United States Patent Application Publication US 2024/0084334 A1 - sequence listing, part 2

SEQ ID NO: 284 - protein, 2088 aa, synthetic construct
MPAAKRVKLDGGDKKYSIGLDIGTNSVGWAVITDEYKVPSKKFKVLGNTDRHSIKKNLIGALLFDSGETAEATRLKRTARRRYTRRKNRICYLQEIFSNEMAKVDDSFFHRLEESFLVEEDKKHERHPIFGNIVDEVAYHEKYPTIYHLRKKLVDSTDKADLRLIYLALAHMIKFRGHFLIEGDLNPDNSDVDKLFIQLVQTYNQLFEENPINASGVDAKAILSARLSKSRRLENLIAQLPGEKKNGLFGNLIALSLGLTPNFKSNFDLAEDAKLQLSKDTYDDDLDNLLAQIGDQYADLFLAAKNLSDAILLSDILRVNTEITKAPLSASMIKRYDEHHQDLTLLKALVRQQLPEKYKEIFFDQSKNGYAGYIDGGASQEEFYKFIKPILEKMDGTEELLVKLNREDLLRKQRTFDNGSIPHQIHLGELHAILRRQEDFYPFLKDNREKIEKILTFRIPYYVGPLARGNSRFAWMTRKSEETITPWNFEEVVDKGASAQSFIERMTNFDKNLPNEKVLPKHSLLYEYFTVYNELTKVKYVTEGMRKPAFLSGEQKKAIVDLLFKTNRKVTVKQLKEDYFKKIECFDSVEISGVEDRFNASLGTYHDLLKIIKDKDFLDNEENEDILEDIVLTLTLFEDREMIEERLKTYAHLFDDKVMKQLKRRRYTGWGRLSRKLINGIRDKQSGKTILDFLKSDGFANRNFMQLIHDDSLTFKEDIQKAQVSGQGDSLHEHIANLAGSPAIKKGILQTVKVVDELVKVMGRHKPENIVIEMARENQTTQKGQKNSRERMKRIEEGIKELGSQILKEHPVENTQLQNEKLYLYYLQNGRDMYVDQELDINRLSDYDVDHIVPQSFLKDDSIDNKVLTRSDKARGKSDNVPSEEVVKKMKNYWRQLLNAKLITQRKFDNLTKAERGGLSELDKAGFIKRQLVETRQITKHVAQILDSRMNTKYDENDKLIREVKVITLKSKLVSDFRKDFQFYKVREINNYHHAHDAYLNAVVGTALIKKYPKLESEFVYGDYKVYDVRKMIAKSEQEIGKATAKYFFYSNIMNFFKTEITLANGEIRKRPLIETNGETGEIVWDKGRDFATVRKVLSMPQVNIVKKTEVQTGGFSKESILPKRNSDKLIARKKDWDPKKYGGFDSPTVAYSVLVVAKVEKGKSKKLKSVKELLGITIMERSSFEKNPIDFLEAKGYKEVKKDLIIKLPKYSLFELENGRKRMLASAGELQKGNELALPSKYVNFLYLASHYEKLKGSPEDNEQKQLFVEQHKHYLDEIIEQISEFSKRVILADANLDKVLSAYNKHRDKPIREQAENIIHLFTLTNLGAPAAFKYFDTTIDRKRYTSTKEVLDATLIHQSITGLYETRIDLSQLGGDGGGSSGGGGGSGGTLQLDDEYRLYSPLVKPDQNIQFWLEQFPQAWAETAGMGLAKQVPPQVIQLKASATPVSVRQYPLSKEAQEGIRPHVQRLIQQGILVPVQSPWNTPLLPVRKPGTNDYRPVQDLREVNKRVQDIHPTVPNPYNLLCALPPQRSWYTVLDLKDAFFCLRLHPTSQPLFAFEWRDPGTGRTGQLTWTRLPQGFKNSPTIFDEALHRDLANFRIQHPQVTLLQYVDDLLLAGATKQDCLEGTKALLLELSDLGYRASAKKAQICRREVTYLGYSLRDGQRWLTEARKKTVVQIPAPTTAKQVREFLGTAGFCRLWIPGFATLAAPLYPLTKEKGEFSWAPEHQKAFDAIKKALLSAPALALPDVTKPFTLYVDERKGVARGVLTQTLGPWRRPVAYLSKKLDPVASGWPVCLKAIAAVAILVKDADKLTLGQNITVIAPHALENIVRQPPDRWMTNARMTHYQSLLLTERVTFAPPAALNPATLLPEETDEPVTHDCHQLLIEETGVRKDLTDIPLTGEVLTWFTDGSSYVVEGKRMAGAAVVDGTRTIWASSLPEGTSAQKAELMALTQALRLAEGKSINIYTDSRYAFATAHVHGAIYKQRGLLTSAGREIKNKEEILSLLEALHLPKRLAIIHCPGHQKAKDPISRGNQMADRVAKQAAQGVNLLAGKRTADGSEFEKRTADGSEFESPKKKAKVE

SEQ ID NO: 285 - protein, 2090 aa, synthetic construct
MPAAKRVKLDGGDKKYSIGLDIGTNSVGWAVITDEYKVPSKKFKVLGNTDRHSIKKNLIGALLFDSGETAEATRLKRTARRRYTRRKNRICYLQEIFSNEMAKVDDSFFHRLEESFLVEEDKKHERHPIFGNIVDEVAYHEKYPTIYHLRKKLVDSTDKADLRLIYLALAHMIKFRGHFLIEGDLNPDNSDVDKLFIQLVQTYNQLFEENPINASGVDAKAILSARLSKSRRLENLIAQLPGEKKNGLFGNLIALSLGLTPNFKSNFDLAEDAKLQLSKDTYDDDLDNLLAQIGDQYADLFLAAKNLSDAILLSDILRVNTEITKAPLSASMIKRYDEHHQDLTLLKALVRQQLPEKYKEIFFDQSKNGYAGYIDGGASQEEFYKFIKPILEKMDGTEELLVKLNREDLLRKQRTFDNGSIPHQIHLGELHAILRRQEDFYPFLKDNREKIEKILTFRIPYYVGPLARGNSRFAWMTRKSEETITPWNFEEVVDKGASAQSFIERMTNFDKNLPNEKVLPKHSLLYEYFTVYNELTKVKYVTEGMRKPAFLSGEQKKAIVDLLFKTNRKVTVKQLKEDYFKKIECFDSVEISGVEDRFNASLGTYHDLLKIIKDKDFLDNEENEDILEDIVLTLTLFEDREMIEERLKTYAHLFDDKVMKQLKRRRYTGWGRLSRKLINGIRDKQSGKTILDFLKSDGFANRNFMQLIHDDSLTFKEDIQKAQVSGQGDSLHEHIANLAGSPAIKKGILQTVKVVDELVKVMGRHKPENIVIEMARENQTTQKGQKNSRERMKRIEEGIKELGSQILKEHPVENTQLQNEKLYLYYLQNGRDMYVDQELDINRLSDYDVDHIVPQSFLKDDSIDNKVLTRSDKARGKSDNVPSEEVVKKMKNYWRQLLNAKLITQRKFDNLTKAERGGLSELDKAGFIKRQLVETRQITKHVAQILDSRMNTKYDENDKLIREVKVITLKSKLVSDFRKDFQFYKVREINNYHHAHDAYLNAVVGTALIKKYPKLESEFVYGDYKVYDVRKMIAKSEQEIGKATAKYFFYSNIMNFFKTEITLANGEIRKRPLIETNGETGEIVWDKGRDFATVRKVLSMPQVNIVKKTEVQTGGFSKESILPKRNSDKLIARKKDWDPKKYGGFDSPTVAYSVLVVAKVEKGKSKKLKSVKELLGITIMERSSFEKNPIDFLEAKGYKEVKKDLIIKLPKYSLFELENGRKRMLASAGELQKGNELALPSKYVNFLYLASHYEKLKGSPEDNEQKQLFVEQHKHYLDEIIEQISEFSKRVILADANLDKVLSAYNKHRDKPIREQAENIIHLFTLTNLGAPAAFKYFDTTIDRKRYTSTKEVLDATLIHQSITGLYETRIDLSQLGGDGGGSSEAAAKGGGGGTLQLDDEYRLYSPLVKPDQNIQFWLEQFPQAWAETAGMGLAKQVPPQVIQLKASATPVSVRQYPLSKEAQEGIRPHVQRLIQQGILVPVQSPWNTPLLPVRKPGTNDYRPVQDLREVNKRVQDIHPTVPNPYNLLCALPPQRSWYTVLDLKDAFFCLRLHPTSQPLFAFEWRDPGTGRTGQLTWTRLPQGFKNSPTIFDEALHRDLANFRIQHPQVTLLQYVDDLLLAGATKQDCLEGTKALLLELSDLGYRASAKKAQICRREVTYLGYSLRDGQRWLTEARKKTVVQIPAPTTAKQVREFLGTAGFCRLWIPGFATLAAPLYPLTKEKGEFSWAPEHQKAFDAIKKALLSAPALALPDVTKPFTLYVDERKGVARGVLTQTLGPWRRPVAYLSKKLDPVASGWPVCLKAIAAVAILVKDADKLTLGQNITVIAPHALENIVRQPPDRWMTNARMTHYQSLLLTERVTFAPPAALNPATLLPEETDEPVTHDCHQLLIEETGVRKDLTDIPLTGEVLTWFTDGSSYVVEGKRMAGAAVVDGTRTIWASSLPEGTSAQKAELMALTQALRLAEGKSINIYTDSRYAFATAHVHGAIYKQRGLLTSAGREIKNKEEILSLLEALHLPKRLAIIHCPGHQKAKDPISRGNQMADRVAKQAAQGVNLLAGKRTADGSEFEKRTADGSEFESPKKKAKVE

SEQ ID NO: 286 - protein, 2090 aa, synthetic construct
MPAAKRVKLDGGDKKYSIGLDIGTNSVGWAVITDEYKVPSKKFKVLGNTDRHSIKKNLIGALLFDSGETAEATRLKRTARRRYTRRKNRICYLQEIFSNEMAKVDDSFFHRLEESFLVEEDKKHERHPIFGNIVDEVAYHEKYPTIYHLRKKLVDSTDKADLRLIYLALAHMIKFRGHFLIEGDLNPDNSDVDKLFIQLVQTYNQLFEENPINASGVDAKAILSARLSKSRRLENLIAQLPGEKKNGLFGNLIALSLGLTPNFKSNFDLAEDAKLQLSKDTYDDDLDNLLAQIGDQYADLFLAAKNLSDAILLSDILRVNTEITKAPLSASMIKRYDEHHQDLTLLKALVRQQLPEKYKEIFFDQSKNGYAGYIDGGASQEEFYKFIKPILEKMDGTEELLVKLNREDLLRKQRTFDNGSIPHQIHLGELHAILRRQEDFYPFLKDNREKIEKILTFRIPYYVGPLARGNSRFAWMTRKSEETITPWNFEEVVDKGASAQSFIERMTNFDKNLPNEKVLPKHSLLYEYFTVYNELTKVKYVTEGMRKPAFLSGEQKKAIVDLLFKTNRKVTVKQLKEDYFKKIECFDSVEISGVEDRFNASLGTYHDLLKIIKDKDFLDNEENEDILEDIVLTLTLFEDREMIEERLKTYAHLFDDKVMKQLKRRRYTGWGRLSRKLINGIRDKQSGKTILDFLKSDGFANRNFMQLIHDDSLTFKEDIQKAQVSGQGDSLHEHIANLAGSPAIKKGILQTVKVVDELVKVMGRHKPENIVIEMARENQTTQKGQKNSRERMKRIEEGIKELGSQILKEHPVENTQLQNEKLYLYYLQNGRDMYVDQELDINRLSDYDVDHIVPQSFLKDDSIDNKVLTRSDKARGKSDNVPSEEVVKKMKNYWRQLLNAKLITQRKFDNLTKAERGGLSELDKAGFIKRQLVETRQITKHVAQILDSRMNTKYDENDKLIREVKVITLKSKLVSDFRKDFQFYKVREINNYHHAHDAYLNAVVGTALIKKYPKLESEFVYGDYKVYDVRKMIAKSEQEIGKATAKYFFYSNIMNFFKTEITLANGEIRKRPLIETNGETGEIVWDKGRDFATVRKVLSMPQVNIVKKTEVQTGGFSKESILPKRNSDKLIARKKDWDPKKYGGFDSPTVAYSVLVVAKVEKGKSKKLKSVKELLGITIMERSSFEKNPIDFLEAKGYKEVKKDLIIKLPKYSLFELENGRKRMLASAGELQKGNELALPSKYVNFLYLASHYEKLKGSPEDNEQKQLFVEQHKHYLDEIIEQISEFSKRVILADANLDKVLSAYNKHRDKPIREQAENIIHLFTLTNLGAPAAFKYFDTTIDRKRYTSTKEVLDATLIHQSITGLYETRIDLSQLGGDGGGGSGGGEAAAKGGTLQLDDEYRLYSPLVKPDQNIQFWLEQFPQAWAETAGMGLAKQVPPQVIQLKASATPVSVRQYPLSKEAQEGIRPHVQRLIQQGILVPVQSPWNTPLLPVRKPGTNDYRPVQDLREVNKRVQDIHPTVPNPYNLLCALPPQRSWYTVLDLKDAFFCLRLHPTSQPLFAFEWRDPGTGRTGQLTWTRLPQGFKNSPTIFDEALHRDLANFRIQHPQVTLLQYVDDLLLAGATKQDCLEGTKALLLELSDLGYRASAKKAQICRREVTYLGYSLRDGQRWLTEARKKTVVQIPAPTTAKQVREFLGTAGFCRLWIPGFATLAAPLYPLTKEKGEFSWAPEHQKAFDAIKKALLSAPALALPDVTKPFTLYVDERKGVARGVLTQTLGPWRRPVAYLSKKLDPVASGWPVCLKAIAAVAILVKDADKLTLGQNITVIAPHALENIVRQPPDRWMTNARMTHYQSLLLTERVTFAPPAALNPATLLPEETDEPVTHDCHQLLIEETGVRKDLTDIPLTGEVLTWFTDGSSYVVEGKRMAGAAVVDGTRTIWASSLPEGTSAQKAELMALTQALRLAEGKSINIYTDSRYAFATAHVHGAIYKQRGLLTSAGREIKNKEEILSLLEALHLPKRLAIIHCPGHQKAKDPISRGNQMADRVAKQAAQGVNLLAGKRTADGSEFEKRTADGSEFESPKKKAKVE

SEQ ID NO: 287 - protein, 2090 aa, synthetic construct
MPAAKRVKLDGGDKKYSIGLDIGTNSVGWAVITDEYKVPSKKFKVLGNTDRHSIKKNLIGALLFDSGETAEATRLKRTARRRYTRRKNRICYLQEIFSNEMAKVDDSFFHRLEESFLVEEDKKHERHPIFGNIVDEVAYHEKYPTIYHLRKKLVDSTDKADLRLIYLALAHMIKFRGHFLIEGDLNPDNSDVDKLFIQLVQTYNQLFEENPINASGVDAKAILSARLSKSRRLENLIAQLPGEKKNGLFGNLIALSLGLTPNFKSNFDLAEDAKLQLSKDTYDDDLDNLLAQIGDQYADLFLAAKNLSDAILLSDILRVNTEITKAPLSASMIKRYDEHHQDLTLLKALVRQQLPEKYKEIFFDQSKNGYAGYIDGGASQEEFYKFIKPILEKMDGTEELLVKLNREDLLRKQRTFDNGSIPHQIHLGELHAILRRQEDFYPFLKDNREKIEKILTFRIPYYVGPLARGNSRFAWMTRKSEETITPWNFEEVVDKGASAQSFIERMTNFDKNLPNEKVLPKHSLLYEYFTVYNELTKVKYVTEGMRKPAFLSGEQKKAIVDLLFKTNRKVTVKQLKEDYFKKIECFDSVEISGVEDRFNASLGTYHDLLKIIKDKDFLDNEENEDILEDIVLTLTLFEDREMIEERLKTYAHLFDDKVMKQLKRRRYTGWGRLSRKLINGIRDKQSGKTILDFLKSDGFANRNFMQLIHDDSLTFKEDIQKAQVSGQGDSLHEHIANLAGSPAIKKGILQTVKVVDELVKVMGRHKPENIVIEMARENQTTQKGQKNSRERMKRIEEGIKELGSQILKEHPVENTQLQNEKLYLYYLQNGRDMYVDQELDINRLSDYDVDHIVPQSFLKDDSIDNKVLTRSDKARGKSDNVPSEEVVKKMKNYWRQLLNAKLITQRKFDNLTKAERGGLSELDKAGFIKRQLVETRQITKHVAQILDSRMNTKYDENDKLIREVKVITLKSKLVSDFRKDFQFYKVREINNYHHAHDAYLNAVVGTALIKKYPKLESEFVYGDYKVYDVRKMIAKSEQEIGKATAKYFFYSNIMNFFKTEITLANGEIRKRPLIETNGETGEIVWDKGRDFATVRKVLSMPQVNIVKKTEVQTGGFSKESILPKRNSDKLIARKKDWDPKKYGGFDSPTVAYSVLVVAKVEKGKSKKLKSVKELLGITIMERSSFEKNPIDFLEAKGYKEVKKDLIIKLPKYSLFELENGRKRMLASAGELQKGNELALPSKYVNFLYLASHYEKLKGSPEDNEQKQLFVEQHKHYLDEIIEQISEFSKRVILADANLDKVLSAYNKHRDKPIREQAENIIHLFTLTNLGAPAAFKYFDTTIDRKRYTSTKEVLDATLIHQSITGLYETRIDLSQLGGDGGEAAAKPAPGGSGGTLQLDDEYRLYSPLVKPDQNIQFWLEQFPQAWAETAGMGLAKQVPPQVIQLKASATPVSVRQYPLSKEAQEGIRPHVQRLIQQGILVPVQSPWNTPLLPVRKPGTNDYRPVQDLREVNKRVQDIHPTVPNPYNLLCALPPQRSWYTVLDLKDAFFCLRLHPTSQPLFAFEWRDPGTGRTGQLTWTRLPQGFKNSPTIFDEALHRDLANFRIQHPQVTLLQYVDDLLLAGATKQDCLEGTKALLLELSDLGYRASAKKAQICRREVTYLGYSLRDGQRWLTEARKKTVVQIPAPTTAKQVREFLGTAGFCRLWIPGFATLAAPLYPLTKEKGEFSWAPEHQKAFDAIKKALLSAPALALPDVTKPFTLYVDERKGVARGVLTQTLGPWRRPVAYLSKKLDPVASGWPVCLKAIAAVAILVKDADKLTLGQNITVIAPHALENIVRQPPDRWMTNARMTHYQSLLLTERVTFAPPAALNPATLLPEETDEPVTHDCHQLLIEETGVRKDLTDIPLTGEVLTWFTDGSSYVVEGKRMAGAAVVDGTRTIWASSLPEGTSAQKAELMALTQALRLAEGKSINIYTDSRYAFATAHVHGAIYKQRGLLTSAGREIKNKEEILSLLEALHLPKRLAIIHCPGHQKAKDPISRGNQMADRVAKQAAQGVNLLAGKRTADGSEFEKRTADGSEFESPKKKAKVE

SEQ ID NO: 288 - protein, 2090 aa, synthetic construct
MPAAKRVKLDGGDKKYSIGLDIGTNSVGWAVITDEYKVPSKKFKVLGNTDRHSIKKNLIGALLFDSGETAEATRLKRTARRRYTRRKNRICYLQEIFSNEMAKVDDSFFHRLEESFLVEEDKKHERHPIFGNIVDEVAYHEKYPTIYHLRKKLVDSTDKADLRLIYLALAHMIKFRGHFLIEGDLNPDNSDVDKLFIQLVQTYNQLFEENPINASGVDAKAILSARLSKSRRLENLIAQLPGEKKNGLFGNLIALSLGLTPNFKSNFDLAEDAKLQLSKDTYDDDLDNLLAQIGDQYADLFLAAKNLSDAILLSDILRVNTEITKAPLSASMIKRYDEHHQDLTLLKALVRQQLPEKYKEIFFDQSKNGYAGYIDGGASQEEFYKFIKPILEKMDGTEELLVKLNREDLLRKQRTFDNGSIPHQIHLGELHAILRRQEDFYPFLKDNREKIEKILTFRIPYYVGPLARGNSRFAWMTRKSEETITPWNFEEVVDKGASAQSFIERMTNFDKNLPNEKVLPKHSLLYEYFTVYNELTKVKYVTEGMRKPAFLSGEQKKAIVDLLFKTNRKVTVKQLKEDYFKKIECFDSVEISGVEDRFNASLGTYHDLLKIIKDKDFLDNEENEDILEDIVLTLTLFEDREMIEERLKTYAHLFDDKVMKQLKRRRYTGWGRLSRKLINGIRDKQSGKTILDFLKSDGFANRNFMQLIHDDSLTFKEDIQKAQVSGQGDSLHEHIANLAGSPAIKKGILQTVKVVDELVKVMGRHKPENIVIEMARENQTTQKGQKNSRERMKRIEEGIKELGSQILKEHPVENTQLQNEKLYLYYLQNGRDMYVDQELDINRLSDYDVDHIVPQSFLKDDSIDNKVLTRSDKARGKSDNVPSEEVVKKMKNYWRQLLNAKLITQRKFDNLTKAERGGLSELDKAGFIKRQLVETRQITKHVAQILDSRMNTKYDENDKLIREVKVITLKSKLVSDFRKDFQFYKVREINNYHHAHDAYLNAVVGTALIKKYPKLESEFVYGDYKVYDVRKMIAKSEQEIGKATAKYFFYSNIMNFFKTEITLANGEIRKRPLIETNGETGEIVWDKGRDFATVRKVLSMPQVNIVKKTEVQTGGFSKESILPKRNSDKLIARKKDWDPKKYGGFDSPTVAYSVLVVAKVEKGKSKKLKSVKELLGITIMERSSFEKNPIDFLEAKGYKEVKKDLIIKLPKYSLFELENGRKRMLASAGELQKGNELALPSKYVNFLYLASHYEKLKGSPEDNEQKQLFVEQHKHYLDEIIEQISEFSKRVILADANLDKVLSAYNKHRDKPIREQAENIIHLFTLTNLGAPAAFKYFDTTIDRKRYTSTKEVLDATLIHQSITGLYETRIDLSQLGGDGGEAAAKGGGGGSGGTLQLDDEYRLYSPLVKPDQNIQFWLEQFPQAWAETAGMGLAKQVPPQVIQLKASATPVSVRQYPLSKEAQEGIRPHVQRLIQQGILVPVQSPWNTPLLPVRKPGTNDYRPVQDLREVNKRVQDIHPTVPNPYNLLCALPPQRSWYTVLDLKDAFFCLRLHPTSQPLFAFEWRDPGTGRTGQLTWTRLPQGFKNSPTIFDEALHRDLANFRIQHPQVTLLQYVDDLLLAGATKQDCLEGTKALLLELSDLGYRASAKKAQICRREVTYLGYSLRDGQRWLTEARKKTVVQIPAPTTAKQVREFLGTAGFCRLWIPGFATLAAPLYPLTKEKGEFSWAPEHQKAFDAIKKALLSAPALALPDVTKPFTLYVDERKGVARGVLTQTLGPWRRPVAYLSKKLDPVASGWPVCLKAIAAVAILVKDADKLTLGQNITVIAPHALENIVRQPPDRWMTNARMTHYQSLLLTERVTFAPPAALNPATLLPEETDEPVTHDCHQLLIEETGVRKDLTDIPLTGEVLTWFTDGSSYVVEGKRMAGAAVVDGTRTIWASSLPEGTSAQKAELMALTQALRLAEGKSINIYTDSRYAFATAHVHGAIYKQRGLLTSAGREIKNKEEILSLLEALHLPKRLAIIHCPGHQKAKDPISRGNQMADRVAKQAAQGVNLLAGKRTADGSEFEKRTADGSEFESPKKKAKVE

SEQ ID NO: 289 - protein, 2082 aa, synthetic construct
MPAAKRVKLDGGDKKYSIGLDIGTNSVGWAVITDEYKVPSKKFKVLGNTDRHSIKKNLIGALLFDSGETAEATRLKRTARRRYTRRKNRICYLQEIFSNEMAKVDDSFFHRLEESFLVEEDKKHERHPIFGNIVDEVAYHEKYPTIYHLRKKLVDSTDKADLRLIYLALAHMIKFRGHFLIEGDLNPDNSDVDKLFIQLVQTYNQLFEENPINASGVDAKAILSARLSKSRRLENLIAQLPGEKKNGLFGNLIALSLGLTPNFKSNFDLAEDAKLQLSKDTYDDDLDNLLAQIGDQYADLFLAAKNLSDAILLSDILRVNTEITKAPLSASMIKRYDEHHQDLTLLKALVRQQLPEKYKEIFFDQSKNGYAGYIDGGASQEEFYKFIKPILEKMDGTEELLVKLNREDLLRKQRTFDNGSIPHQIHLGELHAILRRQEDFYPFLKDNREKIEKILTFRIPYYVGPLARGNSRFAWMTRKSEETITPWNFEEVVDKGASAQSFIERMTNFDKNLPNEKVLPKHSLLYEYFTVYNELTKVKYVTEGMRKPAFLSGEQKKAIVDLLFKTNRKVTVKQLKEDYFKKIECFDSVEISGVEDRFNASLGTYHDLLKIIKDKDFLDNEENEDILEDIVLTLTLFEDREMIEERLKTYAHLFDDKVMKQLKRRRYTGWGRLSRKLINGIRDKQSGKTILDFLKSDGFANRNFMQLIHDDSLTFKEDIQKAQVSGQGDSLHEHIANLAGSPAIKKGILQTVKVVDELVKVMGRHKPENIVIEMARENQTTQKGQKNSRERMKRIEEGIKELGSQILKEHPVENTQLQNEKLYLYYLQNGRDMYVDQELDINRLSDYDVDHIVPQSFLKDDSIDNKVLTRSDKARGKSDNVPSEEVVKKMKNYWRQLLNAKLITQRKFDNLTKAERGGLSELDKAGFIKRQLVETRQITKHVAQILDSRMNTKYDENDKLIREVKVITLKSKLVSDFRKDFQFYKVREINNYHHAHDAYLNAVVGTALIKKYPKLESEFVYGDYKVYDVRKMIAKSEQEIGKATAKYFFYSNIMNFFKTEITLANGEIRKRPLIETNGETGEIVWDKGRDFATVRKVLSMPQVNIVKKTEVQTGGFSKESILPKRNSDKLIARKKDWDPKKYGGFDSPTVAYSVLVVAKVEKGKSKKLKSVKELLGITIMERSSFEKNPIDFLEAKGYKEVKKDLIIKLPKYSLFELENGRKRMLASAGELQKGNELALPSKYVNFLYLASHYEKLKGSPEDNEQKQLFVEQHKHYLDEIIEQISEFSKRVILADANLDKVLSAYNKHRDKPIREQAENIIHLFTLTNLGAPAAFKYFDTTIDRKRYTSTKEVLDATLIHQSITGLYETRIDLSQLGGDGGGGGGGTLQLDDEYRLYSPLVKPDQNIQFWLEQFPQAWAETAGMGLAKQVPPQVIQLKASATPVSVRQYPLSKEAQEGIRPHVQRLIQQGILVPVQSPWNTPLLPVRKPGTNDYRPVQDLREVNKRVQDIHPTVPNPYNLLCALPPQRSWYTVLDLKDAFFCLRLHPTSQPLFAFEWRDPGTGRTGQLTWTRLPQGFKNSPTIFDEALHRDLANFRIQHPQVTLLQYVDDLLLAGATKQDCLEGTKALLLELSDLGYRASAKKAQICRREVTYLGYSLRDGQRWLTEARKKTVVQIPAPTTAKQVREFLGTAGFCRLWIPGFATLAAPLYPLTKEKGEFSWAPEHQKAFDAIKKALLSAPALALPDVTKPFTLYVDERKGVARGVLTQTLGPWRRPVAYLSKKLDPVASGWPVCLKAIAAVAILVKDADKLTLGQNITVIAPHALENIVRQPPDRWMTNARMTHYQSLLLTERVTFAPPAALNPATLLPEETDEPVTHDCHQLLIEETGVRKDLTDIPLTGEVLTWFTDGSSYVVEGKRMAGAAVVDGTRTIWASSLPEGTSAQKAELMALTQALRLAEGKSINIYTDSRYAFATAHVHGAIYKQRGLLTSAGREIKNKEEILSLLEALHLPKRLAIIHCPGHQKAKDPISRGNQMADRVAKQAAQGVNLLAGKRTADGSEFEKRTADGSEFESPKKKAKVE

SEQ ID NO: 290 - protein, 2090 aa, synthetic construct
MPAAKRVKLDGGDKKYSIGLDIGTNSVGWAVITDEYKVPSKKFKVLGNTDRHSIKKNLIGALLFDSGETAEATRLKRTARRRYTRRKNRICYLQEIFSNEMAKVDDSFFHRLEESFLVEEDKKHERHPIFGNIVDEVAYHEKYPTIYHLRKKLVDSTDKADLRLIYLALAHMIKFRGHFLIEGDLNPDNSDVDKLFIQLVQTYNQLFEENPINASGVDAKAILSARLSKSRRLENLIAQLPGEKKNGLFGNLIALSLGLTPNFKSNFDLAEDAKLQLSKDTYDDDLDNLLAQIGDQYADLFLAAKNLSDAILLSDILRVNTEITKAPLSASMIKRYDEHHQDLTLLKALVRQQLPEKYKEIFFDQSKNGYAGYIDGGASQEEFYKFIKPILEKMDGTEELLVKLNREDLLRKQRTFDNGSIPHQIHLGELHAILRRQEDFYPFLKDNREKIEKILTFRIPYYVGPLARGNSRFAWMTRKSEETITPWNFEEVVDKGASAQSFIERMTNFDKNLPNEKVLPKHSLLYEYFTVYNELTKVKYVTEGMRKPAFLSGEQKKAIVDLLFKTNRKVTVKQLKEDYFKKIECFDSVEISGVEDRFNASLGTYHDLLKIIKDKDFLDNEENEDILEDIVLTLTLFEDREMIEERLKTYAHLFDDKVMKQLKRRRYTGWGRLSRKLINGIRDKQSGKTILDFLKSDGFANRNFMQLIHDDSLTFKEDIQKAQVSGQGDSLHEHIANLAGSPAIKKGILQTVKVVDELVKVMGRHKPENIVIEMARENQTTQKGQKNSRERMKRIEEGIKELGSQILKEHPVENTQLQNEKLYLYYLQNGRDMYVDQELDINRLSDYDVDHIVPQSFLKDDSIDNKVLTRSDKARGKSDNVPSEEVVKKMKNYWRQLLNAKLITQRKFDNLTKAERGGLSELDKAGFIKRQLVETRQITKHVAQILDSRMNTKYDENDKLIREVKVITLKSKLVSDFRKDFQFYKVREINNYHHAHDAYLNAVVGTALIKKYPKLESEFVYGDYKVYDVRKMIAKSEQEIGKATAKYFFYSNIMNFFKTEITLANGEIRKRPLIETNGETGEIVWDKGRDFATVRKVLSMPQVNIVKKTEVQTGGFSKESILPKRNSDKLIARKKDWDPKKYGGFDSPTVAYSVLVVAKVEKGKSKKLKSVKELLGITIMERSSFEKNPIDFLEAKGYKEVKKDLIIKLPKYSLFELENGRKRMLASAGELQKGNELALPSKYVNFLYLASHYEKLKGSPEDNEQKQLFVEQHKHYLDEIIEQISEFSKRVILADANLDKVLSAYNKHRDKPIREQAENIIHLFTLTNLGAPAAFKYFDTTIDRKRYTSTKEVLDATLIHQSITGLYETRIDLSQLGGDGGEAAAKGGGGSSGGTLQLDDEYRLYSPLVKPDQNIQFWLEQFPQAWAETAGMGLAKQVPPQVIQLKASATPVSVRQYPLSKEAQEGIRPHVQRLIQQGILVPVQSPWNTPLLPVRKPGTNDYRPVQDLREVNKRVQDIHPTVPNPYNLLCALPPQRSWYTVLDLKDAFFCLRLHPTSQPLFAFEWRDPGTGRTGQLTWTRLPQGFKNSPTIFDEALHRDLANFRIQHPQVTLLQYVDDLLLAGATKQDCLEGTKALLLELSDLGYRASAKKAQICRREVTYLGYSLRDGQRWLTEARKKTVVQIPAPTTAKQVREFLGTAGFCRLWIPGFATLAAPLYPLTKEKGEFSWAPEHQKAFDAIKKALLSAPALALPDVTKPFTLYVDERKGVARGVLTQTLGPWRRPVAYLSKKLDPVASGWPVCLKAIAAVAILVKDADKLTLGQNITVIAPHALENIVRQPPDRWMTNARMTHYQSLLLTERVTFAPPAALNPATLLPEETDEPVTHDCHQLLIEETGVRKDLTDIPLTGEVLTWFTDGSSYVVEGKRMAGAAVVDGTRTIWASSLPEGTSAQKAELMALTQALRLAEGKSINIYTDSRYAFATAHVHGAIYKQRGLLTSAGREIKNKEEILSLLEALHLPKRLAIIHCPGHQKAKDPISRGNQMADRVAKQAAQGVNLLAGKRTADGSEFEKRTADGSEFESPKKKAKVE

SEQ ID NO: 291 - protein, 2083 aa, synthetic construct
MPAAKRVKLDGGDKKYSIGLDIGTNSVGWAVITDEYKVPSKKFKVLGNTDRHSIKKNLIGALLFDSGETAEATRLKRTARRRYTRRKNRICYLQEIFSNEMAKVDDSFFHRLEESFLVEEDKKHERHPIFGNIVDEVAYHEKYPTIYHLRKKLVDSTDKADLRLIYLALAHMIKFRGHFLIEGDLNPDNSDVDKLFIQLVQTYNQLFEENPINASGVDAKAILSARLSKSRRLENLIAQLPGEKKNGLFGNLIALSLGLTPNFKSNFDLAEDAKLQLSKDTYDDDLDNLLAQIGDQYADLFLAAKNLSDAILLSDILRVNTEITKAPLSASMIKRYDEHHQDLTLLKALVRQQLPEKYKEIFFDQSKNGYAGYIDGGASQEEFYKFIKPILEKMDGTEELLVKLNREDLLRKQRTFDNGSIPHQIHLGELHAILRRQEDFYPFLKDNREKIEKILTFRIPYYVGPLARGNSRFAWMTRKSEETITPWNFEEVVDKGASAQSFIERMTNFDKNLPNEKVLPKHSLLYEYFTVYNELTKVKYVTEGMRKPAFLSGEQKKAIVDLLFKTNRKVTVKQLKEDYFKKIECFDSVEISGVEDRFNASLGTYHDLLKIIKDKDFLDNEENEDILEDIVLTLTLFEDREMIEERLKTYAHLFDDKVMKQLKRRRYTGWGRLSRKLINGIRDKQSGKTILDFLKSDGFANRNFMQLIHDDSLTFKEDIQKAQVSGQGDSLHEHIANLAGSPAIKKGILQTVKVVDELVKVMGRHKPENIVIEMARENQTTQKGQKNSRERMKRIEEGIKELGSQILKEHPVENTQLQNEKLYLYYLQNGRDMYVDQELDINRLSDYDVDHIVPQSFLKDDSIDNKVLTRSDKARGKSDNVPSEEVVKKMKNYWRQLLNAKLITQRKFDNLTKAERGGLSELDKAGFIKRQLVETRQITKHVAQILDSRMNTKYDENDKLIREVKVITLKSKLVSDFRKDFQFYKVREINNYHHAHDAYLNAVVGTALIKKYPKLESEFVYGDYKVYDVRKMIAKSEQEIGKATAKYFFYSNIMNFFKTEITLANGEIRKRPLIETNGETGEIVWDKGRDFATVRKVLSMPQVNIVKKTEVQTGGFSKESILPKRNSDKLIARKKDWDPKKYGGFDSPTVAYSVLVVAKVEKGKSKKLKSVKELLGITIMERSSFEKNPIDFLEAKGYKEVKKDLIIKLPKYSLFELENGRKRMLASAGELQKGNELALPSKYVNFLYLASHYEKLKGSPEDNEQKQLFVEQHKHYLDEIIEQISEFSKRVILADANLDKVLSAYNKHRDKPIREQAENIIHLFTLTNLGAPAAFKYFDTTIDRKRYTSTKEVLDATLIHQSITGLYETRIDLSQLGGDGGGGGGGGTLQLDDEYRLYSPLVKPDQNIQFWLEQFPQAWAETAGMGLAKQVPPQVIQLKASATPVSVRQYPLSKEAQEGIRPHVQRLIQQGILVPVQSPWNTPLLPVRKPGTNDYRPVQDLREVNKRVQDIHPTVPNPYNLLCALPPQRSWYTVLDLKDAFFCLRLHPTSQPLFAFEWRDPGTGRTGQLTWTRLPQGFKNSPTIFDEALHRDLANFRIQHPQVTLLQYVDDLLLAGATKQDCLEGTKALLLELSDLGYRASAKKAQICRREVTYLGYSLRDGQRWLTEARKKTVVQIPAPTTAKQVREFLGTAGFCRLWIPGFATLAAPLYPLTKEKGEFSWAPEHQKAFDAIKKALLSAPALALPDVTKPFTLYVDERKGVARGVLTQTLGPWRRPVAYLSKKLDPVASGWPVCLKAIAAVAILVKDADKLTLGQNITVIAPHALENIVRQPPDRWMTNARMTHYQSLLLTERVTFAPPAALNPATLLPEETDEPVTHDCHQLLIEETGVRKDLTDIPLTGEVLTWFTDGSSYVVEGKRMAGAAVVDGTRTIWASSLPEGTSAQKAELMALTQALRLAEGKSINIYTDSRYAFATAHVHGAIYKQRGLLTSAGREIKNKEEILSLLEALHLPKRLAIIHCPGHQKAKDPISRGNQMADRVAKQAAQGVNLLAGKRTADGSEFEKRTADGSEFESPKKKAKVE

SEQ ID NO: 292 - protein, 2097 aa, synthetic construct
MPAAKRVKLDGGDKKYSIGLDIGTNSVGWAVITDEYKVPSKKFKVLGNTDRHSIKKNLIGALLFDSGETAEATRLKRTARRRYTRRKNRICYLQEIFSNEMAKVDDSFFHRLEESFLVEEDKKHERHPIFGNIVDEVAYHEKYPTIYHLRKKLVDSTDKADLRLIYLALAHMIKFRGHFLIEGDLNPDNSDVDKLFIQLVQTYNQLFEENPINASGVDAKAILSARLSKSRRLENLIAQLPGEKKNGLFGNLIALSLGLTPNFKSNFDLAEDAKLQLSKDTYDDDLDNLLAQIGDQYADLFLAAKNLSDAILLSDILRVNTEITKAPLSASMIKRYDEHHQDLTLLKALVRQQLPEKYKEIFFDQSKNGYAGYIDGGASQEEFYKFIKPILEKMDGTEELLVKLNREDLLRKQRTFDNGSIPHQIHLGELHAILRRQEDFYPFLKDNREKIEKILTFRIPYYVGPLARGNSRFAWMTRKSEETITPWNFEEVVDKGASAQSFIERMTNFDKNLPNEKVLPKHSLLYEYFTVYNELTKVKYVTEGMRKPAFLSGEQKKAIVDLLFKTNRKVTVKQLKEDYFKKIECFDSVEISGVEDRFNASLGTYHDLLKIIKDKDFLDNEENEDILEDIVLTLTLFEDREMIEERLKTYAHLFDDKVMKQLKRRRYTGWGRLSRKLINGIRDKQSGKTILDFLKSDGFANRNFMQLIHDDSLTFKEDIQKAQVSGQGDSLHEHIANLAGSPAIKKGILQTVKVVDELVKVMGRHKPENIVIEMARENQTTQKGQKNSRERMKRIEEGIKELGSQILKEHPVENTQLQNEKLYLYYLQNGRDMYVDQELDINRLSDYDVDHIVPQSFLKDDSIDNKVLTRSDKARGKSDNVPSEEVVKKMKNYWRQLLNAKLITQRKFDNLTKAERGGLSELDKAGFIKRQLVETRQITKHVAQILDSRMNTKYDENDKLIREVKVITLKSKLVSDFRKDFQFYKVREINNYHHAHDAYLNAVVGTALIKKYPKLESEFVYGDYKVYDVRKMIAKSEQEIGKATAKYFFYSNIMNFFKTEITLANGEIRKRPLIETNGETGEIVWDKGRDFATVRKVLSMPQVNIVKKTEVQTGGFSKESILPKRNSDKLIARKKDWDPKKYGGFDSPTVAYSVLVVAKVEKGKSKKLKSVKELLGITIMERSSFEKNPIDFLEAKGYKEVKKDLIIKLPKYSLFELENGRKRMLASAGELQKGNELALPSKYVNFLYLASHYEKLKGSPEDNEQKQLFVEQHKHYLDEIIEQISEFSKRVILADANLDKVLSAYNKHRDKPIREQAENIIHLFTLTNLGAPAAFKYFDTTIDRKRYTSTKEVLDATLIHQSITGLYETRIDLSQLGGDGGGGSGGSGGSGGSGGSGGSGGTLQLDDEYRLYSPLVKPDQNIQFWLEQFPQAWAETAGMGLAKQVPPQVIQLKASATPVSVRQYPLSKEAQEGIRPHVQRLIQQGILVPVQSPWNTPLLPVRKPGTNDYRPVQDLREVNKRVQDIHPTVPNPYNLLCALPPQRSWYTVLDLKDAFFCLRLHPTSQPLFAFEWRDPGTGRTGQLTWTRLPQGFKNSPTIFDEALHRDLANFRIQHPQVTLLQYVDDLLLAGATKQDCLEGTKALLLELSDLGYRASAKKAQICRREVTYLGYSLRDGQRWLTEARKKTVVQIPAPTTAKQVREFLGTAGFCRLWIPGFATLAAPLYPLTKEKGEFSWAPEHQKAFDAIKKALLSAPALALPDVTKPFTLYVDERKGVARGVLTQTLGPWRRPVAYLSKKLDPVASGWPVCLKAIAAVAILVKDADKLTLGQNITVIAPHALENIVRQPPDRWMTNARMTHYQSLLLTERVTFAPPAALNPATLLPEETDEPVTHDCHQLLIEETGVRKDLTDIPLTGEVLTWFTDGSSYVVEGKRMAGAAVVDGTRTIWASSLPEGTSAQKAELMALTQALRLAEGKSINIYTDSRYAFATAHVHGAIYKQRGLLTSAGREIKNKEEILSLLEALHLPKRLAIIHCPGHQKAKDPISRGNQMADRVAKQAAQGVNLLAGKRTADGSEFEKRTADGSEFESPKKKAKVE

SEQ ID NO: 293 - protein, 2087 aa, synthetic construct
MPAAKRVKLDGGDKKYSIGLDIGTNSVGWAVITDEYKVPSKKFKVLGNTDRHSIKKNLIGALLFDSGETAEATRLKRTARRRYTRRKNRICYLQEIFSNEMAKVDDSFFHRLEESFLVEEDKKHERHPIFGNIVDEVAYHEKYPTIYHLRKKLVDSTDKADLRLIYLALAHMIKFRGHFLIEGDLNPDNSDVDKLFIQLVQTYNQLFEENPINASGVDAKAILSARLSKSRRLENLIAQLPGEKKNGLFGNLIALSLGLTPNFKSNFDLAEDAKLQLSKDTYDDDLDNLLAQIGDQYADLFLAAKNLSDAILLSDILRVNTEITKAPLSASMIKRYDEHHQDLTLLKALVRQQLPEKYKEIFFDQSKNGYAGYIDGGASQEEFYKFIKPILEKMDGTEELLVKLNREDLLRKQRTFDNGSIPHQIHLGELHAILRRQEDFYPFLKDNREKIEKILTFRIPYYVGPLARGNSRFAWMTRKSEETITPWNFEEVVDKGASAQSFIERMTNFDKNLPNEKVLPKHSLLYEYFTVYNELTKVKYVTEGMRKPAFLSGEQKKAIVDLLFKTNRKVTVKQLKEDYFKKIECFDSVEISGVEDRFNASLGTYHDLLKIIKDKDFLDNEENEDILEDIVLTLTLFEDREMIEERLKTYAHLFDDKVMKQLKRRRYTGWGRLSRKLINGIRDKQSGKTILDFLKSDGFANRNFMQLIHDDSLTFKEDIQKAQVSGQGDSLHEHIANLAGSPAIKKGILQTVKVVDELVKVMGRHKPENIVIEMARENQTTQKGQKNSRERMKRIEEGIKELGSQILKEHPVENTQLQNEKLYLYYLQNGRDMYVDQELDINRLSDYDVDHIVPQSFLKDDSIDNKVLTRSDKARGKSDNVPSEEVVKKMKNYWRQLLNAKLITQRKFDNLTKAERGGLSELDKAGFIKRQLVETRQITKHVAQILDSRMNTKYDENDKLIREVKVITLKSKLVSDFRKDFQFYKVREINNYHHAHDAYLNAVVGTALIKKYPKLESEFVYGDYKVYDVRKMIAKSEQEIGKATAKYFFYSNIMNFFKTEITLANGEIRKRPLIETNGETGEIVWDKGRDFATVRKVLSMPQVNIVKKTEVQTGGFSKESILPKRNSDKLIARKKDWDPKKYGGFDSPTVAYSVLVVAKVEKGKSKKLKSVKELLGITIMERSSFEKNPIDFLEAKGYKEVKKDLIIKLPKYSLFELENGRKRMLASAGELQKGNELALPSKYVNFLYLASHYEKLKGSPEDNEQKQLFVEQHKHYLDEIIEQISEFSKRVILADANLDKVLSAYNKHRDKPIREQAENIIHLFTLTNLGAPAAFKYFDTTIDRKRYTSTKEVLDATLIHQSITGLYETRIDLSQLGGDGGGSSEAAAKGGTLQLDDEYRLYSPLVKPDQNIQFWLEQFPQAWAETAGMGLAKQVPPQVIQLKASATPVSVRQYPLSKEAQEGIRPHVQRLIQQGILVPVQSPWNTPLLPVRKPGTNDYRPVQDLREVNKRVQDIHPTVPNPYNLLCALPPQRSWYTVLDLKDAFFCLRLHPTSQPLFAFEWRDPGTGRTGQLTWTRLPQGFKNSPTIFDEALHRDLANFRIQHPQVTLLQYVDDLLLAGATKQDCLEGTKALLLELSDLGYRASAKKAQICRREVTYLGYSLRDGQRWLTEARKKTVVQIPAPTTAKQVREFLGTAGFCRLWIPGFATLAAPLYPLTKEKGEFSWAPEHQKAFDAIKKALLSAPALALPDVTKPFTLYVDERKGVARGVLTQTLGPWRRPVAYLSKKLDPVASGWPVCLKAIAAVAILVKDADKLTLGQNITVIAPHALENIVRQPPDRWMTNARMTHYQSLLLTERVTFAPPAALNPATLLPEETDEPVTHDCHQLLIEETGVRKDLTDIPLTGEVLTWFTDGSSYVVEGKRMAGAAVVDGTRTIWASSLPEGTSAQKAELMALTQALRLAEGKSINIYTDSRYAFATAHVHGAIYKQRGLLTSAGREIKNKEEILSLLEALHLPKRLAIIHCPGHQKAKDPISRGNQMADRVAKQAAQGVNLLAGKRTADGSEFEKRTADGSEFESPKKKAKVE

SEQ ID NO: 294 - protein, 2088 aa, synthetic construct
MPAAKRVKLDGGDKKYSIGLDIGTNSVGWAVITDEYKVPSKKFKVLGNTDRHSIKKNLIGALLFDSGETAEATRLKRTARRRYTRRKNRICYLQEIFSNEMAKVDDSFFHRLEESFLVEEDKKHERHPIFGNIVDEVAYHEKYPTIYHLRKKLVDSTDKADLRLIYLALAHMIKFRGHFLIEGDLNPDNSDVDKLFIQLVQTYNQLFEENPINASGVDAKAILSARLSKSRRLENLIAQLPGEKKNGLFGNLIALSLGLTPNFKSNFDLAEDAKLQLSKDTYDDDLDNLLAQIGDQYADLFLAAKNLSDAILLSDILRVNTEITKAPLSASMIKRYDEHHQDLTLLKALVRQQLPEKYKEIFFDQSKNGYAGYIDGGASQEEFYKFIKPILEKMDGTEELLVKLNREDLLRKQRTFDNGSIPHQIHLGELHAILRRQEDFYPFLKDNREKIEKILTFRIPYYVGPLARGNSRFAWMTRKSEETITPWNFEEVVDKGASAQSFIERMTNFDKNLPNEKVLPKHSLLYEYFTVYNELTKVKYVTEGMRKPAFLSGEQKKAIVDLLFKTNRKVTVKQLKEDYFKKIECFDSVEISGVEDRFNASLGTYHDLLKIIKDKDFLDNEENEDILEDIVLTLTLFEDREMIEERLKTYAHLFDDKVMKQLKRRRYTGWGRLSRKLINGIRDKQSGKTILDFLKSDGFANRNFMQLIHDDSLTFKEDIQKAQVSGQGDSLHEHIANLAGSPAIKKGILQTVKVVDELVKVMGRHKPENIVIEMARENQTTQKGQKNSRERMKRIEEGIKELGSQILKEHPVENTQLQNEKLYLYYLQNGRDMYVDQELDINRLSDYDVDHIVPQSFLKDDSIDNKVLTRSDKARGKSDNVPSEEVVKKMKNYWRQLLNAKLITQRKFDNLTKAERGGLSELDKAGFIKRQLVETRQITKHVAQILDSRMNTKYDENDKLIREVKVITLKSKLVSDFRKDFQFYKVREINNYHHAHDAYLNAVVGTALIKKYPKLESEFVYGDYKVYDVRKMIAKSEQEIGKATAKYFFYSNIMNFFKTEITLANGEIRKRPLIETNGETGEIVWDKGRDFATVRKVLSMPQVNIVKKTEVQTGGFSKESILPKRNSDKLIARKKDWDPKKYGGFDSPTVAYSVLVVAKVEKGKSKKLKSVKELLGITIMERSSFEKNPIDFLEAKGYKEVKKDLIIKLPKYSLFELENGRKRMLASAGELQKGNELALPSKYVNFLYLASHYEKLKGSPEDNEQKQLFVEQHKHYLDEIIEQISEFSKRVILADANLDKVLSAYNKHRDKPIREQAENIIHLFTLTNLGAPAAFKYFDTTIDRKRYTSTKEVLDATLIHQSITGLYETRIDLSQLGGDGGGGSGGSGGSGGTLQLDDEYRLYSPLVKPDQNIQFWLEQFPQAWAETAGMGLAKQVPPQVIQLKASATPVSVRQYPLSKEAQEGIRPHVQRLIQQGILVPVQSPWNTPLLPVRKPGTNDYRPVQDLREVNKRVQDIHPTVPNPYNLLCALPPQRSWYTVLDLKDAFFCLRLHPTSQPLFAFEWRDPGTGRTGQLTWTRLPQGFKNSPTIFDEALHRDLANFRIQHPQVTLLQYVDDLLLAGATKQDCLEGTKALLLELSDLGYRASAKKAQICRREVTYLGYSLRDGQRWLTEARKKTVVQIPAPTTAKQVREFLGTAGFCRLWIPGFATLAAPLYPLTKEKGEFSWAPEHQKAFDAIKKALLSAPALALPDVTKPFTLYVDERKGVARGVLTQTLGPWRRPVAYLSKKLDPVASGWPVCLKAIAAVAILVKDADKLTLGQNITVIAPHALENIVRQPPDRWMTNARMTHYQSLLLTERVTFAPPAALNPATLLPEETDEPVTHDCHQLLIEETGVRKDLTDIPLTGEVLTWFTDGSSYVVEGKRMAGAAVVDGTRTIWASSLPEGTSAQKAELMALTQALRLAEGKSINIYTDSRYAFATAHVHGAIYKQRGLLTSAGREIKNKEEILSLLEALHLPKRLAIIHCPGHQKAKDPISRGNQMADRVAKQAAQGVNLLAGKRTADGSEFEKRTADGSEFESPKKKAKVE

SEQ ID NO: 295 - protein, 2088 aa, synthetic construct
MPAAKRVKLDGGDKKYSIGLDIGTNSVGWAVITDEYKVPSKKFKVLGNTDRHSIKKNLIGALLFDSGETAEATRLKRTARRRYTRRKNRICYLQEIFSNEMAKVDDSFFHRLEESFLVEEDKKHERHPIFGNIVDEVAYHEKYPTIYHLRKKLVDSTDKADLRLIYLALAHMIKFRGHFLIEGDLNPDNSDVDKLFIQLVQTYNQLFEENPINASGVDAKAILSARLSKSRRLENLIAQLPGEKKNGLFGNLIALSLGLTPNFKSNFDLAEDAKLQLSKDTYDDDLDNLLAQIGDQYADLFLAAKNLSDAILLSDILRVNTEITKAPLSASMIKRYDEHHQDLTLLKALVRQQLPEKYKEIFFDQSKNGYAGYIDGGASQEEFYKFIKPILEKMDGTEELLVKLNREDLLRKQRTFDNGSIPHQIHLGELHAILRRQEDFYPFLKDNREKIEKILTFRIPYYVGPLARGNSRFAWMTRKSEETITPWNFEEVVDKGASAQSFIERMTNFDKNLPNEKVLPKHSLLYEYFTVYNELTKVKYVTEGMRKPAFLSGEQKKAIVDLLFKTNRKVTVKQLKEDYFKKIECFDSVEISGVEDRFNASLGTYHDLLKIIKDKDFLDNEENEDILEDIVLTLTLFEDREMIEERLKTYAHLFDDKVMKQLKRRRYTGWGRLSRKLINGIRDKQSGKTILDFLKSDGFANRNFMQLIHDDSLTFKEDIQKAQVSGQGDSLHEHIANLAGSPAIKKGILQTVKVVDELVKVMGRHKPENIVIEMARENQTTQKGQKNSRERMKRIEEGIKELGSQILKEHPVENTQLQNEKLYLYYLQNGRDMYVDQELDINRLSDYDVDHIVPQSFLKDDSIDNKVLTRSDKARGKSDNVPSEEVVKKMKNYWRQLLNAKLITQRKFDNLTKAERGGLSELDKAGFIKRQLVETRQITKHVAQILDSRMNTKYDENDKLIREVKVITLKSKLVSDFRKDFQFYKVREINNYHHAHDAYLNAVVGTALIKKYPKLESEFVYGDYKVYDVRKMIAKSEQEIGKATAKYFFYSNIMNFFKTEITLANGEIRKRPLIETNGETGEIVWDKGRDFATVRKVLSMPQVNIVKKTEVQTGGFSKESILPKRNSDKLIARKKDWDPKKYGGFDSPTVAYSVLVVAKVEKGKSKKLKSVKELLGITIMERSSFEKNPIDFLEAKGYKEVKKDLIIKLPKYSLFELENGRKRMLASAGELQKGNELALPSKYVNFLYLASHYEKLKGSPEDNEQKQLFVEQHKHYLDEIIEQISEFSKRVILADANLDKVLSAYNKHRDKPIREQAENIIHLFTLTNLGAPAAFKYFDTTIDRKRYTSTKEVLDATLIHQSITGLYETRIDLSQLGGDGGGSSPAPGGSGGTLQLDDEYRLYSPLVKPDQNIQFWLEQFPQAWAETAGMGLAKQVPPQVIQLKASATPVSVRQYPLSKEAQEGIRPHVQRLIQQGILVPVQSPWNTPLLPVRKPGTNDYRPVQDLREVNKRVQDIHPTVPNPYNLLCALPPQRSWYTVLDLKDAFFCLRLHPTSQPLFAFEWRDPGTGRTGQLTWTRLPQGFKNSPTIFDEALHRDLANFRIQHPQVTLLQYVDDLLLAGATKQDCLEGTKALLLELSDLGYRASAKKAQICRREVTYLGYSLRDGQRWLTEARKKTVVQIPAPTTAKQVREFLGTAGFCRLWIPGFATLAAPLYPLTKEKGEFSWAPEHQKAFDAIKKALLSAPALALPDVTKPFTLYVDERKGVARGVLTQTLGPWRRPVAYLSKKLDPVASGWPVCLKAIAAVAILVKDADKLTLGQNITVIAPHALENIVRQPPDRWMTNARMTHYQSLLLTERVTFAPPAALNPATLLPEETDEPVTHDCHQLLIEETGVRKDLTDIPLTGEVLTWFTDGSSYVVEGKRMAGAAVVDGTRTIWASSLPEGTSAQKAELMALTQALRLAEGKSINIYTDSRYAFATAHVHGAIYKQRGLLTSAGREIKNKEEILSLLEALHLPKRLAIIHCPGHQKAKDPISRGNQMADRVAKQAAQGVNLLAGKRTADGSEFEKRTADGSEFESPKKKAKVE

SEQ ID NO: 296 - protein, 2090 aa, synthetic construct
MPAAKRVKLDGGDKKYSIGLDIGTNSVGWAVITDEYKVPSKKFKVLGNTDRHSIKKNLIGALLFDSGETAEATRLKRTARRRYTRRKNRICYLQEIFSNEMAKVDDSFFHRLEESFLVEEDKKHERHPIFGNIVDEVAYHEKYPTIYHLRKKLVDSTDKADLRLIYLALAHMIKFRGHFLIEGDLNPDNSDVDKLFIQLVQTYNQLFEENPINASGVDAKAILSARLSKSRRLENLIAQLPGEKKNGLFGNLIALSLGLTPNFKSNFDLAEDAKLQLSKDTYDDDLDNLLAQIGDQYADLFLAAKNLSDAILLSDILRVNTEITKAPLSASMIKRYDEHHQDLTLLKALVRQQLPEKYKEIFFDQSKNGYAGYIDGGASQEEFYKFIKPILEKMDGTEELLVKLNREDLLRKQRTFDNGSIPHQIHLGELHAILRRQEDFYPFLKDNREKIEKILTFRIPYYVGPLARGNSRFAWMTRKSEETITPWNFEEVVDKGASAQSFIERMTNFDKNLPNEKVLPKHSLLYEYFTVYNELTKVKYVTEGMRKPAFLSGEQKKAIVDLLFKTNRKVTVKQLKEDYFKKIECFDSVEISGVEDRFNASLGTYHDLLKIIKDKDFLDNEENEDILEDIVLTLTLFEDREMIEERLKTYAHLFDDKVMKQLKRRRYTGWGRLSRKLINGIRDKQSGKTILDFLKSDGFANRNFMQLIHDDSLTFKEDIQKAQVSGQGDSLHEHIANLAGSPAIKKGILQTVKVVDELVKVMGRHKPENIVIEMARENQTTQKGQKNSRERMKRIEEGIKELGSQILKEHPVENTQLQNEKLYLYYLQNGRDMYVDQELDINRLSDYDVDHIVPQSFLKDDSIDNKVLTRSDKARGKSDNVPSEEVVKKMKNYWRQLLNAKLITQRKFDNLTKAERGGLSELDKAGFIKRQLVETRQITKHVAQILDSRMNTKYDENDKLIREVKVITLKSKLVSDFRKDFQFYKVREINNYHHAHDAYLNAVVGTALIKKYPKLESEFVYGDYKVYDVRKMIAKSEQEIGKATAKYFFYSNIMNFFKTEITLANGEIRKRPLIETNGETGEIVWDKGRDFATVRKVLSMPQVNIVKKTEVQTGGFSKESILPKRNSDKLIARKKDWDPKKYGGFDSPTVAYSVLVVAKVEKGKSKKLKSVKELLGITIMERSSFEKNPIDFLEAKGYKEVKKDLIIKLPKYSLFELENGRKRMLASAGELQKGNELALPSKYVNFLYLASHYEKLKGSPEDNEQKQLFVEQHKHYLDEIIEQISEFSKRVILADANLDKVLSAYNKHRDKPIREQAENIIHLFTLTNLGAPAAFKYFDTTIDRKRYTSTKEVLDATLIHQSITGLYETRIDLSQLGGDGGEAAAKGSSGGGGGTLQLDDEYRLYSPLVKPDQNIQFWLEQFPQAWAETAGMGLAKQVPPQVIQLKASATPVSVRQYPLSKEAQEGIRPHVQRLIQQGILVPVQSPWNTPLLPVRKPGTNDYRPVQDLREVNKRVQDIHPTVPNPYNLLCALPPQRSWYTVLDLKDAFFCLRLHPTSQPLFAFEWRDPGTGRTGQLTWTRLPQGFKNSPTIFDEALHRDLANFRIQHPQVTLLQYVDDLLLAGATKQDCLEGTKALLLELSDLGYRASAKKAQICRREVTYLGYSLRDGQRWLTEARKKTVVQIPAPTTAKQVREFLGTAGFCRLWIPGFATLAAPLYPLTKEKGEFSWAPEHQKAFDAIKKALLSAPALALPDVTKPFTLYVDERKGVARGVLTQTLGPWRRPVAYLSKKLDPVASGWPVCLKAIAAVAILVKDADKLTLGQNITVIAPHALENIVRQPPDRWMTNARMTHYQSLLLTERVTFAPPAALNPATLLPEETDEPVTHDCHQLLIEETGVRKDLTDIPLTGEVLTWFTDGSSYVVEGKRMAGAAVVDGTRTIWASSLPEGTSAQKAELMALTQALRLAEGKSINIYTDSRYAFATAHVHGAIYKQRGLLTSAGREIKNKEEILSLLEALHLPKRLAIIHCPGHQKAKDPISRGNQMADRVAKQAAQGVNLLAGKRTADGSEFEKRTADGSEFESPKKKAKVE

SEQ ID NO: 297 - protein, 2087 aa, synthetic construct
MPAAKRVKLDGGDKKYSIGLDIGTNSVGWAVITDEYKVPSKKFKVLGNTDRHSIKKNLIGALLFDSGETAEATRLKRTARRRYTRRKNRICYLQEIFSNEMAKVDDSFFHRLEESFLVEEDKKHERHPIFGNIVDEVAYHEKYPTIYHLRKKLVDSTDKADLRLIYLALAHMIKFRGHFLIEGDLNPDNSDVDKLFIQLVQTYNQLFEENPINASGVDAKAILSARLSKSRRLENLIAQLPGEKKNGLFGNLIALSLGLTPNFKSNFDLAEDAKLQLSKDTYDDDLDNLLAQIGDQYADLFLAAKNLSDAILLSDILRVNTEITKAPLSASMIKRYDEHHQDLTLLKALVRQQLPEKYKEIFFDQSKNGYAGYIDGGASQEEFYKFIKPILEKMDGTEELLVKLNREDLLRKQRTFDNGSIPHQIHLGELHAILRRQEDFYPFLKDNREKIEKILTFRIPYYVGPLARGNSRFAWMTRKSEETITPWNFEEVVDKGASAQSFIERMTNFDKNLPNEKVLPKHSLLYEYFTVYNELTKVKYVTEGMRKPAFLSGEQKKAIVDLLFKTNRKVTVKQLKEDYFKKIECFDSVEISGVEDRFNASLGTYHDLLKIIKDKDFLDNEENEDILEDIVLTLTLFEDREMIEERLKTYAHLFDDKVMKQLKRRRYTGWGRLSRKLINGIRDKQSGKTILDFLKSDGFANRNFMQLIHDDSLTFKEDIQKAQVSGQGDSLHEHIANLAGSPAIKKGILQTVKVVDELVKVMGRHKPENIVIEMARENQTTQKGQKNSRERMKRIEEGIKELGSQILKEHPVENTQLQNEKLYLYYLQNGRDMYVDQELDINRLSDYDVDHIVPQSFLKDDSIDNKVLTRSDKARGKSDNVPSEEVVKKMKNYWRQLLNAKLITQRKFDNLTKAERGGLSELDKAGFIKRQLVETRQITKHVAQILDSRMNTKYDENDKLIREVKVITLKSKLVSDFRKDFQFYKVREINNYHHAHDAYLNAVVGTALIKKYPKLESEFVYGDYKVYDVRKMIAKSEQEIGKATAKYFFYSNIMNFFKTEITLANGEIRKRPLIETNGETGEIVWDKGRDFATVRKVLSMPQVNIVKKTEVQTGGFSKESILPKRNSDKLIARKKDWDPKKYGGFDSPTVAYSVLVVAKVEKGKSKKLKSVKELLGITIMERSSFEKNPIDFLEAKGYKEVKKDLIIKLPKYSLFELENGRKRMLASAGELQKGNELALPSKYVNFLYLASHYEKLKGSPEDNEQKQLFVEQHKHYLDEIIEQISEFSKRVILADANLDKVLSAYNKHRDKPIREQAENIIHLFTLTNLGAPAAFKYFDTTIDRKRYTSTKEVLDATLIHQSITGLYETRIDLSQLGGDGGEAAAKPAPGGTLQLDDEYRLYSPLVKPDQNIQFWLEQFPQAWAETAGMGLAKQVPPQVIQLKASATPVSVRQYPLSKEAQEGIRPHVQRLIQQGILVPVQSPWNTPLLPVRKPGTNDYRPVQDLREVNKRVQDIHPTVPNPYNLLCALPPQRSWYTVLDLKDAFFCLRLHPTSQPLFAFEWRDPGTGRTGQLTWTRLPQGFKNSPTIFDEALHRDLANFRIQHPQVTLLQYVDDLLLAGATKQDCLEGTKALLLELSDLGYRASAKKAQICRREVTYLGYSLRDGQRWLTEARKKTVVQIPAPTTAKQVREFLGTAGFCRLWIPGFATLAAPLYPLTKEKGEFSWAPEHQKAFDAIKKALLSAPALALPDVTKPFTLYVDERKGVARGVLTQTLGPWRRPVAYLSKKLDPVASGWPVCLKAIAAVAILVKDADKLTLGQNITVIAPHALENIVRQPPDRWMTNARMTHYQSLLLTERVTFAPPAALNPATLLPEETDEPVTHDCHQLLIEETGVRKDLTDIPLTGEVLTWFTDGSSYVVEGKRMAGAAVVDGTRTIWASSLPEGTSAQKAELMALTQALRLAEGKSINIYTDSRYAFATAHVHGAIYKQRGLLTSAGREIKNKEEILSLLEALHLPKRLAIIHCPGHQKAKDPISRGNQMADRVAKQAAQGVNLLAGKRTADGSEFEKRTADGSEFESPKKKAKVE

SEQ ID NO: 298 - protein, 2094 aa, synthetic construct
MPAAKRVKLDGGDKKYSIGLDIGTNSVGWAVITDEYKVPSKKFKVLGNTDRHSIKKNLIGALLFDSGETAEATRLKRTARRRYTRRKNRICYLQEIFSNEMAKVDDSFFHRLEESFLVEEDKKHERHPIFGNIVDEVAYHEKYPTIYHLRKKLVDSTDKADLRLIYLALAHMIKFRGHFLIEGDLNPDNSDVDKLFIQLVQTYNQLFEENPINASGVDAKAILSARLSKSRRLENLIAQLPGEKKNGLFGNLIALSLGLTPNFKSNFDLAEDAKLQLSKDTYDDDLDNLLAQIGDQYADLFLAAKNLSDAILLSDILRVNTEITKAPLSASMIKRYDEHHQDLTLLKALVRQQLPEKYKEIFFDQSKNGYAGYIDGGASQEEFYKFIKPILEKMDGTEELLVKLNREDLLRKQRTFDNGSIPHQIHLGELHAILRRQEDFYPFLKDNREKIEKILTFRIPYYVGPLARGNSRFAWMTRKSEETITPWNFEEVVDKGASAQSFIERMTNFDKNLPNEKVLPKHSLLYEYFTVYNELTKVKYVTEGMRKPAFLSGEQKKAIVDLLFKTNRKVTVKQLKEDYFKKIECFDSVEISGVEDRFNASLGTYHDLLKIIKDKDFLDNEENEDILEDIVLTLTLFEDREMIEERLKTYAHLFDDKVMKQLKRRRYTGWGRLSRKLINGIRDKQSGKTILDFLKSDGFANRNFMQLIHDDSLTFKEDIQKAQVSGQGDSLHEHIANLAGSPAIKKGILQTVKVVDELVKVMGRHKPENIVIEMARENQTTQKGQKNSRERMKRIEEGIKELGSQILKEHPVENTQLQNEKLYLYYLQNGRDMYVDQELDINRLSDYDVDHIVPQSFLKDDSIDNKVLTRSDKARGKSDNVPSEEVVKKMKNYWRQLLNAKLITQRKFDNLTKAERGGLSELDKAGFIKRQLVETRQITKHVAQILDSRMNTKYDENDKLIREVKVITLKSKLVSDFRKDFQFYKVREINNYHHAHDAYLNAVVGTALIKKYPKLESEFVYGDYKVYDVRKMIAKSEQEIGKATAKYFFYSNIMNFFKTEITLANGEIRKRPLIETNGETGEIVWDKGRDFATVRKVLSMPQVNIVKKTEVQTGGFSKESILPKRNSDKLIARKKDWDPKKYGGFDSPTVAYSVLVVAKVEKGKSKKLKSVKELLGITIMERSSFEKNPIDFLEAKGYKEVKKDLIIKLPKYSLFELENGRKRMLASAGELQKGNELALPSKYVNFLYLASHYEKLKGSPEDNEQKQLFVEQHKHYLDEIIEQISEFSKRVILADANLDKVLSAYNKHRDKPIREQAENIIHLFTLTNLGAPAAFKYFDTTIDRKRYTSTKEVLDATLIHQSITGLYETRIDLSQLGGDGGEAAAKEAAAKEAAAKGGTLQLDDEYRLYSPLVKPDQNIQFWLEQFPQAWAETAGMGLAKQVPPQVIQLKASATPVSVRQYPLSKEAQEGIRPHVQRLIQQGILVPVQSPWNTPLLPVRKPGTNDYRPVQDLREVNKRVQDIHPTVPNPYNLLCALPPQRSWYTVLDLKDAFFCLRLHPTSQPLFAFEWRDPGTGRTGQLTWTRLPQGFKNSPTIFNEALHRDLANFRIQHPQVTLLQYVDDLLLAGATKQDCLEGTKALLLELSDLGYRASAKKAQICRREVTYLGYSLRDGQRWLTEARKKTVVQIPAPTTAKQVREFLGTAGFCRLWIPGFATLAAPLYPLTKPKGEFSWAPEHQKAFDAIKKALLSAPALALPDVTKPFTLYVDERKGVARGVLTQTLGPWRRPVAYLSKKLDPVASGWPVCLKAIAAVAILVKDADKLTLGQNITVIAPHALENIVRQPPDRWMTNARMTHYQSLLLTERVTFAPPAALNPATLLPEETDEPVTHDCHQLLIEETGVRKDLTDIPLTGEVLTWFTDGSSYVVEGKRMAGAAVVDGTRTIWASSLPEGTSAQKAELMALTQALRLAEGKSINIYTDSRYAFATAHVHGAIYKQRGWLTSAGREIKNKEEILSLLEALHLPKRLAIIHCPGHQKAKDPISRGNQMADRVAKQAAQGVNLLAGKRTADGSEFEKRTADGSEFESPKKKAKVE

SEQ ID NO: 299 - protein, 2090 aa, synthetic construct
MPAAKRVKLDGGDKKYSIGLDIGTNSVGWAVITDEYKVPSKKFKVLGNTDRHSIKKNLIGALLFDSGETAEATRLKRTARRRYTRRKNRICYLQEIFSNEMAKVDDSFFHRLEESFLVEEDKKHERHPIFGNIVDEVAYHEKYPTIYHLRKKLVDSTDKADLRLIYLALAHMIKFRGHFLIEGDLNPDNSDVDKLFIQLVQTYNQLFEENPINASGVDAKAILSARLSKSRRLENLIAQLPGEKKNGLFGNLIALSLGLTPNFKSNFDLAEDAKLQLSKDTYDDDLDNLLAQIGDQYADLFLAAKNLSDAILLSDILRVNTEITKAPLSASMIKRYDEHHQDLTLLKALVRQQLPEKYKEIFFDQSKNGYAGYIDGGASQEEFYKFIKPILEKMDGTEELLVKLNREDLLRKQRTFDNGSIPHQIHLGELHAILRRQEDFYPFLKDNREKIEKILTFRIPYYVGPLARGNSRFAWMTRKSEETITPWNFEEVVDKGASAQSFIERMTNFDKNLPNEKVLPKHSLLYEYFTVYNELTKVKYVTEGMRKPAFLSGEQKKAIVDLLFKTNRKVTVKQLKEDYFKKIECFDSVEISGVEDRFNASLGTYHDLLKIIKDKDFLDNEENEDILEDIVLTLTLFEDREMIEERLKTYAHLFDDKVMKQLKRRRYTGWGRLSRKLINGIRDKQSGKTILDFLKSDGFANRNFMQLIHDDSLTFKEDIQKAQVSGQGDSLHEHIANLAGSPAIKKGILQTVKVVDELVKVMGRHKPENIVIEMARENQTTQKGQKNSRERMKRIEEGIKELGSQILKEHPVENTQLQNEKLYLYYLQNGRDMYVDQELDINRLSDYDVDHIVPQSFLKDDSIDNKVLTRSDKARGKSDNVPSEEVVKKMKNYWRQLLNAKLITQRKFDNLTKAERGGLSELDKAGFIKRQLVETRQITKHVAQILDSRMNTKYDENDKLIREVKVITLKSKLVSDFRKDFQFYKVREINNYHHAHDAYLNAVVGTALIKKYPKLESEFVYGDYKVYDVRKMIAKSEQEIGKATAKYFFYSNIMNFFKTEITLANGEIRKRPLIETNGETGEIVWDKGRDFATVRKVLSMPQVNIVKKTEVQTGGFSKESILPKRNSDKLIARKKDWDPKKYGGFDSPTVAYSVLVVAKVEKGKSKKLKSVKELLGITIMERSSFEKNPIDFLEAKGYKEVKKDLIIKLPKYSLFELENGRKRMLASAGELQKGNELALPSKYVNFLYLASHYEKLKGSPEDNEQKQLFVEQHKHYLDEIIEQISEFSKRVILADANLDKVLSAYNKHRDKPIREQAENIIHLFTLTNLGAPAAFKYFDTTIDRKRYTSTKEVLDATLIHQSITGLYETRIDLSQLGGDGGEAAAKGGSGGGGGTLQLDDEYRLYSPLVKPDQNIQFWLEQFPQAWAETAGMGLAKQVPPQVIQLKASATPVSVRQYPLSKEAQEGIRPHVQRLIQQGILVPVQSPWNTPLLPVRKPGTNDYRPVQDLREVNKRVQDIHPTVPNPYNLLCALPPQRSWYTVLDLKDAFFCLRLHPTSQPLFAFEWRDPGTGRTGQLTWTRLPQGFKNSPTIFNEALHRDLANFRIQHPQVTLLQYVDDLLLAGATKQDCLEGTKALLLELSDLGYRASAKKAQICRREVTYLGYSLRDGQRWLTEARKKTVVQIPAPTTAKQVREFLGTAGFCRLWIPGFATLAAPLYPLTKPKGEFSWAPEHQKAFDAIKKALLSAPALALPDVTKPFTLYVDERKGVARGVLTQTLGPWRRPVAYLSKKLDPVASGWPVCLKAIAAVAILVKDADKLTLGQNITVIAPHALENIVRQPPDRWMTNARMTHYQSLLLTERVTFAPPAALNPATLLPEETDEPVTHDCHQLLIEETGVRKDLTDIPLTGEVLTWFTDGSSYVVEGKRMAGAAVVDGTRTIWASSLPEGTSAQKAELMALTQALRLAEGKSINIYTDSRYAFATAHVHGAIYKQRGWLTSAGREIKNKEEILSLLEALHLPKRLAIIHCPGHQKAKDPISRGNQMADRVAKQAAQGVNLLAGKRTADGSEFEKRTADGSEFESPKKKAKVE

SEQ ID NO: 300 - protein, 2125 aa, synthetic construct; identical to SEQ ID NO: 156

SEQ ID NO: 301 - protein, 2090 aa, synthetic construct
MPAAKRVKLDGGDKKYSIGLDIGTNSVGWAVITDEYKVPSKKFKVLGNTDRHSIKKNLIGALLFDSGETAEATRLKRTARRRYTRRKNRICYLQEIFSNEMAKVDDSFFHRLEESFLVEEDKKHERHPIFGNIVDEVAYHEKYPTIYHLRKKLVDSTDKADLRLIYLALAHMIKFRGHFLIEGDLNPDNSDVDKLFIQLVQTYNQLFEENPINASGVDAKAILSARLSKSRRLENLIAQLPGEKKNGLFGNLIALSLGLTPNFKSNFDLAEDAKLQLSKDTYDDDLDNLLAQIGDQYADLFLAAKNLSDAILLSDILRVNTEITKAPLSASMIKRYDEHHQDLTLLKALVRQQLPEKYKEIFFDQSKNGYAGYIDGGASQEEFYKFIKPILEKMDGTEELLVKLNREDLLRKQRTFDNGSIPHQIHLGELHAILRRQEDFYPFLKDNREKIEKILTFRIPYYVGPLARGNSRFAWMTRKSEETITPWNFEEVVDKGASAQSFIERMTNFDKNLPNEKVLPKHSLLYEYFTVYNELTKVKYVTEGMRKPAFLSGEQKKAIVDLLFKTNRKVTVKQLKEDYFKKIECFDSVEISGVEDRFNASLGTYHDLLKIIKDKDFLDNEENEDILEDIVLTLTLFEDREMIEERLKTYAHLFDDKVMKQLKRRRYTGWGRLSRKLINGIRDKQSGKTILDFLKSDGFANRNFMQLIHDDSLTFKEDIQKAQVSGQGDSLHEHIANLAGSPAIKKGILQTVKVVDELVKVMGRHKPENIVIEMARENQTTQKGQKNSRERMKRIEEGIKELGSQILKEHPVENTQLQNEKLYLYYLQNGRDMYVDQELDINRLSDYDVDHIVPQSFLKDDSIDNKVLTRSDKARGKSDNVPSEEVVKKMKNYWRQLLNAKLITQRKFDNLTKAERGGLSELDKAGFIKRQLVETRQITKHVAQILDSRMNTKYDENDKLIREVKVITLKSKLVSDFRKDFQFYKVREINNYHHAHDAYLNAVVGTALIKKYPKLESEFVYGDYKVYDVRKMIAKSEQEIGKATAKYFFYSNIMNFFKTEITLANGEIRKRPLIETNGETGEIVWDKGRDFATVRKVLSMPQVNIVKKTEVQTGGFSKESILPKRNSDKLIARKKDWDPKKYGGFDSPTVAYSVLVVAKVEKGKSKKLKSVKELLGITIMERSSFEKNPIDFLEAKGYKEVKKDLIIKLPKYSLFELENGRKRMLASAGELQKGNELALPSKYVNFLYLASHYEKLKGSPEDNEQKQLFVEQHKHYLDEIIEQISEFSKRVILADANLDKVLSAYNKHRDKPIREQAENIIHLFTLTNLGAPAAFKYFDTTIDRKRYTSTKEVLDATLIHQSITGLYETRIDLSQLGGDGGGGGEAAAKGSSGGTLQLDDEYRLYSPLVKPDQNIQFWLEQFPQAWAETAGMGLAKQVPPQVIQLKASATPVSVRQYPLSKEAQEGIRPHVQRLIQQGILVPVQSPWNTPLLPVRKPGTNDYRPVQDLREVNKRVQDIHPTVPNPYNLLCALPPQRSWYTVLDLKDAFFCLRLHPTSQPLFAFEWRDPGTGRTGQLTWTRLPQGFKNSPTIFNEALHRDLANFRIQHPQVTLLQYVDDLLLAGATKQDCLEGTKALLLELSDLGYRASAKKAQICRREVTYLGYSLRDGQRWLTEARKKTVVQIPAPTTAKQVREFLGTAGFCRLWIPGFATLAAPLYPLTKPKGEFSWAPEHQKAFDAIKKALLSAPALALPDVTKPFTLYVDERKGVARGVLTQTLGPWRRPVAYLSKKLDPVASGWPVCLKAIAAVAILVKDADKLTLGQNITVIAPHALENIVRQPPDRWMTNARMTHYQSLLLTERVTFAPPAALNPATLLPEETDEPVTHDCHQLLIEETGVRKDLTDIPLTGEVLTWFTDGSSYVVEGKRMAGAAVVDGTRTIWASSLPEGTSAQKAELMALTQALRLAEGKSINIYTDSRYAFATAHVHGAIYKQRGWLTSAGREIKNKEEILSLLEALHLPKRLAIIHCPGHQKAKDPISRGNQMADRVAKQAAQGVNLLAGKRTADGSEFEKRTADGSEFESPKKKAKVE

SEQ ID NO: 302 - protein, 2090 aa, synthetic construct; identical to SEQ ID NO: 164

SEQ ID NO: 303 - protein, 2112 aa, synthetic construct; identical to SEQ ID NO: 140

SEQ ID NO: 304 - protein, 2090 aa, synthetic construct
MPAAKRVKLDGGDKKYSIGLDIGTNSVGWAVITDEYKVPSKKFKVLGNTDRHSIKKNLIGALLFDSGETAEATRLKRTARRRYTRRKNRICYLQEIFSNEMAKVDDSFFHRLEESFLVEEDKKHERHPIFGNIVDEVAYHEKYPTIYHLRKKLVDSTDKADLRLIYLALAHMIKFRGHFLIEGDLNPDNSDVDKLFIQLVQTYNQLFEENPINASGVDAKAILSARLSKSRRLENLIAQLPGEKKNGLFGNLIALSLGLTPNFKSNFDLAEDAKLQLSKDTYDDDLDNLLAQIGDQYADLFLAAKNLSDAILLSDILRVNTEITKAPLSASMIKRYDEHHQDLTLLKALVRQQLPEKYKEIFFDQSKNGYAGYIDGGASQEEFYKFIKPILEKMDGTEELLVKLNREDLLRKQRTFDNGSIPHQIHLGELHAILRRQEDFYPFLKDNREKIEKILTFRIPYYVGPLARGNSRFAWMTRKSEETITPWNFEEVVDKGASAQSFIERMTNFDKNLPNEKVLPKHSLLYEYFTVYNELTKVKYVTEGMRKPAFLSGEQKKAIVDLLFKTNRKVTVKQLKEDYFKKIECFDSVEISGVEDRFNASLGTYHDLLKIIKDKDFLDNEENEDILEDIVLTLTLFEDREMIEERLKTYAHLFDDKVMKQLKRRRYTGWGRLSRKLINGIRDKQSGKTILDFLKSDGFANRNFMQLIHDDSLTFKEDIQKAQVSGQGDSLHEHIANLAGSPAIKKGILQTVKVVDELVKVMGRHKPENIVIEMARENQTTQKGQKNSRERMKRIEEGIKELGSQILKEHPVENTQLQNEKLYLYYLQNGRDMYVDQELDINRLSDYDVDHIVPQSFLKDDSIDNKVLTRSDKARGKSDNVPSEEVVKKMKNYWRQLLNAKLITQRKFDNLTKAERGGLSELDKAGFIKRQLVETRQITKHVAQILDSRMNTKYDENDKLIREVKVITLKSKLVSDFRKDFQFYKVREINNYHHAHDAYLNAVVGTALIKKYPKLESEFVYGDYKVYDVRKMIAKSEQEIGKATAKYFFYSNIMNFFKTEITLANGEIRKRPLIETNGETGEIVWDKGRDFATVRKVLSMPQVNIVKKTEVQTGGFSKESILPKRNSDKLIARKKDWDPKKYGGFDSPTVAYSVLVVAKVEKGKSKKLKSVKELLGITIMERSSFEKNPIDFLEAKGYKEVKKDLIIKLPKYSLFELENGRKRMLASAGELQKGNELALPSKYVNFLYLASHYEKLKGSPEDNEQKQLFVEQHKHYLDEIIEQISEFSKRVILADANLDKVLSAYNKHRDKPIREQAENIIHLFTLTNLGAPAAFKYFDTTIDRKRYTSTKEVLDATLIHQSITGLYETRIDLSQLGGDGGEAAAKPAPGSSGGTLQLDDEYRLYSPLVKPDQNIQFWLEQFPQAWAETAGMGLAKQVPPQVIQLKASATPVSVRQYPLSKEAQEGIRPHVQRLIQQGILVPVQSPWNTPLLPVRKPGTNDYRPVQDLREVNKRVQDIHPTVPNPYNLLCALPPQRSWYTVLDLKDAFFCLRLHPTSQPLFAFEWRDPGTGRTGQLTWTRLPQGFKNSPTIFNEALHRDLANFRIQHPQVTLLQYVDDLLLAGATKQDCLEGTKALLLELSDLGYRASAKKAQICRREVTYLGYSLRDGQRWLTEARKKTVVQIPAPTTAKQVREFLGTAGFCRLWIPGFATLAAPLYPLTKPKGEFSWAPEHQKAFDAIKKALLSAPALALPDVTKPFTLYVDERKGVARGVLTQTLGPWRRPVAYLSKKLDPVASGWPVCLKAIAAVAILVKDADKLTLGQNITVIAPHALENIVRQPPDRWMTNARMTHYQSLLLTERVTFAPPAALNPATLLPEETDEPVTHDCHQLLIEETGVRKDLTDIPLTGEVLTWFTDGSSYVVEGKRMAGAAVVDGTRTIWASSLPEGTSAQKAELMALTQALRLAEGKSINIYTDSRYAFATAHVHGAIYKQRGWLTSAGREIKNKEEILSLLEALHLPKRLAIIHCPGHQKAKDPISRGNQMADRVAKQAAQGVNLLAGKRTADGSEFEKRTADGSEFESPKKKAKVE

SEQ ID NO: 305 - protein, 2090 aa, synthetic construct; identical to SEQ ID NO: 127

SEQ ID NO: 306 - protein, 2087 aa, synthetic construct; identical to SEQ ID NO: 126

SEQ ID NO: 307 - protein, 2088 aa, synthetic construct
MPAAKRVKLDGGDKKYSIGLDIGTNSVGWAVITDEYKVPSKKFKVLGNTDRHSIKKNLIGALLFDSGETAEATRLKRTARRRYTRRKNRICYLQEIFSNEMAKVDDSFFHRLEESFLVEEDKKHERHPIFGNIVDEVAYHEKYPTIYHLRKKLVDSTDKADLRLIYLALAHMIKFRGHFLIEGDLNPDNSDVDKLFIQLVQTYNQLFEENPINASGVDAKAILSARLSKSRRLENLIAQLPGEKKNGLFGNLIALSLGLTPNFKSNFDLAEDAKLQLSKDTYDDDLDNLLAQIGDQYADLFLAAKNLSDAILLSDILRVNTEITKAPLSASMIKRYDEHHQDLTLLKALVRQQLPEKYKEIFFDQSKNGYAGYIDGGASQEEFYKFIKPILEKMDGTEELLVKLNREDLLRKQRTFDNGSIPHQIHLGELHAILRRQEDFYPFLKDNREKIEKILTFRIPYYVGPLARGNSRFAWMTRKSEETITPWNFEEVVDKGASAQSFIERMTNFDKNLPNEKVLPKHSLLYEYFTVYNELTKVKYVTEGMRKPAFLSGEQKKAIVDLLFKTNRKVTVKQLKEDYFKKIECFDSVEISGVEDRFNASLGTYHDLLKIIKDKDFLDNEENEDILEDIVLTLTLFEDREMIEERLKTYAHLFDDKVMKQLKRRRYTGWGRLSRKLINGIRDKQSGKTILDFLKSDGFANRNFMQLIHDDSLTFKEDIQKAQVSGQGDSLHEHIANLAGSPAIKKGILQTVKVVDELVKVMGRHKPENIVIEMARENQTTQKGQKNSRERMKRIEEGIKELGSQILKEHPVENTQLQNEKLYLYYLQNGRDMYVDQELDINRLSDYDVDHIVPQSFLKDDSIDNKVLTRSDKARGKSDNVPSEEVVKKMKNYWRQLLNAKLITQRKFDNLTKAERGGLSELDKAGFIKRQLVETRQITKHVAQILDSRMNTKYDENDKLIREVKVITLKSKLVSDFRKDFQFYKVREINNYHHAHDAYLNAVVGTALIKKYPKLESEFVYGDYKVYDVRKMIAKSEQEIGKATAKYFFYSNIMNFFKTEITLANGEIRKRPLIETNGETGEIVWDKGRDFATVRKVLSMPQVNIVKKTEVQTGGFSKESILPKRNSDKLIARKKDWDPKKYGGFDSPTVAYSVLVVAKVEKGKSKKLKSVKELLGITIMERSSFEKNPIDFLEAKGYKEVKKDLIIKLPKYSLFELENGRKRMLASAGELQKGNELALPSKYVNFLYLASHYEKLKGSPEDNEQKQLFVEQHKHYLDEIIEQISEFSKRVILADANLDKVLSAYNKHRDKPIREQAENIIHLFTLTNLGAPAAFKYFDTTIDRKRYTSTKEVLDATLIHQSITGLYETRIDLSQLGGDGGGGGGSSPAPGGTLQLDDEYRLYSPLVKPDQNIQFWLEQFPQAWAETAGMGLAKQVPPQVIQLKASATPVSVRQYPLSKEAQEGIRPHVQRLIQQGILVPVQSPWNTPLLPVRKPGTNDYRPVQDLREVNKRVQDIHPTVPNPYNLLCALPPQRSWYTVLDLKDAFFCLRLHPTSQPLFAFEWRDPGTGRTGQLTWTRLPQGFKNSPTIFNEALHRDLANFRIQHPQVTLLQYVDDLLLAGATKQDCLEGTKALLLELSDLGYRASAKKAQICRREVTYLGYSLRDGQRWLTEARKKTVVQIPAPTTAKQVREFLGTAGFCRLWIPGFATLAAPLYPLTKPKGEFSWAPEHQKAFDAIKKALLSAPALALPDVTKPFTLYVDERKGVARGVLTQTLGPWRRPVAYLSKKLDPVASGWPVCLKAIAAVAILVKDADKLTLGQNITVIAPHALENIVRQPPDRWMTNARMTHYQSLLLTERVTFAPPAALNPATLLPEETDEPVTHDCHQLLIEETGVRKDLTDIPLTGEVLTWFTDGSSYVVEGKRMAGAAVVDGTRTIWASSLPEGTSAQKAELMALTQALRLAEGKSINIYTDSRYAFATAHVHGAIYKQRGWLTSAGREIKNKEEILSLLEALHLPKRLAIIHCPGHQKAKDPISRGNQMADRVAKQAAQGVNLLAGKRTADGSEFEKRTADGSEFESPKKKAKVE

SEQ ID NO: 308 - protein, 2084 aa, synthetic construct; identical to SEQ ID NO: 151

SEQ ID NO: 309 - protein, 2092 aa, synthetic construct; identical to SEQ ID NO: 157

SEQ ID NO: 310 - protein, 2090 aa, synthetic construct
MPAAKRVKLDGGDKKYSIGLDIGTNSVGWAVITDEYKVPSKKFKVLGNTDRHSIKKNLIGALLFDSGETAEATRLKRTARRRYTRRKNRICYLQEIFSNEMAKVDDSFFHRLEESFLVEEDKKHERHPIFGNIVDEVAYHEKYPTIYHLRKKLVDSTDKADLRLIYLALAHMIKFRGHFLIEGDLNPDNSDVDKLFIQLVQTYNQLFEENPINASGVDAKAILSARLSKSRRLENLIAQLPGEKKNGLFGNLIALSLGLTPNFKSNFDLAEDAKLQLSKDTYDDDLDNLLAQIGDQYADLFLAAKNLSDAILLSDILRVNTEITKAPLSASMIKRYDEHHQDLTLLKALVRQQLPEKYKEIFFDQSKNGYAGYIDGGASQEEFYKFIKPILEKMDGTEELLVKLNREDLLRKQRTFDNGSIPHQIHLGELHAILRRQEDFYPFLKDNREKIEKILTFRIPYYVGPLARGNSRFAWMTRKSEETITPWNFEEVVDKGASAQSFIERMTNFDKNLPNEKVLPKHSLLYEYFTVYNELTKVKYVTEGMRKPAFLSGEQKKAIVDLLFKTNRKVTVKQLKEDYFKKIECFDSVEISGVEDRFNASLGTYHDLLKIIKDKDFLDNEENEDILEDIVLTLTLFEDREMIEERLKTYAHLFDDKVMKQLKRRRYTGWGRLSRKLINGIRDKQSGKTILDFLKSDGFANRNFMQLIHDDSLTFKEDIQKAQVSGQGDSLHEHIANLAGSPAIKKGILQTVKVVDELVKVMGRHKPENIVIEMARENQTTQKGQKNSRERMKRIEEGIKELGSQILKEHPVENTQLQNEKLYLYYLQNGRDMYVDQELDINRLSDYDVDHIVPQSFLKDDSIDNKVLTRSDKARGKSDNVPSEEVVKKMKNYWRQLLNAKLITQRKFDNLTKAERGGLSELDKAGFIKRQLVETRQITKHVAQILDSRMNTKYDENDKLIREVKVITLKSKLVSDFRKDFQFYKVREINNYHHAHDAYLNAVVGTALIKKYPKLESEFVYGDYKVYDVRKMIAKSEQEIGKATAKYFFYSNIMNFFKTEITLANGEIRKRPLIETNGETGEIVWDKGRDFATVRKVLSMPQVNIVKKTEVQTGGFSKESILPKRNSDKLIARKKDWDPKKYGGFDSPTVAYSVLVVAKVEKGKSKKLKSVKELLGITIMERSSFEKNPIDFLEAKGYKEVKKDLIIKLPKYSLFELENGRKRMLASAGELQKGNELALPSKYVNFLYLASHYEKLKGSPEDNEQKQLFVEQHKHYLDEIIEQISEFSKRVILADANLDKVLSAYNKHRDKPIREQAENIIHLFTLTNLGAPAAFKYFDTTIDRKRYTSTKEVLDATLIHQSITGLYETRIDLSQLGGDGGGSSPAPEAAAKGGTLQLDDEYRLYSPLVKPDQNIQFWLEQFPQAWAETAGMGLAKQVPPQVIQLKASATPVSVRQYPLSKEAQEGIRPHVQRLIQQGILVPVQSPWNTPLLPVRKPGTNDYRPVQDLREVNKRVQDIHPTVPNPYNLLCALPPQRSWYTVLDLKDAFFCLRLHPTSQPLFAFEWRDPGTGRTGQLTWTRLPQGFKNSPTIFNEALHRDLANFRIQHPQVTLLQYVDDLLLAGATKQDCLEGTKALLLELSDLGYRASAKKAQICRREVTYLGYSLRDGQRWLTEARKKTVVQIPAPTTAKQVREFLGTAGFCRLWIPGFATLAAPLYPLTKPKGEFSWAPEHQKAFDAIKKALLSAPALALPDVTKPFTLYVDERKGVARGVLTQTLGPWRRPVAYLSKKLDPVASGWPVCLKAIAAVAILVKDADKLTLGQNITVIAPHALENIVRQPPDRWMTNARMTHYQSLLLTERVTFAPPAALNPATLLPEETDEPVTHDCHQLLIEETGVRKDLTDIPLTGEVLTWFTDGSSYVVEGKRMAGAAVVDGTRTIWASSLPEGTSAQKAELMALTQALRLAEGKSINIYTDSRYAFATAHVHGAIYKQRGWLTSAGREIKNKEEILSLLEALHLPKRLAIIHCPGHQKAKDPISRGNQMADRVAKQAAQGVNLLAGKRTADGSEFEKRTADGSEFESPKKKAKVE

SEQ ID NO: 311 - protein, 2090 aa, synthetic construct
MPAAKRVKLDGGDKKYSIGLDIGTNSVGWAVITDEYKVPSKKFKVLGNTDRHSIKKNLIGALLFDSGETAEATRLKRTARRRYTRRKNRICYLQEIFSNEMAKVDDSFFHRLEESFLVEEDKKHERHPIFGNIVDEVAYHEKYPTIYHLRKKLVDSTDKADLRLIYLALAHMIKFRGHFLIEGDLNPDNSDVDKLFIQLVQTYNQLFEENPINASGVDAKAILSARLSKSRRLENLIAQLPGEKKNGLFGNLIALSLGLTPNFKSNFDLAEDAKLQLSKDTYDDDLDNLLAQIGDQYADLFLAAKNLSDAILLSDILRVNTEITKAPLSASMIKRYDEHHQDLTLLKALVRQQLPEKYKEIFFDQSKNGYAGYIDGGASQEEFYKFIKPILEKMDGTEELLVKLNREDLLRKQRTFDNGSIPHQIHLGELHAILRRQEDFYPFLKDNREKIEKILTFRIPYYVGPLARGNSRFAWMTRKSEETITPWNFEEVVDKGASAQSFIERMTNFDKNLPNEKVLPKHSLLYEYFTVYNELTKVKYVTEGMRKPAFLSGEQKKAIVDLLFKTNRKVTVKQLKEDYFKKIECFDSVEISGVEDRFNASLGTYHDLLKIIKDKDFLDNEENEDILEDIVLTLTLFEDREMIEERLKTYAHLFDDKVMKQLKRRRYTGWGRLSRKLINGIRDKQSGKTILDFLKSDGFANRNFMQLIHDDSLTFKEDIQKAQVSGQGDSLHEHIANLAGSPAIKKGILQTVKVVDELVKVMGRHKPENIVIEMARENQTTQKGQKNSRERMKRIEEGIKELGSQILKEHPVENTQLQNEKLYLYYLQNGRDMYVDQELDINRLSDYDVDHIVPQSFLKDDSIDNKVLTRSDKARGKSDNVPSEEVVKKMKNYWRQLLNAKLITQRKFDNLTKAERGGLSELDKAGFIKRQLVETRQITKHVAQILDSRMNTKYDENDKLIREVKVITLKSKLVSDFRKDFQFYKVREINNYHHAHDAYLNAVVGTALIKKYPKLESEFVYGDYKVYDVRKMIAKSEQEIGKATAKYFFYSNIMNFFKTEITLANGEIRKRPLIETNGETGEIVWDKGRDFATVRKVLSMPQVNIVKKTEVQTGGFSKESILPKRNSDKLIARKKDWDPKKYGGFDSPTVAYSVLVVAKVEKGKSKKLKSVKELLGITIMERSSFEKNPIDFLEAKGYKEVKKDLIIKLPKYSLFELENGRKRMLASAGELQKGNELALPSKYVNFLYLASHYEKLKGSPEDNEQKQLFVEQHKHYLDEIIEQISEFSKRVILADANLDKVLSAYNKHRDKPIREQAENIIHLFTLTNLGAPAAFKYFDTTIDRKRYTSTKEVLDATLIHQSITGLYETRIDLSQLGGDGGGGGGGSEAAAKGGTLQLDDEYRLYSPLVKPDQNIQFWLEQFPQAWAETAGMGLAKQVPPQVIQLKASATPVSVRQYPLSKEAQEGIRPHVQRLIQQGILVPVQSPWNTPLLPVRKPGTNDYRPVQDLREVNKRVQDIHPTVPNPYNLLCALPPQRSWYTVLDLKDAFFCLRLHPTSQPLFAFEWRDPGTGRTGQLTWTRLPQGFKNSPTIFNEALHRDLANFRIQHPQVTLLQYVDDLLLAGATKQDCLEGTKALLLELSDLGYRASAKKAQICRREVTYLGYSLRDGQRWLTEARKKTVVQIPAPTTAKQVREFLGTAGFCRLWIPGFATLAAPLYPLTKPKGEFSWAPEHQKAFDAIKKALLSAPALALPDVTKPFTLYVDERKGVARGVLTQTLGPWRRPVAYLSKKLDPVASGWPVCLKAIAAVAILVKDADKLTLGQNITVIAPHALENIVRQPPDRWMTNARMTHYQSLLLTERVTFAPPAALNPATLLPEETDEPVTHDCHQLLIEETGVRKDLTDIPLTGEVLTWFTDGSSYVVEGKRMAGAAVVDGTRTIWASSLPEGTSAQKAELMALTQALRLAEGKSINIYTDSRYAFATAHVHGAIYKQRGWLTSAGREIKNKEEILSLLEALHLPKRLAIIHCPGHQKAKDPISRGNQMADRVAKQAAQGVNLLAGKRTADGSEFEKRTADGSEFESPKKKAKVE

SEQ ID NO: 312 - protein, 2090 aa, synthetic construct; identical to SEQ ID NO: 116

SEQ ID NO: 313 - protein, 2109 aa, synthetic construct; identical to SEQ ID NO: 117

SEQ ID NO: 314 - protein, 2088 aa, synthetic construct
MPAAKRVKLDGGDKKYSIGLDIGTNSVGWAVITDEYKVPSKKFKVLGNTDRHSIKKNLIGALLFDSGETAEATRLKRTARRRYTRRKNRICYLQEIFSNEMAKVDDSFFHRLEESFLVEEDKKHERHPIFGNIVDEVAYHEKYPTIYHLRKKLVDSTDKADLRLIYLALAHMIKFRGHFLIEGDLNPDNSDVDKLFIQLVQTYNQLFEENPINASGVDAKAILSARLSKSRRLENLIAQLPGEKKNGLFGNLIALSLGLTPNFKSNFDLAEDAKLQLSKDTYDDDLDNLLAQIGDQYADLFLAAKNLSDAILLSDILRVNTEITKAPLSASMIKRYDEHHQDLTLLKALVRQQLPEKYKEIFFDQSKNGYAGYIDGGASQEEFYKFIKPILEKMDGTEELLVKLNREDLLRKQRTFDNGSIPHQIHLGELHAILRRQEDFYPFLKDNREKIEKILTFRIPYYVGPLARGNSRFAWMTRKSEETITPWNFEEVVDKGASAQSFIERMTNFDKNLPNEKVLPKHSLLYEYFTVYNELTKVKYVTEGMRKPAFLSGEQKKAIVDLLFKTNRKVTVKQLKEDYFKKIECFDSVEISGVEDRFNASLGTYHDLLKIIKDKDFLDNEENEDILEDIVLTLTLFEDREMIEERLKTYAHLFDDKVMKQLKRRRYTGWGRLSRKLINGIRDKQSGKTILDFLKSDGFANRNFMQLIHDDSLTFKEDIQKAQVSGQGDSLHEHIANLAGSPAIKKGILQTVKVVDELVKVMGRHKPENIVIEMARENQTTQKGQKNSRERMKRIEEGIKELGSQILKEHPVENTQLQNEKLYLYYLQNGRDMYVDQELDINRLSDYDVDHIVPQSFLKDDSIDNKVLTRSDKARGKSDNVPSEEVVKKMKNYWRQLLNAKLITQRKFDNLTKAERGGLSELDKAGFIKRQLVETRQITKHVAQILDSRMNTKYDENDKLIREVKVITLKSKLVSDFRKDFQFYKVREINNYHHAHDAYLNAVVGTALIKKYPKLESEFVYGDYKVYDVRKMIAKSEQEIGKATAKYFFYSNIMNFFKTEITLANGEIRKRPLIETNGETGEIVWDKGRDFATVRKVLSMPQVNIVKKTEVQTGGFSKESILPKRNSDKLIARKKDWDPKKYGGFDSPTVAYSVLVVAKVEKGKSKKLKSVKELLGITIMERSSFEKNPIDFLEAKGYKEVKKDLIIKLPKYSLFELENGRKRMLASAGELQKGNELALPSKYVNFLYLASHYEKLKGSPEDNEQKQLFVEQHKHYLDEIIEQISEFSKRVILADANLDKVLSAYNKHRDKPIREQAENIIHLFTLTNLGAPAAFKYFDTTIDRKRYTSTKEVLDATLIHQSITGLYETRIDLSQLGGDGGGGGPAPGSSGGTLQLDDEYRLYSPLVKPDQNIQFWLEQFPQAWAETAGMGLAKQVPPQVIQLKASATPVSVRQYPLSKEAQEGIRPHVQRLIQQGILVPVQSPWNTPLLPVRKPGTNDYRPVQDLREVNKRVQDIHPTVPNPYNLLCALPPQRSWYTVLDLKDAFFCLRLHPTSQPLFAFEWRDPGTGRTGQLTWTRLPQGFKNSPTIFNEALHRDLANFRIQHPQVTLLQYVDDLLLAGATKQDCLEGTKALLLELSDLGYRASAKKAQICRREVTYLGYSLRDGQRWLTEARKKTVVQIPAPTTAKQVREFLGTAGFCRLWIPGFATLAAPLYPLTKPKGEFSWAPEHQKAFDAIKKALLSAPALALPDVTKPFTLYVDERKGVARGVLTQTLGPWRRPVAYLSKKLDPVASGWPVCLKAIAAVAILVKDADKLTLGQNITVIAPHALENIVRQPPDRWMTNARMTHYQSLLLTERVTFAPPAALNPATLLPEETDEPVTHDCHQLLIEETGVRKDLTDIPLTGEVLTWFTDGSSYVVEGKRMAGAAVVDGTRTIWASSLPEGTSAQKAELMALTQALRLAEGKSINIYTDSRYAFATAHVHGAIYKQRGWLTSAGREIKNKEEILSLLEALHLPKRLAIIHCPGHQKAKDPISRGNQMADRVAKQAAQGVNLLAGKRTADGSEFEKRTADGSEFESPKKKAKVE

SEQ ID NO: 315 - protein, 2082 aa, synthetic construct; identical to SEQ ID NO: 120

SEQ ID NO: 316 - protein, 2097 aa, synthetic construct; identical to SEQ ID NO: 142

SEQ ID NO: 317 - protein, 2090 aa, synthetic construct
MPAAKRVKLDGGDKKYSIGLDIGTNSVGWAVITDEYKVPSKKFKVLGNTDRHSIKKNLIGALLFDSGETAEATRLKRTARRRYTRRKNRICYLQEIFSNEMAKVDDSFFHRLEESFLVEEDKKHERHPIFGNIVDEVAYHEKYPTIYHLRKKLVDSTDKADLRLIYLALAHMIKFRGHFLIEGDLNPDNSDVDKLFIQLVQTYNQLFEENPINASGVDAKAILSARLSKSRRLENLIAQLPGEKKNGLFGNLIALSLGLTPNFKSNFDLAEDAKLQLSKDTYDDDLDNLLAQIGDQYADLFLAAKNLSDAILLSDILRVNTEITKAPLSASMIKRYDEHHQDLTLLKALVRQQLPEKYKEIFFDQSKNGYAGYIDGGASQEEFYKFIKPILEKMDGTEELLVKLNREDLLRKQRTFDNGSIPHQIHLGELHAILRRQEDFYPFLKDNREKIEKILTFRIPYYVGPLARGNSRFAWMTRKSEETITPWNFEEVVDKGASAQSFIERMTNFDKNLPNEKVLPKHSLLYEYFTVYNELTKVKYVTEGMRKPAFLSGEQKKAIVDLLFKTNRKVTVKQLKEDYFKKIECFDSVEISGVEDRFNASLGTYHDLLKIIKDKDFLDNEENEDILEDIVLTLTLFEDREMIEERLKTYAHLFDDKVMKQLKRRRYTGWGRLSRKLINGIRDKQSGKTILDFLKSDGFANRNFMQLIHDDSLTFKEDIQKAQVSGQGDSLHEHIANLAGSPAIKKGILQTVKVVDELVKVMGRHKPENIVIEMARENQTTQKGQKNSRERMKRIEEGIKELGSQILKEHPVENTQLQNEKLYLYYLQNGRDMYVDQELDINRLSDYDVDHIVPQSFLKDDSIDNKVLTRSDKARGKSDNVPSEEVVKKMKNYWRQLLNAKLITQRKFDNLTKAERGGLSELDKAGFIKRQLVETRQITKHVAQILDSRMNTKYDENDKLIREVKVITLKSKLVSDFRKDFQFYKVREINNYHHAHDAYLNAVVGTALIKKYPKLESEFVYGDYKVYDVRKMIAKSEQEIGKATAKYFFYSNIMNFFKTEITLANGEIRKRPLIETNGETGEIVWDKGRDFATVRKVLSMPQVNIVKKTEVQTGGFSKESILPKRNSDKLIARKKDWDPKKYGGFDSPTVAYSVLVVAKVEKGKSKKLKSVKELLGITIMERSSFEKNPIDFLEAKGYKEVKKDLIIKLPKYSLFELENGRKRMLASAGELQKGNELALPSKYVNFLYLASHYEKLKGSPEDNEQKQLFVEQHKHYLDEIIEQISEFSKRVILADANLDKVLSAYNKHRDKPIREQAENIIHLFTLTNLGAPAAFKYFDTTIDRKRYTSTKEVLDATLIHQSITGLYETRIDLSQLGGDGGGSSGGGEAAAKGGTLQLDDEYRLYSPLVKPDQNIQFWLEQFPQAWAETAGMGLAKQVPPQVIQLKASATPVSVRQYPLSKEAQEGIRPHVQRLIQQGILVPVQSPWNTPLLPVRKPGTNDYRPVQDLREVNKRVQDIHPTVPNPYNLLCALPPQRSWYTVLDLKDAFFCLRLHPTSQPLFAFEWRDPGTGRTGQLTWTRLPQGFKNSPTIFNEALHRDLANFRIQHPQVTLLQYVDDLLLAGATKQDCLEGTKALLLELSDLGYRASAKKAQICRREVTYLGYSLRDGQRWLTEARKKTVVQIPAPTTAKQVREFLGTAGFCRLWIPGFATLAAPLYPLTKPKGEFSWAPEHQKAFDAIKKALLSAPALALPDVTKPFTLYVDERKGVARGVLTQTLGPWRRPVAYLSKKLDPVASGWPVCLKAIAAVAILVKDADKLTLGQNITVIAPHALENIVRQPPDRWMTNARMTHYQSLLLTERVTFAPPAALNPATLLPEETDEPVTHDCHQLLIEETGVRKDLTDIPLTGEVLTWFTDGSSYVVEGKRMAGAAVVDGTRTIWASSLPEGTSAQKAELMALTQALRLAEGKSINIYTDSRYAFATAHVHGAIYKQRGWLTSAGREIKNKEEILSLLEALHLPKRLAIIHCPGHQKAKDPISRGNQMADRVAKQAAQGVNLLAGKRTADGSEFEKRTADGSEFESPKKKAKVE

SEQ ID NO: 318 - protein, 2090 aa, synthetic construct; identical to SEQ ID NO: 121

SEQ ID NO: 319 - protein, 2090 aa, synthetic construct; identical to SEQ ID NO: 124

SEQ ID NO: 320 - protein, 2088 aa, synthetic construct
MPAAKRVKLDGGDKKYSIGLDIGTNSVGWAVITDEYKVPSKKFKVLGNTDRHSIKKNLIGALLFDSGETAEATRLKRTARRRYTRRKNRICYLQEIFSNEMAKVDDSFFHRLEESFLVEEDKKHERHPIFGNIVDEVAYHEKYPTIYHLRKKLVDSTDKADLRLIYLALAHMIKFRGHFLIEGDLNPDNSDVDKLFIQLVQTYNQLFEENPINASGVDAKAILSARLSKSRRLENLIAQLPGEKKNGLFGNLIALSLGLTPNFKSNFDLAEDAKLQLSKDTYDDDLDNLLAQIGDQYADLFLAAKNLSDAILLSDILRVNTEITKAPLSASMIKRYDEHHQDLTLLKALVRQQLPEKYKEIFFDQSKNGYAGYIDGGASQEEFYKFIKPILEKMDGTEELLVKLNREDLLRKQRTFDNGSIPHQIHLGELHAILRRQEDFYPFLKDNREKIEKILTFRIPYYVGPLARGNSRFAWMTRKSEETITPWNFEEVVDKGASAQSFIERMTNFDKNLPNEKVLPKHSLLYEYFTVYNELTKVKYVTEGMRKPAFLSGEQKKAIVDLLFKTNRKVTVKQLKEDYFKKIECFDSVEISGVEDRFNASLGTYHDLLKIIKDKDFLDNEENEDILEDIVLTLTLFEDREMIEERLKTYAHLFDDKVMKQLKRRRYTGWGRLSRKLINGIRDKQSGKTILDFLKSDGFANRNFMQLIHDDSLTFKEDIQKAQVSGQGDSLHEHIANLAGSPAIKKGILQTVKVVDELVKVMGRHKPENIVIEMARENQTTQKGQKNSRERMKRIEEGIKELGSQILKEHPVENTQLQNEKLYLYYLQNGRDMYVDQELDINRLSDYDVDHIVPQSFLKDDSIDNKVLTRSDKARGKSDNVPSEEVVKKMKNYWRQLLNAKLITQRKFDNLTKAERGGLSELDKAGFIKRQLVETRQITKHVAQILDSRMNTKYDENDKLIREVKVITLKSKLVSDFRKDFQFYKVREINNYHHAHDAYLNAVVGTALIKKYPKLESEFVYGDYKVYDVRKMIAKSEQEIGKATAKYFFYSNIMNFFKTEITLANGEIRKRPLIETNGETGEIVWDKGRDFATVRKVLSMPQVNIVKKTEVQTGGFSKESILPKRNSDKLIARKKDWDPKKYGGFDSPTVAYSVLVVAKVEKGKSKKLKSVKELLGITIMERSSFEKNPIDFLEAKGYKEVKKDLIIKLPKYSLFELENGRKRMLASAGELQKGNELALPSKYVNFLYLASHYEKLKGSPEDNEQKQLFVEQHKHYLDEIIEQISEFSKRVILADANLDKVLSAYNKHRDKPIREQAENIIHLFTLTNLGAPAAFKYFDTTIDRKRYTSTKEVLDATLIHQSITGLYETRIDLSQLGGDGGGGGGGSGSSGGTLQLDDEYRLYSPLVKPDQNIQFWLEQFPQAWAETAGMGLAKQVPPQVIQLKASATPVSVRQYPLSKEAQEGIRPHVQRLIQQGILVPVQSPWNTPLLPVRKPGTNDYRPVQDLREVNKRVQDIHPTVPNPYNLLCALPPQRSWYTVLDLKDAFFCLRLHPTSQPLFAFEWRDPGTGRTGQLTWTRLPQGFKNSPTIFNEALHRDLANFRIQHPQVTLLQYVDDLLLAGATKQDCLEGTKALLLELSDLGYRASAKKAQICRREVTYLGYSLRDGQRWLTEARKKTVVQIPAPTTAKQVREFLGTAGFCRLWIPGFATLAAPLYPLTKPKGEFSWAPEHQKAFDAIKKALLSAPALALPDVTKPFTLYVDERKGVARGVLTQTLGPWRRPVAYLSKKLDPVASGWPVCLKAIAAVAILVKDADKLTLGQNITVIAPHALENIVRQPPDRWMTNARMTHYQSLLLTERVTFAPPAALNPATLLPEETDEPVTHDCHQLLIEETGVRKDLTDIPLTGEVLTWFTDGSSYVVEGKRMAGAAVVDGTRTIWASSLPEGTSAQKAELMALTQALRLAEGKSINIYTDSRYAFATAHVHGAIYKQRGWLTSAGREIKNKEEILSLLEALHLPKRLAIIHCPGHQKAKDPISRGNQMADRVAKQAAQGVNLLAGKRTADGSEFEKRTADGSEFESPKKKAKVE

SEQ ID NO: 321 - protein, 2090 aa, synthetic construct; identical to SEQ ID NO: 138

SEQ ID NO: 322 - protein, 2090 aa, synthetic construct
MPAAKRVKLDGGDKKYSIGLDIGTNSVGWAVITDEYKVPSKKFKVLGNTDRHSIKKNLIGALLFDSGETAEATRLKRTARRRYTRRKNRICYLQEIFSNEMAKVDDSFFHRLEESFLVEEDKKHERHPIFGNIVDEVAYHEKYPTIYHLRKKLVDSTDKADLRLIYLALAHMIKFRGHFLIEGDLNPDNSDVDKLFIQLVQTYNQLFEENPINASGVDAKAILSARLSKSRRLENLIAQLPGEKKNGLFGNLIALSLGLTPNFKSNFDLAEDAKLQLSKDTYDDDLDNLLAQIGDQYADLFLAAKNLSDAILLSDILRVNTEITKAPLSASMIKRYDEHHQDLTLLKALVRQQLPEKYKEIFFDQSKNGYAGYIDGGASQEEFYKFIKPILEKMDGTEELLVKLNREDLLRKQRTFDNGSIPHQIHLGELHAILRRQEDFYPFLKDNREKIEKILTFRIPYYVGPLARGNSRFAWMTRKSEETITPWNFEEVVDKGASAQSFIERMTNFDKNLPNEKVLPKHSLLYEYFTVYNELTKVKYVTEGMRKPAFLSGEQKKAIVDLLFKTNRKVTVKQLKEDYFKKIECFDSVEISGVEDRFNASLGTYHDLLKIIKDKDFLDNEENEDILEDIVLTLTLFEDREMIEERLKTYAHLFDDKVMKQLKRRRYTGWGRLSRKLINGIRDKQSGKTILDFLKSDGFANRNFMQLIHDDSLTFKEDIQKAQVSGQGDSLHEHIANLAGSPAIKKGILQTVKVVDELVKVMGRHKPENIVIEMARENQTTQKGQKNSRERMKRIEEGIKELGSQILKEHPVENTQLQNEKLYLYYLQNGRDMYVDQELDINRLSDYDVDHIVPQSFLKDDSIDNKVLTRSDKARGKSDNVPSEEVVKKMKNYWRQLLNAKLITQRKFDNLTKAERGGLSELDKAGFIKRQLVETRQITKHVAQILDSRMNTKYDENDKLIREVKVITLKSKLVSDFRKDFQFYKVREINNYHHAHDAYLNAVVGTALIKKYPKLESEFVYGDYKVYDVRKMIAKSEQEIGKATAKYFFYSNIMNFFKTEITLANGEIRKRPLIETNGETGEIVWDKGRDFATVRKVLSMPQVNIVKKTEVQTGGFSKESILPKRNSDKLIARKKDWDPKKYGGFDSPTVAYSVLVVAKVEKGKSKKLKSVKELLGITIMERSSFEKNPIDFLEAKGYKEVKKDLIIKLPKYSLFELENGRKRMLASAGELQKGNELALPSKYVNFLYLASHYEKLKGSPEDNEQKQLFVEQHKHYLDEIIEQISEFSKRVILADANLDKVLSAYNKHRDKPIREQAENIIHLFTLTNLGAPAAFKYFDTTIDRKRYTSTKEVLDATLIHQSITGLYETRIDLSQLGGDGGGGGEAAAKGGSGGTLQLDDEYRLYSPLVKPDQNIQFWLEQFPQAWAETAGMGLAKQVPPQVIQLKASATPVSVRQYPLSKEAQEGIRPHVQRLIQQGILVPVQSPWNTPLLPVRKPGTNDYRPVQDLREVNKRVQDIHPTVPNPYNLLCALPPQRSWYTVLDLKDAFFCLRLHPTSQPLFAFEWRDPGTGRTGQLTWTRLPQGFKNSPTIFNEALHRDLANFRIQHPQVTLLQYVDDLLLAGATKQDCLEGTKALLLELSDLGYRASAKKAQICRREVTYLGYSLRDGQRWLTEARKKTVVQIPAPTTAKQVREFLGTAGFCRLWIPGFATLAAPLYPLTKPKGEFSWAPEHQKAFDAIKKALLSAPALALPDVTKPFTLYVDERKGVARGVLTQTLGPWRRPVAYLSKKLDPVASGWPVCLKAIAAVAILVKDADKLTLGQNITVIAPHALENIVRQPPDRWMTNARMTHYQSLLLTERVTFAPPAALNPATLLPEETDEPVTHDCHQLLIEETGVRKDLTDIPLTGEVLTWFTDGSSYVVEGKRMAGAAVVDGTRTIWASSLPEGTSAQKAELMALTQALRLAEGKSINIYTDSRYAFATAHVHGAIYKQRGWLTSAGREIKNKEEILSLLEALHLPKRLAIIHCPGHQKAKDPISRGNQMADRVAKQAAQGVNLLAGKRTADGSEFEKRTADGSEFESPKKKAKVE

SEQ ID NO: 323 - protein, 2090 aa, synthetic construct
MPAAKRVKLDGGDKKYSIGLDIGTNSVGWAVITDEYKVPSKKFKVLGNTDRHSIKKNLIGALLFDSGETAEATRLKRTARRRYTRRKNRICYLQEIFSNEMAKVDDSFFHRLEESFLVEEDKKHERHPIFGNIVDEVAYHEKYPTIYHLRKKLVDSTDKADLRLIYLALAHMIKFRGHFLIEGDLNPDNSDVDKLFIQLVQTYNQLFEENPINASGVDAKAILSARLSKSRRLENLIAQLPGEKKNGLFGNLIALSLGLTPNFKSNFDLAEDAKLQLSKDTYDDDLDNLLAQIGDQYADLFLAAKNLSDAILLSDILRVNTEITKAPLSASMIKRYDEHHQDLTLLKALVRQQLPEKYKEIFFDQSKNGYAGYIDGGASQEEFYKFIKPILEKMDGTEELLVKLNREDLLRKQRTFDNGSIPHQIHLGELHAILRRQEDFYPFLKDNREKIEKILTFRIPYYVGPLARGNSRFAWMTRKSEETITPWNFEEVVDKGASAQSFIERMTNFDKNLPNEKVLPKHSLLYEYFTVYNELTKVKYVTEGMRKPAFLSGEQKKAIVDLLFKTNRKVTVKQLKEDYFKKIECFDSVEISGVEDRFNASLGTYHDLLKIIKDKDFLDNEENEDILEDIVLTLTLFEDREMIEERLKTYAHLFDDKVMKQLKRRRYTGWGRLSRKLINGIRDKQSGKTILDFLKSDGFANRNFMQLIHDDSLTFKEDIQKAQVSGQGDSLHEHIANLAGSPAIKKGILQTVKVVDELVKVMGRHKPENIVIEMARENQTTQKGQKNSRERMKRIEEGIKELGSQILKEHPVENTQLQNEKLYLYYLQNGRDMYVDQELDINRLSDYDVDHIVPQSFLKDDSIDNKVLTRSDKARGKSDNVPSEEVVKKMKNYWRQLLNAKLITQRKFDNLTKAERGGLSELDKAGFIKRQLVETRQITKHVAQILDSRMNTKYDENDKLIREVKVITLKSKLVSDFRKDFQFYKVREINNYHHAHDAYLNAVVGTALIKKYPKLESEFVYGDYKVYDVRKMIAKSEQEIGKATAKYFFYSNIMNFFKTEITLANGEIRKRPLIETNGETGEIVWDKGRDFATVRKVLSMPQVNIVKKTEVQTGGFSKESILPKRNSDKLIARKKDWDPKKYGGFDSPTVAYSVLVVAKVEKGKSKKLKSVKELLGITIMERSSFEKNPIDFLEAKGYKEVKKDLIIKLPKYSLFELENGRKRMLASAGELQKGNELALPSKYVNFLYLASHYEKLKGSPEDNEQKQLFVEQHKHYLDEIIEQISEFSKRVILADANLDKVLSAYNKHRDKPIREQAENIIHLFTLTNLGAPAAFKYFDTTIDRKRYTSTKEVLDATLIHQSITGLYETRIDLSQLGGDGGGGSEAAAKGSSGGTLQLDDEYRLYSPLVKPDQNIQFWLEQFPQAWAETAGMGLAKQVPPQVIQLKASATPVSVRQYPLSKEAQEGIRPHVQRLIQQGILVPVQSPWNTPLLPVRKPGTNDYRPVQDLREVNKRVQDIHPTVPNPYNLLCALPPQRSWYTVLDLKDAFFCLRLHPTSQPLFAFEWRDPGTGRTGQLTWTRLPQGFKNSPTIFNEALHRDLANFRIQHPQVTLLQYVDDLLLAGATKQDCLEGTKALLLELSDLGYRASAKKAQICRREVTYLGYSLRDGQRWLTEARKKTVVQIPAPTTAKQVREFLGTAGFCRLWIPGFATLAAPLYPLTKPKGEFSWAPEHQKAFDAIKKALLSAPALALPDVTKPFTLYVDERKGVARGVLTQTLGPWRRPVAYLSKKLDPVASGWPVCLKAIAAVAILVKDADKLTLGQNITVIAPHALENIVRQPPDRWMTNARMTHYQSLLLTERVTFAPPAALNPATLLPEETDEPVTHDCHQLLIEETGVRKDLTDIPLTGEVLTWFTDGSSYVVEGKRMAGAAVVDGTRTIWASSLPEGTSAQKAELMALTQALRLAEGKSINIYTDSRYAFATAHVHGAIYKQRGWLTSAGREIKNKEEILSLLEALHLPKRLAIIHCPGHQKAKDPISRGNQMADRVAKQAAQGVNLLAGKRTADGSEFEKRTADGSEFESPKKKAKVE

SEQ ID NO: 324 - protein, 2090 aa, synthetic construct
MPAAKRVKLDGGDKKYSIGLDIGTNSVGWAVITDEYKVPSKKFKVLGNTDRHSIKKNLIGALLFDSGETAEATRLKRTARRRYTRRKNRICYLQEIFSNEMAKVDDSFFHRLEESFLVEEDKKHERHPIFGNIVDEVAYHEKYPTIYHLRKKLVDSTDKADLRLIYLALAHMIKFRGHFLIEGDLNPDNSDVDKLFIQLVQTYNQLFEENPINASGVDAKAILSARLSKSRRLENLIAQLPGEKKNGLFGNLIALSLGLTPNFKSNFDLAEDAKLQLSKDTYDDDLDNLLAQIGDQYADLFLAAKNLSDAILLSDILRVNTEITKAPLSASMIKRYDEHHQDLTLLKALVRQQLPEKYKEIFFDQSKNGYAGYIDGGASQEEFYKFIKPILEKMDGTEELLVKLNREDLLRKQRTFDNGSIPHQIHLGELHAILRRQEDFYPFLKDNREKIEKILTFRIPYYVGPLARGNSRFAWMTRKSEETITPWNFEEVVDKGASAQSFIERMTNFDKNLPNEKVLPKHSLLYEYFTVYNELTKVKYVTEGMRKPAFLSGEQKKAIVDLLFKTNRKVTVKQLKEDYFKKIECFDSVEISGVEDRFNASLGTYHDLLKIIKDKDFLDNEENEDILEDIVLTLTLFEDREMIEERLKTYAHLFDDKVMKQLKRRRYTGWGRLSRKLINGIRDKQSGKTILDFLKSDGFANRNFMQLIHDDSLTFKEDIQKAQVSGQGDSLHEHIANLAGSPAIKKGILQTVKVVDELVKVMGRHKPENIVIEMARENQTTQKGQKNSRERMKRIEEGIKELGSQILKEHPVENTQLQNEKLYLYYLQNGRDMYVDQELDINRLSDYDVDHIVPQSFLKDDSIDNKVLTRSDKARGKSDNVPSEEVVKKMKNYWRQLLNAKLITQRKFDNLTKAERGGLSELDKAGFIKRQLVETRQITKHVAQILDSRMNTKYDENDKLIREVKVITLKSKLVSDFRKDFQFYKVREINNYHHAHDAYLNAVVGTALIKKYPKLESEFVYGDYKVYDVRKMIAKSEQEIGKATAKYFFYSNIMNFFKTEITLANGEIRKRPLIETNGETGEIVWDKGRDFATVRKVLSMPQVNIVKKTEVQTGGFSKESILPKRNSDKLIARKKDWDPKKYGGFDSPTVAYSVLVVAKVEKGKSKKLKSVKELLGITIMERSSFEKNPIDFLEAKGYKEVKKDLIIKLPKYSLFELENGRKRMLASAGELQKGNELALPSKYVNFLYLASHYEKLKGSPEDNEQKQLFVEQHKHYLDEIIEQISEFSKRVILADANLDKVLSAYNKHRDKPIREQAENIIHLFTLTNLGAPAAFKYFDTTIDRKRYTSTKEVLDATLIHQSITGLYETRIDLSQLGGDGGGGGEAAAKPAPGGTLQLDDEYRLYSPLVKPDQNIQFWLEQFPQAWAETAGMGLAKQVPPQVIQLKASATPVSVRQYPLSKEAQEGIRPHVQRLIQQGILVPVQSPWNTPLLPVRKPGTNDYRPVQDLREVNKRVQDIHPTVPNPYNLLCALPPQRSWYTVLDLKDAFFCLRLHPTSQPLFAFEWRDPGTGRTGQLTWTRLPQGFKNSPTIFNEALHRDLANFRIQHPQVTLLQYVDDLLLAGATKQDCLEGTKALLLELSDLGYRASAKKAQICRREVTYLGYSLRDGQRWLTEARKKTVVQIPAPTTAKQVREFLGTAGFCRLWIPGFATLAAPLYPLTKPKGEFSWAPEHQKAFDAIKKALLSAPALALPDVTKPFTLYVDERKGVARGVLTQTLGPWRRPVAYLSKKLDPVASGWPVCLKAIAAVAILVKDADKLTLGQNITVIAPHALENIVRQPPDRWMTNARMTHYQSLLLTERVTFAPPAALNPATLLPEETDEPVTHDCHQLLIEETGVRKDLTDIPLTGEVLTWFTDGSSYVVEGKRMAGAAVVDGTRTIWASSLPEGTSAQKAELMALTQALRLAEGKSINIYTDSRYAFATAHVHGAIYKQRGWLTSAGREIKNKEEILSLLEALHLPKRLAIIHCPGHQKAKDPISRGNQMADRVAKQAAQGVNLLAGKRTADGSEFEKRTADGSEFESPKKKAKVE

SEQ ID NO: 325 - protein, 2087 aa, synthetic construct; identical to SEQ ID NO: 128

SEQ ID NO: 326 - protein, 2082 aa, synthetic construct
MPAAKRVKLDGGDKKYSIGLDIGTNSVGWAVITDEYKVPSKKFKVLGNTDRHSIKKNLIGALLFDSGETAEATRLKRTARRRYTRRKNRICYLQEIFSNEMAKVDDSFFHRLEESFLVEEDKKHERHPIFGNIVDEVAYHEKYPTIYHLRKKLVDSTDKADLRLIYLALAHMIKFRGHFLIEGDLNPDNSDVDKLFIQLVQTYNQLFEENPINASGVDAKAILSARLSKSRRLENLIAQLPGEKKNGLFGNLIALSLGLTPNFKSNFDLAEDAKLQLSKDTYDDDLDNLLAQIGDQYADLFLAAKNLSDAILLSDILRVNTEITKAPLSASMIKRYDEHHQDLTLLKALVRQQLPEKYKEIFFDQSKNGYAGYIDGGASQEEFYKFIKPILEKMDGTEELLVKLNREDLLRKQRTFDNGSIPHQIHLGELHAILRRQEDFYPFLKDNREKIEKILTFRIPYYVGPLARGNSRFAWMTRKSEETITPWNFEEVVDKGASAQSFIERMTNFDKNLPNEKVLPKHSLLYEYFTVYNELTKVKYVTEGMRKPAFLSGEQKKAIVDLLFKTNRKVTVKQLKEDYFKKIECFDSVEISGVEDRFNASLGTYHDLLKIIKDKDFLDNEENEDILEDIVLTLTLFEDREMIEERLKTYAHLFDDKVMKQLKRRRYTGWGRLSRKLINGIRDKQSGKTILDFLKSDGFANRNFMQLIHDDSLTFKEDIQKAQVSGQGDSLHEHIANLAGSPAIKKGILQTVKVVDELVKVMGRHKPENIVIEMARENQTTQKGQKNSRERMKRIEEGIKELGSQILKEHPVENTQLQNEKLYLYYLQNGRDMYVDQELDINRLSDYDVDHIVPQSFLKDDSIDNKVLTRSDKARGKSDNVPSEEVVKKMKNYWRQLLNAKLITQRKFDNLTKAERGGLSELDKAGFIKRQLVETRQITKHVAQILDSRMNTKYDENDKLIREVKVITLKSKLVSDFRKDFQFYKVREINNYHHAHDAYLNAVVGTALIKKYPKLESEFVYGDYKVYDVRKMIAKSEQEIGKATAKYFFYSNIMNFFKTEITLANGEIRKRPLIETNGETGEIVWDKGRDFATVRKVLSMPQVNIVKKTEVQTGGFSKESILPKRNSDKLIARKKDWDPKKYGGFDSPTVAYSVLVVAKVEKGKSKKLKSVKELLGITIMERSSFEKNPIDFLEAKGYKEVKKDLIIKLPKYSLFELENGRKRMLASAGELQKGNELALPSKYVNFLYLASHYEKLKGSPEDNEQKQLFVEQHKHYLDEIIEQISEFSKRVILADANLDKVLSAYNKHRDKPIREQAENIIHLFTLTNLGAPAAFKYFDTTIDRKRYTSTKEVLDATLIHQSITGLYETRIDLSQLGGDGGGGSGGTLQLDDEYRLYSPLVKPDQNIQFWLEQFPQAWAETAGMGLAKQVPPQVIQLKASATPVSVRQYPLSKEAQEGIRPHVQRLIQQGILVPVQSPWNTPLLPVRKPGTNDYRPVQDLREVNKRVQDIHPTVPNPYNLLCALPPQRSWYTVLDLKDAFFCLRLHPTSQPLFAFEWRDPGTGRTGQLTWTRLPQGFKNSPTIFNEALHRDLANFRIQHPQVTLLQYVDDLLLAGATKQDCLEGTKALLLELSDLGYRASAKKAQICRREVTYLGYSLRDGQRWLTEARKKTVVQIPAPTTAKQVREFLGTAGFCRLWIPGFATLAAPLYPLTKPKGEFSWAPEHQKAFDAIKKALLSAPALALPDVTKPFTLYVDERKGVARGVLTQTLGPWRRPVAYLSKKLDPVASGWPVCLKAIAAVAILVKDADKLTLGQNITVIAPHALENIVRQPPDRWMTNARMTHYQSLLLTERVTFAPPAALNPATLLPEETDEPVTHDCHQLLIEETGVRKDLTDIPLTGEVLTWFTDGSSYVVEGKRMAGAAVVDGTRTIWASSLPEGTSAQKAELMALTQALRLAEGKSINIYTDSRYAFATAHVHGAIYKQRGWLTSAGREIKNKEEILSLLEALHLPKRLAIIHCPGHQKAKDPISRGNQMADRVAKQAAQGVNLLAGKRTADGSEFEKRTADGSEFESPKKKAKVE

SEQ ID NO: 327 - protein, 2090 aa, synthetic construct; identical to SEQ ID NO: 132

SEQ ID NO: 328 - protein, 2095 aa, synthetic construct; identical to SEQ ID NO: 122

SEQ ID NO: 329 - protein, 2085 aa, synthetic construct; identical to SEQ ID NO: 143

SEQ ID NO: 330 - protein, 2090 aa, synthetic construct; identical to SEQ ID NO: 160

SEQ ID NO: 331 - protein, 2090 aa, synthetic construct
MPAAKRVKLDGGDKKYSIGLDIGTNSVGWAVITDEYKVPSKKFKVLGNTDRHSIKKNLIGALLFDSGETAEATRLKRTARRRYTRRKNRICYLQEIFSNEMAKVDDSFFHRLEESFLVEEDKKHERHPIFGNIVDEVAYHEKYPTIYHLRKKLVDSTDKADLRLIYLALAHMIKFRGHFLIEGDLNPDNSDVDKLFIQLVQTYNQLFEENPINASGVDAKAILSARLSKSRRLENLIAQLPGEKKNGLFGNLIALSLGLTPNFKSNFDLAEDAKLQLSKDTYDDDLDNLLAQIGDQYADLFLAAKNLSDAILLSDILRVNTEITKAPLSASMIKRYDEHHQDLTLLKALVRQQLPEKYKEIFFDQSKNGYAGYIDGGASQEEFYKFIKPILEKMDGTEELLVKLNREDLLRKQRTFDNGSIPHQIHLGELHAILRRQEDFYPFLKDNREKIEKILTFRIPYYVGPLARGNSRFAWMTRKSEETITPWNFEEVVDKGASAQSFIERMTNFDKNLPNEKVLPKHSLLYEYFTVYNELTKVKYVTEGMRKPAFLSGEQKKAIVDLLFKTNRKVTVKQLKEDYFKKIECFDSVEISGVEDRFNASLGTYHDLLKIIKDKDFLDNEENEDILEDIVLTLTLFEDREMIEERLKTYAHLFDDKVMKQLKRRRYTGWGRLSRKLINGIRDKQSGKTILDFLKSDGFANRNFMQLIHDDSLTFKEDIQKAQVSGQGDSLHEHIANLAGSPAIKKGILQTVKVVDELVKVMGRHKPENIVIEMARENQTTQKGQKNSRERMKRIEEGIKELGSQILKEHPVENTQLQNEKLYLYYLQNGRDMYVDQELDINRLSDYDVDHIVPQSFLKDDSIDNKVLTRSDKARGKSDNVPSEEVVKKMKNYWRQLLNAKLITQRKFDNLTKAERGGLSELDKAGFIKRQLVETRQITKHVAQILDSRMNTKYDENDKLIREVKVITLKSKLVSDFRKDFQFYKVREINNYHHAHDAYLNAVVGTALIKKYPKLESEFVYGDYKVYDVRKMIAKSEQEIGKATAKYFFYSNIMNFFKTEITLANGEIRKRPLIETNGETGEIVWDKGRDFATVRKVLSMPQVNIVKKTEVQTGGFSKESILPKRNSDKLIARKKDWDPKKYGGFDSPTVAYSVLVVAKVEKGKSKKLKSVKELLGITIMERSSFEKNPIDFLEAKGYKEVKKDLIIKLPKYSLFELENGRKRMLASAGELQKGNELALPSKYVNFLYLASHYEKLKGSPEDNEQKQLFVEQHKHYLDEIIEQISEFSKRVILADANLDKVLSAYNKHRDKPIREQAENIIHLFTLTNLGAPAAFKYFDTTIDRKRYTSTKEVLDATLIHQSITGLYETRIDLSQLGGDGGPAPEAAAKGGSGGTLQLDDEYRLYSPLVKPDQNIQFWLEQFPQAWAETAGMGLAKQVPPQVIQLKASATPVSVRQYPLSKEAQEGIRPHVQRLIQQGILVPVQSPWNTPLLPVRKPGTNDYRPVQDLREVNKRVQDIHPTVPNPYNLLCALPPQRSWYTVLDLKDAFFCLRLHPTSQPLFAFEWRDPGTGRTGQLTWTRLPQGFKNSPTIFNEALHRDLANFRIQHPQVTLLQYVDDLLLAGATKQDCLEGTKALLLELSDLGYRASAKKAQICRREVTYLGYSLRDGQRWLTEARKKTVVQIPAPTTAKQVREFLGTAGFCRLWIPGFATLAAPLYPLTKPKGEFSWAPEHQKAFDAIKKALLSAPALALPDVTKPFTLYVDERKGVARGVLTQTLGPWRRPVAYLSKKLDPVASGWPVCLKAIAAVAILVKDADKLTLGQNITVIAPHALENIVRQPPDRWMTNARMTHYQSLLLTERVTFAPPAALNPATLLPEETDEPVTHDCHQLLIEETGVRKDLTDIPLTGEVLTWFTDGSSYVVEGKRMAGAAVVDGTRTIWASSLPEGTSAQKAELMALTQALRLAEGKSINIYTDSRYAFATAHVHGAIYKQRGWLTSAGREIKNKEEILSLLEALHLPKRLAIIHCPGHQKAKDPISRGNQMADRVAKQAAQGVNLLAGKRTADGSEFEKRTADGSEFESPKKKAKVE

SEQ ID NO: 332 - protein, 2085 aa, synthetic construct
MPAAKRVKLDGGDKKYSIGLDIGTNSVGWAVITDEYKVPSKKFKVLGNTDRHSIKKNLIGALLFDSGETAEATRLKRTARRRYTRRKNRICYLQEIFSNEMAKVDDSFFHRLEESFLVEEDKKHERHPIFGNIVDEVAYHEKYPTIYHLRKKLVDSTDKADLRLIYLALAHMIKFRGHFLIEGDLNPDNSDVDKLFIQLVQTYNQLFEENPINASGVDAKAILSARLSKSRRLENLIAQLPGEKKNGLFGNLIALSLGLTPNFKSNFDLAEDAKLQLSKDTYDDDLDNLLAQIGDQYADLFLAAKNLSDAILLSDILRVNTEITKAPLSASMIKRYDEHHQDLTLLKALVRQQLPEKYKEIFFDQSKNGYAGYIDGGASQEEFYKFIKPILEKMDGTEELLVKLNREDLLRKQRTFDNGSIPHQIHLGELHAILRRQEDFYPFLKDNREKIEKILTFRIPYYVGPLARGNSRFAWMTRKSEETITPWNFEEVVDKGASAQSFIERMTNFDKNLPNEKVLPKHSLLYEYFTVYNELTKVKYVTEGMRKPAFLSGEQKKAIVDLLFKTNRKVTVKQLKEDYFKKIECFDSVEISGVEDRFNASLGTYHDLLKIIKDKDFLDNEENEDILEDIVLTLTLFEDREMIEERLKTYAHLFDDKVMKQLKRRRYTGWGRLSRKLINGIRDKQSGKTILDFLKSDGFANRNFMQLIHDDSLTFKEDIQKAQVSGQGDSLHEHIANLAGSPAIKKGILQTVKVVDELVKVMGRHKPENIVIEMARENQTTQKGQKNSRERMKRIEEGIKELGSQILKEHPVENTQLQNEKLYLYYLQNGRDMYVDQELDINRLSDYDVDHIVPQSFLKDDSIDNKVLTRSDKARGKSDNVPSEEVVKKMKNYWRQLLNAKLITQRKFDNLTKAERGGLSELDKAGFIKRQLVETRQITKHVAQILDSRMNTKYDENDKLIREVKVITLKSKLVSDFRKDFQFYKVREINNYHHAHDAYLNAVVGTALIKKYPKLESEFVYGDYKVYDVRKMIAKSEQEIGKATAKYFFYSNIMNFFKTEITLANGEIRKRPLIETNGETGEIVWDKGRDFATVRKVLSMPQVNIVKKTEVQTGGFSKESILPKRNSDKLIARKKDWDPKKYGGFDSPTVAYSVLVVAKVEKGKSKKLKSVKELLGITIMERSSFEKNPIDFLEAKGYKEVKKDLIIKLPKYSLFELENGRKRMLASAGELQKGNELALPSKYVNFLYLASHYEKLKGSPEDNEQKQLFVEQHKHYLDEIIEQISEFSKRVILADANLDKVLSAYNKHRDKPIREQAENIIHLFTLTNLGAPAAFKYFDTTIDRKRYTSTKEVLDATLIHQSITGLYETRIDLSQLGGDGGPAPGGGGGTLQLDDEYRLYSPLVKPDQNIQFWLEQFPQAWAETAGMGLAKQVPPQVIQLKASATPVSVRQYPLSKEAQEGIRPHVQRLIQQGILVPVQSPWNTPLLPVRKPGTNDYRPVQDLREVNKRVQDIHPTVPNPYNLLCALPPQRSWYTVLDLKDAFFCLRLHPTSQPLFAFEWRDPGTGRTGQLTWTRLPQGFKNSPTIFNEALHRDLANFRIQHPQVTLLQYVDDLLLAGATKQDCLEGTKALLLELSDLGYRASAKKAQICRREVTYLGYSLRDGQRWLTEARKKTVVQIPAPTTAKQVREFLGTAGFCRLWIPGFATLAAPLYPLTKPKGEFSWAPEHQKAFDAIKKALLSAPALALPDVTKPFTLYVDERKGVARGVLTQTLGPWRRPVAYLSKKLDPVASGWPVCLKAIAAVAILVKDADKLTLGQNITVIAPHALENIVRQPPDRWMTNARMTHYQSLLLTERVTFAPPAALNPATLLPEETDEPVTHDCHQLLIEETGVRKDLTDIPLTGEVLTWFTDGSSYVVEGKRMAGAAVVDGTRTIWASSLPEGTSAQKAELMALTQALRLAEGKSINIYTDSRYAFATAHVHGAIYKQRGWLTSAGREIKNKEEILSLLEALHLPKRLAIIHCPGHQKAKDPISRGNQMADRVAKQAAQGVNLLAGKRTADGSEFEKRTADGSEFESPKKKAKVE

SEQ ID NO: 333 - protein, 2083 aa, synthetic construct; identical to SEQ ID NO: 149

SEQ ID NO: 334 - protein, 2090 aa, synthetic construct; identical to SEQ ID NO: 146

SEQ ID NO: 335 - protein, 2087 aa, synthetic construct; identical to SEQ ID NO: 158

SEQ ID NO: 336 - protein, 2088 aa, synthetic construct
MPAAKRVKLDGGDKKYSIGLDIGTNSVGWAVITDEYKVPSKKFKVLGNTDRHSIKKNLIGALLFDSGETAEATRLKRTARRRYTRRKNRICYLQEIFSNEMAKVDDSFFHRLEESFLVEEDKKHERHPIFGNIVDEVAYHEKYPTIYHLRKKLVDSTDKADLRLIYLALAHMIKFRGHFLIEGDLNPDNSDVDKLFIQLVQTYNQLFEENPINASGVDAKAILSARLSKSRRLENLIAQLPGEKKNGLFGNLIALSLGLTPNFKSNFDLAEDAKLQLSKDTYDDDLDNLLAQIGDQYADLFLAAKNLSDAILLSDILRVNTEITKAPLSASMIKRYDEHHQDLTLLKALVRQQLPEKYKEIFFDQSKNGYAGYIDGGASQEEFYKFIKPILEKMDGTEELLVKLNREDLLRKQRTFDNGSIPHQIHLGELHAILRRQEDFYPFLKDNREKIEKILTFRIPYYVGPLARGNSRFAWMTRKSEETITPWNFEEVVDKGASAQSFIERMTNFDKNLPNEKVLPKHSLLYEYFTVYNELTKVKYVTEGMRKPAFLSGEQKKAIVDLLFKTNRKVTVKQLKEDYFKKIECFDSVEISGVEDRFNASLGTYHDLLKIIKDKDFLDNEENEDILEDIVLTLTLFEDREMIEERLKTYAHLFDDKVMKQLKRRRYTGWGRLSRKLINGIRDKQSGKTILDFLKSDGFANRNFMQLIHDDSLTFKEDIQKAQVSGQGDSLHEHIANLAGSPAIKKGILQTVKVVDELVKVMGRHKPENIVIEMARENQTTQKGQKNSRERMKRIEEGIKELGSQILKEHPVENTQLQNEKLYLYYLQNGRDMYVDQELDINRLSDYDVDHIVPQSFLKDDSIDNKVLTRSDKARGKSDNVPSEEVVKKMKNYWRQLLNAKLITQRKFDNLTKAERGGLSELDKAGFIKRQLVETRQITKHVAQILDSRMNTKYDENDKLIREVKVITLKSKLVSDFRKDFQFYKVREINNYHHAHDAYLNAVVGTALIKKYPKLESEFVYGDYKVYDVRKMIAKSEQEIGKATAKYFFYSNIMNFFKTEITLANGEIRKRPLIETNGETGEIVWDKGRDFATVRKVLSMPQVNIVKKTEVQTGGFSKESILPKRNSDKLIARKKDWDPKKYGGFDSPTVAYSVLVVAKVEKGKSKKLKSVKELLGITIMERSSFEKNPIDFLEAKGYKEVKKDLIIKLPKYSLFELENGRKRMLASAGELQKGNELALPSKYVNFLYLASHYEKLKGSPEDNEQKQLFVEQHKHYLDEIIEQISEFSKRVILADANLDKVLSAYNKHRDKPIREQAENIIHLFTLTNLGAPAAFKYFDTTIDRKRYTSTKEVLDATLIHQSITGLYETRIDLSQLGGDGGGGSGGGGSSGGTLQLDDEYRLYSPLVKPDQNIQFWLEQFPQAWAETAGMGLAKQVPPQVIQLKASATPVSVRQYPLSKEAQEGIRPHVQRLIQQGILVPVQSPWNTPLLPVRKPGTNDYRPVQDLREVNKRVQDIHPTVPNPYNLLCALPPQRSWYTVLDLKDAFFCLRLHPTSQPLFAFEWRDPGTGRTGQLTWTRLPQGFKNSPTIFNEALHRDLANFRIQHPQVTLLQYVDDLLLAGATKQDCLEGTKALLLELSDLGYRASAKKAQICRREVTYLGYSLRDGQRWLTEARKKTVVQIPAPTTAKQVREFLGTAGFCRLWIPGFATLAAPLYPLTKPKGEFSWAPEHQKAFDAIKKALLSAPALALPDVTKPFTLYVDERKGVARGVLTQTLGPWRRPVAYLSKKLDPVASGWPVCLKAIAAVAILVKDADKLTLGQNITVIAPHALENIVRQPPDRWMTNARMTHYQSLLLTERVTFAPPAALNPATLLPEETDEPVTHDCHQLLIEETGVRKDLTDIPLTGEVLTWFTDGSSYVVEGKRMAGAAVVDGTRTIWASSLPEGTSAQKAELMALTQALRLAEGKSINIYTDSRYAFATAHVHGAIYKQRGWLTSAGREIKNKEEILSLLEALHLPKRLAIIHCPGHQKAKDPISRGNQMADRVAKQAAQGVNLLAGKRTADGSEFEKRTADGSEFESPKKKAKVE

SEQ ID NO: 337 - protein, 2104 aa, synthetic construct; identical to SEQ ID NO: 150

SEQ ID NO: 338 - protein, 2088 aa, synthetic construct; identical to SEQ ID NO: 169

SEQ ID NO: 339 - protein, 2088 aa, synthetic construct; identical to SEQ ID NO: 162

SEQ ID NO: 340 - protein, 2088 aa, synthetic construct; identical to SEQ ID NO: 173

SEQ ID NO: 341 - protein, 2090 aa, synthetic construct; identical to SEQ ID NO: 141

SEQ ID NO: 342 - protein, 2094 aa, synthetic construct
MPAAKRVKLDGGDKKYSIGLDIGTNSVGWAVITDEYKVPSKKFKVLGNTDRHSIKKNLIGALLFDSGETAEATRLKRTARRRYTRRKNRICYLQEIFSNEMAKVDDSFFHRLEESFLVEEDKKHERHPIFGNIVDEVAYHEKYPTIYHLRKKLVDSTDKADLRLIYLALAHMIKFRGHFLIEGDLNPDNSDVDKLFIQLVQTYNQLFEENPINASGVDAKAILSARLSKSRRLENLIAQLPGEKKNGLFGNLIALSLGLTPNFKSNFDLAEDAKLQLSKDTYDDDLDNLLAQIGDQYADLFLAAKNLSDAILLSDILRVNTEITKAPLSASMIKRYDEHHQDLTLLKALVRQQLPEKYKEIFFDQSKNGYAGYIDGGASQEEFYKFIKPILEKMDGTEELLVKLNREDLLRKQRTFDNGSIPHQIHLGELHAILRRQEDFYPFLKDNREKIEKILTFRIPYYVGPLARGNSRFAWMTRKSEETITPWNFEEVVDKGASAQSFIERMTNFDKNLPNEKVLPKHSLLYEYFTVYNELTKVKYVTEGMRKPAFLSGEQKKAIVDLLFKTNRKVTVKQLKEDYFKKIECFDSVEISGVEDRFNASLGTYHDLLKIIKDKDFLDNEENEDILEDIVLTLTLFEDREMIEERLKTYAHLFDDKVMKQLKRRRYTGWGRLSRKLINGIRDKQSGKTILDFLKSDGFANRNFMQLIHDDSLTFKEDIQKAQVSGQGDSLHEHIANLAGSPAIKKGILQTVKVVDELVKVMGRHKPENIVIEMARENQTTQKGQKNSRERMKRIEEGIKELGSQILKEHPVENTQLQNEKLYLYYLQNGRDMYVDQELDINRLSDYDVDHIVPQSFLKDDSIDNKVLTRSDKARGKSDNVPSEEVVKKMKNYWRQLLNAKLITQRKFDNLTKAERGGLSELDKAGFIKRQLVETRQITKHVAQILDSRMNTKYDENDKLIREVKVITLKSKLVSDFRKDFQFYKVREINNYHHAHDAYLNAVVGTALIKKYPKLESEFVYGDYKVYDVRKMIAKSEQEIGKATAKYFFYSNIMNFFKTEITLANGEIRKRPLIETNGETGEIVWDKGRDFATVRKVLSMPQVNIVKKTEVQTGGFSKESILPKRNSDKLIARKKDWDPKKYGGFDSPTVAYSVLVVAKVEKGKSKKLKSVKELLGITIMERSSFEKNPIDFLEAKGYKEVKKDLIIKLPKYSLFELENGRKRMLASAGELQKGNELALPSKYVNFLYLASHYEKLKGSPEDNEQKQLFVEQHKHYLDEIIEQISEFSKRVILADANLDKVLSAYNKHRDKPIREQAENIIHLFTLTNLGAPAAFKYFDTTIDRKRYTSTKEVLDATLIHQSITGLYETRIDLSQLGGDGGEAAAKGGGGSEAAAKGGTLQLDDEYRLYSPLVKPDQNIQFWLEQFPQAWAETAGMGLAKQVPPQVIQLKASATPVSVRQYPLSKEAQEGIRPHVQRLIQQGILVPVQSPWNTPLLPVRKPGTNDYRPVQDLREVNKRVQDIHPTVPNPYNLLCALPPQRSWYTVLDLKDAFFCLRLHPTSQPLFAFEWRDPGTGRTGQLTWTRLPQGFKNSPTIFNEALHRDLANFRIQHPQVTLLQYVDDLLLAGATKQDCLEGTKALLLELSDLGYRASAKKAQICRREVTYLGYSLRDGQRWLTEARKKTVVQIPAPTTAKQVREFLGTAGFCRLWIPGFATLAAPLYPLTKPKGEFSWAPEHQKAFDAIKKALLSAPALALPDVTKPFTLYVDERKGVARGVLTQTLGPWRRPVAYLSKKLDPVASGWPVCLKAIAAVAILVKDADKLTLGQNITVIAPHALENIVRQPPDRWMTNARMTHYQSLLLTERVTFAPPAALNPATLLPEETDEPVTHDCHQLLIEETGVRKDLTDIPLTGEVLTWFTDGSSYVVEGKRMAGAAVVDGTRTIWASSLPEGTSAQKAELMALTQALRLAEGKSINIYTDSRYAFATAHVHGAIYKQRGWLTSAGREIKNKEEILSLLEALHLPKRLAIIHCPGHQKAKDPISRGNQMADRVAKQAAQGVNLLAGKRTADGSEFEKRTADGSEFESPKKKAKVE

SEQ ID NO: 343 - protein, 2087 aa, synthetic construct
MPAAKRVKLDGGDKKYSIGLDIGTNSVGWAVITDEYKVPSKKFKVLGNTDRHSIKKNLIGALLFDSGETAEATRLKRTARRRYTRRKNRICYLQEIFSNEMAKVDDSFFHRLEESFLVEEDKKHERHPIFGNIVDEVAYHEKYPTIYHLRKKLVDSTDKADLRLIYLALAHMIKFRGHFLIEGDLNPDNSDVDKLFIQLVQTYNQLFEENPINASGVDAKAILSARLSKSRRLENLIAQLPGEKKNGLFGNLIALSLGLTPNFKSNFDLAEDAKLQLSKDTYDDDLDNLLAQIGDQYADLFLAAKNLSDAILLSDILRVNTEITKAPLSASMIKRYDEHHQDLTLLKALVRQQLPEKYKEIFFDQSKNGYAGYIDGGASQEEFYKFIKPILEKMDGTEELLVKLNREDLLRKQRTFDNGSIPHQIHLGELHAILRRQEDFYPFLKDNREKIEKILTFRIPYYVGPLARGNSRFAWMTRKSEETITPWNFEEVVDKGASAQSFIERMTNFDKNLPNEKVLPKHSLLYEYFTVYNELTKVKYVTEGMRKPAFLSGEQKKAIVDLLFKTNRKVTVKQLKEDYFKKIECFDSVEISGVEDRFNASLGTYHDLLKIIKDKDFLDNEENEDILEDIVLTLTLFEDREMIEERLKTYAHLFDDKVMKQLKRRRYTGWGRLSRKLINGIRDKQSGKTILDFLKSDGFANRNFMQLIHDDSLTFKEDIQKAQVSGQGDSLHEHIANLAGSPAIKKGILQTVKVVDELVKVMGRHKPENIVIEMARENQTTQKGQKNSRERMKRIEEGIKELGSQILKEHPVENTQLQNEKLYLYYLQNGRDMYVDQELDINRLSDYDVDHIVPQSFLKDDSIDNKVLTRSDKARGKSDNVPSEEVVKKMKNYWRQLLNAKLITQRKFDNLTKAERGGLSELDKAGFIKRQLVETRQITKHVAQILDSRMNTKYDENDKLIREVKVITLKSKLVSDFRKDFQFYKVREINNYHHAHDAYLNAVVGTALIKKYPKLESEFVYGDYKVYDVRKMIAKSEQEIGKATAKYFFYSNIMNFFKTEITLANGEIRKRPLIETNGETGEIVWDKGRDFATVRKVLSMPQVNIVKKTEVQTGGFSKESILPKRNSDKLIARKKDWDPKKYGGFDSPTVAYSVLVVAKVEKGKSKKLKSVKELLGITIMERSSFEKNPIDFLEAKGYKEVKKDLIIKLPKYSLFELENGRKRMLASAGELQKGNELALPSKYVNFLYLASHYEKLKGSPEDNEQKQLFVEQHKHYLDEIIEQISEFSKRVILADANLDKVLSAYNKHRDKPIREQAENIIHLFTLTNLGAPAAFKYFDTTIDRKRYTSTKEVLDATLIHQSITGLYETRIDLSQLGGDGGEAAAKPAPGGTLQLDDEYRLYSPLVKPDQNIQFWLEQFPQAWAETAGMGLAKQVPPQVIQLKASATPVSVRQYPLSKEAQEGIRPHVQRLIQQGILVPVQSPWNTPLLPVRKPGTNDYRPVQDLREVNKRVQDIHPTVPNPYNLLCALPPQRSWYTVLDLKDAFFCLRLHPTSQPLFAFEWRDPGTGRTGQLTWTRLPQGFKNSPTIFNEALHRDLANFRIQHPQVTLLQYVDDLLLAGATKQDCLEGTKALLLELSDLGYRASAKKAQICRREVTYLGYSLRDGQRWLTEARKKTVVQIPAPTTAKQVREFLGTAGFCRLWIPGFATLAAPLYPLTKPKGEFSWAPEHQKAFDAIKKALLSAPALALPDVTKPFTLYVDERKGVARGVLTQTLGPWRRPVAYLSKKLDPVASGWPVCLKAIAAVAILVKDADKLTLGQNITVIAPHALENIVRQPPDRWMTNARMTHYQSLLLTERVTFAPPAALNPATLLPEETDEPVTHDCHQLLIEETGVRKDLTDIPLTGEVLTWFTDGSSYVVEGKRMAGAAVVDGTRTIWASSLPEGTSAQKAELMALTQALRLAEGKSINIYTDSRYAFATAHVHGAIYKQRGWLTSAGREIKNKEEILSLLEALHLPKRLAIIHCPGHQKAKDPISRGNQMADRVAKQAAQGVNLLAGKRTADGSEFEKRTADGSEFESPKKKAKVE

SEQ ID NO: 344 - protein, 2088 aa, synthetic construct; identical to SEQ ID NO: 131

SEQ ID NO: 345 - protein, 2085 aa, synthetic construct
MPAAKRVKLDGGDKKYSIGLDIGTNSVGWAVITDEYKVPSKKFKVLGNTDRHSIKKNLIGALLFDSGETAEATRLKRTARRRYTRRKNRICYLQEIFSNEMAKVDDSFFHRLEESFLVEEDKKHERHPIFGNIVDEVAYHEKYPTIYHLRKKLVDSTDKADLRLIYLALAHMIKFRGHFLIEGDLNPDNSDVDKLFIQLVQTYNQLFEENPINASGVDAKAILSARLSKSRRLENLIAQLPGEKKNGLFGNLIALSLGLTPNFKSNFDLAEDAKLQLSKDTYDDDLDNLLAQIGDQYADLFLAAKNLSDAILLSDILRVNTEITKAPLSASMIKRYDEHHQDLTLLKALVRQQLPEKYKEIFFDQSKNGYAGYIDGGASQEEFYKFIKPILEKMDGTEELLVKLNREDLLRKQRTFDNGSIPHQIHLGELHAILRRQEDFYPFLKDNREKIEKILTFRIPYYVGPLARGNSRFAWMTRKSEETITPWNFEEVVDKGASAQSFIERMTNFDKNLPNEKVLPKHSLLYEYFTVYNELTKVKYVTEGMRKPAFLSGEQKKAIVDLLFKTNRKVTVKQLKEDYFKKIECFDSVEISGVEDRFNASLGTYHDLLKIIKDKDFLDNEENEDILEDIVLTLTLFEDREMIEERLKTYAHLFDDKVMKQLKRRRYTGWGRLSRKLINGIRDKQSGKTILDFLKSDGFANRNFMQLIHDDSLTFKEDIQKAQVSGQGDSLHEHIANLAGSPAIKKGILQTVKVVDELVKVMGRHKPENIVIEMARENQTTQKGQKNSRERMKRIEEGIKELGSQILKEHPVENTQLQNEKLYLYYLQNGRDMYVDQELDINRLSDYDVDHIVPQSFLKDDSIDNKVLTRSDKARGKSDNVPSEEVVKKMKNYWRQLLNAKLITQRKFDNLTKAERGGLSELDKAGFIKRQLVETRQITKHVAQILDSRMNTKYDENDKLIREVKVITLKSKLVSDFRKDFQFYKVREINNYHHAHDAYLNAVVGTALIKKYPKLESEFVYGDYKVYDVRKMIAKSEQEIGKATAKYFFYSNIMNFFKTEITLANGEIRKRPLIETNGETGEIVWDKGRDFATVRKVLSMPQVNIVKKTEVQTGGFSKESILPKRNSDKLIARKKDWDPKKYGGFDSPTVAYSVLVVAKVEKGKSKKLKSVKELLGITIMERSSFEKNPIDFLEAKGYKEVKKDLIIKLPKYSLFELENGRKRMLASAGELQKGNELALPSKYVNFLYLASHYEKLKGSPEDNEQKQLFVEQHKHYLDEIIEQISEFSKRVILADANLDKVLSAYNKHRDKPIREQAENIIHLFTLTNLGAPAAFKYFDTTIDRKRYTSTKEVLDATLIHQSITGLYETRIDLSQLGGDGGGGSPAPGGTLQLDDEYRLYSPLVKPDQNIQFWLEQFPQAWAETAGMGLAKQVPPQVIQLKASATPVSVRQYPLSKEAQEGIRPHVQRLIQQGILVPVQSPWNTPLLPVRKPGTNDYRPVQDLREVNKRVQDIHPTVPNPYNLLCALPPQRSWYTVLDLKDAFFCLRLHPTSQPLFAFEWRDPGTGRTGQLTWTRLPQGFKNSPTIFNEALHRDLANFRIQHPQVTLLQYVDDLLLAGATKQDCLEGTKALLLELSDLGYRASAKKAQICRREVTYLGYSLRDGQRWLTEARKKTVVQIPAPTTAKQVREFLGTAGFCRLWIPGFATLAAPLYPLTKPKGEFSWAPEHQKAFDAIKKALLSAPALALPDVTKPFTLYVDERKGVARGVLTQTLGPWRRPVAYLSKKLDPVASGWPVCLKAIAAVAILVKDADKLTLGQNITVIAPHALENIVRQPPDRWMTNARMTHYQSLLLTERVTFAPPAALNPATLLPEETDEPVTHDCHQLLIEETGVRKDLTDIPLTGEVLTWFTDGSSYVVEGKRMAGAAVVDGTRTIWASSLPEGTSAQKAELMALTQALRLAEGKSINIYTDSRYAFATAHVHGAIYKQRGWLTSAGREIKNKEEILSLLEALHLPKRLAIIHCPGHQKAKDPISRGNQMADRVAKQAAQGVNLLAGKRTADGSEFEKRTADGSEFESPKKKAKVE

SEQ ID NO: 346 - protein, 2090 aa, synthetic construct
MPAAKRVKLDGGDKKYSIGLDIGTNSVGWAVITDEYKVPSKKFKVLGNTDRHSIKKNLIGALLFDSGETAEATRLKRTARRRYTRRKNRICYLQEIFSNEMAKVDDSFFHRLEESFLVEEDKKHERHPIFGNIVDEVAYHEKYPTIYHLRKKLVDSTDKADLRLIYLALAHMIKFRGHFLIEGDLNPDNSDVDKLFIQLVQTYNQLFEENPINASGVDAKAILSARLSKSRRLENLIAQLPGEKKNGLFGNLIALSLGLTPNFKSNFDLAEDAKLQLSKDTYDDDLDNLLAQIGDQYADLFLAAKNLSDAILLSDILRVNTEITKAPLSASMIKRYDEHHQDLTLLKALVRQQLPEKYKEIFFDQSKNGYAGYIDGGASQEEFYKFIKPILEKMDGTEELLVKLNREDLLRKQRTFDNGSIPHQIHLGELHAILRRQEDFYPFLKDNREKIEKILTFRIPYYVGPLARGNSRFAWMTRKSEETITPWNFEEVVDKGASAQSFIERMTNFDKNLPNEKVLPKHSLLYEYFTVYNELTKVKYVTEGMRKPAFLSGEQKKAIVDLLFKTNRKVTVKQLKEDYFKKIECFDSVEISGVEDRFNASLGTYHDLLKIIKDKDFLDNEENEDILEDIVLTLTLFEDREMIEERLKTYAHLFDDKVMKQLKRRRYTGWGRLSRKLINGIRDKQSGKTILDFLKSDGFANRNFMQLIHDDSLTFKEDIQKAQVSGQGDSLHEHIANLAGSPAIKKGILQTVKVVDELVKVMGRHKPENIVIEMARENQTTQKGQKNSRERMKRIEEGIKELGSQILKEHPVENTQLQNEKLYLYYLQNGRDMYVDQELDINRLSDYDVDHIVPQSFLKDDSIDNKVLTRSDKARGKSDNVPSEEVVKKMKNYWRQLLNAKLITQRKFDNLTKAERGGLSELDKAGFIKRQLVETRQITKHVAQILDSRMNTKYDENDKLIREVKVITLKSKLVSDFRKDFQFYKVREINNYHHAHDAYLNAVVGTALIKKYPKLESEFVYGDYKVYDVRKMIAKSEQEIGKATAKYFFYSNIMNFFKTEITLANGEIRKRPLIETNGETGEIVWDKGRDFATVRKVLSMPQVNIVKKTEVQTGGFSKESILPKRNSDKLIARKKDWDPKKYGGFDSPTVAYSVLVVAKVEKGKSKKLKSVKELLGITIMERSSFEKNPIDFLEAKGYKEVKKDLIIKLPKYSLFELENGRKRMLASAGELQKGNELALPSKYVNFLYLASHYEKLKGSPEDNEQKQLFVEQHKHYLDEIIEQISEFSKRVILADANLDKVLSAYNKHRDKPIREQAENIIHLFTLTNLGAPAAFKYFDTTIDRKRYTSTKEVLDATLIHQSITGLYETRIDLSQLGGDGGGGGPAPEAAAKGGTLQLDDEYRLYSPLVKPDQNIQFWLEQFPQAWAETAGMGLAKQVPPQVIQLKASATPVSVRQYPLSKEAQEGIRPHVQRLIQQGILVPVQSPWNTPLLPVRKPGTNDYRPVQDLREVNKRVQDIHPTVPNPYNLLCALPPQRSWYTVLDLKDAFFCLRLHPTSQPLFAFEWRDPGTGRTGQLTWTRLPQGFKNSPTIFNEALHRDLANFRIQHPQVTLLQYVDDLLLAGATKQDCLEGTKALLLELSDLGYRASAKKAQICRREVTYLGYSLRDGQRWLTEARKKTVVQIPAPTTAKQVREFLGTAGFCRLWIPGFATLAAPLYPLTKPKGEFSWAPEHQKAFDAIKKALLSAPALALPDVTKPFTLYVDERKGVARGVLTQTLGPWRRPVAYLSKKLDPVASGWPVCLKAIAAVAILVKDADKLTLGQNITVIAPHALENIVRQPPDRWMTNARMTHYQSLLLTERVTFAPPAALNPATLLPEETDEPVTHDCHQLLIEETGVRKDLTDIPLTGEVLTWFTDGSSYVVEGKRMAGAAVVDGTRTIWASSLPEGTSAQKAELMALTQALRLAEGKSINIYTDSRYAFATAHVHGAIYKQRGWLTSAGREIKNKEEILSLLEALHLPKRLAIIHCPGHQKAKDPISRGNQMADRVAKQAAQGVNLLAGKRTADGSEFEKRTADGSEFESPKKKAKVE

SEQ ID NO: 347 - protein, 2082 aa, synthetic construct; identical to SEQ ID NO: 177

SEQ ID NO: 348 - protein, 2090 aa, synthetic construct
MPAAKRVKLDGGDKKYSIGLDIGTNSVGWAVITDEYKVPSKKFKVLGNTDRHSIKKNLIGALLFDSGETAEATRLKRTARRRYTRRKNRICYLQEIFSNEMAKVDDSFFHRLEESFLVEEDKKHERHPIFGNIVDEVAYHEKYPTIYHLRKKLVDSTDKADLRLIYLALAHMIKFRGHFLIEGDLNPDNSDVDKLFIQLVQTYNQLFEENPINASGVDAKAILSARLSKSRRLENLIAQLPGEKKNGLFGNLIALSLGLTPNFKSNFDLAEDAKLQLSKDTYDDDLDNLLAQIGDQYADLFLAAKNLSDAILLSDILRVNTEITKAPLSASMIKRYDEHHQDLTLLKALVRQQLPEKYKEIFFDQSKNGYAGYIDGGASQEEFYKFIKPILEKMDGTEELLVKLNREDLLRKQRTFDNGSIPHQIHLGELHAILRRQEDFYPFLKDNREKIEKILTFRIPYYVGPLARGNSRFAWMTRKSEETITPWNFEEVVDKGASAQSFIERMTNFDKNLPNEKVLPKHSLLYEYFTVYNELTKVKYVTEGMRKPAFLSGEQKKAIVDLLFKTNRKVTVKQLKEDYFKKIECFDSVEISGVEDRFNASLGTYHDLLKIIKDKDFLDNEENEDILEDIVLTLTLFEDREMIEERLKTYAHLFDDKVMKQLKRRRYTGWGRLSRKLINGIRDKQSGKTILDFLKSDGFANRNFMQLIHDDSLTFKEDIQKAQVSGQGDSLHEHIANLAGSPAIKKGILQTVKVVDELVKVMGRHKPENIVIEMARENQTTQKGQKNSRERMKRIEEGIKELGSQILKEHPVENTQLQNEKLYLYYLQNGRDMYVDQELDINRLSDYDVDHIVPQSFLKDDSIDNKVLTRSDKARGKSDNVPSEEVVKKMKNYWRQLLNAKLITQRKFDNLTKAERGGLSELDKAGFIKRQLVETRQITKHVAQILDSRMNTKYDENDKLIREVKVITLKSKLVSDFRKDFQFYKVREINNYHHAHDAYLNAVVGTALIKKYPKLESEFVYGDYKVYDVRKMIAKSEQEIGKATAKYFFYSNIMNFFKTEITLANGEIRKRPLIETNGETGEIVWDKGRDFATVRKVLSMPQVNIVKKTEVQTGGFSKESILPKRNSDKLIARKKDWDPKKYGGFDSPTVAYSVLVVAKVEKGKSKKLKSVKELLGITIMERSSFEKNPIDFLEAKGYKEVKKDLIIKLPKYSLFELENGRKRMLASAGELQKGNELALPSKYVNFLYLASHYEKLKGSPEDNEQKQLFVEQHKHYLDEIIEQISEFSKRVILADANLDKVLSAYNKHRDKPIREQAENIIHLFTLTNLGAPAAFKYFDTTIDRKRYTSTKEVLDATLIHQSITGLYETRIDLSQLGGDGGEAAAKGGGPAPGGTLQLDDEYRLYSPLVKPDQNIQFWLEQFPQAWAETAGMGLAKQVPPQVIQLKASATPVSVRQYPLSKEAQEGIRPHVQRLIQQGILVPVQSPWNTPLLPVRKPGTNDYRPVQDLREVNKRVQDIHPTVPNPYNLLCALPPQRSWYTVLDLKDAFFCLRLHPTSQPLFAFEWRDPGTGRTGQLTWTRLPQGFKNSPTIFNEALHRDLANFRIQHPQVTLLQYVDDLLLAGATKQDCLEGTKALLLELSDLGYRASAKKAQICRREVTYLGYSLRDGQRWLTEARKKTVVQIPAPTTAKQVREFLGTAGFCRLWIPGFATLAAPLYPLTKPKGEFSWAPEHQKAFDAIKKALLSAPALALPDVTKPFTLYVDERKGVARGVLTQTLGPWRRPVAYLSKKLDPVASGWPVCLKAIAAVAILVKDADKLTLGQNITVIAPHALENIVRQPPDRWMTNARMTHYQSLLLTERVTFAPPAALNPATLLPEETDEPVTHDCHQLLIEETGVRKDLTDIPLTGEVLTWFTDGSSYVVEGKRMAGAAVVDGTRTIWASSLPEGTSAQKAELMALTQALRLAEGKSINIYTDSRYAFATAHVHGAIYKQRGWLTSAGREIKNKEEILSLLEALHLPKRLAIIHCPGHQKAKDPISRGNQMADRVAKQAAQGVNLLAGKRTADGSEFEKRTADGSEFESPKKKAKVE

SEQ ID NO: 349 - protein, 2090 aa, synthetic construct; identical to SEQ ID NO: 136

SEQ ID NO: 350 - protein, 2090 aa, synthetic construct; identical to SEQ ID NO: 115

SEQ ID NO: 351 - protein, 2099 aa, synthetic construct; identical to SEQ ID NO: 137

SEQ ID NO: 352 - protein, 2090 aa, synthetic construct
MPAAKRVKLDGGDKKYSIGLDIGTNSVGWAVITDEYKVPSKKFKVLGNTDRHSIKKNLIGALLFDSGETAEATRLKRTARRRYTRRKNRICYLQEIFSNEMAKVDDSFFHRLEESFLVEEDKKHERHPIFGNIVDEVAYHEKYPTIYHLRKKLVDSTDKADLRLIYLALAHMIKFRGHFLIEGDLNPDNSDVDKLFIQLVQTYNQLFEENPINASGVDAKAILSARLSKSRRLENLIAQLPGEKKNGLFGNLIALSLGLTPNFKSNFDLAEDAKLQLSKDTYDDDLDNLLAQIGDQYADLFLAAKNLSDAILLSDILRVNTEITKAPLSASMIKRYDEHHQDLTLLKALVRQQLPEKYKEIFFDQSKNGYAGYIDGGASQEEFYKFIKPILEKMDGTEELLVKLNREDLLRKQRTFDNGSIPHQIHLGELHAILRRQEDFYPFLKDNREKIEKILTFRIPYYVGPLARGNSRFAWMTRKSEETITPWNFEEVVDKGASAQSFIERMTNFDKNLPNEKVLPKHSLLYEYFTVYNELTKVKYVTEGMRKPAFLSGEQKKAIVDLLFKTNRKVTVKQLKEDYFKKIECFDSVEISGVEDRFNASLGTYHDLLKIIKDKDFLDNEENEDILEDIVLTLTLFEDREMIEERLKTYAHLFDDKVMKQLKRRRYTGWGRLSRKLINGIRDKQSGKTILDFLKSDGFANRNFMQLIHDDSLTFKEDIQKAQVSGQGDSLHEHIANLAGSPAIKKGILQTVKVVDELVKVMGRHKPENIVIEMARENQTTQKGQKNSRERMKRIEEGIKELGSQILKEHPVENTQLQNEKLYLYYLQNGRDMYVDQELDINRLSDYDVDHIVPQSFLKDDSIDNKVLTRSDKARGKSDNVPSEEVVKKMKNYWRQLLNAKLITQRKFDNLTKAERGGLSELDKAGFIKRQLVETRQITKHVAQILDSRMNTKYDENDKLIREVKVITLKSKLVSDFRKDFQFYKVREINNYHHAHDAYLNAVVGTALIKKYPKLESEFVYGDYKVYDVRKMIAKSEQEIGKATAKYFFYSNIMNFFKTEITLANGEIRKRPLIETNGETGEIVWDKGRDFATVRKVLSMPQVNIVKKTEVQTGGFSKESILPKRNSDKLIARKKDWDPKKYGGFDSPTVAYSVLVVAKVEKGKSKKLKSVKELLGITIMERSSFEKNPIDFLEAKGYKEVKKDLIIKLPKYSLFELENGRKRMLASAGELQKGNELALPSKYVNFLYLASHYEKLKGSPEDNEQKQLFVEQHKHYLDEIIEQISEFSKRVILADANLDKVLSAYNKHRDKPIREQAENIIHLFTLTNLGAPAAFKYFDTTIDRKRYTSTKEVLDATLIHQSITGLYETRIDLSQLGGDGGGGSEAAAKGGGGGTLQLDDEYRLYSPLVKPDQNIQFWLEQFPQAWAETAGMGLAKQVPPQVIQLKASATPVSVRQYPLSKEAQEGIRPHVQRLIQQGILVPVQSPWNTPLLPVRKPGTNDYRPVQDLREVNKRVQDIHPTVPNPYNLLCALPPQRSWYTVLDLKDAFFCLRLHPTSQPLFAFEWRDPGTGRTGQLTWTRLPQGFKNSPTIFNEALHRDLANFRIQHPQVTLLQYVDDLLLAGATKQDCLEGTKALLLELSDLGYRASAKKAQICRREVTYLGYSLRDGQRWLTEARKKTVVQIPAPTTAKQVREFLGTAGFCRLWIPGFATLAAPLYPLTKPKGEFSWAPEHQKAFDAIKKALLSAPALALPDVTKPFTLYVDERKGVARGVLTQTLGPWRRPVAYLSKKLDPVASGWPVCLKAIAAVAILVKDADKLTLGQNITVIAPHALENIVRQPPDRWMTNARMTHYQSLLLTERVTFAPPAALNPATLLPEETDEPVTHDCHQLLIEETGVRKDLTDIPLTGEVLTWFTDGSSYVVEGKRMAGAAVVDGTRTIWASSLPEGTSAQKAELMALTQALRLAEGKSINIYTDSRYAFATAHVHGAIYKQRGWLTSAGREIKNKEEILSLLEALHLPKRLAIIHCPGHQKAKDPISRGNQMADRVAKQAAQGVNLLAGKRTADGSEFEKRTADGSEFESPKKKAKVE

SEQ ID NO: 353 - protein, 2085 aa, synthetic construct; identical to SEQ ID NO: 183

SEQ ID NO: 354 - protein, 2090 aa, synthetic construct
MPAAKRVKLDGGDKKYSIGLDIGTNSVGWAVITDEYKVPSKKFKVLGNTDRHSIKKNLIGALLFDSGETAEATRLKRTARRRYTRRKNRICYLQEIFSNEMAKVDDSFFHRLEESFLVEEDKKHERHPIFGNIVDEVAYHEKYPTIYHLRKKLVDSTDKADLRLIYLALAHMIKFRGHFLIEGDLNPDNSDVDKLFIQLVQTYNQLFEENPINASGVDAKAILSARLSKSRRLENLIAQLPGEKKNGLFGNLIALSLGLTPNFKSNFDLAEDAKLQLSKDTYDDDLDNLLAQIGDQYADLFLAAKNLSDAILLSDILRVNTEITKAPLSASMIKRYDEHHQDLTLLKALVRQQLPEKYKEIFFDQSKNGYAGYIDGGASQEEFYKFIKPILEKMDGTEELLVKLNREDLLRKQRTFDNGSIPHQIHLGELHAILRRQEDFYPFLKDNREKIEKILTFRIPYYVGPLARGNSRFAWMTRKSEETITPWNFEEVVDKGASAQSFIERMTNFDKNLPNEKVLPKHSLLYEYFTVYNELTKVKYVTEGMRKPAFLSGEQKKAIVDLLFKTNRKVTVKQLKEDYFKKIECFDSVEISGVEDRFNASLGTYHDLLKIIKDKDFLDNEENEDILEDIVLTLTLFEDREMIEERLKTYAHLFDDKVMKQLKRRRYTGWGRLSRKLINGIRDKQSGKTILDFLKSDGFANRNFMQLIHDDSLTFKEDIQKAQVSGQGDSLHEHIANLAGSPAIKKGILQTVKVVDELVKVMGRHKPENIVIEMARENQTTQKGQKNSRERMKRIEEGIKELGSQILKEHPVENTQLQNEKLYLYYLQNGRDMYVDQELDINRLSDYDVDHIVPQSFLKDDSIDNKVLTRSDKARGKSDNVPSEEVVKKMKNYWRQLLNAKLITQRKFDNLTKAERGGLSELDKAGFIKRQLVETRQITKHVAQILDSRMNTKYDENDKLIREVKVITLKSKLVSDFRKDFQFYKVREINNYHHAHDAYLNAVVGTALIKKYPKLESEFVYGDYKVYDVRKMIAKSEQEIGKATAKYFFYSNIMNFFKTEITLANGEIRKRPLIETNGETGEIVWDKGRDFATVRKVLSMPQVNIVKKTEVQTGGFSKESILPKRNSDKLIARKKDWDPKKYGGFDSPTVAYSVLVVAKVEKGKSKKLKSVKELLGITIMERSSFEKNPIDFLEAKGYKEVKKDLIIKLPKYSLFELENGRKRMLASAGELQKGNELALPSKYVNFLYLASHYEKLKGSPEDNEQKQLFVEQHKHYLDEIIEQISEFSKRVILADANLDKVLSAYNKHRDKPIREQAENIIHLFTLTNLGAPAAFKYFDTTIDRKRYTSTKEVLDATLIHQSITGLYETRIDLSQLGGDGGEAAAKGGGGGSGGTLQLDDEYRLYSPLVKPDQNIQFWLEQFPQAWAETAGMGLAKQVPPQVIQLKASATPVSVRQYPLSKEAQEGIRPHVQRLIQQGILVPVQSPWNTPLLPVRKPGTNDYRPVQDLREVNKRVQDIHPTVPNPYNLLCALPPQRSWYTVLDLKDAFFCLRLHPTSQPLFAFEWRDPGTGRTGQLTWTRLPQGFKNSPTIFNEALHRDLANFRIQHPQVTLLQYVDDLLLAGATKQDCLEGTKALLLELSDLGYRASAKKAQICRREVTYLGYSLRDGQRWLTEARKKTVVQIPAPTTAKQVREFLGTAGFCRLWIPGFATLAAPLYPLTKPKGEFSWAPEHQKAFDAIKKALLSAPALALPDVTKPFTLYVDERKGVARGVLTQTLGPWRRPVAYLSKKLDPVASGWPVCLKAIAAVAILVKDADKLTLGQNITVIAPHALENIVRQPPDRWMTNARMTHYQSLLLTERVTFAPPAALNPATLLPEETDEPVTHDCHQLLIEETGVRKDLTDIPLTGEVLTWFTDGSSYVVEGKRMAGAAVVDGTRTIWASSLPEGTSAQKAELMALTQALRLAEGKSINIYTDSRYAFATAHVHGAIYKQRGWLTSAGREIKNKEEILSLLEALHLPKRLAIIHCPGHQKAKDPISRGNQMADRVAKQAAQGVNLLAGKRTADGSEFEKRTADGSEFESPKKKAKVE

SEQ ID NO: 355 - protein, 2099 aa, synthetic construct
MPAAKRVKLDGGDKKYSIGLDIGTNSVGWAVITDEYKVPSKKFKVLGNTDRHSIKKNLIGALLFDSGETAEATRLKRTARRRYTRRKNRICYLQEIFSNEMAKVDDSFFHRLEESFLVEEDKKHERHPIFGNIVDEVAYHEKYPTIYHLRKKLVDSTDKADLRLIYLALAHMIKFRGHFLIEGDLNPDNSDVDKLFIQLVQTYNQLFEENPINASGVDAKAILSARLSKSRRLENLIAQLPGEKKNGLFGNLIALSLGLTPNFKSNFDLAEDAKLQLSKDTYDDDLDNLLAQIGDQYADLFLAAKNLSDAILLSDILRVNTEITKAPLSASMIKRYDEHHQDLTLLKALVRQQLPEKYKEIFFDQSKNGYAGYIDGGASQEEFYKFIKPILEKMDGTEELLVKLNREDLLRKQRTFDNGSIPHQIHLGELHAILRRQEDFYPFLKDNREKIEKILTFRIPYYVGPLARGNSRFAWMTRKSEETITPWNFEEVVDKGASAQSFIERMTNFDKNLPNEKVLPKHSLLYEYFTVYNELTKVKYVTEGMRKPAFLSGEQKKAIVDLLFKTNRKVTVKQLKEDYFKKIECFDSVEISGVEDRFNASLGTYHDLLKIIKDKDFLDNEENEDILEDIVLTLTLFEDREMIEERLKTYAHLFDDKVMKQLKRRRYTGWGRLSRKLINGIRDKQSGKTILDFLKSDGFANRNFMQLIHDDSLTFKEDIQKAQVSGQGDSLHEHIANLAGSPAIKKGILQTVKVVDELVKVMGRHKPENIVIEMARENQTTQKGQKNSRERMKRIEEGIKELGSQILKEHPVENTQLQNEKLYLYYLQNGRDMYVDQELDINRLSDYDVDHIVPQSFLKDDSIDNKVLTRSDKARGKSDNVPSEEVVKKMKNYWRQLLNAKLITQRKFDNLTKAERGGLSELDKAGFIKRQLVETRQITKHVAQILDSRMNTKYDENDKLIREVKVITLKSKLVSDFRKDFQFYKVREINNYHHAHDAYLNAVVGTALIKKYPKLESEFVYGDYKVYDVRKMIAKSEQEIGKATAKYFFYSNIMNFFKTEITLANGEIRKRPLIETNGETGEIVWDKGRDFATVRKVLSMPQVNIVKKTEVQTGGFSKESILPKRNSDKLIARKKDWDPKKYGGFDSPTVAYSVLVVAKVEKGKSKKLKSVKELLGITIMERSSFEKNPIDFLEAKGYKEVKKDLIIKLPKYSLFELENGRKRMLASAGELQKGNELALPSKYVNFLYLASHYEKLKGSPEDNEQKQLFVEQHKHYLDEIIEQISEFSKRVILADANLDKVLSAYNKHRDKPIREQAENIIHLFTLTNLGAPAAFKYFDTTIDRKRYTSTKEVLDATLIHQSITGLYETRIDLSQLGGDGGGGGGSGGGGSGGGGSGGGGSGGTLQLDDEYRLYSPLVKPDQNIQFWLEQFPQAWAETAGMGLAKQVPPQVIQLKASATPVSVRQYPLSKEAQEGIRPHVQRLIQQGILVPVQSPWNTPLLPVRKPGTNDYRPVQDLREVNKRVQDIHPTVPNPYNLLCALPPQRSWYTVLDLKDAFFCLRLHPTSQPLFAFEWRDPGTGRTGQLTWTRLPQGFKNSPTIFNEALHRDLANFRIQHPQVTLLQYVDDLLLAGATKQDCLEGTKALLLELSDLGYRASAKKAQICRREVTYLGYSLRDGQRWLTEARKKTVVQIPAPTTAKQVREFLGTAGFCRLWIPGFATLAAPLYPLTKPKGEFSWAPEHQKAFDAIKKALLSAPALALPDVTKPFTLYVDERKGVARGVLTQTLGPWRRPVAYLSKKLDPVASGWPVCLKAIAAVAILVKDADKLTLGQNITVIAPHALENIVRQPPDRWMTNARMTHYQSLLLTERVTFAPPAALNPATLLPEETDEPVTHDCHQLLIEETGVRKDLTDIPLTGEVLTWFTDGSSYVVEGKRMAGAAVVDGTRTIWASSLPEGTSAQKAELMALTQALRLAEGKSINIYTDSRYAFATAHVHGAIYKQRGWLTSAGREIKNKEEILSLLEALHLPKRLAIIHCPGHQKAKDPISRGNQMADRVAKQAAQGVNLLAGKRTADGSEFEKRTADGSEFESPKKKAKVE

SEQ ID NO: 356 - protein, 2085 aa, synthetic construct; identical to SEQ ID NO: 125

SEQ ID NO: 357 - protein, 2091 aa, synthetic construct
MPAAKRVKLDGGDKKYSIGLDIGTNSVGWAVITDEYKVPSKKFKVLGNTDRHSIKKNLIGALLFDSGETAEATRLKRTARRRYTRRKNRICYLQEIFSNEMAKVDDSFFHRLEESFLVEEDKKHERHPIFGNIVDEVAYHEKYPTIYHLRKKLVDSTDKADLRLIYLALAHMIKFRGHFLIEGDLNPDNSDVDKLFIQLVQTYNQLFEENPINASGVDAKAILSARLSKSRRLENLIAQLPGEKKNGLFGNLIALSLGLTPNFKSNFDLAEDAKLQLSKDTYDDDLDNLLAQIGDQYADLFLAAKNLSDAILLSDILRVNTEITKAPLSASMIKRYDEHHQDLTLLKALVRQQLPEKYKEIFFDQSKNGYAGYIDGGASQEEFYKFIKPILEKMDGTEELLVKLNREDLLRKQRTFDNGSIPHQIHLGELHAILRRQEDFYPFLKDNREKIEKILTFRIPYYVGPLARGNSRFAWMTRKSEETITPWNFEEVVDKGASAQSFIERMTNFDKNLPNEKVLPKHSLLYEYFTVYNELTKVKYVTEGMRKPAFLSGEQKKAIVDLLFKTNRKVTVKQLKEDYFKKIECFDSVEISGVEDRFNASLGTYHDLLKIIKDKDFLDNEENEDILEDIVLTLTLFEDREMIEERLKTYAHLFDDKVMKQLKRRRYTGWGRLSRKLINGIRDKQSGKTILDFLKSDGFANRNFMQLIHDDSLTFKEDIQKAQVSGQGDSLHEHIANLAGSPAIKKGILQTVKVVDELVKVMGRHKPENIVIEMARENQTTQKGQKNSRERMKRIEEGIKELGSQILKEHPVENTQLQNEKLYLYYLQNGRDMYVDQELDINRLSDYDVDHIVPQSFLKDDSIDNKVLTRSDKARGKSDNVPSEEVVKKMKNYWRQLLNAKLITQRKFDNLTKAERGGLSELDKAGFIKRQLVETRQITKHVAQILDSRMNTKYDENDKLIREVKVITLKSKLVSDFRKDFQFYKVREINNYHHAHDAYLNAVVGTALIKKYPKLESEFVYGDYKVYDVRKMIAKSEQEIGKATAKYFFYSNIMNFFKTEITLANGEIRKRPLIETNGETGEIVWDKGRDFATVRKVLSMPQVNIVKKTEVQTGGFSKESILPKRNSDKLIARKKDWDPKKYGGFDSPTVAYSVLVVAKVEKGKSKKLKSVKELLGITIMERSSFEKNPIDFLEAKGYKEVKKDLIIKLPKYSLFELENGRKRMLASAGELQKGNELALPSKYVNFLYLASHYEKLKGSPEDNEQKQLFVEQHKHYLDEIIEQISEFSKRVILADANLDKVLSAYNKHRDKPIREQAENIIHLFTLTNLGAPAAFKYFDTTIDRKRYTSTKEVLDATLIHQSITGLYETRIDLSQLGGDGGGSSGSSGSSGSSGGTLQLDDEYRLYSPLVKPDQNIQFWLEQFPQAWAETAGMGLAKQVPPQVIQLKASATPVSVRQYPLSKEAQEGIRPHVQRLIQQGILVPVQSPWNTPLLPVRKPGTNDYRPVQDLREVNKRVQDIHPTVPNPYNLLCALPPQRSWYTVLDLKDAFFCLRLHPTSQPLFAFEWRDPGTGRTGQLTWTRLPQGFKNSPTIFNEALHRDLANFRIQHPQVTLLQYVDDLLLAGATKQDCLEGTKALLLELSDLGYRASAKKAQICRREVTYLGYSLRDGQRWLTEARKKTVVQIPAPTTAKQVREFLGTAGFCRLWIPGFATLAAPLYPLTKPKGEFSWAPEHQKAFDAIKKALLSAPALALPDVTKPFTLYVDERKGVARGVLTQTLGPWRRPVAYLSKKLDPVASGWPVCLKAIAAVAILVKDADKLTLGQNITVIAPHALENIVRQPPDRWMTNARMTHYQSLLLTERVTFAPPAALNPATLLPEETDEPVTHDCHQLLIEETGVRKDLTDIPLTGEVLTWFTDGSSYVVEGKRMAGAAVVDGTRTIWASSLPEGTSAQKAELMALTQALRLAEGKSINIYTDSRYAFATAHVHGAIYKQRGWLTSAGREIKNKEEILSLLEALHLPKRLAIIHCPGHQKAKDPISRGNQMADRVAKQAAQGVNLLAGKRTADGSEFEKRTADGSEFESPKKKAKVE

SEQ ID NO: 358 - protein, 2090 aa, synthetic construct
MPAAKRVKLDGGDKKYSIGLDIGTNSVGWAVITDEYKVPSKKFKVLGNTDRHSIKKNLIGALLFDSGETAEATRLKRTARRRYTRRKNRICYLQEIFSNEMAKVDDSFFHRLEESFLVEEDKKHERHPIFGNIVDEVAYHEKYPTIYHLRKKLVDSTDKADLRLIYLALAHMIKFRGHFLIEGDLNPDNSDVDKLFIQLVQTYNQLFEENPINASGVDAKAILSARLSKSRRLENLIAQLPGEKKNGLFGNLIALSLGLTPNFKSNFDLAEDAKLQLSKDTYDDDLDNLLAQIGDQYADLFLAAKNLSDAILLSDILRVNTEITKAPLSASMIKRYDEHHQDLTLLKALVRQQLPEKYKEIFFDQSKNGYAGYIDGGASQEEFYKFIKPILEKMDGTEELLVKLNREDLLRKQRTFDNGSIPHQIHLGELHAILRRQEDFYPFLKDNREKIEKILTFRIPYYVGPLARGNSRFAWMTRKSEETITPWNFEEVVDKGASAQSFIERMTNFDKNLPNEKVLPKHSLLYEYFTVYNELTKVKYVTEGMRKPAFLSGEQKKAIVDLLFKTNRKVTVKQLKEDYFKKIECFDSVEISGVEDRFNASLGTYHDLLKIIKDKDFLDNEENEDILEDIVLTLTLFEDREMIEERLKTYAHLFDDKVMKQLKRRRYTGWGRLSRKLINGIRDKQSGKTILDFLKSDGFANRNFMQLIHDDSLTFKEDIQKAQVSGQGDSLHEHIANLAGSPAIKKGILQTVKVVDELVKVMGRHKPENIVIEMARENQTTQKGQKNSRERMKRIEEGIKELGSQILKEHPVENTQLQNEKLYLYYLQNGRDMYVDQELDINRLSDYDVDHIVPQSFLKDDSIDNKVLTRSDKARGKSDNVPSEEVVKKMKNYWRQLLNAKLITQRKFDNLTKAERGGLSELDKAGFIKRQLVETRQITKHVAQILDSRMNTKYDENDKLIREVKVITLKSKLVSDFRKDFQFYKVREINNYHHAHDAYLNAVVGTALIKKYPKLESEFVYGDYKVYDVRKMIAKSEQEIGKATAKYFFYSNIMNFFKTEITLANGEIRKRPLIETNGETGEIVWDKGRDFATVRKVLSMPQVNIVKKTEVQTGGFSKESILPKRNSDKLIARKKDWDPKKYGGFDSPTVAYSVLVVAKVEKGKSKKLKSVKELLGITIMERSSFEKNPIDFLEAKGYKEVKKDLIIKLPKYSLFELENGRKRMLASAGELQKGNELALPSKYVNFLYLASHYEKLKGSPEDNEQKQLFVEQHKHYLDEIIEQISEFSKRVILADANLDKVLSAYNKHRDKPIREQAENIIHLFTLTNLGAPAAFKYFDTTIDRKRYTSTKEVLDATLIHQSITGLYETRIDLSQLGGDGGEAAAKPAPGGGGGTLQLDDEYRLYSPLVKPDQNIQFWLEQFPQAWAETAGMGLAKQVPPQVIQLKASATPVSVRQYPLSKEAQEGIRPHVQRLIQQGILVPVQSPWNTPLLPVRKPGTNDYRPVQDLREVNKRVQDIHPTVPNPYNLLCALPPQRSWYTVLDLKDAFFCLRLHPTSQPLFAFEWRDPGTGRTGQLTWTRLPQGFKNSPTIFNEALHRDLANFRIQHPQVTLLQYVDDLLLAGATKQDCLEGTKALLLELSDLGYRASAKKAQICRREVTYLGYSLRDGQRWLTEARKKTVVQIPAPTTAKQVREFLGTAGFCRLWIPGFATLAAPLYPLTKPKGEFSWAPEHQKAFDAIKKALLSAPALALPDVTKPFTLYVDERKGVARGVLTQTLGPWRRPVAYLSKKLDPVASGWPVCLKAIAAVAILVKDADKLTLGQNITVIAPHALENIVRQPPDRWMTNARMTHYQSLLLTERVTFAPPAALNPATLLPEETDEPVTHDCHQLLIEETGVRKDLTDIPLTGEVLTWFTDGSSYVVEGKRMAGAAVVDGTRTIWASSLPEGTSAQKAELMALTQALRLAEGKSINIYTDSRYAFATAHVHGAIYKQRGWLTSAGREIKNKEEILSLLEALHLPKRLAIIHCPGHQKAKDPISRGNQMADRVAKQAAQGVNLLAGKRTADGSEFEKRTADGSEFESPKKKAKVE

SEQ ID NO: 359 - protein, 2088 aa, synthetic construct; identical to SEQ ID NO: 175

SEQ ID NO: 360 - protein, 2087 aa, synthetic construct
MPAAKRVKLDGGDKKYSIGLDIGTNSVGWAVITDEYKVPSKKFKVLGNTDRHSIKKNLIGALLFDSGETAEATRLKRTARRRYTRRKNRICYLQEIFSNEMAKVDDSFFHRLEESFLVEEDKKHERHPIFGNIVDEVAYHEKYPTIYHLRKKLVDSTDKADLRLIYLALAHMIKFRGHFLIEGDLNPDNSDVDKLFIQLVQTYNQLFEENPINASGVDAKAILSARLSKSRRLENLIAQLPGEKKNGLFGNLIALSLGLTPNFKSNFDLAEDAKLQLSKDTYDDDLDNLLAQIGDQYADLFLAAKNLSDAILLSDILRVNTEITKAPLSASMIKRYDEHHQDLTLLKALVRQQLPEKYKEIFFDQSKNGYAGYIDGGASQEEFYKFIKPILEKMDGTEELLVKLNREDLLRKQRTFDNGSIPHQIHLGELHAILRRQEDFYPFLKDNREKIEKILTFRIPYYVGPLARGNSRFAWMTRKSEETITPWNFEEVVDKGASAQSFIERMTNFDKNLPNEKVLPKHSLLYEYFTVYNELTKVKYVTEGMRKPAFLSGEQKKAIVDLLFKTNRKVTVKQLKEDYFKKIECFDSVEISGVEDRFNASLGTYHDLLKIIKDKDFLDNEENEDILEDIVLTLTLFEDREMIEERLKTYAHLFDDKVMKQLKRRRYTGWGRLSRKLINGIRDKQSGKTILDFLKSDGFANRNFMQLIHDDSLTFKEDIQKAQVSGQGDSLHEHIANLAGSPAIKKGILQTVKVVDELVKVMGRHKPENIVIEMARENQTTQKGQKNSRERMKRIEEGIKELGSQILKEHPVENTQLQNEKLYLYYLQNGRDMYVDQELDINRLSDYDVDHIVPQSFLKDDSIDNKVLTRSDKARGKSDNVPSEEVVKKMKNYWRQLLNAKLITQRKFDNLTKAERGGLSELDKAGFIKRQLVETRQITKHVAQILDSRMNTKYDENDKLIREVKVITLKSKLVSDFRKDFQFYKVREINNYHHAHDAYLNAVVGTALIKKYPKLESEFVYGDYKVYDVRKMIAKSEQEIGKATAKYFFYSNIMNFFKTEITLANGEIRKRPLIETNGETGEIVWDKGRDFATVRKVLSMPQVNIVKKTEVQTGGFSKESILPKRNSDKLIARKKDWDPKKYGGFDSPTVAYSVLVVAKVEKGKSKKLKSVKELLGITIMERSSFEKNPIDFLEAKGYKEVKKDLIIKLPKYSLFELENGRKRMLASAGELQKGNELALPSKYVNFLYLASHYEKLKGSPEDNEQKQLFVEQHKHYLDEIIEQISEFSKRVILADANLDKVLSAYNKHRDKPIREQAENIIHLFTLTNLGAPAAFKYFDTTIDRKRYTSTKEVLDATLIHQSITGLYETRIDLSQLGGDGGEAAAKGSSGGTLQLDDEYRLYSPLVKPDQNIQFWLEQFPQAWAETAGMGLAKQVPPQVIQLKASATPVSVRQYPLSKEAQEGIRPHVQRLIQQGILVPVQSPWNTPLLPVRKPGTNDYRPVQDLREVNKRVQDIHPTVPNPYNLLCALPPQRSWYTVLDLKDAFFCLRLHPTSQPLFAFEWRDPGTGRTGQLTWTRLPQGFKNSPTIFNEALHRDLANFRIQHPQVTLLQYVDDLLLAGATKQDCLEGTKALLLELSDLGYRASAKKAQICRREVTYLGYSLRDGQRWLTEARKKTVVQIPAPTTAKQVREFLGTAGFCRLWIPGFATLAAPLYPLTKPKGEFSWAPEHQKAFDAIKKALLSAPALALPDVTKPFTLYVDERKGVARGVLTQTLGPWRRPVAYLSKKLDPVASGWPVCLKAIAAVAILVKDADKLTLGQNITVIAPHALENIVRQPPDRWMTNARMTHYQSLLLTERVTFAPPAALNPATLLPEETDEPVTHDCHQLLIEETGVRKDLTDIPLTGEVLTWFTDGSSYVVEGKRMAGAAVVDGTRTIWASSLPEGTSAQKAELMALTQALRLAEGKSINIYTDSRYAFATAHVHGAIYKQRGWLTSAGREIKNKEEILSLLEALHLPKRLAIIHCPGHQKAKDPISRGNQMADRVAKQAAQGVNLLAGKRTADGSEFEKRTADGSEFESPKKKAKVE

SEQ ID NO: 361 - protein, 2090 aa, synthetic construct
MPAAKRVKLDGGDKKYSIGLDIGTNSVGWAVITDEYKVPSKKFKVLGNTDRHSIKKNLIGALLFDSGETAEATRLKRTARRRYTRRKNRICYLQEIFSNEMAKVDDSFFHRLEESFLVEEDKKHERHPIFGNIVDEVAYHEKYPTIYHLRKKLVDSTDKADLRLIYLALAHMIKFRGHFLIEGDLNPDNSDVDKLFIQLVQTYNQLFEENPINASGVDAKAILSARLSKSRRLENLIAQLPGEKKNGLFGNLIALSLGLTPNFKSNFDLAEDAKLQLSKDTYDDDLDNLLAQIGDQYADLFLAAKNLSDAILLSDILRVNTEITKAPLSASMIKRYDEHHQDLTLLKALVRQQLPEKYKEIFFDQSKNGYAGYIDGGASQEEFYKFIKPILEKMDGTEELLVKLNREDLLRKQRTFDNGSIPHQIHLGELHAILRRQEDFYPFLKDNREKIEKILTFRIPYYVGPLARGNSRFAWMTRKSEETITPWNFEEVVDKGASAQSFIERMTNFDKNLPNEKVLPKHSLLYEYFTVYNELTKVKYVTEGMRKPAFLSGEQKKAIVDLLFKTNRKVTVKQLKEDYFKKIECFDSVEISGVEDRFNASLGTYHDLLKIIKDKDFLDNEENEDILEDIVLTLTLFEDREMIEERLKTYAHLFDDKVMKQLKRRRYTGWGRLSRKLINGIRDKQSGKTILDFLKSDGFANRNFMQLIHDDSLTFKEDIQKAQVSGQGDSLHEHIANLAGSPAIKKGILQTVKVVDELVKVMGRHKPENIVIEMARENQTTQKGQKNSRERMKRIEEGIKELGSQILKEHPVENTQLQNEKLYLYYLQNGRDMYVDQELDINRLSDYDVDHIVPQSFLKDDSIDNKVLTRSDKARGKSDNVPSEEVVKKMKNYWRQLLNAKLITQRKFDNLTKAERGGLSELDKAGFIKRQLVETRQITKHVAQILDSRMNTKYDENDKLIREVKVITLKSKLVSDFRKDFQFYKVREINNYHHAHDAYLNAVVGTALIKKYPKLESEFVYGDYKVYDVRKMIAKSEQEIGKATAKYFFYSNIMNFFKTEITLANGEIRKRPLIETNGETGEIVWDKGRDFATVRKVLSMPQVNIVKKTEVQTGGFSKESILPKRNSDKLIARKKDWDPKKYGGFDSPTVAYSVLVVAKVEKGKSKKLKSVKELLGITIMERSSFEKNPIDFLEAKGYKEVKKDLIIKLPKYSLFELENGRKRMLASAGELQKGNELALPSKYVNFLYLASHYEKLKGSPEDNEQKQLFVEQHKHYLDEIIEQISEFSKRVILADANLDKVLSAYNKHRDKPIREQAENIIHLFTLTNLGAPAAFKYFDTTIDRKRYTSTKEVLDATLIHQSITGLYETRIDLSQLGGDGGGSSEAAAKGGSGGTLQLDDEYRLYSPLVKPDQNIQFWLEQFPQAWAETAGMGLAKQVPPQVIQLKASATPVSVRQYPLSKEAQEGIRPHVQRLIQQGILVPVQSPWNTPLLPVRKPGTNDYRPVQDLREVNKRVQDIHPTVPNPYNLLCALPPQRSWYTVLDLKDAFFCLRLHPTSQPLFAFEWRDPGTGRTGQLTWTRLPQGFKNSPTIFNEALHRDLANFRIQHPQVTLLQYVDDLLLAGATKQDCLEGTKALLLELSDLGYRASAKKAQICRREVTYLGYSLRDGQRWLTEARKKTVVQIPAPTTAKQVREFLGTAGFCRLWIPGFATLAAPLYPLTKPKGEFSWAPEHQKAFDAIKKALLSAPALALPDVTKPFTLYVDERKGVARGVLTQTLGPWRRPVAYLSKKLDPVASGWPVCLKAIAAVAILVKDADKLTLGQNITVIAPHALENIVRQPPDRWMTNARMTHYQSLLLTERVTFAPPAALNPATLLPEETDEPVTHDCHQLLIEETGVRKDLTDIPLTGEVLTWFTDGSSYVVEGKRMAGAAVVDGTRTIWASSLPEGTSAQKAELMALTQALRLAEGKSINIYTDSRYAFATAHVHGAIYKQRGWLTSAGREIKNKEEILSLLEALHLPKRLAIIHCPGHQKAKDPISRGNQMADRVAKQAAQGVNLLAGKRTADGSEFEKRTADGSEFESPKKKAKVE

SEQ ID NO: 362 - protein, 2087 aa, synthetic construct; identical to SEQ ID NO: 114

SEQ ID NO: 363 - protein, 2090 aa, synthetic construct; identical to SEQ ID NO: 139

SEQ ID NO: 364 - protein, 2088 aa, synthetic construct; identical to SEQ ID NO: 181

SEQ ID NO: 365 - protein, 2090 aa, synthetic construct; identical to SEQ ID NO: 133

SEQ ID NO: 366 - protein, 2084 aa, synthetic construct; identical to SEQ ID NO: 163

SEQ ID NO: 367 - protein, 2084 aa, synthetic construct; identical to SEQ ID NO: 166

SEQ ID NO: 368 - protein, 2090 aa, synthetic construct; identical to SEQ ID NO: 170

SEQ ID NO: 369 - protein, 2085 aa, synthetic construct; identical to SEQ ID NO: 165

SEQ ID NO: 370 - protein, 2091 aa, synthetic construct; identical to SEQ ID NO: 153

SEQ ID NO: 371 - protein, 2088 aa, synthetic construct
MPAAKRVKLDGGDKKYSIGLDIGTNSVGWAVITDEYKVPSKKFKVLGNTDRHSIKKNLIGALLFDSGETAEATRLKRTARRRYTRRKNRICYLQEIFSNEMAKVDDSFFHRLEESFLVEEDKKHERHPIFGNIVDEVAYHEKYPTIYHLRKKLVDSTDKADLRLIYLALAHMIKFRGHFLIEGDLNPDNSDVDKLFIQLVQTYNQLFEENPINASGVDAKAILSARLSKSRRLENLIAQLPGEKKNGLFGNLIALSLGLTPNFKSNFDLAEDAKLQLSKDTYDDDLDNLLAQIGDQYADLFLAAKNLSDAILLSDILRVNTEITKAPLSASMIKRYDEHHQDLTLLKALVRQQLPEKYKEIFFDQSKNGYAGYIDGGASQEEFYKFIKPILEKMDGTEELLVKLNREDLLRKQRTFDNGSIPHQIHLGELHAILRRQEDFYPFLKDNREKIEKILTFRIPYYVGPLARGNSRFAWMTRKSEETITPWNFEEVVDKGASAQSFIERMTNFDKNLPNEKVLPKHSLLYEYFTVYNELTKVKYVTEGMRKPAFLSGEQKKAIVDLLFKTNRKVTVKQLKEDYFKKIECFDSVEISGVEDRFNASLGTYHDLLKIIKDKDFLDNEENEDILEDIVLTLTLFEDREMIEERLKTYAHLFDDKVMKQLKRRRYTGWGRLSRKLINGIRDKQSGKTILDFLKSDGFANRNFMQLIHDDSLTFKEDIQKAQVSGQGDSLHEHIANLAGSPAIKKGILQTVKVVDELVKVMGRHKPENIVIEMARENQTTQKGQKNSRERMKRIEEGIKELGSQILKEHPVENTQLQNEKLYLYYLQNGRDMYVDQELDINRLSDYDVDHIVPQSFLKDDSIDNKVLTRSDKARGKSDNVPSEEVVKKMKNYWRQLLNAKLITQRKFDNLTKAERGGLSELDKAGFIKRQLVETRQITKHVAQILDSRMNTKYDENDKLIREVKVITLKSKLVSDFRKDFQFYKVREINNYHHAHDAYLNAVVGTALIKKYPKLESEFVYGDYKVYDVRKMIAKSEQEIGKATAKYFFYSNIMNFFKTEITLANGEIRKRPLIETNGETGEIVWDKGRDFATVRKVLSMPQVNIVKKTEVQTGGFSKESILPKRNSDKLIARKKDWDPKKYGGFDSPTVAYSVLVVAKVEKGKSKKLKSVKELLGITIMERSSFEKNPIDFLEAKGYKEVKKDLIIKLPKYSLFELENGRKRMLASAGELQKGNELALPSKYVNFLYLASHYEKLKGSPEDNEQKQLFVEQHKHYLDEIIEQISEFSKRVILADANLDKVLSAYNKHRDKPIREQAENIIHLFTLTNLGAPAAFKYFDTTIDRKRYTSTKEVLDATLIHQSITGLYETRIDLSQLGGDGGPAPGGGGSSGGTLQLDDEYRLYSPLVKPDQNIQFWLEQFPQAWAETAGMGLAKQVPPQVIQLKASATPVSVRQYPLSKEAQEGIRPHVQRLIQQGILVPVQSPWNTPLLPVRKPGTNDYRPVQDLREVNKRVQDIHPTVPNPYNLLCALPPQRSWYTVLDLKDAFFCLRLHPTSQPLFAFEWRDPGTGRTGQLTWTRLPQGFKNSPTIFNEALHRDLANFRIQHPQVTLLQYVDDLLLAGATKQDCLEGTKALLLELSDLGYRASAKKAQICRREVTYLGYSLRDGQRWLTEARKKTVVQIPAPTTAKQVREFLGTAGFCRLWIPGFATLAAPLYPLTKPKGEFSWAPEHQKAFDAIKKALLSAPALALPDVTKPFTLYVDERKGVARGVLTQTLGPWRRPVAYLSKKLDPVASGWPVCLKAIAAVAILVKDADKLTLGQNITVIAPHALENIVRQPPDRWMTNARMTHYQSLLLTERVTFAPPAALNPATLLPEETDEPVTHDCHQLLIEETGVRKDLTDIPLTGEVLTWFTDGSSYVVEGKRMAGAAVVDGTRTIWASSLPEGTSAQKAELMALTQALRLAEGKSINIYTDSRYAFATAHVHGAIYKQRGWLTSAGREIKNKEEILSLLEALHLPKRLAIIHCPGHQKAKDPISRGNQMADRVAKQAAQGVNLLAGKRTADGSEFEKRTADGSEFESPKKKAKVE

SEQ ID NO: 372 - protein, 2090 aa, synthetic construct; identical to SEQ ID NO: 172

SEQ ID NO: 373 - protein, 2088 aa, synthetic construct
MPAAKRVKLDGGDKKYSIGLDIGTNSVGWAVITDEYKVPSKKFKVLGNTDRHSIKKNLIGALLFDSGETAEATRLKRTARRRYTRRKNRICYLQEIFSNEMAKVDDSFFHRLEESFLVEEDKKHERHPIFGNIVDEVAYHEKYPTIYHLRKKLVDSTDKADLRLIYLALAHMIKFRGHFLIEGDLNPDNSDVDKLFIQLVQTYNQLFEENPINASGVDAKAILSARLSKSRRLENLIAQLPGEKKNGLFGNLIALSLGLTPNFKSNFDLAEDAKLQLSKDTYDDDLDNLLAQIGDQYADLFLAAKNLSDAILLSDILRVNTEITKAPLSASMIKRYDEHHQDLTLLKALVRQQLPEKYKEIFFDQSKNGYAGYIDGGASQEEFYKFIKPILEKMDGTEELLVKLNREDLLRKQRTFDNGSIPHQIHLGELHAILRRQEDFYPFLKDNREKIEKILTFRIPYYVGPLARGNSRFAWMTRKSEETITPWNFEEVVDKGASAQSFIERMTNFDKNLPNEKVLPKHSLLYEYFTVYNELTKVKYVTEGMRKPAFLSGEQKKAIVDLLFKTNRKVTVKQLKEDYFKKIECFDSVEISGVEDRFNASLGTYHDLLKIIKDKDFLDNEENEDILEDIVLTLTLFEDREMIEERLKTYAHLFDDKVMKQLKRRRYTGWGRLSRKLINGIRDKQSGKTILDFLKSDGFANRNFMQLIHDDSLTFKEDIQKAQVSGQGDSLHEHIANLAGSPAIKKGILQTVKVVDELVKVMGRHKPENIVIEMARENQTTQKGQKNSRERMKRIEEGIKELGSQILKEHPVENTQLQNEKLYLYYLQNGRDMYVDQELDINRLSDYDVDHIVPQSFLKDDSIDNKVLTRSDKARGKSDNVPSEEVVKKMKNYWRQLLNAKLITQRKFDNLTKAERGGLSELDKAGFIKRQLVETRQITKHVAQILDSRMNTKYDENDKLIREVKVITLKSKLVSDFRKDFQFYKVREINNYHHAHDAYLNAVVGTALIKKYPKLESEFVYGDYKVYDVRKMIAKSEQEIGKATAKYFFYSNIMNFFKTEITLANGEIRKRPLIETNGETGEIVWDKGRDFATVRKVLSMPQVNIVKKTEVQTGGFSKESILPKRNSDKLIARKKDWDPKKYGGFDSPTVAYSVLVVAKVEKGKSKKLKSVKELLGITIMERSSFEKNPIDFLEAKGYKEVKKDLIIKLPKYSLFELENGRKRMLASAGELQKGNELALPSKYVNFLYLASHYEKLKGSPEDNEQKQLFVEQHKHYLDEIIEQISEFSKRVILADANLDKVLSAYNKHRDKPIREQAENIIHLFTLTNLGAPAAFKYFDTTIDRKRYTSTKEVLDATLIHQSITGLYETRIDLSQLGGDGGGGSGGGPAPGGTLQLDDEYRLYSPLVKPDQNIQFWLEQFPQAWAETAGMGLAKQVPPQVIQLKASATPVSVRQYPLSKEAQEGIRPHVQRLIQQGILVPVQSPWNTPLLPVRKPGTNDYRPVQDLREVNKRVQDIHPTVPNPYNLLCALPPQRSWYTVLDLKDAFFCLRLHPTSQPLFAFEWRDPGTGRTGQLTWTRLPQGFKNSPTIFNEALHRDLANFRIQHPQVTLLQYVDDLLLAGATKQDCLEGTKALLLELSDLGYRASAKKAQICRREVTYLGYSLRDGQRWLTEARKKTVVQIPAPTTAKQVREFLGTAGFCRLWIPGFATLAAPLYPLTKPKGEFSWAPEHQKAFDAIKKALLSAPALALPDVTKPFTLYVDERKGVARGVLTQTLGPWRRPVAYLSKKLDPVASGWPVCLKAIAAVAILVKDADKLTLGQNITVIAPHALENIVRQPPDRWMTNARMTHYQSLLLTERVTFAPPAALNPATLLPEETDEPVTHDCHQLLIEETGVRKDLTDIPLTGEVLTWFTDGSSYVVEGKRMAGAAVVDGTRTIWASSLPEGTSAQKAELMALTQALRLAEGKSINIYTDSRYAFATAHVHGAIYKQRGWLTSAGREIKNKEEILSLLEALHLPKRLAIIHCPGHQKAKDPISRGNQMADRVAKQAAQGVNLLAGKRTADGSEFEKRTADGSEFESPKKKAKVE

SEQ ID NO: 374 - protein, 2094 aa, synthetic construct; identical to SEQ ID NO: 118

SEQ ID NO: 375 - protein, 2087 aa, synthetic construct
MPAAKRVKLDGGDKKYSIGLDIGTNSVGWAVITDEYKVPSKKFKVLGNTDRHSIKKNLIGALLFDSGETAEATRLKRTARRRYTRRKNRICYLQEIFSNEMAKVDDSFFHRLEESFLVEEDKKHERHPIFGNIVDEVAYHEKYPTIYHLRKKLVDSTDKADLRLIYLALAHMIKFRGHFLIEGDLNPDNSDVDKLFIQLVQTYNQLFEENPINASGVDAKAILSARLSKSRRLENLIAQLPGEKKNGLFGNLIALSLGLTPNFKSNFDLAEDAKLQLSKDTYDDDLDNLLAQIGDQYADLFLAAKNLSDAILLSDILRVNTEITKAPLSASMIKRYDEHHQDLTLLKALVRQQLPEKYKEIFFDQSKNGYAGYIDGGASQEEFYKFIKPILEKMDGTEELLVKLNREDLLRKQRTFDNGSIPHQIHLGELHAILRRQEDFYPFLKDNREKIEKILTFRIPYYVGPLARGNSRFAWMTRKSEETITPWNFEEVVDKGASAQSFIERMTNFDKNLPNEKVLPKHSLLYEYFTVYNELTKVKYVTEGMRKPAFLSGEQKKAIVDLLFKTNRKVTVKQLKEDYFKKIECFDSVEISGVEDRFNASLGTYHDLLKIIKDKDFLDNEENEDILEDIVLTLTLFEDREMIEERLKTYAHLFDDKVMKQLKRRRYTGWGRLSRKLINGIRDKQSGKTILDFLKSDGFANRNFMQLIHDDSLTFKEDIQKAQVSGQGDSLHEHIANLAGSPAIKKGILQTVKVVDELVKVMGRHKPENIVIEMARENQTTQKGQKNSRERMKRIEEGIKELGSQILKEHPVENTQLQNEKLYLYYLQNGRDMYVDQELDINRLSDYDVDHIVPQSFLKDDSIDNKVLTRSDKARGKSDNVPSEEVVKKMKNYWRQLLNAKLITQRKFDNLTKAERGGLSELDKAGFIKRQLVETRQITKHVAQILDSRMNTKYDENDKLIREVKVITLKSKLVSDFRKDFQFYKVREINNYHHAHDAYLNAVVGTALIKKYPKLESEFVYGDYKVYDVRKMIAKSEQEIGKATAKYFFYSNIMNFFKTEITLANGEIRKRPLIETNGETGEIVWDKGRDFATVRKVLSMPQVNIVKKTEVQTGGFSKESILPKRNSDKLIARKKDWDPKKYGGFDSPTVAYSVLVVAKVEKGKSKKLKSVKELLGITIMERSSFEKNPIDFLEAKGYKEVKKDLIIKLPKYSLFELENGRKRMLASAGELQKGNELALPSKYVNFLYLASHYEKLKGSPEDNEQKQLFVEQHKHYLDEIIEQISEFSKRVILADANLDKVLSAYNKHRDKPIREQAENIIHLFTLTNLGAPAAFKYFDTTIDRKRYTSTKEVLDATLIHQSITGLYETRIDLSQLGGDGGPAPEAAAKGGTLQLDDEYRLYSPLVKPDQNIQFWLEQFPQAWAETAGMGLAKQVPPQVIQLKASATPVSVRQYPLSKEAQEGIRPHVQRLIQQGILVPVQSPWNTPLLPVRKPGTNDYRPVQDLREVNKRVQDIHPTVPNPYNLLCALPPQRSWYTVLDLKDAFFCLRLHPTSQPLFAFEWRDPGTGRTGQLTWTRLPQGFKNSPTIFNEALHRDLANFRIQHPQVTLLQYVDDLLLAGATKQDCLEGTKALLLELSDLGYRASAKKAQICRREVTYLGYSLRDGQRWLTEARKKTVVQIPAPTTAKQVREFLGTAGFCRLWIPGFATLAAPLYPLTKPKGEFSWAPEHQKAFDAIKKALLSAPALALPDVTKPFTLYVDERKGVARGVLTQTLGPWRRPVAYLSKKLDPVASGWPVCLKAIAAVAILVKDADKLTLGQNITVIAPHALENIVRQPPDRWMTNARMTHYQSLLLTERVTFAPPAALNPATLLPEETDEPVTHDCHQLLIEETGVRKDLTDIPLTGEVLTWFTDGSSYVVEGKRMAGAAVVDGTRTIWASSLPEGTSAQKAELMALTQALRLAEGKSINIYTDSRYAFATAHVHGAIYKQRGWLTSAGREIKNKEEILSLLEALHLPKRLAIIHCPGHQKAKDPISRGNQMADRVAKQAAQGVNLLAGKRTADGSEFEKRTADGSEFESPKKKAKVE

SEQ ID NO: 376 - protein, 2090 aa, synthetic construct; identical to SEQ ID NO: 154

SEQ ID NO: 377 - protein, 2091 aa, synthetic construct; identical to SEQ ID NO: 145

SEQ ID NO: 378 - protein, 2089 aa, synthetic construct
MPAAKRVKLDGGDKKYSIGLDIGTNSVGWAVITDEYKVPSKKFKVLGNTDRHSIKKNLIGALLFDSGETAEATRLKRTARRRYTRRKNRICYLQEIFSNEMAKVDDSFFHRLEESFLVEEDKKHERHPIFGNIVDEVAYHEKYPTIYHLRKKLVDSTDKADLRLIYLALAHMIKFRGHFLIEGDLNPDNSDVDKLFIQLVQTYNQLFEENPINASGVDAKAILSARLSKSRRLENLIAQLPGEKKNGLFGNLIALSLGLTPNFKSNFDLAEDAKLQLSKDTYDDDLDNLLAQIGDQYADLFLAAKNLSDAILLSDILRVNTEITKAPLSASMIKRYDEHHQDLTLLKALVRQQLPEKYKEIFFDQSKNGYAGYIDGGASQEEFYKFIKPILEKMDGTEELLVKLNREDLLRKQRTFDNGSIPHQIHLGELHAILRRQEDFYPFLKDNREKIEKILTFRIPYYVGPLARGNSRFAWMTRKSEETITPWNFEEVVDKGASAQSFIERMTNFDKNLPNEKVLPKHSLLYEYFTVYNELTKVKYVTEGMRKPAFLSGEQKKAIVDLLFKTNRKVTVKQLKEDYFKKIECFDSVEISGVEDRFNASLGTYHDLLKIIKDKDFLDNEENEDILEDIVLTLTLFEDREMIEERLKTYAHLFDDKVMKQLKRRRYTGWGRLSRKLINGIRDKQSGKTILDFLKSDGFANRNFMQLIHDDSLTFKEDIQKAQVSGQGDSLHEHIANLAGSPAIKKGILQTVKVVDELVKVMGRHKPENIVIEMARENQTTQKGQKNSRERMKRIEEGIKELGSQILKEHPVENTQLQNEKLYLYYLQNGRDMYVDQELDINRLSDYDVDHIVPQSFLKDDSIDNKVLTRSDKARGKSDNVPSEEVVKKMKNYWRQLLNAKLITQRKFDNLTKAERGGLSELDKAGFIKRQLVETRQITKHVAQILDSRMNTKYDENDKLIREVKVITLKSKLVSDFRKDFQFYKVREINNYHHAHDAYLNAVVGTALIKKYPKLESEFVYGDYKVYDVRKMIAKSEQEIGKATAKYFFYSNIMNFFKTEITLANGEIRKRPLIETNGETGEIVWDKGRDFATVRKVLSMPQVNIVKKTEVQTGGFSKESILPKRNSDKLIARKKDWDPKKYGGFDSPTVAYSVLVVAKVEKGKSKKLKSVKELLGITIMERSSFEKNPIDFLEAKGYKEVKKDLIIKLPKYSLFELENGRKRMLASAGELQKGNELALPSKYVNFLYLASHYEKLKGSPEDNEQKQLFVEQHKHYLDEIIEQISEFSKRVILADANLDKVLSAYNKHRDKPIREQAENIIHLFTLTNLGAPAAFKYFDTTIDRKRYTSTKEVLDATLIHQSITGLYETRIDLSQLGGDGGGGGGSGGGGSGGTLQLDDEYRLYSPLVKPDQNIQFWLEQFPQAWAETAGMGLAKQVPPQVIQLKASATPVSVRQYPLSKEAQEGIRPHVQRLIQQGILVPVQSPWNTPLLPVRKPGTNDYRPVQDLREVNKRVQDIHPTVPNPYNLLCALPPQRSWYTVLDLKDAFFCLRLHPTSQPLFAFEWRDPGTGRTGQLTWTRLPQGFKNSPTIFNEALHRDLANFRIQHPQVTLLQYVDDLLLAGATKQDCLEGTKALLLELSDLGYRASAKKAQICRREVTYLGYSLRDGQRWLTEARKKTVVQIPAPTTAKQVREFLGTAGFCRLWIPGFATLAAPLYPLTKPKGEFSWAPEHQKAFDAIKKALLSAPALALPDVTKPFTLYVDERKGVARGVLTQTLGPWRRPVAYLSKKLDPVASGWPVCLKAIAAVAILVKDADKLTLGQNITVIAPHALENIVRQPPDRWMTNARMTHYQSLLLTERVTFAPPAALNPATLLPEETDEPVTHDCHQLLIEETGVRKDLTDIPLTGEVLTWFTDGSSYVVEGKRMAGAAVVDGTRTIWASSLPEGTSAQKAELMALTQALRLAEGKSINIYTDSRYAFATAHVHGAIYKQRGWLTSAGREIKNKEEILSLLEALHLPKRLAIIHCPGHQKAKDPISRGNQMADRVAKQAAQGVNLLAGKRTADGSEFEKRTADGSEFESPKKKAKVE

SEQ ID NO: 379 - protein, 2088 aa, synthetic construct
MPAAKRVKLDGGDKKYSIGLDIGTNSVGWAVITDEYKVPSKKFKVLGNTDRHSIKKNLIGALLFDSGETAEATRLKRTARRRYTRRKNRICYLQEIFSNEMAKVDDSFFHRLEESFLVEEDKKHERHPIFGNIVDEVAYHEKYPTIYHLRKKLVDSTDKADLRLIYLALAHMIKFRGHFLIEGDLNPDNSDVDKLFIQLVQTYNQLFEENPINASGVDAKAILSARLSKSRRLENLIAQLPGEKKNGLFGNLIALSLGLTPNFKSNFDLAEDAKLQLSKDTYDDDLDNLLAQIGDQYADLFLAAKNLSDAILLSDILRVNTEITKAPLSASMIKRYDEHHQDLTLLKALVRQQLPEKYKEIFFDQSKNGYAGYIDGGASQEEFYKFIKPILEKMDGTEELLVKLNREDLLRKQRTFDNGSIPHQIHLGELHAILRRQEDFYPFLKDNREKIEKILTFRIPYYVGPLARGNSRFAWMTRKSEETITPWNFEEVVDKGASAQSFIERMTNFDKNLPNEKVLPKHSLLYEYFTVYNELTKVKYVTEGMRKPAFLSGEQKKAIVDLLFKTNRKVTVKQLKEDYFKKIECFDSVEISGVEDRFNASLGTYHDLLKIIKDKDFLDNEENEDILEDIVLTLTLFEDREMIEERLKTYAHLFDDKVMKQLKRRRYTGWGRLSRKLINGIRDKQSGKTILDFLKSDGFANRNFMQLIHDDSLTFKEDIQKAQVSGQGDSLHEHIANLAGSPAIKKGILQTVKVVDELVKVMGRHKPENIVIEMARENQTTQKGQKNSRERMKRIEEGIKELGSQILKEHPVENTQLQNEKLYLYYLQNGRDMYVDQELDINRLSDYDVDHIVPQSFLKDDSIDNKVLTRSDKARGKSDNVPSEEVVKKMKNYWRQLLNAKLITQRKFDNLTKAERGGLSELDKAGFIKRQLVETRQITKHVAQILDSRMNTKYDENDKLIREVKVITLKSKLVSDFRKDFQFYKVREINNYHHAHDAYLNAVVGTALIKKYPKLESEFVYGDYKVYDVRKMIAKSEQEIGKATAKYFFYSNIMNFFKTEITLANGEIRKRPLIETNGETGEIVWDKGRDFATVRKVLSMPQVNIVKKTEVQTGGFSKESILPKRNSDKLIARKKDWDPKKYGGFDSPTVAYSVLVVAKVEKGKSKKLKSVKELLGITIMERSSFEKNPIDFLEAKGYKEVKKDLIIKLPKYSLFELENGRKRMLASAGELQKGNELALPSKYVNFLYLASHYEKLKGSPEDNEQKQLFVEQHKHYLDEIIEQISEFSKRVILADANLDKVLSAYNKHRDKPIREQAENIIHLFTLTNLGAPAAFKYFDTTIDRKRYTSTKEVLDATLIHQSITGLYETRIDLSQLGGDGGGSSPAPGGGGGTLQLDDEYRLYSPLVKPDQNIQFWLEQFPQAWAETAGMGLAKQVPPQVIQLKASATPVSVRQYPLSKEAQEGIRPHVQRLIQQGILVPVQSPWNTPLLPVRKPGTNDYRPVQDLREVNKRVQDIHPTVPNPYNLLCALPPQRSWYTVLDLKDAFFCLRLHPTSQPLFAFEWRDPGTGRTGQLTWTRLPQGFKNSPTIFNEALHRDLANFRIQHPQVTLLQYVDDLLLAGATKQDCLEGTKALLLELSDLGYRASAKKAQICRREVTYLGYSLRDGQRWLTEARKKTVVQIPAPTTAKQVREFLGTAGFCRLWIPGFATLAAPLYPLTKPKGEFSWAPEHQKAFDAIKKALLSAPALALPDVTKPFTLYVDERKGVARGVLTQTLGPWRRPVAYLSKKLDPVASGWPVCLKAIAAVAILVKDADKLTLGQNITVIAPHALENIVRQPPDRWMTNARMTHYQSLLLTERVTFAPPAALNPATLLPEETDEPVTHDCHQLLIEETGVRKDLTDIPLTGEVLTWFTDGSSYVVEGKRMAGAAVVDGTRTIWASSLPEGTSAQKAELMALTQALRLAEGKSINIYTDSRYAFATAHVHGAIYKQRGWLTSAGREIKNKEEILSLLEALHLPKRLAIIHCPGHQKAKDPISRGNQMADRVAKQAAQGVNLLAGKRTADGSEFEKRTADGSEFESPKKKAKVE

SEQ ID NO: 380 - protein, 2087 aa, synthetic construct; identical to SEQ ID NO: 185

SEQ ID NO: 381 - protein, 2086 aa, synthetic construct; identical to SEQ ID NO: 152

SEQ ID NO: 382 - protein, 2088 aa, synthetic construct
MPAAKRVKLDGGDKKYSIGLDIGTNSVGWAVITDEYKVPSKKFKVLGNTDRHSIKKNLIGALLFDSGETAEATRLKRTARRRYTRRKNRICYLQEIFSNEMAKVDDSFFHRLEESFLVEEDKKHERHPIFGNIVDEVAYHEKYPTIYHLRKKLVDSTDKADLRLIYLALAHMIKFRGHFLIEGDLNPDNSDVDKLFIQLVQTYNQLFEENPINASGVDAKAILSARLSKSRRLENLIAQLPGEKKNGLFGNLIALSLGLTPNFKSNFDLAEDAKLQLSKDTYDDDLDNLLAQIGDQYADLFLAAKNLSDAILLSDILRVNTEITKAPLSASMIKRYDEHHQDLTLLKALVRQQLPEKYKEIFFDQSKNGYAGYIDGGASQEEFYKFIKPILEKMDGTEELLVKLNREDLLRKQRTFDNGSIPHQIHLGELHAILRRQEDFYPFLKDNREKIEKILTFRIPYYVGPLARGNSRFAWMTRKSEETITPWNFEEVVDKGASAQSFIERMTNFDKNLPNEKVLPKHSLLYEYFTVYNELTKVKYVTEGMRKPAFLSGEQKKAIVDLLFKTNRKVTVKQLKEDYFKKIECFDSVEISGVEDRFNASLGTYHDLLKIIKDKDFLDNEENEDILEDIVLTLTLFEDREMIEERLKTYAHLFDDKVMKQLKRRRYTGWGRLSRKLINGIRDKQSGKTILDFLKSDGFANRNFMQLIHDDSLTFKEDIQKAQVSGQGDSLHEHIANLAGSPAIKKGILQTVKVVDELVKVMGRHKPENIVIEMARENQTTQKGQKNSRERMKRIEEGIKELGSQILKEHPVENTQLQNEKLYLYYLQNGRDMYVDQELDINRLSDYDVDHIVPQSFLKDDSIDNKVLTRSDKARGKSDNVPSEEVVKKMKNYWRQLLNAKLITQRKFDNLTKAERGGLSELDKAGFIKRQLVETRQITKHVAQILDSRMNTKYDENDKLIREVKVITLKSKLVSDFRKDFQFYKVREINNYHHAHDAYLNAVVGTALIKKYPKLESEFVYGDYKVYDVRKMIAKSEQEIGKATAKYFFYSNIMNFFKTEITLANGEIRKRPLIETNGETGEIVWDKGRDFATVRKVLSMPQVNIVKKTEVQTGGFSKESILPKRNSDKLIARKKDWDPKKYGGFDSPTVAYSVLVVAKVEKGKSKKLKSVKELLGITIMERSSFEKNPIDFLEAKGYKEVKKDLIIKLPKYSLFELENGRKRMLASAGELQKGNELALPSKYVNFLYLASHYEKLKGSPEDNEQKQLFVEQHKHYLDEIIEQISEFSKRVILADANLDKVLSAYNKHRDKPIREQAENIIHLFTLTNLGAPAAFKYFDTTIDRKRYTSTKEVLDATLIHQSITGLYETRIDLSQLGGDGGPAPAPAPAPGGTLQLDDEYRLYSPLVKPDQNIQFWLEQFPQAWAETAGMGLAKQVPPQVIQLKASATPVSVRQYPLSKEAQEGIRPHVQRLIQQGILVPVQSPWNTPLLPVRKPGTNDYRPVQDLREVNKRVQDIHPTVPNPYNLLCALPPQRSWYTVLDLKDAFFCLRLHPTSQPLFAFEWRDPGTGRTGQLTWTRLPQGFKNSPTIFNEALHRDLANFRIQHPQVTLLQYVDDLLLAGATKQDCLEGTKALLLELSDLGYRASAKKAQICRREVTYLGYSLRDGQRWLTEARKKTVVQIPAPTTAKQVREFLGTAGFCRLWIPGFATLAAPLYPLTKPKGEFSWAPEHQKAFDAIKKALLSAPALALPDVTKPFTLYVDERKGVARGVLTQTLGPWRRPVAYLSKKLDPVASGWPVCLKAIAAVAILVKDADKLTLGQNITVIAPHALENIVRQPPDRWMTNARMTHYQSLLLTERVTFAPPAALNPATLLPEETDEPVTHDCHQLLIEETGVRKDLTDIPLTGEVLTWFTDGSSYVVEGKRMAGAAVVDGTRTIWASSLPEGTSAQKAELMALTQALRLAEGKSINIYTDSRYAFATAHVHGAIYKQRGWLTSAGREIKNKEEILSLLEALHLPKRLAIIHCPGHQKAKDPISRGNQMADRVAKQAAQGVNLLAGKRTADGSEFEKRTADGSEFESPKKKAKVE

SEQ ID NO: 383 - protein, 2085 aa, synthetic construct; identical to SEQ ID NO: 178

SEQ ID NO: 384 - protein, 2088 aa, synthetic construct; identical to SEQ ID NO: 144

SEQ ID NO: 385 - protein, 2090 aa, synthetic construct
MPAAKRVKLDGGDKKYSIGLDIGTNSVGWAVITDEYKVPSKKFKVLGNTDRHSIKKNLIGALLFDSGETAEATRLKRTARRRYTRRKNRICYLQEIFSNEMAKVDDSFFHRLEESFLVEEDKKHERHPIFGNIVDEVAYHEKYPTIYHLRKKLVDSTDKADLRLIYLALAHMIKFRGHFLIEGDLNPDNSDVDKLFIQLVQTYNQLFEENPINASGVDAKAILSARLSKSRRLENLIAQLPGEKKNGLFGNLIALSLGLTPNFKSNFDLAEDAKLQLSKDTYDDDLDNLLAQIGDQYADLFLAAKNLSDAILLSDILRVNTEITKAPLSASMIKRYDEHHQDLTLLKALVRQQLPEKYKEIFFDQSKNGYAGYIDGGASQEEFYKFIKPILEKMDGTEELLVKLNREDLLRKQRTFDNGSIPHQIHLGELHAILRRQEDFYPFLKDNREKIEKILTFRIPYYVGPLARGNSRFAWMTRKSEETITPWNFEEVVDKGASAQSFIERMTNFDKNLPNEKVLPKHSLLYEYFTVYNELTKVKYVTEGMRKPAFLSGEQKKAIVDLLFKTNRKVTVKQLKEDYFKKIECFDSVEISGVEDRFNASLGTYHDLLKIIKDKDFLDNEENEDILEDIVLTLTLFEDREMIEERLKTYAHLFDDKVMKQLKRRRYTGWGRLSRKLINGIRDKQSGKTILDFLKSDGFANRNFMQLIHDDSLTFKEDIQKAQVSGQGDSLHEHIANLAGSPAIKKGILQTVKVVDELVKVMGRHKPENIVIEMARENQTTQKGQKNSRERMKRIEEGIKELGSQILKEHPVENTQLQNEKLYLYYLQNGRDMYVDQELDINRLSDYDVDHIVPQSFLKDDSIDNKVLTRSDKARGKSDNVPSEEVVKKMKNYWRQLLNAKLITQRKFDNLTKAERGGLSELDKAGFIKRQLVETRQITKHVAQILDSRMNTKYDENDKLIREVKVITLKSKLVSDFRKDFQFYKVREINNYHHAHDAYLNAVVGTALIKKYPKLESEFVYGDYKVYDVRKMIAKSEQEIGKATAKYFFYSNIMNFFKTEITLANGEIRKRPLIETNGETGEIVWDKGRDFATVRKVLSMPQVNIVKKTEVQTGGFSKESILPKRNSDKLIARKKDWDPKKYGGFDSPTVAYSVLVVAKVEKGKSKKLKSVKELLGITIMERSSFEKNPIDFLEAKGYKEVKKDLIIKLPKYSLFELENGRKRMLASAGELQKGNELALPSKYVNFLYLASHYEKLKGSPEDNEQKQLFVEQHKHYLDEIIEQISEFSKRVILADANLDKVLSAYNKHRDKPIREQAENIIHLFTLTNLGAPAAFKYFDTTIDRKRYTSTKEVLDATLIHQSITGLYETRIDLSQLGGDGGPAPGSSEAAAKGGTLQLDDEYRLYSPLVKPDQNIQFWLEQFPQAWAETAGMGLAKQVPPQVIQLKASATPVSVRQYPLSKEAQEGIRPHVQRLIQQGILVPVQSPWNTPLLPVRKPGTNDYRPVQDLREVNKRVQDIHPTVPNPYNLLCALPPQRSWYTVLDLKDAFFCLRLHPTSQPLFAFEWRDPGTGRTGQLTWTRLPQGFKNSPTIFNEALHRDLANFRIQHPQVTLLQYVDDLLLAGATKQDCLEGTKALLLELSDLGYRASAKKAQICRREVTYLGYSLRDGQRWLTEARKKTVVQIPAPTTAKQVREFLGTAGFCRLWIPGFATLAAPLYPLTKPKGEFSWAPEHQKAFDAIKKALLSAPALALPDVTKPFTLYVDERKGVARGVLTQTLGPWRRPVAYLSKKLDPVASGWPVCLKAIAAVAILVKDADKLTLGQNITVIAPHALENIVRQPPDRWMTNARMTHYQSLLLTERVTFAPPAALNPATLLPEETDEPVTHDCHQLLIEETGVRKDLTDIPLTGEVLTWFTDGSSYVVEGKRMAGAAVVDGTRTIWASSLPEGTSAQKAELMALTQALRLAEGKSINIYTDSRYAFATAHVHGAIYKQRGWLTSAGREIKNKEEILSLLEALHLPKRLAIIHCPGHQKAKDPISRGNQMADRVAKQAAQGVNLLAGKRTADGSEFEKRTADGSEFESPKKKAKVE

SEQ ID NO: 386 - protein, 2085 aa, synthetic construct; identical to SEQ ID NO: 123

SEQ ID NO: 387 - protein, 2088 aa, synthetic construct; identical to SEQ ID NO: 155

SEQ ID NO: 388 - protein, 2088 aa, synthetic construct; identical to SEQ ID NO: 134

SEQ ID NO: 389 - protein, 2088 aa, synthetic construct; identical to SEQ ID NO: 171

SEQ ID NO: 390 - protein, 2090 aa, synthetic construct
MPAAKRVKLDGGDKKYSIGLDIGTNSVGWAVITDEYKVPSKKFKVLGNTDRHSIKKNLIGALLFDSGETAEATRLKRTARRRYTRRKNRICYLQEIFSNEMAKVDDSFFHRLEESFLVEEDKKHERHPIFGNIVDEVAYHEKYPTIYHLRKKLVDSTDKADLRLIYLALAHMIKFRGHFLIEGDLNPDNSDVDKLFIQLVQTYNQLFEENPINASGVDAKAILSARLSKSRRLENLIAQLPGEKKNGLFGNLIALSLGLTPNFKSNFDLAEDAKLQLSKDTYDDDLDNLLAQIGDQYADLFLAAKNLSDAILLSDILRVNTEITKAPLSASMIKRYDEHHQDLTLLKALVRQQLPEKYKEIFFDQSKNGYAGYIDGGASQEEFYKFIKPILEKMDGTEELLVKLNREDLLRKQRTFDNGSIPHQIHLGELHAILRRQEDFYPFLKDNREKIEKILTFRIPYYVGPLARGNSRFAWMTRKSEETITPWNFEEVVDKGASAQSFIERMTNFDKNLPNEKVLPKHSLLYEYFTVYNELTKVKYVTEGMRKPAFLSGEQKKAIVDLLFKTNRKVTVKQLKEDYFKKIECFDSVEISGVEDRFNASLGTYHDLLKIIKDKDFLDNEENEDILEDIVLTLTLFEDREMIEERLKTYAHLFDDKVMKQLKRRRYTGWGRLSRKLINGIRDKQSGKTILDFLKSDGFANRNFMQLIHDDSLTFKEDIQKAQVSGQGDSLHEHIANLAGSPAIKKGILQTVKVVDELVKVMGRHKPENIVIEMARENQTTQKGQKNSRERMKRIEEGIKELGSQILKEHPVENTQLQNEKLYLYYLQNGRDMYVDQELDINRLSDYDVDHIVPQSFLKDDSIDNKVLTRSDKARGKSDNVPSEEVVKKMKNYWRQLLNAKLITQRKFDNLTKAERGGLSELDKAGFIKRQLVETRQITKHVAQILDSRMNTKYDENDKLIREVKVITLKSKLVSDFRKDFQFYKVREINNYHHAHDAYLNAVVGTALIKKYPKLESEFVYGDYKVYDVRKMIAKSEQEIGKATAKYFFYSNIMNFFKTEITLANGEIRKRPLIETNGETGEIVWDKGRDFATVRKVLSMPQVNIVKKTEVQTGGFSKESILPKRNSDKLIARKKDWDPKKYGGFDSPTVAYSVLVVAKVEKGKSKKLKSVKELLGITIMERSSFEKNPIDFLEAKGYKEVKKDLIIKLPKYSLFELENGRKRMLASAGELQKGNELALPSKYVNFLYLASHYEKLKGSPEDNEQKQLFVEQHKHYLDEIIEQISEFSKRVILADANLDKVLSAYNKHRDKPIREQAENIIHLFTLTNLGAPAAFKYFDTTIDRKRYTSTKEVLDATLIHQSITGLYETRIDLSQLGGDGGEAAAKGSSPAPGGTLQLDDEYRLYSPLVKPDQNIQFWLEQFPQAWAETAGMGLAKQVPPQVIQLKASATPVSVRQYPLSKEAQEGIRPHVQRLIQQGILVPVQSPWNTPLLPVRKPGTNDYRPVQDLREVNKRVQDIHPTVPNPYNLLCALPPQRSWYTVLDLKDAFFCLRLHPTSQPLFAFEWRDPGTGRTGQLTWTRLPQGFKNSPTIFNEALHRDLANFRIQHPQVTLLQYVDDLLLAGATKQDCLEGTKALLLELSDLGYRASAKKAQICRREVTYLGYSLRDGQRWLTEARKKTVVQIPAPTTAKQVREFLGTAGFCRLWIPGFATLAAPLYPLTKPKGEFSWAPEHQKAFDAIKKALLSAPALALPDVTKPFTLYVDERKGVARGVLTQTLGPWRRPVAYLSKKLDPVASGWPVCLKAIAAVAILVKDADKLTLGQNITVIAPHALENIVRQPPDRWMTNARMTHYQSLLLTERVTFAPPAALNPATLLPEETDEPVTHDCHQLLIEETGVRKDLTDIPLTGEVLTWFTDGSSYVVEGKRMAGAAVVDGTRTIWASSLPEGTSAQKAELMALTQALRLAEGKSINIYTDSRYAFATAHVHGAIYKQRGWLTSAGREIKNKEEILSLLEALHLPKRLAIIHCPGHQKAKDPISRGNQMADRVAKQAAQGVNLLAGKRTADGSEFEKRTADGSEFESPKKKAKVE

SEQ ID NO: 391 - protein, 2094 aa, synthetic construct; identical to SEQ ID NO: 159

SEQ ID NO: 392 - protein, 2084 aa, synthetic construct; identical to SEQ ID NO: 147

SEQ ID NO: 393 - protein, 2085 aa, synthetic construct; identical to SEQ ID NO: 174

SEQ ID NO: 394 - protein, 2087 aa, synthetic construct
MPAAKRVKLDGGDKKYSIGLDIGTNSVGWAVITDEYKVPSKKFKVLGNTDRHSIKKNLIGALLFDSGETAEATRLKRTARRRYTRRKNRICYLQEIFSNEMAKVDDSFFHRLEESFLVEEDKKHERHPIFGNIVDEVAYHEKYPTIYHLRKKLVDSTDKADLRLIYLALAHMIKFRGHFLIEGDLNPDNSDVDKLFIQLVQTYNQLFEENPINASGVDAKAILSARLSKSRRLENLIAQLPGEKKNGLFGNLIALSLGLTPNFKSNFDLAEDAKLQLSKDTYDDDLDNLLAQIGDQYADLFLAAKNLSDAILLSDILRVNTEITKAPLSASMIKRYDEHHQDLTLLKALVRQQLPEKYKEIFFDQSKNGYAGYIDGGASQEEFYKFIKPILEKMDGTEELLVKLNREDLLRKQRTFDNGSIPHQIHLGELHAILRRQEDFYPFLKDNREKIEKILTFRIPYYVGPLARGNSRFAWMTRKSEETITPWNFEEVVDKGASAQSFIERMTNFDKNLPNEKVLPKHSLLYEYFTVYNELTKVKYVTEGMRKPAFLSGEQKKAIVDLLFKTNRKVTVKQLKEDYFKKIECFDSVEISGVEDRFNASLGTYHDLLKIIKDKDFLDNEENEDILEDIVLTLTLFEDREMIEERLKTYAHLFDDKVMKQLKRRRYTGWGRLSRKLINGIRDKQSGKTILDFLKSDGFANRNFMQLIHDDSLTFKEDIQKAQVSGQGDSLHEHIANLAGSPAIKKGILQTVKVVDELVKVMGRHKPENIVIEMARENQTTQKGQKNSRERMKRIEEGIKELGSQILKEHPVENTQLQNEKLYLYYLQNGRDMYVDQELDINRLSDYDVDHIVPQSFLKDDSIDNKVLTRSDKARGKSDNVPSEEVVKKMKNYWRQLLNAKLITQRKFDNLTKAERGGLSELDKAGFIKRQLVETRQITKHVAQILDSRMNTKYDENDKLIREVKVITLKSKLVSDFRKDFQFYKVREINNYHHAHDAYLNAVVGTALIKKYPKLESEFVYGDYKVYDVRKMIAKSEQEIGKATAKYFFYSNIMNFFKTEITLANGEIRKRPLIETNGETGEIVWDKGRDFATVRKVLSMPQVNIVKKTEVQTGGFSKESILPKRNSDKLIARKKDWDPKKYGGFDSPTVAYSVLVVAKVEKGKSKKLKSVKELLGITIMERSSFEKNPIDFLEAKGYKEVKKDLIIKLPKYSLFELENGRKRMLASAGELQKGNELALPSKYVNFLYLASHYEKLKGSPEDNEQKQLFVEQHKHYLDEIIEQISEFSKRVILADANLDKVLSAYNKHRDKPIREQAENIIHLFTLTNLGAPAAFKYFDTTIDRKRYTSTKEVLDATLIHQSITGLYETRIDLSQLGGDGGGGSEAAAKGGTLQLDDEYRLYSPLVKPDQNIQFWLEQFPQAWAETAGMGLAKQVPPQVIQLKASATPVSVRQYPLSKEAQEGIRPHVQRLIQQGILVPVQSPWNTPLLPVRKPGTNDYRPVQDLREVNKRVQDIHPTVPNPYNLLCALPPQRSWYTVLDLKDAFFCLRLHPTSQPLFAFEWRDPGTGRTGQLTWTRLPQGFKNSPTIFNEALHRDLANFRIQHPQVTLLQYVDDLLLAGATKQDCLEGTKALLLELSDLGYRASAKKAQICRREVTYLGYSLRDGQRWLTEARKKTVVQIPAPTTAKQVREFLGTAGFCRLWIPGFATLAAPLYPLTKPKGEFSWAPEHQKAFDAIKKALLSAPALALPDVTKPFTLYVDERKGVARGVLTQTLGPWRRPVAYLSKKLDPVASGWPVCLKAIAAVAILVKDADKLTLGQNITVIAPHALENIVRQPPDRWMTNARMTHYQSLLLTERVTFAPPAALNPATLLPEETDEPVTHDCHQLLIEETGVRKDLTDIPLTGEVLTWFTDGSSYVVEGKRMAGAAVVDGTRTIWASSLPEGTSAQKAELMALTQALRLAEGKSINIYTDSRYAFATAHVHGAIYKQRGWLTSAGREIKNKEEILSLLEALHLPKRLAIIHCPGHQKAKDPISRGNQMADRVAKQAAQGVNLLAGKRTADGSEFEKRTADGSEFESPKKKAKVE

SEQ ID NO: 395 - protein, 2088 aa, synthetic construct; identical to SEQ ID NO: 180

SEQ ID NO: 396 - protein, 2097 aa, synthetic construct; identical to SEQ ID NO: 113

SEQ ID NO: 397 - protein, 2085 aa, synthetic construct; identical to SEQ ID NO: 184

SEQ ID NO: 398 - protein, 2090 aa, synthetic construct; identical to SEQ ID NO: 119

SEQ ID NO: 399 - protein, 2089 aa, synthetic construct
MPAAKRVKLDGGDKKYSIGLDIGTNSVGWAVITDEYKVPSKKFKVLGNTDRHSIKKNLIGALLFDSGETAEATRLKRTARRRYTRRKNRICYLQEIFSNEMAKVDDSFFHRLEESFLVEEDKKHERHPIFGNIVDEVAYHEKYPTIYHLRKKLVDSTDKADLRLIYLALAHMIKFRGHFLIEGDLNPDNSDVDKLFIQLVQTYNQLFEENPINASGVDAKAILSARLSKSRRLENLIAQLPGEKKNGLFGNLIALSLGLTPNFKSNFDLAEDAKLQLSKDTYDDDLDNLLAQIGDQYADLFLAAKNLSDAILLSDILRVNTEITKAPLSASMIKRYDEHHQDLTLLKALVRQQLPEKYKEIFFDQSKNGYAGYIDGGASQEEFYKFIKPILEKMDGTEELLVKLNREDLLRKQRTFDNGSIPHQIHLGELHAILRRQEDFYPFLKDNREKIEKILTFRIPYYVGPLARGNSRFAWMTRKSEETITPWNFEEVVDKGASAQSFIERMTNFDKNLPNEKVLPKHSLLYEYFTVYNELTKVKYVTEGMRKPAFLSGEQKKAIVDLLFKTNRKVTVKQLKEDYFKKIECFDSVEISGVEDRFNASLGTYHDLLKIIKDKDFLDNEENEDILEDIVLTLTLFEDREMIEERLKTYAHLFDDKVMKQLKRRRYTGWGRLSRKLINGIRDKQSGKTILDFLKSDGFANRNFMQLIHDDSLTFKEDIQKAQVSGQGDSLHEHIANLAGSPAIKKGILQTVKVVDELVKVMGRHKPENIVIEMARENQTTQKGQKNSRERMKRIEEGIKELGSQILKEHPVENTQLQNEKLYLYYLQNGRDMYVDQELDINRLSDYDVDHIVPQSFLKDDSIDNKVLTRSDKARGKSDNVPSEEVVKKMKNYWRQLLNAKLITQRKFDNLTKAERGGLSELDKAGFIKRQLVETRQITKHVAQILDSRMNTKYDENDKLIREVKVITLKSKLVSDFRKDFQFYKVREINNYHHAHDAYLNAVVGTALIKKYPKLESEFVYGDYKVYDVRKMIAKSEQEIGKATAKYFFYSNIMNFFKTEITLANGEIRKRPLIETNGETGEIVWDKGRDFATVRKVLSMPQVNIVKKTEVQTGGFSKESILPKRNSDKLIARKKDWDPKKYGGFDSPTVAYSVLVVAKVEKGKSKKLKSVKELLGITIMERSSFEKNPIDFLEAKGYKEVKKDLIIKLPKYSLFELENGRKRMLASAGELQKGNELALPSKYVNFLYLASHYEKLKGSPEDNEQKQLFVEQHKHYLDEIIEQISEFSKRVILADANLDKVLSAYNKHRDKPIREQAENIIHLFTLTNLGAPAAFKYFDTTIDRKRYTSTKEVLDATLIHQSITGLYETRIDLSQLGGDGGEAAAKEAAAKGGTLQLDDEYRLYSPLVKPDQNIQFWLEQFPQAWAETAGMGLAKQVPPQVIQLKASATPVSVRQYPLSKEAQEGIRPHVQRLIQQGILVPVQSPWNTPLLPVRKPGTNDYRPVQDLREVNKRVQDIHPTVPNPYNLLCALPPQRSWYTVLDLKDAFFCLRLHPTSQPLFAFEWRDPGTGRTGQLTWTRLPQGFKNSPTIFNEALHRDLANFRIQHPQVTLLQYVDDLLLAGATKQDCLEGTKALLLELSDLGYRASAKKAQICRREVTYLGYSLRDGQRWLTEARKKTVVQIPAPTTAKQVREFLGTAGFCRLWIPGFATLAAPLYPLTKPKGEFSWAPEHQKAFDAIKKALLSAPALALPDVTKPFTLYVDERKGVARGVLTQTLGPWRRPVAYLSKKLDPVASGWPVCLKAIAAVAILVKDADKLTLGQNITVIAPHALENIVRQPPDRWMTNARMTHYQSLLLTERVTFAPPAALNPATLLPEETDEPVTHDCHQLLIEETGVRKDLTDIPLTGEVLTWFTDGSSYVVEGKRMAGAAVVDGTRTIWASSLPEGTSAQKAELMALTQALRLAEGKSINIYTDSRYAFATAHVHGAIYKQRGWLTSAGREIKNKEEILSLLEALHLPKRLAIIHCPGHQKAKDPISRGNQMADRVAKQAAQGVNLLAGKRTADGSEFEKRTADGSEFESPKKKAKVE

SEQ ID NO: 400 - protein, 2088 aa, synthetic construct; identical to SEQ ID NO: 129

SEQ ID NO: 401 - protein, 2088 aa, synthetic construct
MPAAKRVKLDGGDKKYSIGLDIGTNSVGWAVITDEYKVPSKKFKVLGNTDRHSIKKNLIGALLFDSGETAEATRLKRTARRRYTRRKNRICYLQEIFSNEMAKVDDSFFHRLEESFLVEEDKKHERHPIFGNIVDEVAYHEKYPTIYHLRKKLVDSTDKADLRLIYLALAHMIKFRGHFLIEGDLNPDNSDVDKLFIQLVQTYNQLFEENPINASGVDAKAILSARLSKSRRLENLIAQLPGEKKNGLFGNLIALSLGLTPNFKSNFDLAEDAKLQLSKDTYDDDLDNLLAQIGDQYADLFLAAKNLSDAILLSDILRVNTEITKAPLSASMIKRYDEHHQDLTLLKALVRQQLPEKYKEIFFDQSKNGYAGYIDGGASQEEFYKFIKPILEKMDGTEELLVKLNREDLLRKQRTFDNGSIPHQIHLGELHAILRRQEDFYPFLKDNREKIEKILTFRIPYYVGPLARGNSRFAWMTRKSEETITPWNFEEVVDKGASAQSFIERMTNFDKNLPNEKVLPKHSLLYEYFTVYNELTKVKYVTEGMRKPAFLSGEQKKAIVDLLFKTNRKVTVKQLKEDYFKKIECFDSVEISGVEDRFNASLGTYHDLLKIIKDKDFLDNEENEDILEDIVLTLTLFEDREMIEERLKTYAHLFDDKVMKQLKRRRYTGWGRLSRKLINGIRDKQSGKTILDFLKSDGFANRNFMQLIHDDSLTFKEDIQKAQVSGQGDSLHEHIANLAGSPAIKKGILQTVKVVDELVKVMGRHKPENIVIEMARENQTTQKGQKNSRERMKRIEEGIKELGSQILKEHPVENTQLQNEKLYLYYLQNGRDMYVDQELDINRLSDYDVDHIVPQSFLKDDSIDNKVLTRSDKARGKSDNVPSEEVVKKMKNYWRQLLNAKLITQRKFDNLTKAERGGLSELDKAGFIKRQLVETRQITKHVAQILDSRMNTKYDENDKLIREVKVITLKSKLVSDFRKDFQFYKVREINNYHHAHDAYLNAVVGTALIKKYPKLESEFVYGDYKVYDVRKMIAKSEQEIGKATAKYFFYSNIMNFFKTEITLANGEIRKRPLIETNGETGEIVWDKGRDFATVRKVLSMPQVNIVKKTEVQTGGFSKESILPKRNSDKLIARKKDWDPKKYGGFDSPTVAYSVLVVAKVEKGKSKKLKSVKELLGITIMERSSFEKNPIDFLEAKGYKEVKKDLIIKLPKYSLFELENGRKRMLASAGELQKGNELALPSKYVNFLYLASHYEKLKGSPEDNEQKQLFVEQHKHYLDEIIEQISEFSKRVILADANLDKVLSAYNKHRDKPIREQAENIIHLFTLTNLGAPAAFKYFDTTIDRKRYTSTKEVLDATLIHQSITGLYETRIDLSQLGGDGGGSSGGSPAPGGTLQLDDEYRLYSPLVKPDQNIQFWLEQFPQAWAETAGMGLAKQVPPQVIQLKASATPVSVRQYPLSKEAQEGIRPHVQRLIQQGILVPVQSPWNTPLLPVRKPGTNDYRPVQDLREVNKRVQDIHPTVPNPYNLLCALPPQRSWYTVLDLKDAFFCLRLHPTSQPLFAFEWRDPGTGRTGQLTWTRLPQGFKNSPTIFNEALHRDLANFRIQHPQVTLLQYVDDLLLAGATKQDCLEGTKALLLELSDLGYRASAKKAQICRREVTYLGYSLRDGQRWLTEARKKTVVQIPAPTTAKQVREFLGTAGFCRLWIPGFATLAAPLYPLTKPKGEFSWAPEHQKAFDAIKKALLSAPALALPDVTKPFTLYVDERKGVARGVLTQTLGPWRRPVAYLSKKLDPVASGWPVCLKAIAAVAILVKDADKLTLGQNITVIAPHALENIVRQPPDRWMTNARMTHYQSLLLTERVTFAPPAALNPATLLPEETDEPVTHDCHQLLIEETGVRKDLTDIPLTGEVLTWFTDGSSYVVEGKRMAGAAVVDGTRTIWASSLPEGTSAQKAELMALTQALRLAEGKSINIYTDSRYAFATAHVHGAIYKQRGWLTSAGREIKNKEEILSLLEALHLPKRLAIIHCPGHQKAKDPISRGNQMADRVAKQAAQGVNLLAGKRTADGSEFEKRTADGSEFESPKKKAKVE

SEQ ID NO: 402 - protein, 2088 aa, synthetic construct
MPAAKRVKLDGGDKKYSIGLDIGTNSVGWAVITDEYKVPSKKFKVLGNTDRHSIKKNLIGALLFDSGETAEATRLKRTARRRYTRRKNRICYLQEIFSNEMAKVDDSFFHRLEESFLVEEDKKHERHPIFGNIVDEVAYHEKYPTIYHLRKKLVDSTDKADLRLIYLALAHMIKFRGHFLIEGDLNPDNSDVDKLFIQLVQTYNQLFEENPINASGVDAKAILSARLSKSRRLENLIAQLPGEKKNGLFGNLIALSLGLTPNFKSNFDLAEDAKLQLSKDTYDDDLDNLLAQIGDQYADLFLAAKNLSDAILLSDILRVNTEITKAPLSASMIKRYDEHHQDLTLLKALVRQQLPEKYKEIFFDQSKNGYAGYIDGGASQEEFYKFIKPILEKMDGTEELLVKLNREDLLRKQRTFDNGSIPHQIHLGELHAILRRQEDFYPFLKDNREKIEKILTFRIPYYVGPLARGNSRFAWMTRKSEETITPWNFEEVVDKGASAQSFIERMTNFDKNLPNEKVLPKHSLLYEYFTVYNELTKVKYVTEGMRKPAFLSGEQKKAIVDLLFKTNRKVTVKQLKEDYFKKIECFDSVEISGVEDRFNASLGTYHDLLKIIKDKDFLDNEENEDILEDIVLTLTLFEDREMIEERLKTYAHLFDDKVMKQLKRRRYTGWGRLSRKLINGIRDKQSGKTILDFLKSDGFANRNFMQLIHDDSLTFKEDIQKAQVSGQGDSLHEHIANLAGSPAIKKGILQTVKVVDELVKVMGRHKPENIVIEMARENQTTQKGQKNSRERMKRIEEGIKELGSQILKEHPVENTQLQNEKLYLYYLQNGRDMYVDQELDINRLSDYDVDHIVPQSFLKDDSIDNKVLTRSDKARGKSDNVPSEEVVKKMKNYWRQLLNAKLITQRKFDNLTKAERGGLSELDKAGFIKRQLVETRQITKHVAQILDSRMNTKYDENDKLIREVKVITLKSKLVSDFRKDFQFYKVREINNYHHAHDAYLNAVVGTALIKKYPKLESEFVYGDYKVYDVRKMIAKSEQEIGKATAKYFFYSNIMNFFKTEITLANGEIRKRPLIETNGETGEIVWDKGRDFATVRKVLSMPQVNIVKKTEVQTGGFSKESILPKRNSDKLIARKKDWDPKKYGGFDSPTVAYSVLVVAKVEKGKSKKLKSVKELLGITIMERSSFEKNPIDFLEAKGYKEVKKDLIIKLPKYSLFELENGRKRMLASAGELQKGNELALPSKYVNFLYLASHYEKLKGSPEDNEQKQLFVEQHKHYLDEIIEQISEFSKRVILADANLDKVLSAYNKHRDKPIREQAENIIHLFTLTNLGAPAAFKYFDTTIDRKRYTSTKEVLDATLIHQSITGLYETRIDLSQLGGDGGGGGGGSPAPGGTLQLDDEYRLYSPLVKPDQNIQFWLEQFPQAWAETAGMGLAKQVPPQVIQLKASATPVSVRQYPLSKEAQEGIRPHVQRLIQQGILVPVQSPWNTPLLPVRKPGTNDYRPVQDLREVNKRVQDIHPTVPNPYNLLCALPPQRSWYTVLDLKDAFFCLRLHPTSQPLFAFEWRDPGTGRTGQLTWTRLPQGFKNSPTIFNEALHRDLANFRIQHPQVTLLQYVDDLLLAGATKQDCLEGTKALLLELSDLGYRASAKKAQICRREVTYLGYSLRDGQRWLTEARKKTVVQIPAPTTAKQVREFLGTAGFCRLWIPGFATLAAPLYPLTKPKGEFSWAPEHQKAFDAIKKALLSAPALALPDVTKPFTLYVDERKGVARGVLTQTLGPWRRPVAYLSKKLDPVASGWPVCLKAIAAVAILVKDADKLTLGQNITVIAPHALENIVRQPPDRWMTNARMTHYQSLLLTERVTFAPPAALNPATLLPEETDEPVTHDCHQLLIEETGVRKDLTDIPLTGEVLTWFTDGSSYVVEGKRMAGAAVVDGTRTIWASSLPEGTSAQKAELMALTQALRLAEGKSINIYTDSRYAFATAHVHGAIYKQRGWLTSAGREIKNKEEILSLLEALHLPKRLAIIHCPGHQKAKDPISRGNQMADRVAKQAAQGVNLLAGKRTADGSEFEKRTADGSEFESPKKKAKVE

SEQ ID NO: 403 - protein, 2088 aa, synthetic construct; identical to SEQ ID NO: 130

SEQ ID NO: 404 - protein, 2094 aa, synthetic construct; identical to SEQ ID NO: 161

SEQ ID NO: 405 - protein, 2085 aa, synthetic construct
MPAAKRVKLDGGDKKYSIGLDIGTNSVGWAVITDEYKVPSKKFKVLGNTDRHSIKKNLIGALLFDSGETAEATRLKRTARRRYTRRKNRICYLQEIFSNEMAKVDDSFFHRLEESFLVEEDKKHERHPIFGNIVDEVAYHEKYPTIYHLRKKLVDSTDKADLRLIYLALAHMIKFRGHFLIEGDLNPDNSDVDKLFIQLVQTYNQLFEENPINASGVDAKAILSARLSKSRRLENLIAQLPGEKKNGLFGNLIALSLGLTPNFKSNFDLAEDAKLQLSKDTYDDDLDNLLAQIGDQYADLFLAAKNLSDAILLSDILRVNTEITKAPLSASMIKRYDEHHQDLTLLKALVRQQLPEKYKEIFFDQSKNGYAGYIDGGASQEEFYKFIKPILEKMDGTEELLVKLNREDLLRKQRTFDNGSIPHQIHLGELHAILRRQEDFYPFLKDNREKIEKILTFRIPYYVGPLARGNSRFAWMTRKSEETITPWNFEEVVDKGASAQSFIERMTNFDKNLPNEKVLPKHSLLYEYFTVYNELTKVKYVTEGMRKPAFLSGEQKKAIVDLLFKTNRKVTVKQLKEDYFKKIECFDSVEISGVEDRFNASLGTYHDLLKIIKDKDFLDNEENEDILEDIVLTLTLFEDREMIEERLKTYAHLFDDKVMKQLKRRRYTGWGRLSRKLINGIRDKQSGKTILDFLKSDGFANRNFMQLIHDDSLTFKEDIQKAQVSGQGDSLHEHIANLAGSPAIKKGILQTVKVVDELVKVMGRHKPENIVIEMARENQTTQKGQKNSRERMKRIEEGIKELGSQILKEHPVENTQLQNEKLYLYYLQNGRDMYVDQELDINRLSDYDVDHIVPQSFLKDDSIDNKVLTRSDKARGKSDNVPSEEVVKKMKNYWRQLLNAKLITQRKFDNLTKAERGGLSELDKAGFIKRQLVETRQITKHVAQILDSRMNTKYDENDKLIREVKVITLKSKLVSDFRKDFQFYKVREINNYHHAHDAYLNAVVGTALIKKYPKLESEFVYGDYKVYDVRKMIAKSEQEIGKATAKYFFYSNIMNFFKTEITLANGEIRKRPLIETNGETGEIVWDKGRDFATVRKVLSMPQVNIVKKTEVQTGGFSKESILPKRNSDKLIARKKDWDPKKYGGFDSPTVAYSVLVVAKVEKGKSKKLKSVKELLGITIMERSSFEKNPIDFLEAKGYKEVKKDLIIKLPKYSLFELENGRKRMLASAGELQKGNELALPSKYVNFLYLASHYEKLKGSPEDNEQKQLFVEQHKHYLDEIIEQISEFSKRVILADANLDKVLSAYNKHRDKPIREQAENIIHLFTLTNLGAPAAFKYFDTTIDRKRYTSTKEVLDATLIHQSITGLYETRIDLSQLGGDGGGGGGSSGGTLQLDDEYRLYSPLVKPDQNIQFWLEQFPQAWAETAGMGLAKQVPPQVIQLKASATPVSVRQYPLSKEAQEGIRPHVQRLIQQGILVPVQSPWNTPLLPVRKPGTNDYRPVQDLREVNKRVQDIHPTVPNPYNLLCALPPQRSWYTVLDLKDAFFCLRLHPTSQPLFAFEWRDPGTGRTGQLTWTRLPQGFKNSPTIFNEALHRDLANFRIQHPQVTLLQYVDDLLLAGATKQDCLEGTKALLLELSDLGYRASAKKAQICRREVTYLGYSLRDGQRWLTEARKKTVVQIPAPTTAKQVREFLGTAGFCRLWIPGFATLAAPLYPLTKPKGEFSWAPEHQKAFDAIKKALLSAPALALPDVTKPFTLYVDERKGVARGVLTQTLGPWRRPVAYLSKKLDPVASGWPVCLKAIAAVAILVKDADKLTLGQNITVIAPHALENIVRQPPDRWMTNARMTHYQSLLLTERVTFAPPAALNPATLLPEETDEPVTHDCHQLLIEETGVRKDLTDIPLTGEVLTWFTDGSSYVVEGKRMAGAAVVDGTRTIWASSLPEGTSAQKAELMALTQALRLAEGKSINIYTDSRYAFATAHVHGAIYKQRGWLTSAGREIKNKEEILSLLEALHLPKRLAIIHCPGHQKAKDPISRGNQMADRVAKQAAQGVNLLAGKRTADGSEFEKRTADGSEFESPKKKAKVE

SEQ ID NO: 406 - protein, 2088 aa, synthetic construct; identical to SEQ ID NO: 182

SEQ ID NO: 407 - protein, 2211 aa, synthetic construct
MPAAKRVKLDGGDKKYSIGLDIGTNSVGWAVITDEYKVPSKKFKVLGNTDRHSIKKNLIGALLFDSGETAEATRLKRTARRRYTRRKNRICYLQEIFSNEMAKVDDSFFHRLEESFLVEEDKKHERHPIFGNIVDEVAYHEKYPTIYHLRKKLVDSTDKADLRLIYLALAHMIKFRGHFLIEGDLNPDNSDVDKLFIQLVQTYNQLFEENPINASGVDAKAILSARLSKSRRLENLIAQLPGEKKNGLFGNLIALSLGLTPNFKSNFDLAEDAKLQLSKDTYDDDLDNLLAQIGDQYADLFLAAKNLSDAILLSDILRVNTEITKAPLSASMIKRYDEHHQDLTLLKALVRQQLPEKYKEIFFDQSKNGYAGYIDGGASQEEFYKFIKPILEKMDGTEELLVKLNREDLLRKQRTFDNGSIPHQIHLGELHAILRRQEDFYPFLKDNREKIEKILTFRIPYYVGPLARGNSRFAWMTRKSEETITPWNFEEVVDKGASAQSFIERMTNFDKNLPNEKVLPKHSLLYEYFTVYNELTKVKYVTEGMRKPAFLSGEQKKAIVDLLFKTNRKVTVKQLKEDYFKKIECFDSVEISGVEDRFNASLGTYHDLLKIIKDKDFLDNEENEDILEDIVLTLTLFEDREMIEERLKTYAHLFDDKVMKQLKRRRYTGWGRLSRKLINGIRDKQSGKTILDFLKSDGFANRNFMQLIHDDSLTFKEDIQKAQVSGQGDSLHEHIANLAGSPAIKKGILQTVKVVDELVKVMGRHKPENIVIEMARENQTTQKGQKNSRERMKRIEEGIKELGSQILKEHPVENTQLQNEKLYLYYLQNGRDMYVDQELDINRLSDYDVDHIVPQSFLKDDSIDNKVLTRSDKARGKSDNVPSEEVVKKMKNYWRQLLNAKLITQRKFDNLTKAERGGLSELDKAGFIKRQLVETRQITKHVAQILDSRMNTKYDENDKLIREVKVITLKSKLVSDFRKDFQFYKVREINNYHHAHDAYLNAVVGTALIKKYPKLESEFVYGDYKVYDVRKMIAKSEQEIGKATAKYFFYSNIMNFFKTEITLANGEIRKRPLIETNGETGEIVWDKGRDFATVRKVLSMPQVNIVKKTEVQTGGFSKESILPKRNSDKLIARKKDWDPKKYGGFDSPTVAYSVLVVAKVEKGKSKKLKSVKELLGITIMERSSFEKNPIDFLEAKGYKEVKKDLIIKLPKYSLFELENGRKRMLASAGELQKGNELALPSKYVNFLYLASHYEKLKGSPEDNEQKQLFVEQHKHYLDEIIEQISEFSKRVILADANLDKVLSAYNKHRDKPIREQAENIIHLFTLTNLGAPAAFKYFDTTIDRKRYTSTKEVLDATLIHQSITGLYETRIDLSQLGGDGGAEAAAKEAAAKEAAAKEAAAKALEAEAAAKEAAAKEAAAKEAAAKAGGMDPLQLLQPLEAEIKGTKLKAHWNSGATITCVPEAFLEDERPIQTMLIKTIHGEKQQDVYYLTFKVQGRKVEAEVLASPYDYILLNPSDVPWLMKKPLQLTVLVPLHEYQERLLQQTALPKEQKELLQKLFLKYDALWQHWENQVGHRRIKPHNIATGTLAPRPQKQYPINPKAKPSIQIVIDDLLKQGVLIQQNSTMNTPVYPVPKPDGKWRMVLDYREVNKTIPLIAAQNQHSAGILSSIYRGKYKTTLDLTNGFWAHPITPESYWLTAFTWQGKQYCWTRLPQGFLNSPALFTADVVDLLKEIPNVQAYVDDIYISHDDPQEHLEQLEKIFSILLNAGYVVSLKKSEIAQREVEFLGFNITKEGRGLTDTFKQKLLNITPPKDLKQLQSILGLLNFARNFIPNYSELVKPLYTIVANANGKFISWTEDNSNQLQHIISVLNQADNLEERNPETRLIIKVNSSPSAGYIRYYNEGSKRPIMYVNYIFSKAEAKFTQTEKLLTTMHKGLIKAMDLAMGQEILVYSPIVSMTKIQRTPLPERKALPVRWITWMTYLEDPRIQFHYDKSLPELQQIPNVTEDVIAKTKHPSEFAMVFYTDGSAIKHPDVNKSHSAGMGIAQVQFIPEYKIVHQWSIPLGDHTAQLAEIAAVEFACKKALKISGPVLIVTDSFYVAESANKELPYWKSNGFLNNKKKPLRHVSKWKSIAECLQLKPDIIIMHEKGHQQPMTTLHTEGNNLADKLATQGSYVVHAGKRTADGSEFEKRTADGSEFESPKKKAKVE

SEQ ID NO: 408 - protein, 2198 aa, synthetic construct
MPAAKRVKLDGGDKKYSIGLDIGTNSVGWAVITDEYKVPSKKFKVLGNTDRHSIKKNLIGALLFDSGETAEATRLKRTARRRYTRRKNRICYLQEIFSNEMAKVDDSFFHRLEESFLVEEDKKHERHPIFGNIVDEVAYHEKYPTIYHLRKKLVDSTDKADLRLIYLALAHMIKFRGHFLIEGDLNPDNSDVDKLFIQLVQTYNQLFEENPINASGVDAKAILSARLSKSRRLENLIAQLPGEKKNGLFGNLIALSLGLTPNFKSNFDLAEDAKLQLSKDTYDDDLDNLLAQIGDQYADLFLAAKNLSDAILLSDILRVNTEITKAPLSASMIKRYDEHHQDLTLLKALVRQQLPEKYKEIFFDQSKNGYAGYIDGGASQEEFYKFIKPILEKMDGTEELLVKLNREDLLRKQRTFDNGSIPHQIHLGELHAILRRQEDFYPFLKDNREKIEKILTFRIPYYVGPLARGNSRFAWMTRKSEETITPWNFEEVVDKGASAQSFIERMTNFDKNLPNEKVLPKHSLLYEYFTVYNELTKVKYVTEGMRKPAFLSGEQKKAIVDLLFKTNRKVTVKQLKEDYFKKIECFDSVEISGVEDRFNASLGTYHDLLKIIKDKDFLDNEENEDILEDIVLTLTLFEDREMIEERLKTYAHLFDDKVMKQLKRRRYTGWGRLSRKLINGIRDKQSGKTILDFLKSDGFANRNFMQLIHDDSLTFKEDIQKAQVSGQGDSLHEHIANLAGSPAIKKGILQTVKVVDELVKVMGRHKPENIVIEMARENQTTQKGQKNSRERMKRIEEGIKELGSQILKEHPVENTQLQNEKLYLYYLQNGRDMYVDQELDINRLSDYDVDHIVPQSFLKDDSIDNKVLTRSDKARGKSDNVPSEEVVKKMKNYWRQLLNAKLITQRKFDNLTKAERGGLSELDKAGFIKRQLVETRQITKHVAQILDSRMNTKYDENDKLIREVKVITLKSKLVSDFRKDFQFYKVREINNYHHAHDAYLNAVVGTALIKKYPKLESEFVYGDYKVYDVRKMIAKSEQEIGKATAKYFFYSNIMNFFKTEITLANGEIRKRPLIETNGETGEIVWDKGRDFATVRKVLSMPQVNIVKKTEVQTGGFSKESILPKRNSDKLIARKKDWDPKKYGGFDSPTVAYSVLVVAKVEKGKSKKLKSVKELLGITIMERSSFEKNPIDFLEAKGYKEVKKDLIIKLPKYSLFELENGRKRMLASAGELQKGNELALPSKYVNFLYLASHYEKLKGSPEDNEQKQLFVEQHKHYLDEIIEQISEFSKRVILADANLDKVLSAYNKHRDKPIREQAENIIHLFTLTNLGAPAAFKYFDTTIDRKRYTSTKEVLDATLIHQSITGLYETRIDLSQLGGDGGSGGSSGGSSGSETPGTSESATPESSGGSSGGSSGGMDPLQLLQPLEAEIKGTKLKAHWNSGATITCVPEAFLEDERPIQTMLIKTIHGEKQQDVYYLTFKVQGRKVEAEVLASPYDYILLNPSDVPWLMKKPLQLTVLVPLHEYQERLLQQTALPKEQKELLQKLFLKYDALWQHWENQVGHRRIKPHNIATGTLAPRPQKQYPINPKAKPSIQIVIDDLLKQGVLIQQNSTMNTPVYPVPKPDGKWRMVLDYREVNKTIPLIAAQNQHSAGILSSIYRGKYKTTLDLTNGFWAHPITPESYWLTAFTWQGKQYCWTRLPQGFLNSPALFTADVVDLLKEIPNVQAYVDDIYISHDDPQEHLEQLEKIFSILLNAGYVVSLKKSEIAQREVEFLGFNITKEGRGLTDTFKQKLLNITPPKDLKQLQSILGLLNFARNFIPNYSELVKPLYTIVANANGKFISWTEDNSNQLQHIISVLNQADNLEERNPETRLIIKVNSSPSAGYIRYYNEGSKRPIMYVNYIFSKAEAKFTQTEKLLTTMHKGLIKAMDLAMGQEILVYSPIVSMTKIQRTPLPERKALPVRWITWMTYLEDPRIQFHYDKSLPELQQIPNVTEDVIAKTKHPSEFAMVFYTDGSAIKHPDVNKSHSAGMGIAQVQFIPEYKIVHQWSIPLGDHTAQLAEIAAVEFACKKALKISGPVLIVTDSFYVAESANKELPYWKSNGFLNNKKKPLRHVSKWKSIAECLQLKPDIIIMHEKGHQQPMTTLHTEGNNLADKLATQGSYVVHAGKRTADGSEFEKRTADGSEFESPKKKAKVE

SEQ ID NO: 409 - protein, 2176 aa, synthetic construct
MPAAKRVKLDGGDKKYSIGLDIGTNSVGWAVITDEYKVPSKKFKVLGNTDRHSIKKNLIGALLFDSGETAEATRLKRTARRRYTRRKNRICYLQEIFSNEMAKVDDSFFHRLEESFLVEEDKKHERHPIFGNIVDEVAYHEKYPTIYHLRKKLVDSTDKADLRLIYLALAHMIKFRGHFLIEGDLNPDNSDVDKLFIQLVQTYNQLFEENPINASGVDAKAILSARLSKSRRLENLIAQLPGEKKNGLFGNLIALSLGLTPNFKSNFDLAEDAKLQLSKDTYDDDLDNLLAQIGDQYADLFLAAKNLSDAILLSDILRVNTEITKAPLSASMIKRYDEHHQDLTLLKALVRQQLPEKYKEIFFDQSKNGYAGYIDGGASQEEFYKFIKPILEKMDGTEELLVKLNREDLLRKQRTFDNGSIPHQIHLGELHAILRRQEDFYPFLKDNREKIEKILTFRIPYYVGPLARGNSRFAWMTRKSEETITPWNFEEVVDKGASAQSFIERMTNFDKNLPNEKVLPKHSLLYEYFTVYNELTKVKYVTEGMRKPAFLSGEQKKAIVDLLFKTNRKVTVKQLKEDYFKKIECFDSVEISGVEDRFNASLGTYHDLLKIIKDKDFLDNEENEDILEDIVLTLTLFEDREMIEERLKTYAHLFDDKVMKQLKRRRYTGWGRLSRKLINGIRDKQSGKTILDFLKSDGFANRNFMQLIHDDSLTFKEDIQKAQVSGQGDSLHEHIANLAGSPAIKKGILQTVKVVDELVKVMGRHKPENIVIEMARENQTTQKGQKNSRERMKRIEEGIKELGSQILKEHPVENTQLQNEKLYLYYLQNGRDMYVDQELDINRLSDYDVDHIVPQSFLKDDSIDNKVLTRSDKARGKSDNVPSEEVVKKMKNYWRQLLNAKLITQRKFDNLTKAERGGLSELDKAGFIKRQLVETRQITKHVAQILDSRMNTKYDENDKLIREVKVITLKSKLVSDFRKDFQFYKVREINNYHHAHDAYLNAVVGTALIKKYPKLESEFVYGDYKVYDVRKMIAKSEQEIGKATAKYFFYSNIMNFFKTEITLANGEIRKRPLIETNGETGEIVWDKGRDFATVRKVLSMPQVNIVKKTEVQTGGFSKESILPKRNSDKLIARKKDWDPKKYGGFDSPTVAYSVLVVAKVEKGKSKKLKSVKELLGITIMERSSFEKNPIDFLEAKGYKEVKKDLIIKLPKYSLFELENGRKRMLASAGELQKGNELALPSKYVNFLYLASHYEKLKGSPEDNEQKQLFVEQHKHYLDEIIEQISEFSKRVILADANLDKVLSAYNKHRDKPIREQAENIIHLFTLTNLGAPAAFKYFDTTIDRKRYTSTKEVLDATLIHQSITGLYETRIDLSQLGGDGGGSSEAAAKPAPGGMDPLQLLQPLEAEIKGTKLKAHWNSGATITCVPEAFLEDERPIQTMLIKTIHGEKQQDVYYLTFKVQGRKVEAEVLASPYDYILLNPSDVPWLMKKPLQLTVLVPLHEYQERLLQQTALPKEQKELLQKLFLKYDALWQHWENQVGHRRIKPHNIATGTLAPRPQKQYPINPKAKPSIQIVIDDLLKQGVLIQQNSTMNTPVYPVPKPDGKWRMVLDYREVNKTIPLIAAQNQHSAGILSSIYRGKYKTTLDLTNGFWAHPITPESYWLTAFTWQGKQYCWTRLPQGFLNSPALFTADVVDLLKEIPNVQAYVDDIYISHDDPQEHLEQLEKIFSILLNAGYVVSLKKSEIAQREVEFLGFNITKEGRGLTDTFKQKLLNITPPKDLKQLQSILGLLNFARNFIPNYSELVKPLYTIVANANGKFISWTEDNSNQLQHIISVLNQADNLEERNPETRLIIKVNSSPSAGYIRYYNEGSKRPIMYVNYIFSKAEAKFTQTEKLLTTMHKGLIKAMDLAMGQEILVYSPIVSMTKIQRTPLPERKALPVRWITWMTYLEDPRIQFHYDKSLPELQQIPNVTEDVIAKTKHPSEFAMVFYTDGSAIKHPDVNKSHSAGMGIAQVQFIPEYKIVHQWSIPLGDHTAQLAEIAAVEFACKKALKISGPVLIVTDSFYVAESANKELPYWKSNGFLNNKKKPLRHVSKWKSIAECLQLKPDIIIMHEKGHQQPMTTLHTEGNNLADKLATQGSYVVHAGKRTADGSEFEKRTADGSEFESPKKKAKVE

SEQ ID NO: 410 - protein, 2181 aa, synthetic construct
MPAAKRVKLDGGDKKYSIGLDIGTNSVGWAVITDEYKVPSKKFKVLGNTDRHSIKKNLIGALLFDSGETAEATRLKRTARRRYTRRKNRICYLQEIFSNEMAKVDDSFFHRLEESFLVEEDKKHERHPIFGNIVDEVAYHEKYPTIYHLRKKLVDSTDKADLRLIYLALAHMIKFRGHFLIEGDLNPDNSDVDKLFIQLVQTYNQLFEENPINASGVDAKAILSARLSKSRRLENLIAQLPGEKKNGLFGNLIALSLGLTPNFKSNFDLAEDAKLQLSKDTYDDDLDNLLAQIGDQYADLFLAAKNLSDAILLSDILRVNTEITKAPLSASMIKRYDEHHQDLTLLKALVRQQLPEKYKEIFFDQSKNGYAGYIDGGASQEEFYKFIKPILEKMDGTEELLVKLNREDLLRKQRTFDNGSIPHQIHLGELHAILRRQEDFYPFLKDNREKIEKILTFRIPYYVGPLARGNSRFAWMTRKSEETITPWNFEEVVDKGASAQSFIERMTNFDKNLPNEKVLPKHSLLYEYFTVYNELTKVKYVTEGMRKPAFLSGEQKKAIVDLLFKTNRKVTVKQLKEDYFKKIECFDSVEISGVEDRFNASLGTYHDLLKIIKDKDFLDNEENEDILEDIVLTLTLFEDREMIEERLKTYAHLFDDKVMKQLKRRRYTGWGRLSRKLINGIRDKQSGKTILDFLKSDGFANRNFMQLIHDDSLTFKEDIQKAQVSGQGDSLHEHIANLAGSPAIKKGILQTVKVVDELVKVMGRHKPENIVIEMARENQTTQKGQKNSRERMKRIEEGIKELGSQILKEHPVENTQLQNEKLYLYYLQNGRDMYVDQELDINRLSDYDVDHIVPQSFLKDDSIDNKVLTRSDKARGKSDNVPSEEVVKKMKNYWRQLLNAKLITQRKFDNLTKAERGGLSELDKAGFIKRQLVETRQITKHVAQILDSRMNTKYDENDKLIREVKVITLKSKLVSDFRKDFQFYKVREINNYHHAHDAYLNAVVGTALIKKYPKLESEFVYGDYKVYDVRKMIAKSEQEIGKATAKYFFYSNIMNFFKTEITLANGEIRKRPLIETNGETGEIVWDKGRDFATVRKVLSMPQVNIVKKTEVQTGGFSKESILPKRNSDKLIARKKDWDPKKYGGFDSPTVAYSVLVVAKVEKGKSKKLKSVKELLGITIMERSSFEKNPIDFLEAKGYKEVKKDLIIKLPKYSLFELENGRKRMLASAGELQKGNELALPSKYVNFLYLASHYEKLKGSPEDNEQKQLFVEQHKHYLDEIIEQISEFSKRVILADANLDKVLSAYNKHRDKPIREQAENIIHLFTLTNLGAPAAFKYFDTTIDRKRYTSTKEVLDATLIHQSITGLYETRIDLSQLGGDGGSGSETPGTSESATPESGGMDPLQLLQPLEAEIKGTKLKAHWNSGATITCVPEAFLEDERPIQTMLIKTIHGEKQQDVYYLTFKVQGRKVEAEVLASPYDYILLNPSDVPWLMKKPLQLTVLVPLHEYQERLLQQTALPKEQKELLQKLFLKYDALWQHWENQVGHRRIKPHNIATGTLAPRPQKQYPINPKAKPSIQIVIDDLLKQGVLIQQNSTMNTPVYPVPKPDGKWRMVLDYREVNKTIPLIAAQNQHSAGILSSIYRGKYKTTLDLTNGFWAHPITPESYWLTAFTWQGKQYCWTRLPQGFLNSPALFTADVVDLLKEIPNVQAYVDDIYISHDDPQEHLEQLEKIFSILLNAGYVVSLKKSEIAQREVEFLGFNITKEGRGLTDTFKQKLLNITPPKDLKQLQSILGLLNFARNFIPNYSELVKPLYTIVANANGKFISWTEDNSNQLQHIISVLNQADNLEERNPETRLIIKVNSSPSAGYIRYYNEGSKRPIMYVNYIFSKAEAKFTQTEKLLTTMHKGLIKAMDLAMGQEILVYSPIVSMTKIQRTPLPERKALPVRWITWMTYLEDPRIQFHYDKSLPELQQIPNVTEDVIAKTKHPSEFAMVFYTDGSAIKHPDVNKSHSAGMGIAQVQFIPEYKIVHQWSIPLGDHTAQLAEIAAVEFACKKALKISGPVLIVTDSFYVAESANKELPYWKSNGFLNNKKKPLRHVSKWKSIAECLQLKPDIIIMHEKGHQQPMTTLHTEGNNLADKLATQGSYVVHAGKRTADGSEFEKRTADGSEFESPKKKAKVE

SEQ ID NO: 411 - protein, 2178 aa, synthetic construct
MPAAKRVKLDGGDKKYSIGLDIGTNSVGWAVITDEYKVPSKKFKVLGNTDRHSIKKNLIGALLFDSGETAEATRLKRTARRRYTRRKNRICYLQEIFSNEMAKVDDSFFHRLEESFLVEEDKKHERHPIFGNIVDEVAYHEKYPTIYHLRKKLVDSTDKADLRLIYLALAHMIKFRGHFLIEGDLNPDNSDVDKLFIQLVQTYNQLFEENPINASGVDAKAILSARLSKSRRLENLIAQLPGEKKNGLFGNLIALSLGLTPNFKSNFDLAEDAKLQLSKDTYDDDLDNLLAQIGDQYADLFLAAKNLSDAILLSDILRVNTEITKAPLSASMIKRYDEHHQDLTLLKALVRQQLPEKYKEIFFDQSKNGYAGYIDGGASQEEFYKFIKPILEKMDGTEELLVKLNREDLLRKQRTFDNGSIPHQIHLGELHAILRRQEDFYPFLKDNREKIEKILTFRIPYYVGPLARGNSRFAWMTRKSEETITPWNFEEVVDKGASAQSFIERMTNFDKNLPNEKVLPKHSLLYEYFTVYNELTKVKYVTEGMRKPAFLSGEQKKAIVDLLFKTNRKVTVKQLKEDYFKKIECFDSVEISGVEDRFNASLGTYHDLLKIIKDKDFLDNEENEDILEDIVLTLTLFEDREMIEERLKTYAHLFDDKVMKQLKRRRYTGWGRLSRKLINGIRDKQSGKTILDFLKSDGFANRNFMQLIHDDSLTFKEDIQKAQVSGQGDSLHEHIANLAGSPAIKKGILQTVKVVDELVKVMGRHKPENIVIEMARENQTTQKGQKNSRERMKRIEEGIKELGSQILKEHPVENTQLQNEKLYLYYLQNGRDMYVDQELDINRLSDYDVDHIVPQSFLKDDSIDNKVLTRSDKARGKSDNVPSEEVVKKMKNYWRQLLNAKLITQRKFDNLTKAERGGLSELDKAGFIKRQLVETRQITKHVAQILDSRMNTKYDENDKLIREVKVITLKSKLVSDFRKDFQFYKVREINNYHHAHDAYLNAVVGTALIKKYPKLESEFVYGDYKVYDVRKMIAKSEQEIGKATAKYFFYSNIMNFFKTEITLANGEIRKRPLIETNGETGEIVWDKGRDFATVRKVLSMPQVNIVKKTEVQTGGFSKESILPKRNSDKLIARKKDWDPKKYGGFDSPTVAYSVLVVAKVEKGKSKKLKSVKELLGITIMERSSFEKNPIDFLEAKGYKEVKKDLIIKLPKYSLFELENGRKRMLASAGELQKGNELALPSKYVNFLYLASHYEKLKGSPEDNEQKQLFVEQHKHYLDEIIEQISEFSKRVILADANLDKVLSAYNKHRDKPIREQAENIIHLFTLTNLGAPAAFKYFDTTIDRKRYTSTKEVLDATLIHQSITGLYETRIDLSQLGGDGGPAPAPAPAPAPAPGGMDPLQLLQPLEAEIKGTKLKAHWNSGATITCVPEAFLEDERPIQTMLIKTIHGEKQQDVYYLTFKVQGRKVEAEVLASPYDYILLNPSDVPWLMKKPLQLTVLVPLHEYQERLLQQTALPKEQKELLQKLFLKYDALWQHWENQVGHRRIKPHNIATGTLAPRPQKQYPINPKAKPSIQIVIDDLLKQGVLIQQNSTMNTPVYPVPKPDGKWRMVLDYREVNKTIPLIAAQNQHSAGILSSIYRGKYKTTLDLTNGFWAHPITPESYWLTAFTWQGKQYCWTRLPQGFLNSPALFTADVVDLLKEIPNVQAYVDDIYISHDDPQEHLEQLEKIFSILLNAGYVVSLKKSEIAQREVEFLGFNITKEGRGLTDTFKQKLLNITPPKDLKQLQSILGLLNFARNFIPNYSELVKPLYTIVANANGKFISWTEDNSNQLQHIISVLNQADNLEERNPETRLIIKVNSSPSAGYIRYYNEGSKRPIMYVNYIFSKAEAKFTQTEKLLTTMHKGLIKAMDLAMGQEILVYSPIVSMTKIQRTPLPERKALPVRWITWMTYLEDPRIQFHYDKSLPELQQIPNVTEDVIAKTKHPSEFAMVFYTDGSAIKHPDVNKSHSAGMGIAQVQFIPEYKIVHQWSIPLGDHTAQLAEIAAVEFACKKALKISGPVLIVTDSFYVAESANKELPYWKSNGFLNNKKKPLRHVSKWKSIAECLQLKPDIIIMHEKGHQQPMTTLHTEGNNLADKLATQGSYVVHAGKRTADGSEFEKRTADGSEFESPKKKAKVE

SEQ ID NO: 412 - protein, 2176 aa, synthetic construct
MPAAKRVKLDGGDKKYSIGLDIGTNSVGWAVITDEYKVPSKKFKVLGNTDRHSIKKNLIGALLFDSGETAEATRLKRTARRRYTRRKNRICYLQEIFSNEMAKVDDSFFHRLEESFLVEEDKKHERHPIFGNIVDEVAYHEKYPTIYHLRKKLVDSTDKADLRLIYLALAHMIKFRGHFLIEGDLNPDNSDVDKLFIQLVQTYNQLFEENPINASGVDAKAILSARLSKSRRLENLIAQLPGEKKNGLFGNLIALSLGLTPNFKSNFDLAEDAKLQLSKDTYDDDLDNLLAQIGDQYADLFLAAKNLSDAILLSDILRVNTEITKAPLSASMIKRYDEHHQDLTLLKALVRQQLPEKYKEIFFDQSKNGYAGYIDGGASQEEFYKFIKPILEKMDGTEELLVKLNREDLLRKQRTFDNGSIPHQIHLGELHAILRRQEDFYPFLKDNREKIEKILTFRIPYYVGPLARGNSRFAWMTRKSEETITPWNFEEVVDKGASAQSFIERMTNFDKNLPNEKVLPKHSLLYEYFTVYNELTKVKYVTEGMRKPAFLSGEQKKAIVDLLFKTNRKVTVKQLKEDYFKKIECFDSVEISGVEDRFNASLGTYHDLLKIIKDKDFLDNEENEDILEDIVLTLTLFEDREMIEERLKTYAHLFDDKVMKQLKRRRYTGWGRLSRKLINGIRDKQSGKTILDFLKSDGFANRNFMQLIHDDSLTFKEDIQKAQVSGQGDSLHEHIANLAGSPAIKKGILQTVKVVDELVKVMGRHKPENIVIEMARENQTTQKGQKNSRERMKRIEEGIKELGSQILKEHPVENTQLQNEKLYLYYLQNGRDMYVDQELDINRLSDYDVDHIVPQSFLKDDSIDNKVLTRSDKARGKSDNVPSEEVVKKMKNYWRQLLNAKLITQRKFDNLTKAERGGLSELDKAGFIKRQLVETRQITKHVAQILDSRMNTKYDENDKLIREVKVITLKSKLVSDFRKDFQFYKVREINNYHHAHDAYLNAVVGTALIKKYPKLESEFVYGDYKVYDVRKMIAKSEQEIGKATAKYFFYSNIMNFFKTEITLANGEIRKRPLIETNGETGEIVWDKGRDFATVRKVLSMPQVNIVKKTEVQTGGFSKESILPKRNSDKLIARKKDWDPKKYGGFDSPTVAYSVLVVAKVEKGKSKKLKSVKELLGITIMERSSFEKNPIDFLEAKGYKEVKKDLIIKLPKYSLFELENGRKRMLASAGELQKGNELALPSKYVNFLYLASHYEKLKGSPEDNEQKQLFVEQHKHYLDEIIEQISEFSKRVILADANLDKVLSAYNKHRDKPIREQAENIIHLFTLTNLGAPAAFKYFDTTIDRKRYTSTKEVLDATLIHQSITGLYETRIDLSQLGGDGGPAPEAAAKGSSGGMDPLQLLQPLEAEIKGTKLKAHWNSGATITCVPEAFLEDERPIQTMLIKTIHGEKQQDVYYLTFKVQGRKVEAEVLASPYDYILLNPSDVPWLMKKPLQLTVLVPLHEYQERLLQQTALPKEQKELLQKLFLKYDALWQHWENQVGHRRIKPHNIATGTLAPRPQKQYPINPKAKPSIQIVIDDLLKQGVLIQQNSTMNTPVYPVPKPDGKWRMVLDYREVNKTIPLIAAQNQHSAGILSSIYRGKYKTTLDLTNGFWAHPITPESYWLTAFTWQGKQYCWTRLPQGFLNSPALFTADVVDLLKEIPNVQAYVDDIYISHDDPQEHLEQLEKIFSILLNAGYVVSLKKSEIAQREVEFLGFNITKEGRGLTDTFKQKLLNITPPKDLKQLQSILGLLNFARNFIPNYSELVKPLYTIVANANGKFISWTEDNSNQLQHIISVLNQADNLEERNPETRLIIKVNSSPSAGYIRYYNEGSKRPIMYVNYIFSKAEAKFTQTEKLLTTMHKGLIKAMDLAMGQEILVYSPIVSMTKIQRTPLPERKALPVRWITWMTYLEDPRIQFHYDKSLPELQQIPNVTEDVIAKTKHPSEFAMVFYTDGSAIKHPDVNKSHSAGMGIAQVQFIPEYKIVHQWSIPLGDHTAQLAEIAAVEFACKKALKISGPVLIVTDSFYVAESANKELPYWKSNGFLNNKKKPLRHVSKWKSIAECLQLKPDIIIMHEKGHQQPMTTLHTEGNNLADKLATQGSYVVHAGKRTADGSEFEKRTADGSEFESPKKKAKVE

SEQ ID NO: 413 - protein, 2180 aa, synthetic construct
MPAAKRVKLDGGDKKYSIGLDIGTNSVGWAVITDEYKVPSKKFKVLGNTDRHSIKKNLIGALLFDSGETAEATRLKRTARRRYTRRKNRICYLQEIFSNEMAKVDDSFFHRLEESFLVEEDKKHERHPIFGNIVDEVAYHEKYPTIYHLRKKLVDSTDKADLRLIYLALAHMIKFRGHFLIEGDLNPDNSDVDKLFIQLVQTYNQLFEENPINASGVDAKAILSARLSKSRRLENLIAQLPGEKKNGLFGNLIALSLGLTPNFKSNFDLAEDAKLQLSKDTYDDDLDNLLAQIGDQYADLFLAAKNLSDAILLSDILRVNTEITKAPLSASMIKRYDEHHQDLTLLKALVRQQLPEKYKEIFFDQSKNGYAGYIDGGASQEEFYKFIKPILEKMDGTEELLVKLNREDLLRKQRTFDNGSIPHQIHLGELHAILRRQEDFYPFLKDNREKIEKILTFRIPYYVGPLARGNSRFAWMTRKSEETITPWNFEEVVDKGASAQSFIERMTNFDKNLPNEKVLPKHSLLYEYFTVYNELTKVKYVTEGMRKPAFLSGEQKKAIVDLLFKTNRKVTVKQLKEDYFKKIECFDSVEISGVEDRFNASLGTYHDLLKIIKDKDFLDNEENEDILEDIVLTLTLFEDREMIEERLKTYAHLFDDKVMKQLKRRRYTGWGRLSRKLINGIRDKQSGKTILDFLKSDGFANRNFMQLIHDDSLTFKEDIQKAQVSGQGDSLHEHIANLAGSPAIKKGILQTVKVVDELVKVMGRHKPENIVIEMARENQTTQKGQKNSRERMKRIEEGIKELGSQILKEHPVENTQLQNEKLYLYYLQNGRDMYVDQELDINRLSDYDVDHIVPQSFLKDDSIDNKVLTRSDKARGKSDNVPSEEVVKKMKNYWRQLLNAKLITQRKFDNLTKAERGGLSELDKAGFIKRQLVETRQITKHVAQILDSRMNTKYDENDKLIREVKVITLKSKLVSDFRKDFQFYKVREINNYHHAHDAYLNAVVGTALIKKYPKLESEFVYGDYKVYDVRKMIAKSEQEIGKATAKYFFYSNIMNFFKTEITLANGEIRKRPLIETNGETGEIVWDKGRDFATVRKVLSMPQVNIVKKTEVQTGGFSKESILPKRNSDKLIARKKDWDPKKYGGFDSPTVAYSVLVVAKVEKGKSKKLKSVKELLGITIMERSSFEKNPIDFLEAKGYKEVKKDLIIKLPKYSLFELENGRKRMLASAGELQKGNELALPSKYVNFLYLASHYEKLKGSPEDNEQKQLFVEQHKHYLDEIIEQISEFSKRVILADANLDKVLSAYNKHRDKPIREQAENIIHLFTLTNLGAPAAFKYFDTTIDRKRYTSTKEVLDATLIHQSITGLYETRIDLSQLGGDGGEAAAKEAAAKEAAAKGGMDPLQLLQPLEAEIKGTKLKAHWNSGATITCVPEAFLEDERPIQTMLIKTIHGEKQQDVYYLTFKVQGRKVEAEVLASPYDYILLNPSDVPWLMKKPLQLTVLVPLHEYQERLLQQTALPKEQKELLQKLFLKYDALWQHWENQVGHRRIKPHNIATGTLAPRPQKQYPINPKAKPSIQIVIDDLLKQGVLIQQNSTMNTPVYPVPKPDGKWRMVLDYREVNKTIPLIAAQNQHSAGILSSIYRGKYKTTLDLTNGFWAHPITPESYWLTAFTWQGKQYCWTRLPQGFLNSPALFTADVVDLLKEIPNVQAYVDDIYISHDDPQEHLEQLEKIFSILLNAGYVVSLKKSEIAQREVEFLGFNITKEGRGLTDTFKQKLLNITPPKDLKQLQSILGLLNFARNFIPNYSELVKPLYTIVANANGKFISWTEDNSNQLQHIISVLNQADNLEERNPETRLIIKVNSSPSAGYIRYYNEGSKRPIMYVNYIFSKAEAKFTQTEKLLTTMHKGLIKAMDLAMGQEILVYSPIVSMTKIQRTPLPERKALPVRWITWMTYLEDPRIQFHYDKSLPELQQIPNVTEDVIAKTKHPSEFAMVFYTDGSAIKHPDVNKSHSAGMGIAQVQFIPEYKIVHQWSIPLGDHTAQLAEIAAVEFACKKALKISGPVLIVTDSFYVAESANKELPYWKSNGFLNNKKKPLRHVSKWKSIAECLQLKPDIIIMHEKGHQQPMTTLHTEGNNLADKLATQGSYVVHAGKRTADGSEFEKRTADGSEFESPKKKAKVE

SEQ ID NO: 414 - protein, 2176 aa, synthetic construct
MPAAKRVKLDGGDKKYSIGLDIGTNSVGWAVITDEYKVPSKKFKVLGNTDRHSIKKNLIGALLFDSGETAEATRLKRTARRRYTRRKNRICYLQEIFSNEMAKVDDSFFHRLEESFLVEEDKKHERHPIFGNIVDEVAYHEKYPTIYHLRKKLVDSTDKADLRLIYLALAHMIKFRGHFLIEGDLNPDNSDVDKLFIQLVQTYNQLFEENPINASGVDAKAILSARLSKSRRLENLIAQLPGEKKNGLFGNLIALSLGLTPNFKSNFDLAEDAKLQLSKDTYDDDLDNLLAQIGDQYADLFLAAKNLSDAILLSDILRVNTEITKAPLSASMIKRYDEHHQDLTLLKALVRQQLPEKYKEIFFDQSKNGYAGYIDGGASQEEFYKFIKPILEKMDGTEELLVKLNREDLLRKQRTFDNGSIPHQIHLGELHAILRRQEDFYPFLKDNREKIEKILTFRIPYYVGPLARGNSRFAWMTRKSEETITPWNFEEVVDKGASAQSFIERMTNFDKNLPNEKVLPKHSLLYEYFTVYNELTKVKYVTEGMRKPAFLSGEQKKAIVDLLFKTNRKVTVKQLKEDYFKKIECFDSVEISGVEDRFNASLGTYHDLLKIIKDKDFLDNEENEDILEDIVLTLTLFEDREMIEERLKTYAHLFDDKVMKQLKRRRYTGWGRLSRKLINGIRDKQSGKTILDFLKSDGFANRNFMQLIHDDSLTFKEDIQKAQVSGQGDSLHEHIANLAGSPAIKKGILQTVKVVDELVKVMGRHKPENIVIEMARENQTTQKGQKNSRERMKRIEEGIKELGSQILKEHPVENTQLQNEKLYLYYLQNGRDMYVDQELDINRLSDYDVDHIVPQSFLKDDSIDNKVLTRSDKARGKSDNVPSEEVVKKMKNYWRQLLNAKLITQRKFDNLTKAERGGLSELDKAGFIKRQLVETRQITKHVAQILDSRMNTKYDENDKLIREVKVITLKSKLVSDFRKDFQFYKVREINNYHHAHDAYLNAVVGTALIKKYPKLESEFVYGDYKVYDVRKMIAKSEQEIGKATAKYFFYSNIMNFFKTEITLANGEIRKRPLIETNGETGEIVWDKGRDFATVRKVLSMPQVNIVKKTEVQTGGFSKESILPKRNSDKLIARKKDWDPKKYGGFDSPTVAYSVLVVAKVEKGKSKKLKSVKELLGITIMERSSFEKNPIDFLEAKGYKEVKKDLIIKLPKYSLFELENGRKRMLASAGELQKGNELALPSKYVNFLYLASHYEKLKGSPEDNEQKQLFVEQHKHYLDEIIEQISEFSKRVILADANLDKVLSAYNKHRDKPIREQAENIIHLFTLTNLGAPAAFKYFDTTIDRKRYTSTKEVLDATLIHQSITGLYETRIDLSQLGGDGGEAAAKGSSPAPGGMDPLQLLQPLEAEIKGTKLKAHWNSGATITCVPEAFLEDERPIQTMLIKTIHGEKQQDVYYLTFKVQGRKVEAEVLASPYDYILLNPSDVPWLMKKPLQLTVLVPLHEYQERLLQQTALPKEQKELLQKLFLKYDALWQHWENQVGHRRIKPHNIATGTLAPRPQKQYPINPKAKPSIQIVIDDLLKQGVLIQQNSTMNTPVYPVPKPDGKWRMVLDYREVNKTIPLIAAQNQHSAGILSSIYRGKYKTTLDLTNGFWAHPITPESYWLTAFTWQGKQYCWTRLPQGFLNSPALFTADVVDLLKEIPNVQAYVDDIYISHDDPQEHLEQLEKIFSILLNAGYVVSLKKSEIAQREVEFLGFNITKEGRGLTDTFKQKLLNITPPKDLKQLQSILGLLNFARNFIPNYSELVKPLYTIVANANGKFISWTEDNSNQLQHIISVLNQADNLEERNPETRLIIKVNSSPSAGYIRYYNEGSKRPIMYVNYIFSKAEAKFTQTEKLLTTMHKGLIKAMDLAMGQEILVYSPIVSMTKIQRTPLPERKALPVRWITWMTYLEDPRIQFHYDKSLPELQQIPNVTEDVIAKTKHPSEFAMVFYTDGSAIKHPDVNKSHSAGMGIAQVQFIPEYKIVHQWSIPLGDHTAQLAEIAAVEFACKKALKISGPVLIVTDSFYVAESANKELPYWKSNGFLNNKKKPLRHVSKWKSIAECLQLKPDIIIMHEKGHQQPMTTLHTEGNNLADKLATQGSYVVHAGKRTADGSEFEKRTADGSEFESPKKKAKVE

SEQ ID NO: 415 - protein, 2174 aa, synthetic construct
MPAAKRVKLDGGDKKYSIGLDIGTNSVGWAVITDEYKVPSKKFKVLGNTDRHSIKKNLIGALLFDSGETAEATRLKRTARRRYTRRKNRICYLQEIFSNEMAKVDDSFFHRLEESFLVEEDKKHERHPIFGNIVDEVAYHEKYPTIYHLRKKLVDSTDKADLRLIYLALAHMIKFRGHFLIEGDLNPDNSDVDKLFIQLVQTYNQLFEENPINASGVDAKAILSARLSKSRRLENLIAQLPGEKKNGLFGNLIALSLGLTPNFKSNFDLAEDAKLQLSKDTYDDDLDNLLAQIGDQYADLFLAAKNLSDAILLSDILRVNTEITKAPLSASMIKRYDEHHQDLTLLKALVRQQLPEKYKEIFFDQSKNGYAGYIDGGASQEEFYKFIKPILEKMDGTEELLVKLNREDLLRKQRTFDNGSIPHQIHLGELHAILRRQEDFYPFLKDNREKIEKILTFRIPYYVGPLARGNSRFAWMTRKSEETITPWNFEEVVDKGASAQSFIERMTNFDKNLPNEKVLPKHSLLYEYFTVYNELTKVKYVTEGMRKPAFLSGEQKKAIVDLLFKTNRKVTVKQLKEDYFKKIECFDSVEISGVEDRFNASLGTYHDLLKIIKDKDFLDNEENEDILEDIVLTLTLFEDREMIEERLKTYAHLFDDKVMKQLKRRRYTGWGRLSRKLINGIRDKQSGKTILDFLKSDGFANRNFMQLIHDDSLTFKEDIQKAQVSGQGDSLHEHIANLAGSPAIKKGILQTVKVVDELVKVMGRHKPENIVIEMARENQTTQKGQKNSRERMKRIEEGIKELGSQILKEHPVENTQLQNEKLYLYYLQNGRDMYVDQELDINRLSDYDVDHIVPQSFLKDDSIDNKVLTRSDKARGKSDNVPSEEVVKKMKNYWRQLLNAKLITQRKFDNLTKAERGGLSELDKAGFIKRQLVETRQITKHVAQILDSRMNTKYDENDKLIREVKVITLKSKLVSDFRKDFQFYKVREINNYHHAHDAYLNAVVGTALIKKYPKLESEFVYGDYKVYDVRKMIAKSEQEIGKATAKYFFYSNIMNFFKTEITLANGEIRKRPLIETNGETGEIVWDKGRDFATVRKVLSMPQVNIVKKTEVQTGGFSKESILPKRNSDKLIARKKDWDPKKYGGFDSPTVAYSVLVVAKVEKGKSKKLKSVKELLGITIMERSSFEKNPIDFLEAKGYKEVKKDLIIKLPKYSLFELENGRKRMLASAGELQKGNELALPSKYVNFLYLASHYEKLKGSPEDNEQKQLFVEQHKHYLDEIIEQISEFSKRVILADANLDKVLSAYNKHRDKPIREQAENIIHLFTLTNLGAPAAFKYFDTTIDRKRYTSTKEVLDATLIHQSITGLYETRIDLSQLGGDGGGGGPAPGSSGGMDPLQLLQPLEAEIKGTKLKAHWNSGATITCVPEAFLEDERPIQTMLIKTIHGEKQQDVYYLTFKVQGRKVEAEVLASPYDYILLNPSDVPWLMKKPLQLTVLVPLHEYQERLLQQTALPKEQKELLQKLFLKYDALWQHWENQVGHRRIKPHNIATGTLAPRPQKQYPINPKAKPSIQIVIDDLLKQGVLIQQNSTMNTPVYPVPKPDGKWRMVLDYREVNKTIPLIAAQNQHSAGILSSIYRGKYKTTLDLTNGFWAHPITPESYWLTAFTWQGKQYCWTRLPQGFLNSPALFTADVVDLLKEIPNVQAYVDDIYISHDDPQEHLEQLEKIFSILLNAGYVVSLKKSEIAQREVEFLGFNITKEGRGLTDTFKQKLLNITPPKDLKQLQSILGLLNFARNFIPNYSELVKPLYTIVANANGKFISWTEDNSNQLQHIISVLNQADNLEERNPETRLIIKVNSSPSAGYIRYYNEGSKRPIMYVNYIFSKAEAKFTQTEKLLTTMHKGLIKAMDLAMGQEILVYSPIVSMTKIQRTPLPERKALPVRWITWMTYLEDPRIQFHYDKSLPELQQIPNVTEDVIAKTKHPSEFAMVFYTDGSAIKHPDVNKSHSAGMGIAQVQFIPEYKIVHQWSIPLGDHTAQLAEIAAVEFACKKALKISGPVLIVTDSFYVAESANKELPYWKSNGFLNNKKKPLRHVSKWKSIAECLQLKPDIIIMHEKGHQQPMTTLHTEGNNLADKLATQGSYVVHAGKRTADGSEFEKRTADGSEFESPKKKAKVE

SEQ ID NO: 416 - protein, 2173 aa, synthetic construct
MPAAKRVKLDGGDKKYSIGLDIGTNSVGWAVITDEYKVPSKKFKVLGNTDRHSIKKNLIGALLFDSGETAEATRLKRTARRRYTRRKNRICYLQEIFSNEMAKVDDSFFHRLEESFLVEEDKKHERHPIFGNIVDEVAYHEKYPTIYHLRKKLVDSTDKADLRLIYLALAHMIKFRGHFLIEGDLNPDNSDVDKLFIQLVQTYNQLFEENPINASGVDAKAILSARLSKSRRLENLIAQLPGEKKNGLFGNLIALSLGLTPNFKSNFDLAEDAKLQLSKDTYDDDLDNLLAQIGDQYADLFLAAKNLSDAILLSDILRVNTEITKAPLSASMIKRYDEHHQDLTLLKALVRQQLPEKYKEIFFDQSKNGYAGYIDGGASQEEFYKFIKPILEKMDGTEELLVKLNREDLLRKQRTFDNGSIPHQIHLGELHAILRRQEDFYPFLKDNREKIEKILTFRIPYYVGPLARGNSRFAWMTRKSEETITPWNFEEVVDKGASAQSFIERMTNFDKNLPNEKVLPKHSLLYEYFTVYNELTKVKYVTEGMRKPAFLSGEQKKAIVDLLFKTNRKVTVKQLKEDYFKKIECFDSVEISGVEDRFNASLGTYHDLLKIIKDKDFLDNEENEDILEDIVLTLTLFEDREMIEERLKTYAHLFDDKVMKQLKRRRYTGWGRLSRKLINGIRDKQSGKTILDFLKSDGFANRNFMQLIHDDSLTFKEDIQKAQVSGQGDSLHEHIANLAGSPAIKKGILQTVKVVDELVKVMGRHKPENIVIEMARENQTTQKGQKNSRERMKRIEEGIKELGSQILKEHPVENTQLQNEKLYLYYLQNGRDMYVDQELDINRLSDYDVDHIVPQSFLKDDSIDNKVLTRSDKARGKSDNVPSEEVVKKMKNYWRQLLNAKLITQRKFDNLTKAERGGLSELDKAGFIKRQLVETRQITKHVAQILDSRMNTKYDENDKLIREVKVITLKSKLVSDFRKDFQFYKVREINNYHHAHDAYLNAVVGTALIKKYPKLESEFVYGDYKVYDVRKMIAKSEQEIGKATAKYFFYSNIMNFFKTEITLANGEIRKRPLIETNGETGEIVWDKGRDFATVRKVLSMPQVNIVKKTEVQTGGFSKESILPKRNSDKLIARKKDWDPKKYGGFDSPTVAYSVLVVAKVEKGKSKKLKSVKELLGITIMERSSFEKNPIDFLEAKGYKEVKKDLIIKLPKYSLFELENGRKRMLASAGELQKGNELALPSKYVNFLYLASHYEKLKGSPEDNEQKQLFVEQHKHYLDEIIEQISEFSKRVILADANLDKVLSAYNKHRDKPIREQAENIIHLFTLTNLGAPAAFKYFDTTIDRKRYTSTKEVLDATLIHQSITGLYETRIDLSQLGGDGGGGGEAAAKGGMDPLQLLQPLEAEIKGTKLKAHWNSGATITCVPEAFLEDERPIQTMLIKTIHGEKQQDVYYLTFKVQGRKVEAEVLASPYDYILLNPSDVPWLMKKPLQLTVLVPLHEYQERLLQQTALPKEQKELLQKLFLKYDALWQHWENQVGHRRIKPHNIATGTLAPRPQKQYPINPKAKPSIQIVIDDLLKQGVLIQQNSTMNTPVYPVPKPDGKWRMVLDYREVNKTIPLIAAQNQHSAGILSSIYRGKYKTTLDLTNGFWAHPITPESYWLTAFTWQGKQYCWTRLPQGFLNSPALFTADVVDLLKEIPNVQAYVDDIYISHDDPQEHLEQLEKIFSILLNAGYVVSLKKSEIAQREVEFLGFNITKEGRGLTDTFKQKLLNITPPKDLKQLQSILGLLNFARNFIPNYSELVKPLYTIVANANGKFISWTEDNSNQLQHIISVLNQADNLEERNPETRLIIKVNSSPSAGYIRYYNEGSKRPIMYVNYIFSKAEAKFTQTEKLLTTMHKGLIKAMDLAMGQEILVYSPIVSMTKIQRTPLPERKALPVRWITWMTYLEDPRIQFHYDKSLPELQQIPNVTEDVIAKTKHPSEFAMVFYTDGSAIKHPDVNKSHSAGMGIAQVQFIPEYKIVHQWSIPLGDHTAQLAEIAAVEFACKKALKISGPVLIVTDSFYVAESANKELPYWKSNGFLNNKKKPLRHVSKWKSIAECLQLKPDIIIMHEKGHQQPMTTLHTEGNNLADKLATQGSYVVHAGKRTADGSEFEKRTADGSEFESPKKKAKVE

SEQ ID NO: 417 - protein, 2176 aa, synthetic construct
MPAAKRVKLDGGDKKYSIGLDIGTNSVGWAVITDEYKVPSKKFKVLGNTDRHSIKKNLIGALLFDSGETAEATRLKRTARRRYTRRKNRICYLQEIFSNEMAKVDDSFFHRLEESFLVEEDKKHERHPIFGNIVDEVAYHEKYPTIYHLRKKLVDSTDKADLRLIYLALAHMIKFRGHFLIEGDLNPDNSDVDKLFIQLVQTYNQLFEENPINASGVDAKAILSARLSKSRRLENLIAQLPGEKKNGLFGNLIALSLGLTPNFKSNFDLAEDAKLQLSKDTYDDDLDNLLAQIGDQYADLFLAAKNLSDAILLSDILRVNTEITKAPLSASMIKRYDEHHQDLTLLKALVRQQLPEKYKEIFFDQSKNGYAGYIDGGASQEEFYKFIKPILEKMDGTEELLVKLNREDLLRKQRTFDNGSIPHQIHLGELHAILRRQEDFYPFLKDNREKIEKILTFRIPYYVGPLARGNSRFAWMTRKSEETITPWNFEEVVDKGASAQSFIERMTNFDKNLPNEKVLPKHSLLYEYFTVYNELTKVKYVTEGMRKPAFLSGEQKKAIVDLLFKTNRKVTVKQLKEDYFKKIECFDSVEISGVEDRFNASLGTYHDLLKIIKDKDFLDNEENEDILEDIVLTLTLFEDREMIEERLKTYAHLFDDKVMKQLKRRRYTGWGRLSRKLINGIRDKQSGKTILDFLKSDGFANRNFMQLIHDDSLTFKEDIQKAQVSGQGDSLHEHIANLAGSPAIKKGILQTVKVVDELVKVMGRHKPENIVIEMARENQTTQKGQKNSRERMKRIEEGIKELGSQILKEHPVENTQLQNEKLYLYYLQNGRDMYVDQELDINRLSDYDVDHIVPQSFLKDDSIDNKVLTRSDKARGKSDNVPSEEVVKKMKNYWRQLLNAKLITQRKFDNLTKAERGGLSELDKAGFIKRQLVETRQITKHVAQILDSRMNTKYDENDKLIREVKVITLKSKLVSDFRKDFQFYKVREINNYHHAHDAYLNAVVGTALIKKYPKLESEFVYGDYKVYDVRKMIAKSEQEIGKATAKYFFYSNIMNFFKTEITLANGEIRKRPLIETNGETGEIVWDKGRDFATVRKVLSMPQVNIVKKTEVQTGGFSKESILPKRNSDKLIARKKDWDPKKYGGFDSPTVAYSVLVVAKVEKGKSKKLKSVKELLGITIMERSSFEKNPIDFLEAKGYKEVKKDLIIKLPKYSLFELENGRKRMLASAGELQKGNELALPSKYVNFLYLASHYEKLKGSPEDNEQKQLFVEQHKHYLDEIIEQISEFSKRVILADANLDKVLSAYNKHRDKPIREQAENIIHLFTLTNLGAPAAFKYFDTTIDRKRYTSTKEVLDATLIHQSITGLYETRIDLSQLGGDGGGGSEAAAKPAPGGMDPLQLLQPLEAEIKGTKLKAHWNSGATITCVPEAFLEDERPIQTMLIKTIHGEKQQDVYYLTFKVQGRKVEAEVLASPYDYILLNPSDVPWLMKKPLQLTVLVPLHEYQERLLQQTALPKEQKELLQKLFLKYDALWQHWENQVGHRRIKPHNIATGTLAPRPQKQYPINPKAKPSIQIVIDDLLKQGVLIQQNSTMNTPVYPVPKPDGKWRMVLDYREVNKTIPLIAAQNQHSAGILSSIYRGKYKTTLDLTNGFWAHPITPESYWLTAFTWQGKQYCWTRLPQGFLNSPALFTADVVDLLKEIPNVQAYVDDIYISHDDPQEHLEQLEKIFSILLNAGYVVSLKKSEIAQREVEFLGFNITKEGRGLTDTFKQKLLNITPPKDLKQLQSILGLLNFARNFIPNYSELVKPLYTIVANANGKFISWTEDNSNQLQHIISVLNQADNLEERNPETRLIIKVNSSPSAGYIRYYNEGSKRPIMYVNYIFSKAEAKFTQTEKLLTTMHKGLIKAMDLAMGQEILVYSPIVSMTKIQRTPLPERKALPVRWITWMTYLEDPRIQFHYDKSLPELQQIPNVTEDVIAKTKHPSEFAMVFYTDGSAIKHPDVNKSHSAGMGIAQVQFIPEYKIVHQWSIPLGDHTAQLAEIAAVEFACKKALKISGPVLIVTDSFYVAESANKELPYWKSNGFLNNKKKPLRHVSKWKSIAECLQLKPDIIIMHEKGHQQPMTTLHTEGNNLADKLATQGSYVVHAGKRTADGSEFEKRTADGSEFESPKKKAKVE

SEQ ID NO: 418 - protein, 2177 aa, synthetic construct
MPAAKRVKLDGGDKKYSIGLDIGTNSVGWAVITDEYKVPSKKFKVLGNTDRHSIKKNLIGALLFDSGETAEATRLKRTARRRYTRRKNRICYLQEIFSNEMAKVDDSFFHRLEESFLVEEDKKHERHPIFGNIVDEVAYHEKYPTIYHLRKKLVDSTDKADLRLIYLALAHMIKFRGHFLIEGDLNPDNSDVDKLFIQLVQTYNQLFEENPINASGVDAKAILSARLSKSRRLENLIAQLPGEKKNGLFGNLIALSLGLTPNFKSNFDLAEDAKLQLSKDTYDDDLDNLLAQIGDQYADLFLAAKNLSDAILLSDILRVNTEITKAPLSASMIKRYDEHHQDLTLLKALVRQQLPEKYKEIFFDQSKNGYAGYIDGGASQEEFYKFIKPILEKMDGTEELLVKLNREDLLRKQRTFDNGSIPHQIHLGELHAILRRQEDFYPFLKDNREKIEKILTFRIPYYVGPLARGNSRFAWMTRKSEETITPWNFEEVVDKGASAQSFIERMTNFDKNLPNEKVLPKHSLLYEYFTVYNELTKVKYVTEGMRKPAFLSGEQKKAIVDLLFKTNRKVTVKQLKEDYFKKIECFDSVEISGVEDRFNASLGTYHDLLKIIKDKDFLDNEENEDILEDIVLTLTLFEDREMIEERLKTYAHLFDDKVMKQLKRRRYTGWGRLSRKLINGIRDKQSGKTILDFLKSDGFANRNFMQLIHDDSLTFKEDIQKAQVSGQGDSLHEHIANLAGSPAIKKGILQTVKVVDELVKVMGRHKPENIVIEMARENQTTQKGQKNSRERMKRIEEGIKELGSQILKEHPVENTQLQNEKLYLYYLQNGRDMYVDQELDINRLSDYDVDHIVPQSFLKDDSIDNKVLTRSDKARGKSDNVPSEEVVKKMKNYWRQLLNAKLITQRKFDNLTKAERGGLSELDKAGFIKRQLVETRQITKHVAQILDSRMNTKYDENDKLIREVKVITLKSKLVSDFRKDFQFYKVREINNYHHAHDAYLNAVVGTALIKKYPKLESEFVYGDYKVYDVRKMIAKSEQEIGKATAKYFFYSNIMNFFKTEITLANGEIRKRPLIETNGETGEIVWDKGRDFATVRKVLSMPQVNIVKKTEVQTGGFSKESILPKRNSDKLIARKKDWDPKKYGGFDSPTVAYSVLVVAKVEKGKSKKLKSVKELLGITIMERSSFEKNPIDFLEAKGYKEVKKDLIIKLPKYSLFELENGRKRMLASAGELQKGNELALPSKYVNFLYLASHYEKLKGSPEDNEQKQLFVEQHKHYLDEIIEQISEFSKRVILADANLDKVLSAYNKHRDKPIREQAENIIHLFTLTNLGAPAAFKYFDTTIDRKRYTSTKEVLDATLIHQSITGLYETRIDLSQLGGDGGGSSGSSGSSGSSGGMDPLQLLQPLEAEIKGTKLKAHWNSGATITCVPEAFLEDERPIQTMLIKTIHGEKQQDVYYLTFKVQGRKVEAEVLASPYDYILLNPSDVPWLMKKPLQLTVLVPLHEYQERLLQQTALPKEQKELLQKLFLKYDALWQHWENQVGHRRIKPHNIATGTLAPRPQKQYPINPKAKPSIQIVIDDLLKQGVLIQQNSTMNTPVYPVPKPDGKWRMVLDYREVNKTIPLIAAQNQHSAGILSSIYRGKYKTTLDLTNGFWAHPITPESYWLTAFTWQGKQYCWTRLPQGFLNSPALFTADVVDLLKEIPNVQAYVDDIYISHDDPQEHLEQLEKIFSILLNAGYVVSLKKSEIAQREVEFLGFNITKEGRGLTDTFKQKLLNITPPKDLKQLQSILGLLNFARNFIPNYSELVKPLYTIVANANGKFISWTEDNSNQLQHIISVLNQADNLEERNPETRLIIKVNSSPSAGYIRYYNEGSKRPIMYVNYIFSKAEAKFTQTEKLLTTMHKGLIKAMDLAMGQEILVYSPIVSMTKIQRTPLPERKALPVRWITWMTYLEDPRIQFHYDKSLPELQQIPNVTEDVIAKTKHPSEFAMVFYTDGSAIKHPDVNKSHSAGMGIAQVQFIPEYKIVHQWSIPLGDHTAQLAEIAAVEFACKKALKISGPVLIVTDSFYVAESANKELPYWKSNGFLNNKKKPLRHVSKWKSIAECLQLKPDIIIMHEKGHQQPMTTLHTEGNNLADKLATQGSYVVHAGKRTADGSEFEKRTADGSEFESPKKKAKVE

SEQ ID NO: 419 - protein, 2174 aa, synthetic construct
MPAAKRVKLDGGDKKYSIGLDIGTNSVGWAVITDEYKVPSKKFKVLGNTDRHSIKKNLIGALLFDSGETAEATRLKRTARRRYTRRKNRICYLQEIFSNEMAKVDDSFFHRLEESFLVEEDKKHERHPIFGNIVDEVAYHEKYPTIYHLRKKLVDSTDKADLRLIYLALAHMIKFRGHFLIEGDLNPDNSDVDKLFIQLVQTYNQLFEENPINASGVDAKAILSARLSKSRRLENLIAQLPGEKKNGLFGNLIALSLGLTPNFKSNFDLAEDAKLQLSKDTYDDDLDNLLAQIGDQYADLFLAAKNLSDAILLSDILRVNTEITKAPLSASMIKRYDEHHQDLTLLKALVRQQLPEKYKEIFFDQSKNGYAGYIDGGASQEEFYKFIKPILEKMDGTEELLVKLNREDLLRKQRTFDNGSIPHQIHLGELHAILRRQEDFYPFLKDNREKIEKILTFRIPYYVGPLARGNSRFAWMTRKSEETITPWNFEEVVDKGASAQSFIERMTNFDKNLPNEKVLPKHSLLYEYFTVYNELTKVKYVTEGMRKPAFLSGEQKKAIVDLLFKTNRKVTVKQLKEDYFKKIECFDSVEISGVEDRFNASLGTYHDLLKIIKDKDFLDNEENEDILEDIVLTLTLFEDREMIEERLKTYAHLFDDKVMKQLKRRRYTGWGRLSRKLINGIRDKQSGKTILDFLKSDGFANRNFMQLIHDDSLTFKEDIQKAQVSGQGDSLHEHIANLAGSPAIKKGILQTVKVVDELVKVMGRHKPENIVIEMARENQTTQKGQKNSRERMKRIEEGIKELGSQILKEHPVENTQLQNEKLYLYYLQNGRDMYVDQELDINRLSDYDVDHIVPQSFLKDDSIDNKVLTRSDKARGKSDNVPSEEVVKKMKNYWRQLLNAKLITQRKFDNLTKAERGGLSELDKAGFIKRQLVETRQITKHVAQILDSRMNTKYDENDKLIREVKVITLKSKLVSDFRKDFQFYKVREINNYHHAHDAYLNAVVGTALIKKYPKLESEFVYGDYKVYDVRKMIAKSEQEIGKATAKYFFYSNIMNFFKTEITLANGEIRKRPLIETNGETGEIVWDKGRDFATVRKVLSMPQVNIVKKTEVQTGGFSKESILPKRNSDKLIARKKDWDPKKYGGFDSPTVAYSVLVVAKVEKGKSKKLKSVKELLGITIMERSSFEKNPIDFLEAKGYKEVKKDLIIKLPKYSLFELENGRKRMLASAGELQKGNELALPSKYVNFLYLASHYEKLKGSPEDNEQKQLFVEQHKHYLDEIIEQISEFSKRVILADANLDKVLSAYNKHRDKPIREQAENIIHLFTLTNLGAPAAFKYFDTTIDRKRYTSTKEVLDATLIHQSITGLYETRIDLSQLGGDGGGGGGSSPAPGGMDPLQLLQPLEAEIKGTKLKAHWNSGATITCVPEAFLEDERPIQTMLIKTIHGEKQQDVYYLTFKVQGRKVEAEVLASPYDYILLNPSDVPWLMKKPLQLTVLVPLHEYQERLLQQTALPKEQKELLQKLFLKYDALWQHWENQVGHRRIKPHNIATGTLAPRPQKQYPINPKAKPSIQIVIDDLLKQGVLIQQNSTMNTPVYPVPKPDGKWRMVLDYREVNKTIPLIAAQNQHSAGILSSIYRGKYKTTLDLTNGFWAHPITPESYWLTAFTWQGKQYCWTRLPQGFLNSPALFTADVVDLLKEIPNVQAYVDDIYISHDDPQEHLEQLEKIFSILLNAGYVVSLKKSEIAQREVEFLGFNITKEGRGLTDTFKQKLLNITPPKDLKQLQSILGLLNFARNFIPNYSELVKPLYTIVANANGKFISWTEDNSNQLQHIISVLNQADNLEERNPETRLIIKVNSSPSAGYIRYYNEGSKRPIMYVNYIFSKAEAKFTQTEKLLTTMHKGLIKAMDLAMGQEILVYSPIVSMTKIQRTPLPERKALPVRWITWMTYLEDPRIQFHYDKSLPELQQIPNVTEDVIAKTKHPSEFAMVFYTDGSAIKHPDVNKSHSAGMGIAQVQFIPEYKIVHQWSIPLGDHTAQLAEIAAVEFACKKALKISGPVLIVTDSFYVAESANKELPYWKSNGFLNNKKKPLRHVSKWKSIAECLQLKPDIIIMHEKGHQQPMTTLHTEGNNLADKLATQGSYVVHAGKRTADGSEFEKRTADGSEFESPKKKAKVE

SEQ ID NO: 420 - protein, 2176 aa, synthetic construct
MPAAKRVKLDGGDKKYSIGLDIGTNSVGWAVITDEYKVPSKKFKVLGNTDRHSIKKNLIGALLFDSGETAEATRLKRTARRRYTRRKNRICYLQEIFSNEMAKVDDSFFHRLEESFLVEEDKKHERHPIFGNIVDEVAYHEKYPTIYHLRKKLVDSTDKADLRLIYLALAHMIKFRGHFLIEGDLNPDNSDVDKLFIQLVQTYNQLFEENPINASGVDAKAILSARLSKSRRLENLIAQLPGEKKNGLFGNLIALSLGLTPNFKSNFDLAEDAKLQLSKDTYDDDLDNLLAQIGDQYADLFLAAKNLSDAILLSDILRVNTEITKAPLSASMIKRYDEHHQDLTLLKALVRQQLPEKYKEIFFDQSKNGYAGYIDGGASQEEFYKFIKPILEKMDGTEELLVKLNREDLLRKQRTFDNGSIPHQIHLGELHAILRRQEDFYPFLKDNREKIEKILTFRIPYYVGPLARGNSRFAWMTRKSEETITPWNFEEVVDKGASAQSFIERMTNFDKNLPNEKVLPKHSLLYEYFTVYNELTKVKYVTEGMRKPAFLSGEQKKAIVDLLFKTNRKVTVKQLKEDYFKKIECFDSVEISGVEDRFNASLGTYHDLLKIIKDKDFLDNEENEDILEDIVLTLTLFEDREMIEERLKTYAHLFDDKVMKQLKRRRYTGWGRLSRKLINGIRDKQSGKTILDFLKSDGFANRNFMQLIHDDSLTFKEDIQKAQVSGQGDSLHEHIANLAGSPAIKKGILQTVKVVDELVKVMGRHKPENIVIEMARENQTTQKGQKNSRERMKRIEEGIKELGSQILKEHPVENTQLQNEKLYLYYLQNGRDMYVDQELDINRLSDYDVDHIVPQSFLKDDSIDNKVLTRSDKARGKSDNVPSEEVVKKMKNYWRQLLNAKLITQRKFDNLTKAERGGLSELDKAGFIKRQLVETRQITKHVAQILDSRMNTKYDENDKLIREVKVITLKSKLVSDFRKDFQFYKVREINNYHHAHDAYLNAVVGTALIKKYPKLESEFVYGDYKVYDVRKMIAKSEQEIGKATAKYFFYSNIMNFFKTEITLANGEIRKRPLIETNGETGEIVWDKGRDFATVRKVLSMPQVNIVKKTEVQTGGFSKESILPKRNSDKLIARKKDWDPKKYGGFDSPTVAYSVLVVAKVEKGKSKKLKSVKELLGITIMERSSFEKNPIDFLEAKGYKEVKKDLIIKLPKYSLFELENGRKRMLASAGELQKGNELALPSKYVNFLYLASHYEKLKGSPEDNEQKQLFVEQHKHYLDEIIEQISEFSKRVILADANLDKVLSAYNKHRDKPIREQAENIIHLFTLTNLGAPAAFKYFDTTIDRKRYTSTKEVLDATLIHQSITGLYETRIDLSQLGGDGGGGGGSSEAAAKGGMDPLQLLQPLEAEIKGTKLKAHWNSGATITCVPEAFLEDERPIQTMLIKTIHGEKQQDVYYLTFKVQGRKVEAEVLASPYDYILLNPSDVPWLMKKPLQLTVLVPLHEYQERLLQQTALPKEQKELLQKLFLKYDALWQHWENQVGHRRIKPHNIATGTLAPRPQKQYPINPKAKPSIQIVIDDLLKQGVLIQQNSTMNTPVYPVPKPDGKWRMVLDYREVNKTIPLIAAQNQHSAGILSSIYRGKYKTTLDLTNGFWAHPITPESYWLTAFTWQGKQYCWTRLPQGFLNSPALFTADVVDLLKEIPNVQAYVDDIYISHDDPQEHLEQLEKIFSILLNAGYVVSLKKSEIAQREVEFLGFNITKEGRGLTDTFKQKLLNITPPKDLKQLQSILGLLNFARNFIPNYSELVKPLYTIVANANGKFISWTEDNSNQLQHIISVLNQADNLEERNPETRLIIKVNSSPSAGYIRYYNEGSKRPIMYVNYIFSKAEAKFTQTEKLLTTMHKGLIKAMDLAMGQEILVYSPIVSMTKIQRTPLPERKALPVRWITWMTYLEDPRIQFHYDKSLPELQQIPNVTEDVIAKTKHPSEFAMVFYTDGSAIKHPDVNKSHSAGMGIAQVQFIPEYKIVHQWSIPLGDHTAQLAEIAAVEFACKKALKISGPVLIVTDSFYVAESANKELPYWKSNGFLNNKKKPLRHVSKWKSIAECLQLKPDIIIMHEKGHQQPMTTLHTEGNNLADKLATQGSYVVHAGKRTADGSEFEKRTADGSEFESPKKKAKVE

SEQ ID NO: 421 - protein, 2180 aa, synthetic construct
MPAAKRVKLDGGDKKYSIGLDIGTNSVGWAVITDEYKVPSKKFKVLGNTDRHSIKKNLIGALLFDSGETAEATRLKRTARRRYTRRKNRICYLQEIFSNEMAKVDDSFFHRLEESFLVEEDKKHERHPIFGNIVDEVAYHEKYPTIYHLRKKLVDSTDKADLRLIYLALAHMIKFRGHFLIEGDLNPDNSDVDKLFIQLVQTYNQLFEENPINASGVDAKAILSARLSKSRRLENLIAQLPGEKKNGLFGNLIALSLGLTPNFKSNFDLAEDAKLQLSKDTYDDDLDNLLAQIGDQYADLFLAAKNLSDAILLSDILRVNTEITKAPLSASMIKRYDEHHQDLTLLKALVRQQLPEKYKEIFFDQSKNGYAGYIDGGASQEEFYKFIKPILEKMDGTEELLVKLNREDLLRKQRTFDNGSIPHQIHLGELHAILRRQEDFYPFLKDNREKIEKILTFRIPYYVGPLARGNSRFAWMTRKSEETITPWNFEEVVDKGASAQSFIERMTNFDKNLPNEKVLPKHSLLYEYFTVYNELTKVKYVTEGMRKPAFLSGEQKKAIVDLLFKTNRKVTVKQLKEDYFKKIECFDSVEISGVEDRFNASLGTYHDLLKIIKDKDFLDNEENEDILEDIVLTLTLFEDREMIEERLKTYAHLFDDKVMKQLKRRRYTGWGRLSRKLINGIRDKQSGKTILDFLKSDGFANRNFMQLIHDDSLTFKEDIQKAQVSGQGDSLHEHIANLAGSPAIKKGILQTVKVVDELVKVMGRHKPENIVIEMARENQTTQKGQKNSRERMKRIEEGIKELGSQILKEHPVENTQLQNEKLYLYYLQNGRDMYVDQELDINRLSDYDVDHIVPQSFLKDDSIDNKVLTRSDKARGKSDNVPSEEVVKKMKNYWRQLLNAKLITQRKFDNLTKAERGGLSELDKAGFIKRQLVETRQITKHVAQILDSRMNTKYDENDKLIREVKVITLKSKLVSDFRKDFQFYKVREINNYHHAHDAYLNAVVGTALIKKYPKLESEFVYGDYKVYDVRKMIAKSEQEIGKATAKYFFYSNIMNFFKTEITLANGEIRKRPLIETNGETGEIVWDKGRDFATVRKVLSMPQVNIVKKTEVQTGGFSKESILPKRNSDKLIARKKDWDPKKYGGFDSPTVAYSVLVVAKVEKGKSKKLKSVKELLGITIMERSSFEKNPIDFLEAKGYKEVKKDLIIKLPKYSLFELENGRKRMLASAGELQKGNELALPSKYVNFLYLASHYEKLKGSPEDNEQKQLFVEQHKHYLDEIIEQISEFSKRVILADANLDKVLSAYNKHRDKPIREQAENIIHLFTLTNLGAPAAFKYFDTTIDRKRYTSTKEVLDATLIHQSITGLYETRIDLSQLGGDGGGGGGSEAAAKGGGGSGGMDPLQLLQPLEAEIKGTKLKAHWNSGATITCVPEAFLEDERPIQTMLIKTIHGEKQQDVYYLTFKVQGRKVEAEVLASPYDYILLNPSDVPWLMKKPLQLTVLVPLHEYQERLLQQTALPKEQKELLQKLFLKYDALWQHWENQVGHRRIKPHNIATGTLAPRPQKQYPINPKAKPSIQIVIDDLLKQGVLIQQNSTMNTPVYPVPKPDGKWRMVLDYREVNKTIPLIAAQNQHSAGILSSIYRGKYKTTLDLTNGFWAHPITPESYWLTAFTWQGKQYCWTRLPQGFLNSPALFTADVVDLLKEIPNVQAYVDDIYISHDDPQEHLEQLEKIFSILLNAGYVVSLKKSEIAQREVEFLGFNITKEGRGLTDTFKQKLLNITPPKDLKQLQSILGLLNFARNFIPNYSELVKPLYTIVANANGKFISWTEDNSNQLQHIISVLNQADNLEERNPETRLIIKVNSSPSAGYIRYYNEGSKRPIMYVNYIFSKAEAKFTQTEKLLTTMHKGLIKAMDLAMGQEILVYSPIVSMTKIQRTPLPERKALPVRWITWMTYLEDPRIQFHYDKSLPELQQIPNVTEDVIAKTKHPSEFAMVFYTDGSAIKHPDVNKSHSAGMGIAQVQFIPEYKIVHQWSIPLGDHTAQLAEIAAVEFACKKALKISGPVLIVTDSFYVAESANKELPYWKSNGFLNNKKKPLRHVSKWKSIAECLQLKPDIIIMHEKGHQQPMTTLHTEGNNLADKLATQGSYVVHAGKRTADGSEFEKRTADGSEFESPKKKAKVE

SEQ ID NO: 422 - protein, 2176 aa, synthetic construct
MPAAKRVKLDGGDKKYSIGLDIGTNSVGWAVITDEYKVPSKKFKVLGNTDRHSIKKNLIGALLFDSGETAEATRLKRTARRRYTRRKNRICYLQEIFSNEMAKVDDSFFHRLEESFLVEEDKKHERHPIFGNIVDEVAYHEKYPTIYHLRKKLVDSTDKADLRLIYLALAHMIKFRGHFLIEGDLNPDNSDVDKLFIQLVQTYNQLFEENPINASGVDAKAILSARLSKSRRLENLIAQLPGEKKNGLFGNLIALSLGLTPNFKSNFDLAEDAKLQLSKDTYDDDLDNLLAQIGDQYADLFLAAKNLSDAILLSDILRVNTEITKAPLSASMIKRYDEHHQDLTLLKALVRQQLPEKYKEIFFDQSKNGYAGYIDGGASQEEFYKFIKPILEKMDGTEELLVKLNREDLLRKQRTFDNGSIPHQIHLGELHAILRRQEDFYPFLKDNREKIEKILTFRIPYYVGPLARGNSRFAWMTRKSEETITPWNFEEVVDKGASAQSFIERMTNFDKNLPNEKVLPKHSLLYEYFTVYNELTKVKYVTEGMRKPAFLSGEQKKAIVDLLFKTNRKVTVKQLKEDYFKKIECFDSVEISGVEDRFNASLGTYHDLLKIIKDKDFLDNEENEDILEDIVLTLTLFEDREMIEERLKTYAHLFDDKVMKQLKRRRYTGWGRLSRKLINGIRDKQSGKTILDFLKSDGFANRNFMQLIHDDSLTFKEDIQKAQVSGQGDSLHEHIANLAGSPAIKKGILQTVKVVDELVKVMGRHKPENIVIEMARENQTTQKGQKNSRERMKRIEEGIKELGSQILKEHPVENTQLQNEKLYLYYLQNGRDMYVDQELDINRLSDYDVDHIVPQSFLKDDSIDNKVLTRSDKARGKSDNVPSEEVVKKMKNYWRQLLNAKLITQRKFDNLTKAERGGLSELDKAGFIKRQLVETRQITKHVAQILDSRMNTKYDENDKLIREVKVITLKSKLVSDFRKDFQFYKVREINNYHHAHDAYLNAVVGTALIKKYPKLESEFVYGDYKVYDVRKMIAKSEQEIGKATAKYFFYSNIMNFFKTEITLANGEIRKRPLIETNGETGEIVWDKGRDFATVRKVLSMPQVNIVKKTEVQTGGFSKESILPKRNSDKLIARKKDWDPKKYGGFDSPTVAYSVLVVAKVEKGKSKKLKSVKELLGITIMERSSFEKNPIDFLEAKGYKEVKKDLIIKLPKYSLFELENGRKRMLASAGELQKGNELALPSKYVNFLYLASHYEKLKGSPEDNEQKQLFVEQHKHYLDEIIEQISEFSKRVILADANLDKVLSAYNKHRDKPIREQAENIIHLFTLTNLGAPAAFKYFDTTIDRKRYTSTKEVLDATLIHQSITGLYETRIDLSQLGGDGGGGGEAAAKGGSGGMDPLQLLQPLEAEIKGTKLKAHWNSGATITCVPEAFLEDERPIQTMLIKTIHGEKQQDVYYLTFKVQGRKVEAEVLASPYDYILLNPSDVPWLMKKPLQLTVLVPLHEYQERLLQQTALPKEQKELLQKLFLKYDALWQHWENQVGHRRIKPHNIATGTLAPRPQKQYPINPKAKPSIQIVIDDLLKQGVLIQQNSTMNTPVYPVPKPDGKWRMVLDYREVNKTIPLIAAQNQHSAGILSSIYRGKYKTTLDLTNGFWAHPITPESYWLTAFTWQGKQYCWTRLPQGFLNSPALFTADVVDLLKEIPNVQAYVDDIYISHDDPQEHLEQLEKIFSILLNAGYVVSLKKSEIAQREVEFLGFNITKEGRGLTDTFKQKLLNITPPKDLKQLQSILGLLNFARNFIPNYSELVKPLYTIVANANGKFISWTEDNSNQLQHIISVLNQADNLEERNPETRLIIKVNSSPSAGYIRYYNEGSKRPIMYVNYIFSKAEAKFTQTEKLLTTMHKGLIKAMDLAMGQEILVYSPIVSMTKIQRTPLPERKALPVRWITWMTYLEDPRIQFHYDKSLPELQQIPNVTEDVIAKTKHPSEFAMVFYTDGSAIKHPDVNKSHSAGMGIAQVQFIPEYKIVHQWSIPLGDHTAQLAEIAAVEFACKKALKISGPVLIVTDSFYVAESANKELPYWKSNGFLNNKKKPLRHVSKWKSIAECLQLKPDIIIMHEKGHQQPMTTLHTEGNNLADKLATQGSYVVHAGKRTADGSEFEKRTADGSEFESPKKKAKVE

SEQ ID NO: 423 - protein, 2171 aa, synthetic construct
MPAAKRVKLDGGDKKYSIGLDIGTNSVGWAVITDEYKVPSKKFKVLGNTDRHSIKKNLIGALLFDSGETAEATRLKRTARRRYTRRKNRICYLQEIFSNEMAKVDDSFFHRLEESFLVEEDKKHERHPIFGNIVDEVAYHEKYPTIYHLRKKLVDSTDKADLRLIYLALAHMIKFRGHFLIEGDLNPDNSDVDKLFIQLVQTYNQLFEENPINASGVDAKAILSARLSKSRRLENLIAQLPGEKKNGLFGNLIALSLGLTPNFKSNFDLAEDAKLQLSKDTYDDDLDNLLAQIGDQYADLFLAAKNLSDAILLSDILRVNTEITKAPLSASMIKRYDEHHQDLTLLKALVRQQLPEKYKEIFFDQSKNGYAGYIDGGASQEEFYKFIKPILEKMDGTEELLVKLNREDLLRKQRTFDNGSIPHQIHLGELHAILRRQEDFYPFLKDNREKIEKILTFRIPYYVGPLARGNSRFAWMTRKSEETITPWNFEEVVDKGASAQSFIERMTNFDKNLPNEKVLPKHSLLYEYFTVYNELTKVKYVTEGMRKPAFLSGEQKKAIVDLLFKTNRKVTVKQLKEDYFKKIECFDSVEISGVEDRFNASLGTYHDLLKIIKDKDFLDNEENEDILEDIVLTLTLFEDREMIEERLKTYAHLFDDKVMKQLKRRRYTGWGRLSRKLINGIRDKQSGKTILDFLKSDGFANRNFMQLIHDDSLTFKEDIQKAQVSGQGDSLHEHIANLAGSPAIKKGILQTVKVVDELVKVMGRHKPENIVIEMARENQTTQKGQKNSRERMKRIEEGIKELGSQILKEHPVENTQLQNEKLYLYYLQNGRDMYVDQELDINRLSDYDVDHIVPQSFLKDDSIDNKVLTRSDKARGKSDNVPSEEVVKKMKNYWRQLLNAKLITQRKFDNLTKAERGGLSELDKAGFIKRQLVETRQITKHVAQILDSRMNTKYDENDKLIREVKVITLKSKLVSDFRKDFQFYKVREINNYHHAHDAYLNAVVGTALIKKYPKLESEFVYGDYKVYDVRKMIAKSEQEIGKATAKYFFYSNIMNFFKTEITLANGEIRKRPLIETNGETGEIVWDKGRDFATVRKVLSMPQVNIVKKTEVQTGGFSKESILPKRNSDKLIARKKDWDPKKYGGFDSPTVAYSVLVVAKVEKGKSKKLKSVKELLGITIMERSSFEKNPIDFLEAKGYKEVKKDLIIKLPKYSLFELENGRKRMLASAGELQKGNELALPSKYVNFLYLASHYEKLKGSPEDNEQKQLFVEQHKHYLDEIIEQISEFSKRVILADANLDKVLSAYNKHRDKPIREQAENIIHLFTLTNLGAPAAFKYFDTTIDRKRYTSTKEVLDATLIHQSITGLYETRIDLSQLGGDGGGSSGSSGGMDPLQLLQPLEAEIKGTKLKAHWNSGATITCVPEAFLEDERPIQTMLIKTIHGEKQQDVYYLTFKVQGRKVEAEVLASPYDYILLNPSDVPWLMKKPLQLTVLVPLHEYQERLLQQTALPKEQKELLQKLFLKYDALWQHWENQVGHRRIKPHNIATGTLAPRPQKQYPINPKAKPSIQIVIDDLLKQGVLIQQNSTMNTPVYPVPKPDGKWRMVLDYREVNKTIPLIAAQNQHSAGILSSIYRGKYKTTLDLTNGFWAHPITPESYWLTAFTWQGKQYCWTRLPQGFLNSPALFTADVVDLLKEIPNVQAYVDDIYISHDDPQEHLEQLEKIFSILLNAGYVVSLKKSEIAQREVEFLGFNITKEGRGLTDTFKQKLLNITPPKDLKQLQSILGLLNFARNFIPNYSELVKPLYTIVANANGKFISWTEDNSNQLQHIISVLNQADNLEERNPETRLIIKVNSSPSAGYIRYYNEGSKRPIMYVNYIFSKAEAKFTQTEKLLTTMHKGLIKAMDLAMGQEILVYSPIVSMTKIQRTPLPERKALPVRWITWMTYLEDPRIQFHYDKSLPELQQIPNVTEDVIAKTKHPSEFAMVFYTDGSAIKHPDVNKSHSAGMGIAQVQFIPEYKIVHQWSIPLGDHTAQLAEIAAVEFACKKALKISGPVLIVTDSFYVAESANKELPYWKSNGFLNNKKKPLRHVSKWKSIAECLQLKPDIIIMHEKGHQQPMTTLHTEGNNLADKLATQGSYVVHAGKRTADGSEFEKRTADGSEFESPKKKAKVE

SEQ ID NO: 424 - protein, 2176 aa, synthetic construct
MPAAKRVKLDGGDKKYSIGLDIGTNSVGWAVITDEYKVPSKKFKVLGNTDRHSIKKNLIGALLFDSGETAEATRLKRTARRRYTRRKNRICYLQEIFSNEMAKVDDSFFHRLEESFLVEEDKKHERHPIFGNIVDEVAYHEKYPTIYHLRKKLVDSTDKADLRLIYLALAHMIKFRGHFLIEGDLNPDNSDVDKLFIQLVQTYNQLFEENPINASGVDAKAILSARLSKSRRLENLIAQLPGEKKNGLFGNLIALSLGLTPNFKSNFDLAEDAKLQLSKDTYDDDLDNLLAQIGDQYADLFLAAKNLSDAILLSDILRVNTEITKAPLSASMIKRYDEHHQDLTLLKALVRQQLPEKYKEIFFDQSKNGYAGYIDGGASQEEFYKFIKPILEKMDGTEELLVKLNREDLLRKQRTFDNGSIPHQIHLGELHAILRRQEDFYPFLKDNREKIEKILTFRIPYYVGPLARGNSRFAWMTRKSEETITPWNFEEVVDKGASAQSFIERMTNFDKNLPNEKVLPKHSLLYEYFTVYNELTKVKYVTEGMRKPAFLSGEQKKAIVDLLFKTNRKVTVKQLKEDYFKKIECFDSVEISGVEDRFNASLGTYHDLLKIIKDKDFLDNEENEDILEDIVLTLTLFEDREMIEERLKTYAHLFDDKVMKQLKRRRYTGWGRLSRKLINGIRDKQSGKTILDFLKSDGFANRNFMQLIHDDSLTFKEDIQKAQVSGQGDSLHEHIANLAGSPAIKKGILQTVKVVDELVKVMGRHKPENIVIEMARENQTTQKGQKNSRERMKRIEEGIKELGSQILKEHPVENTQLQNEKLYLYYLQNGRDMYVDQELDINRLSDYDVDHIVPQSFLKDDSIDNKVLTRSDKARGKSDNVPSEEVVKKMKNYWRQLLNAKLITQRKFDNLTKAERGGLSELDKAGFIKRQLVETRQITKHVAQILDSRMNTKYDENDKLIREVKVITLKSKLVSDFRKDFQFYKVREINNYHHAHDAYLNAVVGTALIKKYPKLESEFVYGDYKVYDVRKMIAKSEQEIGKATAKYFFYSNIMNFFKTEITLANGEIRKRPLIETNGETGEIVWDKGRDFATVRKVLSMPQVNIVKKTEVQTGGFSKESILPKRNSDKLIARKKDWDPKKYGGFDSPTVAYSVLVVAKVEKGKSKKLKSVKELLGITIMERSSFEKNPIDFLEAKGYKEVKKDLIIKLPKYSLFELENGRKRMLASAGELQKGNELALPSKYVNFLYLASHYEKLKGSPEDNEQKQLFVEQHKHYLDEIIEQISEFSKRVILADANLDKVLSAYNKHRDKPIREQAENIIHLFTLTNLGAPAAFKYFDTTIDRKRYTSTKEVLDATLIHQSITGLYETRIDLSQLGGDGGPAPGGGEAAAKGGMDPLQLLQPLEAEIKGTKLKAHWNSGATITCVPEAFLEDERPIQTMLIKTIHGEKQQDVYYLTFKVQGRKVEAEVLASPYDYILLNPSDVPWLMKKPLQLTVLVPLHEYQERLLQQTALPKEQKELLQKLFLKYDALWQHWENQVGHRRIKPHNIATGTLAPRPQKQYPINPKAKPSIQIVIDDLLKQGVLIQQNSTMNTPVYPVPKPDGKWRMVLDYREVNKTIPLIAAQNQHSAGILSSIYRGKYKTTLDLTNGFWAHPITPESYWLTAFTWQGKQYCWTRLPQGFLNSPALFTADVVDLLKEIPNVQAYVDDIYISHDDPQEHLEQLEKIFSILLNAGYVVSLKKSEIAQREVEFLGFNITKEGRGLTDTFKQKLLNITPPKDLKQLQSILGLLNFARNFIPNYSELVKPLYTIVANANGKFISWTEDNSNQLQHIISVLNQADNLEERNPETRLIIKVNSSPSAGYIRYYNEGSKRPIMYVNYIFSKAEAKFTQTEKLLTTMHKGLIKAMDLAMGQEILVYSPIVSMTKIQRTPLPERKALPVRWITWMTYLEDPRIQFHYDKSLPELQQIPNVTEDVIAKTKHPSEFAMVFYTDGSAIKHPDVNKSHSAGMGIAQVQFIPEYKIVHQWSIPLGDHTAQLAEIAAVEFACKKALKISGPVLIVTDSFYVAESANKELPYWKSNGFLNNKKKPLRHVSKWKSIAECLQLKPDIIIMHEKGHQQPMTTLHTEGNNLADKLATQGSYVVHAGKRTADGSEFEKRTADGSEFESPKKKAKVE

SEQ ID NO: 425 - protein, 2174 aa, synthetic construct
MPAAKRVKLDGGDKKYSIGLDIGTNSVGWAVITDEYKVPSKKFKVLGNTDRHSIKKNLIGALLFDSGETAEATRLKRTARRRYTRRKNRICYLQEIFSNEMAKVDDSFFHRLEESFLVEEDKKHERHPIFGNIVDEVAYHEKYPTIYHLRKKLVDSTDKADLRLIYLALAHMIKFRGHFLIEGDLNPDNSDVDKLFIQLVQTYNQLFEENPINASGVDAKAILSARLSKSRRLENLIAQLPGEKKNGLFGNLIALSLGLTPNFKSNFDLAEDAKLQLSKDTYDDDLDNLLAQIGDQYADLFLAAKNLSDAILLSDILRVNTEITKAPLSASMIKRYDEHHQDLTLLKALVRQQLPEKYKEIFFDQSKNGYAGYIDGGASQEEFYKFIKPILEKMDGTEELLVKLNREDLLRKQRTFDNGSIPHQIHLGELHAILRRQEDFYPFLKDNREKIEKILTFRIPYYVGPLARGNSRFAWMTRKSEETITPWNFEEVVDKGASAQSFIERMTNFDKNLPNEKVLPKHSLLYEYFTVYNELTKVKYVTEGMRKPAFLSGEQKKAIVDLLFKTNRKVTVKQLKEDYFKKIECFDSVEISGVEDRFNASLGTYHDLLKIIKDKDFLDNEENEDILEDIVLTLTLFEDREMIEERLKTYAHLFDDKVMKQLKRRRYTGWGRLSRKLINGIRDKQSGKTILDFLKSDGFANRNFMQLIHDDSLTFKEDIQKAQVSGQGDSLHEHIANLAGSPAIKKGILQTVKVVDELVKVMGRHKPENIVIEMARENQTTQKGQKNSRERMKRIEEGIKELGSQILKEHPVENTQLQNEKLYLYYLQNGRDMYVDQELDINRLSDYDVDHIVPQSFLKDDSIDNKVLTRSDKARGKSDNVPSEEVVKKMKNYWRQLLNAKLITQRKFDNLTKAERGGLSELDKAGFIKRQLVETRQITKHVAQILDSRMNTKYDENDKLIREVKVITLKSKLVSDFRKDFQFYKVREINNYHHAHDAYLNAVVGTALIKKYPKLESEFVYGDYKVYDVRKMIAKSEQEIGKATAKYFFYSNIMNFFKTEITLANGEIRKRPLIETNGETGEIVWDKGRDFATVRKVLSMPQVNIVKKTEVQTGGFSKESILPKRNSDKLIARKKDWDPKKYGGFDSPTVAYSVLVVAKVEKGKSKKLKSVKELLGITIMERSSFEKNPIDFLEAKGYKEVKKDLIIKLPKYSLFELENGRKRMLASAGELQKGNELALPSKYVNFLYLASHYEKLKGSPEDNEQKQLFVEQHKHYLDEIIEQISEFSKRVILADANLDKVLSAYNKHRDKPIREQAENIIHLFTLTNLGAPAAFKYFDTTIDRKRYTSTKEVLDATLIHQSITGLYETRIDLSQLGGDGGGGSGGSGGSGGMDPLQLLQPLEAEIKGTKLKAHWNSGATITCVPEAFLEDERPIQTMLIKTIHGEKQQDVYYLTFKVQGRKVEAEVLASPYDYILLNPSDVPWLMKKPLQLTVLVPLHEYQERLLQQTALPKEQKELLQKLFLKYDALWQHWENQVGHRRIKPHNIATGTLAPRPQKQYPINPKAKPSIQIVIDDLLKQGVLIQQNSTMNTPVYPVPKPDGKWRMVLDYREVNKTIPLIAAQNQHSAGILSSIYRGKYKTTLDLTNGFWAHPITPESYWLTAFTWQGKQYCWTRLPQGFLNSPALFTADVVDLLKEIPNVQAYVDDIYISHDDPQEHLEQLEKIFSILLNAGYVVSLKKSEIAQREVEFLGFNITKEGRGLTDTFKQKLLNITPPKDLKQLQSILGLLNFARNFIPNYSELVKPLYTIVANANGKFISWTEDNSNQLQHIISVLNQADNLEERNPETRLIIKVNSSPSAGYIRYYNEGSKRPIMYVNYIFSKAEAKFTQTEKLLTTMHKGLIKAMDLAMGQEILVYSPIVSMTKIQRTPLPERKALPVRWITWMTYLEDPRIQFHYDKSLPELQQIPNVTEDVIAKTKHPSEFAMVFYTDGSAIKHPDVNKSHSAGMGIAQVQFIPEYKIVHQWSIPLGDHTAQLAEIAAVEFACKKALKISGPVLIVTDSFYVAESANKELPYWKSNGFLNNKKKPLRHVSKWKSIAECLQLKPDIIIMHEKGHQQPMTTLHTEGNNLADKLATQGSYVVHAGKRTADGSEFEKRTADGSEFESPKKKAKVE

SEQ ID NO: 426 - protein, 2094 aa, synthetic construct
MPAAKRVKLDGGDKKYSIGLDIGTNSVGWAVITDEYKVPSKKFKVLGNTDRHSIKKNLIGALLFDSGETAEATRLKRTARRRYTRRKNRICYLQEIFSNEMAKVDDSFFHRLEESFLVEEDKKHERHPIFGNIVDEVAYHEKYPTIYHLRKKLVDSTDKADLRLIYLALAHMIKFRGHFLIEGDLNPDNSDVDKLFIQLVQTYNQLFEENPINASGVDAKAILSARLSKSRRLENLIAQLPGEKKNGLFGNLIALSLGLTPNFKSNFDLAEDAKLQLSKDTYDDDLDNLLAQIGDQYADLFLAAKNLSDAILLSDILRVNTEITKAPLSASMIKRYDEHHQDLTLLKALVRQQLPEKYKEIFFDQSKNGYAGYIDGGASQEEFYKFIKPILEKMDGTEELLVKLNREDLLRKQRTFDNGSIPHQIHLGELHAILRRQEDFYPFLKDNREKIEKILTFRIPYYVGPLARGNSRFAWMTRKSEETITPWNFEEVVDKGASAQSFIERMTNFDKNLPNEKVLPKHSLLYEYFTVYNELTKVKYVTEGMRKPAFLSGEQKKAIVDLLFKTNRKVTVKQLKEDYFKKIECFDSVEISGVEDRFNASLGTYHDLLKIIKDKDFLDNEENEDILEDIVLTLTLFEDREMIEERLKTYAHLFDDKVMKQLKRRRYTGWGRLSRKLINGIRDKQSGKTILDFLKSDGFANRNFMQLIHDDSLTFKEDIQKAQVSGQGDSLHEHIANLAGSPAIKKGILQTVKVVDELVKVMGRHKPENIVIEMARENQTTQKGQKNSRERMKRIEEGIKELGSQILKEHPVENTQLQNEKLYLYYLQNGRDMYVDQELDINRLSDYDVDHIVPQSFLKDDSIDNKVLTRSDKARGKSDNVPSEEVVKKMKNYWRQLLNAKLITQRKFDNLTKAERGGLSELDKAGFIKRQLVETRQITKHVAQILDSRMNTKYDENDKLIREVKVITLKSKLVSDFRKDFQFYKVREINNYHHAHDAYLNAVVGTALIKKYPKLESEFVYGDYKVYDVRKMIAKSEQEIGKATAKYFFYSNIMNFFKTEITLANGEIRKRPLIETNGETGEIVWDKGRDFATVRKVLSMPQVNIVKKTEVQTGGFSKESILPKRNSDKLIARKKDWDPKKYGGFDSPTVAYSVLVVAKVEKGKSKKLKSVKELLGITIMERSSFEKNPIDFLEAKGYKEVKKDLIIKLPKYSLFELENGRKRMLASAGELQKGNELALPSKYVNFLYLASHYEKLKGSPEDNEQKQLFVEQHKHYLDEIIEQISEFSKRVILADANLDKVLSAYNKHRDKPIREQAENIIHLFTLTNLGAPAAFKYFDTTIDRKRYTSTKEVLDATLIHQSITGLYETRIDLSQLGGDGGGSSGSSGSSGSSGSSGSSGGVPWLMKKPLQLTVLVPLHEYQERLLQQTALPKEQKELLQKLFLKYDALWQHWENQVGHRRIKPHNIATGTLAPRPQKQYPINPKAKPSIQIVIDDLLKQGVLIQQNSTMNTPVYPVPKPDGKWRMVLDYREVNKTIPLIAAQNQHSAGILSSIYRGKYKTTLDLTNGFWAHPITPESYWLTAFTWQGKQYCWTRLPQGFLNSPALFTADVVDLLKEIPNVQAYVDDIYISHDDPQEHLEQLEKIFSILLNAGYVVSLKKSEIAQREVEFLGFNITKEGRGLTDTFKQKLLNITPPKDLKQLQSILGLLNFARNFIPNYSELVKPLYTIVANANGKFISWTEDNSNQLQHIISVLNQADNLEERNPETRLIIKVNSSPSAGYIRYYNEGSKRPIMYVNYIFSKAEAKFTQTEKLLTTMHKGLIKAMDLAMGQEILVYSPIVSMTKIQRTPLPERKALPVRWITWMTYLEDPRIQFHYDKSLPELQQIPNVTEDVIAKTKHPSEFAMVFYTDGSAIKHPDVNKSHSAGMGIAQVQFIPEYKIVHQWSIPLGDHTAQLAEIAAVEFACKKALKISGPVLIVTDSFYVAESANKELPYWKSNGFLNNKKKPLRHVSKWKSIAECLQLKPDIIIMHEKGHQQPMTTLHTEGNNLADKLATQGSYVVHAGKRTADGSEFEKRTADGSEFESPKKKAKVE

SEQ ID NO: 427 - protein, 2087 aa, synthetic construct
MPAAKRVKLDGGDKKYSIGLDIGTNSVGWAVITDEYKVPSKKFKVLGNTDRHSIKKNLIGALLFDSGETAEATRLKRTARRRYTRRKNRICYLQEIFSNEMAKVDDSFFHRLEESFLVEEDKKHERHPIFGNIVDEVAYHEKYPTIYHLRKKLVDSTDKADLRLIYLALAHMIKFRGHFLIEGDLNPDNSDVDKLFIQLVQTYNQLFEENPINASGVDAKAILSARLSKSRRLENLIAQLPGEKKNGLFGNLIALSLGLTPNFKSNFDLAEDAKLQLSKDTYDDDLDNLLAQIGDQYADLFLAAKNLSDAILLSDILRVNTEITKAPLSASMIKRYDEHHQDLTLLKALVRQQLPEKYKEIFFDQSKNGYAGYIDGGASQEEFYKFIKPILEKMDGTEELLVKLNREDLLRKQRTFDNGSIPHQIHLGELHAILRRQEDFYPFLKDNREKIEKILTFRIPYYVGPLARGNSRFAWMTRKSEETITPWNFEEVVDKGASAQSFIERMTNFDKNLPNEKVLPKHSLLYEYFTVYNELTKVKYVTEGMRKPAFLSGEQKKAIVDLLFKTNRKVTVKQLKEDYFKKIECFDSVEISGVEDRFNASLGTYHDLLKIIKDKDFLDNEENEDILEDIVLTLTLFEDREMIEERLKTYAHLFDDKVMKQLKRRRYTGWGRLSRKLINGIRDKQSGKTILDFLKSDGFANRNFMQLIHDDSLTFKEDIQKAQVSGQGDSLHEHIANLAGSPAIKKGILQTVKVVDELVKVMGRHKPENIVIEMARENQTTQKGQKNSRERMKRIEEGIKELGSQILKEHPVENTQLQNEKLYLYYLQNGRDMYVDQELDINRLSDYDVDHIVPQSFLKDDSIDNKVLTRSDKARGKSDNVPSEEVVKKMKNYWRQLLNAKLITQRKFDNLTKAERGGLSELDKAGFIKRQLVETRQITKHVAQILDSRMNTKYDENDKLIREVKVITLKSKLVSDFRKDFQFYKVREINNYHHAHDAYLNAVVGTALIKKYPKLESEFVYGDYKVYDVRKMIAKSEQEIGKATAKYFFYSNIMNFFKTEITLANGEIRKRPLIETNGETGEIVWDKGRDFATVRKVLSMPQVNIVKKTEVQTGGFSKESILPKRNSDKLIARKKDWDPKKYGGFDSPTVAYSVLVVAKVEKGKSKKLKSVKELLGITIMERSSFEKNPIDFLEAKGYKEVKKDLIIKLPKYSLFELENGRKRMLASAGELQKGNELALPSKYVNFLYLASHYEKLKGSPEDNEQKQLFVEQHKHYLDEIIEQISEFSKRVILADANLDKVLSAYNKHRDKPIREQAENIIHLFTLTNLGAPAAFKYFDTTIDRKRYTSTKEVLDATLIHQSITGLYETRIDLSQLGGDGGPAPEAAAKGSSGGVPWLMKKPLQLTVLVPLHEYQERLLQQTALPKEQKELLQKLFLKYDALWQHWENQVGHRRIKPHNIATGTLAPRPQKQYPINPKAKPSIQIVIDDLLKQGVLIQQNSTMNTPVYPVPKPDGKWRMVLDYREVNKTIPLIAAQNQHSAGILSSIYRGKYKTTLDLTNGFWAHPITPESYWLTAFTWQGKQYCWTRLPQGFLNSPALFTADVVDLLKEIPNVQAYVDDIYISHDDPQEHLEQLEKIFSILLNAGYVVSLKKSEIAQREVEFLGFNITKEGRGLTDTFKQKLLNITPPKDLKQLQSILGLLNFARNFIPNYSELVKPLYTIVANANGKFISWTEDNSNQLQHIISVLNQADNLEERNPETRLIIKVNSSPSAGYIRYYNEGSKRPIMYVNYIFSKAEAKFTQTEKLLTTMHKGLIKAMDLAMGQEILVYSPIVSMTKIQRTPLPERKALPVRWITWMTYLEDPRIQFHYDKSLPELQQIPNVTEDVIAKTKHPSEFAMVFYTDGSAIKHPDVNKSHSAGMGIAQVQFIPEYKIVHQWSIPLGDHTAQLAEIAAVEFACKKALKISGPVLIVTDSFYVAESANKELPYWKSNGFLNNKKKPLRHVSKWKSIAECLQLKPDIIIMHEKGHQQPMTTLHTEGNNLADKLATQGSYVVHAGKRTADGSEFEKRTADGSEFESPKKKAKVE

SEQ ID NO: 428 - protein, 2091 aa, synthetic construct
MPAAKRVKLDGGDKKYSIGLDIGTNSVGWAVITDEYKVPSKKFKVLGNTDRHSIKKNLIGALLFDSGETAEATRLKRTARRRYTRRKNRICYLQEIFSNEMAKVDDSFFHRLEESFLVEEDKKHERHPIFGNIVDEVAYHEKYPTIYHLRKKLVDSTDKADLRLIYLALAHMIKFRGHFLIEGDLNPDNSDVDKLFIQLVQTYNQLFEENPINASGVDAKAILSARLSKSRRLENLIAQLPGEKKNGLFGNLIALSLGLTPNFKSNFDLAEDAKLQLSKDTYDDDLDNLLAQIGDQYADLFLAAKNLSDAILLSDILRVNTEITKAPLSASMIKRYDEHHQDLTLLKALVRQQLPEKYKEIFFDQSKNGYAGYIDGGASQEEFYKFIKPILEKMDGTEELLVKLNREDLLRKQRTFDNGSIPHQIHLGELHAILRRQEDFYPFLKDNREKIEKILTFRIPYYVGPLARGNSRFAWMTRKSEETITPWNFEEVVDKGASAQSFIERMTNFDKNLPNEKVLPKHSLLYEYFTVYNELTKVKYVTEGMRKPAFLSGEQKKAIVDLLFKTNRKVTVKQLKEDYFKKIECFDSVEISGVEDRFNASLGTYHDLLKIIKDKDFLDNEENEDILEDIVLTLTLFEDREMIEERLKTYAHLFDDKVMKQLKRRRYTGWGRLSRKLINGIRDKQSGKTILDFLKSDGFANRNFMQLIHDDSLTFKEDIQKAQVSGQGDSLHEHIANLAGSPAIKKGILQTVKVVDELVKVMGRHKPENIVIEMARENQTTQKGQKNSRERMKRIEEGIKELGSQILKEHPVENTQLQNEKLYLYYLQNGRDMYVDQELDINRLSDYDVDHIVPQSFLKDDSIDNKVLTRSDKARGKSDNVPSEEVVKKMKNYWRQLLNAKLITQRKFDNLTKAERGGLSELDKAGFIKRQLVETRQITKHVAQILDSRMNTKYDENDKLIREVKVITLKSKLVSDFRKDFQFYKVREINNYHHAHDAYLNAVVGTALIKKYPKLESEFVYGDYKVYDVRKMIAKSEQEIGKATAKYFFYSNIMNFFKTEITLANGEIRKRPLIETNGETGEIVWDKGRDFATVRKVLSMPQVNIVKKTEVQTGGFSKESILPKRNSDKLIARKKDWDPKKYGGFDSPTVAYSVLVVAKVEKGKSKKLKSVKELLGITIMERSSFEKNPIDFLEAKGYKEVKKDLIIKLPKYSLFELENGRKRMLASAGELQKGNELALPSKYVNFLYLASHYEKLKGSPEDNEQKQLFVEQHKHYLDEIIEQISEFSKRVILADANLDKVLSAYNKHRDKPIREQAENIIHLFTLTNLGAPAAFKYFDTTIDRKRYTSTKEVLDATLIHQSITGLYETRIDLSQLGGDGGGSSGSSGSSGSSGSSGGVPWLMKKPLQLTVLVPLHEYQERLLQQTALPKEQKELLQKLFLKYDALWQHWENQVGHRRIKPHNIATGTLAPRPQKQYPINPKAKPSIQIVIDDLLKQGVLIQQNSTMNTPVYPVPKPDGKWRMVLDYREVNKTIPLIAAQNQHSAGILSSIYRGKYKTTLDLTNGFWAHPITPESYWLTAFTWQGKQYCWTRLPQGFLNSPALFTADVVDLLKEIPNVQAYVDDIYISHDDPQEHLEQLEKIFSILLNAGYVVSLKKSEIAQREVEFLGFNITKEGRGLTDTFKQKLLNITPPKDLKQLQSILGLLNFARNFIPNYSELVKPLYTIVANANGKFISWTEDNSNQLQHIISVLNQADNLEERNPETRLIIKVNSSPSAGYIRYYNEGSKRPIMYVNYIFSKAEAKFTQTEKLLTTMHKGLIKAMDLAMGQEILVYSPIVSMTKIQRTPLPERKALPVRWITWMTYLEDPRIQFHYDKSLPELQQIPNVTEDVIAKTKHPSEFAMVFYTDGSAIKHPDVNKSHSAGMGIAQVQFIPEYKIVHQWSIPLGDHTAQLAEIAAVEFACKKALKISGPVLIVTDSFYVAESANKELPYWKSNGFLNNKKKPLRHVSKWKSIAECLQLKPDIIIMHEKGHQQPMTTLHTEGNNLADKLATQGSYVVHAGKRTADGSEFEKRTADGSEFESPKKKAKVE

SEQ ID NO: 429 - protein, 2084 aa, synthetic construct
MPAAKRVKLDGGDKKYSIGLDIGTNSVGWAVITDEYKVPSKKFKVLGNTDRHSIKKNLIGALLFDSGETAEATRLKRTARRRYTRRKNRICYLQEIFSNEMAKVDDSFFHRLEESFLVEEDKKHERHPIFGNIVDEVAYHEKYPTIYHLRKKLVDSTDKADLRLIYLALAHMIKFRGHFLIEGDLNPDNSDVDKLFIQLVQTYNQLFEENPINASGVDAKAILSARLSKSRRLENLIAQLPGEKKNGLFGNLIALSLGLTPNFKSNFDLAEDAKLQLSKDTYDDDLDNLLAQIGDQYADLFLAAKNLSDAILLSDILRVNTEITKAPLSASMIKRYDEHHQDLTLLKALVRQQLPEKYKEIFFDQSKNGYAGYIDGGASQEEFYKFIKPILEKMDGTEELLVKLNREDLLRKQRTFDNGSIPHQIHLGELHAILRRQEDFYPFLKDNREKIEKILTFRIPYYVGPLARGNSRFAWMTRKSEETITPWNFEEVVDKGASAQSFIERMTNFDKNLPNEKVLPKHSLLYEYFTVYNELTKVKYVTEGMRKPAFLSGEQKKAIVDLLFKTNRKVTVKQLKEDYFKKIECFDSVEISGVEDRFNASLGTYHDLLKIIKDKDFLDNEENEDILEDIVLTLTLFEDREMIEERLKTYAHLFDDKVMKQLKRRRYTGWGRLSRKLINGIRDKQSGKTILDFLKSDGFANRNFMQLIHDDSLTFKEDIQKAQVSGQGDSLHEHIANLAGSPAIKKGILQTVKVVDELVKVMGRHKPENIVIEMARENQTTQKGQKNSRERMKRIEEGIKELGSQILKEHPVENTQLQNEKLYLYYLQNGRDMYVDQELDINRLSDYDVDHIVPQSFLKDDSIDNKVLTRSDKARGKSDNVPSEEVVKKMKNYWRQLLNAKLITQRKFDNLTKAERGGLSELDKAGFIKRQLVETRQITKHVAQILDSRMNTKYDENDKLIREVKVITLKSKLVSDFRKDFQFYKVREINNYHHAHDAYLNAVVGTALIKKYPKLESEFVYGDYKVYDVRKMIAKSEQEIGKATAKYFFYSNIMNFFKTEITLANGEIRKRPLIETNGETGEIVWDKGRDFATVRKVLSMPQVNIVKKTEVQTGGFSKESILPKRNSDKLIARKKDWDPKKYGGFDSPTVAYSVLVVAKVEKGKSKKLKSVKELLGITIMERSSFEKNPIDFLEAKGYKEVKKDLIIKLPKYSLFELENGRKRMLASAGELQKGNELALPSKYVNFLYLASHYEKLKGSPEDNEQKQLFVEQHKHYLDEIIEQISEFSKRVILADANLDKVLSAYNKHRDKPIREQAENIIHLFTLTNLGAPAAFKYFDTTIDRKRYTSTKEVLDATLIHQSITGLYETRIDLSQLGGDGGGGGGGGGGGGVPWLMKKPLQLTVLVPLHEYQERLLQQTALPKEQKELLQKLFLKYDALWQHWENQVGHRRIKPHNIATGTLAPRPQKQYPINPKAKPSIQIVIDDLLKQGVLIQQNSTMNTPVYPVPKPDGKWRMVLDYREVNKTIPLIAAQNQHSAGILSSIYRGKYKTTLDLTNGFWAHPITPESYWLTAFTWQGKQYCWTRLPQGFLNSPALFTADVVDLLKEIPNVQAYVDDIYISHDDPQEHLEQLEKIFSILLNAGYVVSLKKSEIAQREVEFLGFNITKEGRGLTDTFKQKLLNITPPKDLKQLQSILGLLNFARNFIPNYSELVKPLYTIVANANGKFISWTEDNSNQLQHIISVLNQADNLEERNPETRLIIKVNSSPSAGYIRYYNEGSKRPIMYVNYIFSKAEAKFTQTEKLLTTMHKGLIKAMDLAMGQEILVYSPIVSMTKIQRTPLPERKALPVRWITWMTYLEDPRIQFHYDKSLPELQQIPNVTEDVIAKTKHPSEFAMVFYTDGSAIKHPDVNKSHSAGMGIAQVQFIPEYKIVHQWSIPLGDHTAQLAEIAAVEFACKKALKISGPVLIVTDSFYVAESANKELPYWKSNGFLNNKKKPLRHVSKWKSIAECLQLKPDIIIMHEKGHQQPMTTLHTEGNNLADKLATQGSYVVHAGKRTADGSEFEKRTADGSEFESPKKKAKVE

SEQ ID NO: 430 - protein, 2084 aa, synthetic construct
MPAAKRVKLDGGDKKYSIGLDIGTNSVGWAVITDEYKVPSKKFKVLGNTDRHSIKKNLIGALLFDSGETAEATRLKRTARRRYTRRKNRICYLQEIFSNEMAKVDDSFFHRLEESFLVEEDKKHERHPIFGNIVDEVAYHEKYPTIYHLRKKLVDSTDKADLRLIYLALAHMIKFRGHFLIEGDLNPDNSDVDKLFIQLVQTYNQLFEENPINASGVDAKAILSARLSKSRRLENLIAQLPGEKKNGLFGNLIALSLGLTPNFKSNFDLAEDAKLQLSKDTYDDDLDNLLAQIGDQYADLFLAAKNLSDAILLSDILRVNTEITKAPLSASMIKRYDEHHQDLTLLKALVRQQLPEKYKEIFFDQSKNGYAGYIDGGASQEEFYKFIKPILEKMDGTEELLVKLNREDLLRKQRTFDNGSIPHQIHLGELHAILRRQEDFYPFLKDNREKIEKILTFRIPYYVGPLARGNSRFAWMTRKSEETITPWNFEEVVDKGASAQSFIERMTNFDKNLPNEKVLPKHSLLYEYFTVYNELTKVKYVTEGMRKPAFLSGEQKKAIVDLLFKTNRKVTVKQLKEDYFKKIECFDSVEISGVEDRFNASLGTYHDLLKIIKDKDFLDNEENEDILEDIVLTLTLFEDREMIEERLKTYAHLFDDKVMKQLKRRRYTGWGRLSRKLINGIRDKQSGKTILDFLKSDGFANRNFMQLIHDDSLTFKEDIQKAQVSGQGDSLHEHIANLAGSPAIKKGILQTVKVVDELVKVMGRHKPENIVIEMARENQTTQKGQKNSRERMKRIEEGIKELGSQILKEHPVENTQLQNEKLYLYYLQNGRDMYVDQELDINRLSDYDVDHIVPQSFLKDDSIDNKVLTRSDKARGKSDNVPSEEVVKKMKNYWRQLLNAKLITQRKFDNLTKAERGGLSELDKAGFIKRQLVETRQITKHVAQILDSRMNTKYDENDKLIREVKVITLKSKLVSDFRKDFQFYKVREINNYHHAHDAYLNAVVGTALIKKYPKLESEFVYGDYKVYDVRKMIAKSEQEIGKATAKYFFYSNIMNFFKTEITLANGEIRKRPLIETNGETGEIVWDKGRDFATVRKVLSMPQVNIVKKTEVQTGGFSKESILPKRNSDKLIARKKDWDPKKYGGFDSPTVAYSVLVVAKVEKGKSKKLKSVKELLGITIMERSSFEKNPIDFLEAKGYKEVKKDLIIKLPKYSLFELENGRKRMLASAGELQKGNELALPSKYVNFLYLASHYEKLKGSPEDNEQKQLFVEQHKHYLDEIIEQISEFSKRVILADANLDKVLSAYNKHRDKPIREQAENIIHLFTLTNLGAPAAFKYFDTTIDRKRYTSTKEVLDATLIHQSITGLYETRIDLSQLGGDGGPAPEAAAKGGVPWLMKKPLQLTVLVPLHEYQERLLQQTALPKEQKELLQKLFLKYDALWQHWENQVGHRRIKPHNIATGTLAPRPQKQYPINPKAKPSIQIVIDDLLKQGVLIQQNSTMNTPVYPVPKPDGKWRMVLDYREVNKTIPLIAAQNQHSAGILSSIYRGKYKTTLDLTNGFWAHPITPESYWLTAFTWQGKQYCWTRLPQGFLNSPALFTADVVDLLKEIPNVQAYVDDIYISHDDPQEHLEQLEKIFSILLNAGYVVSLKKSEIAQREVEFLGFNITKEGRGLTDTFKQKLLNITPPKDLKQLQSILGLLNFARNFIPNYSELVKPLYTIVANANGKFISWTEDNSNQLQHIISVLNQADNLEERNPETRLIIKVNSSPSAGYIRYYNEGSKRPIMYVNYIFSKAEAKFTQTEKLLTTMHKGLIKAMDLAMGQEILVYSPIVSMTKIQRTPLPERKALPVRWITWMTYLEDPRIQFHYDKSLPELQQIPNVTEDVIAKTKHPSEFAMVFYTDGSAIKHPDVNKSHSAGMGIAQVQFIPEYKIVHQWSIPLGDHTAQLAEIAAVEFACKKALKISGPVLIVTDSFYVAESANKELPYWKSNGFLNNKKKPLRHVSKWKSIAECLQLKPDIIIMHEKGHQQPMTTLHTEGNNLADKLATQGSYVVHAGKRTADGSEFEKRTADGSEFESPKKKAKVE

SEQ ID NO: 431 - protein, 2082 aa, synthetic construct
MPAAKRVKLDGGDKKYSIGLDIGTNSVGWAVITDEYKVPSKKFKVLGNTDRHSIKKNLIGALLFDSGETAEATRLKRTARRRYTRRKNRICYLQEIFSNEMAKVDDSFFHRLEESFLVEEDKKHERHPIFGNIVDEVAYHEKYPTIYHLRKKLVDSTDKADLRLIYLALAHMIKFRGHFLIEGDLNPDNSDVDKLFIQLVQTYNQLFEENPINASGVDAKAILSARLSKSRRLENLIAQLPGEKKNGLFGNLIALSLGLTPNFKSNFDLAEDAKLQLSKDTYDDDLDNLLAQIGDQYADLFLAAKNLSDAILLSDILRVNTEITKAPLSASMIKRYDEHHQDLTLLKALVRQQLPEKYKEIFFDQSKNGYAGYIDGGASQEEFYKFIKPILEKMDGTEELLVKLNREDLLRKQRTFDNGSIPHQIHLGELHAILRRQEDFYPFLKDNREKIEKILTFRIPYYVGPLARGNSRFAWMTRKSEETITPWNFEEVVDKGASAQSFIERMTNFDKNLPNEKVLPKHSLLYEYFTVYNELTKVKYVTEGMRKPAFLSGEQKKAIVDLLFKTNRKVTVKQLKEDYFKKIECFDSVEISGVEDRFNASLGTYHDLLKIIKDKDFLDNEENEDILEDIVLTLTLFEDREMIEERLKTYAHLFDDKVMKQLKRRRYTGWGRLSRKLINGIRDKQSGKTILDFLKSDGFANRNFMQLIHDDSLTFKEDIQKAQVSGQGDSLHEHIANLAGSPAIKKGILQTVKVVDELVKVMGRHKPENIVIEMARENQTTQKGQKNSRERMKRIEEGIKELGSQILKEHPVENTQLQNEKLYLYYLQNGRDMYVDQELDINRLSDYDVDHIVPQSFLKDDSIDNKVLTRSDKARGKSDNVPSEEVVKKMKNYWRQLLNAKLITQRKFDNLTKAERGGLSELDKAGFIKRQLVETRQITKHVAQILDSRMNTKYDENDKLIREVKVITLKSKLVSDFRKDFQFYKVREINNYHHAHDAYLNAVVGTALIKKYPKLESEFVYGDYKVYDVRKMIAKSEQEIGKATAKYFFYSNIMNFFKTEITLANGEIRKRPLIETNGETGEIVWDKGRDFATVRKVLSMPQVNIVKKTEVQTGGFSKESILPKRNSDKLIARKKDWDPKKYGGFDSPTVAYSVLVVAKVEKGKSKKLKSVKELLGITIMERSSFEKNPIDFLEAKGYKEVKKDLIIKLPKYSLFELENGRKRMLASAGELQKGNELALPSKYVNFLYLASHYEKLKGSPEDNEQKQLFVEQHKHYLDEIIEQISEFSKRVILADANLDKVLSAYNKHRDKPIREQAENIIHLFTLTNLGAPAAFKYFDTTIDRKRYTSTKEVLDATLIHQSITGLYETRIDLSQLGGDGGGGGGGGGGVPWLMKKPLQLTVLVPLHEYQERLLQQTALPKEQKELLQKLFLKYDALWQHWENQVGHRRIKPHNIATGTLAPRPQKQYPINPKAKPSIQIVIDDLLKQGVLIQQNSTMNTPVYPVPKPDGKWRMVLDYREVNKTIPLIAAQNQHSAGILSSIYRGKYKTTLDLTNGFWAHPITPESYWLTAFTWQGKQYCWTRLPQGFLNSPALFTADVVDLLKEIPNVQAYVDDIYISHDDPQEHLEQLEKIFSILLNAGYVVSLKKSEIAQREVEFLGFNITKEGRGLTDTFKQKLLNITPPKDLKQLQSILGLLNFARNFIPNYSELVKPLYTIVANANGKFISWTEDNSNQLQHIISVLNQADNLEERNPETRLIIKVNSSPSAGYIRYYNEGSKRPIMYVNYIFSKAEAKFTQTEKLLTTMHKGLIKAMDLAMGQEILVYSPIVSMTKIQRTPLPERKALPVRWITWMTYLEDPRIQFHYDKSLPELQQIPNVTEDVIAKTKHPSEFAMVFYTDGSAIKHPDVNKSHSAGMGIAQVQFIPEYKIVHQWSIPLGDHTAQLAEIAAVEFACKKALKISGPVLIVTDSFYVAESANKELPYWKSNGFLNNKKKPLRHVSKWKSIAECLQLKPDIIIMHEKGHQQPMTTLHTEGNNLADKLATQGSYVVHAGKRTADGSEFEKRTADGSEFESPKKKAKVE

SEQ ID NO: 432 - protein, 2087 aa, synthetic construct
MPAAKRVKLDGGDKKYSIGLDIGTNSVGWAVITDEYKVPSKKFKVLGNTDRHSIKKNLIGALLFDSGETAEATRLKRTARRRYTRRKNRICYLQEIFSNEMAKVDDSFFHRLEESFLVEEDKKHERHPIFGNIVDEVAYHEKYPTIYHLRKKLVDSTDKADLRLIYLALAHMIKFRGHFLIEGDLNPDNSDVDKLFIQLVQTYNQLFEENPINASGVDAKAILSARLSKSRRLENLIAQLPGEKKNGLFGNLIALSLGLTPNFKSNFDLAEDAKLQLSKDTYDDDLDNLLAQIGDQYADLFLAAKNLSDAILLSDILRVNTEITKAPLSASMIKRYDEHHQDLTLLKALVRQQLPEKYKEIFFDQSKNGYAGYIDGGASQEEFYKFIKPILEKMDGTEELLVKLNREDLLRKQRTFDNGSIPHQIHLGELHAILRRQEDFYPFLKDNREKIEKILTFRIPYYVGPLARGNSRFAWMTRKSEETITPWNFEEVVDKGASAQSFIERMTNFDKNLPNEKVLPKHSLLYEYFTVYNELTKVKYVTEGMRKPAFLSGEQKKAIVDLLFKTNRKVTVKQLKEDYFKKIECFDSVEISGVEDRFNASLGTYHDLLKIIKDKDFLDNEENEDILEDIVLTLTLFEDREMIEERLKTYAHLFDDKVMKQLKRRRYTGWGRLSRKLINGIRDKQSGKTILDFLKSDGFANRNFMQLIHDDSLTFKEDIQKAQVSGQGDSLHEHIANLAGSPAIKKGILQTVKVVDELVKVMGRHKPENIVIEMARENQTTQKGQKNSRERMKRIEEGIKELGSQILKEHPVENTQLQNEKLYLYYLQNGRDMYVDQELDINRLSDYDVDHIVPQSFLKDDSIDNKVLTRSDKARGKSDNVPSEEVVKKMKNYWRQLLNAKLITQRKFDNLTKAERGGLSELDKAGFIKRQLVETRQITKHVAQILDSRMNTKYDENDKLIREVKVITLKSKLVSDFRKDFQFYKVREINNYHHAHDAYLNAVVGTALIKKYPKLESEFVYGDYKVYDVRKMIAKSEQEIGKATAKYFFYSNIMNFFKTEITLANGEIRKRPLIETNGETGEIVWDKGRDFATVRKVLSMPQVNIVKKTEVQTGGFSKESILPKRNSDKLIARKKDWDPKKYGGFDSPTVAYSVLVVAKVEKGKSKKLKSVKELLGITIMERSSFEKNPIDFLEAKGYKEVKKDLIIKLPKYSLFELENGRKRMLASAGELQKGNELALPSKYVNFLYLASHYEKLKGSPEDNEQKQLFVEQHKHYLDEIIEQISEFSKRVILADANLDKVLSAYNKHRDKPIREQAENIIHLFTLTNLGAPAAFKYFDTTIDRKRYTSTKEVLDATLIHQSITGLYETRIDLSQLGGDGGGGSEAAAKPAPGGVPWLMKKPLQLTVLVPLHEYQERLLQQTALPKEQKELLQKLFLKYDALWQHWENQVGHRRIKPHNIATGTLAPRPQKQYPINPKAKPSIQIVIDDLLKQGVLIQQNSTMNTPVYPVPKPDGKWRMVLDYREVNKTIPLIAAQNQHSAGILSSIYRGKYKTTLDLTNGFWAHPITPESYWLTAFTWQGKQYCWTRLPQGFLNSPALFTADVVDLLKEIPNVQAYVDDIYISHDDPQEHLEQLEKIFSILLNAGYVVSLKKSEIAQREVEFLGFNITKEGRGLTDTFKQKLLNITPPKDLKQLQSILGLLNFARNFIPNYSELVKPLYTIVANANGKFISWTEDNSNQLQHIISVLNQADNLEERNPETRLIIKVNSSPSAGYIRYYNEGSKRPIMYVNYIFSKAEAKFTQTEKLLTTMHKGLIKAMDLAMGQEILVYSPIVSMTKIQRTPLPERKALPVRWITWMTYLEDPRIQFHYDKSLPELQQIPNVTEDVIAKTKHPSEFAMVFYTDGSAIKHPDVNKSHSAGMGIAQVQFIPEYKIVHQWSIPLGDHTAQLAEIAAVEFACKKALKISGPVLIVTDSFYVAESANKELPYWKSNGFLNNKKKPLRHVSKWKSIAECLQLKPDIIIMHEKGHQQPMTTLHTEGNNLADKLATQGSYVVHAGKRTADGSEFEKRTADGSEFESPKKKAKVE

SEQ ID NO: 433 - protein, 2087 aa, synthetic construct
MPAAKRVKLDGGDKKYSIGLDIGTNSVGWAVITDEYKVPSKKFKVLGNTDRHSIKKNLIGALLFDSGETAEATRLKRTARRRYTRRKNRICYLQEIFSNEMAKVDDSFFHRLEESFLVEEDKKHERHPIFGNIVDEVAYHEKYPTIYHLRKKLVDSTDKADLRLIYLALAHMIKFRGHFLIEGDLNPDNSDVDKLFIQLVQTYNQLFEENPINASGVDAKAILSARLSKSRRLENLIAQLPGEKKNGLFGNLIALSLGLTPNFKSNFDLAEDAKLQLSKDTYDDDLDNLLAQIGDQYADLFLAAKNLSDAILLSDILRVNTEITKAPLSASMIKRYDEHHQDLTLLKALVRQQLPEKYKEIFFDQSKNGYAGYIDGGASQEEFYKFIKPILEKMDGTEELLVKLNREDLLRKQRTFDNGSIPHQIHLGELHAILRRQEDFYPFLKDNREKIEKILTFRIPYYVGPLARGNSRFAWMTRKSEETITPWNFEEVVDKGASAQSFIERMTNFDKNLPNEKVLPKHSLLYEYFTVYNELTKVKYVTEGMRKPAFLSGEQKKAIVDLLFKTNRKVTVKQLKEDYFKKIECFDSVEISGVEDRFNASLGTYHDLLKIIKDKDFLDNEENEDILEDIVLTLTLFEDREMIEERLKTYAHLFDDKVMKQLKRRRYTGWGRLSRKLINGIRDKQSGKTILDFLKSDGFANRNFMQLIHDDSLTFKEDIQKAQVSGQGDSLHEHIANLAGSPAIKKGILQTVKVVDELVKVMGRHKPENIVIEMARENQTTQKGQKNSRERMKRIEEGIKELGSQILKEHPVENTQLQNEKLYLYYLQNGRDMYVDQELDINRLSDYDVDHIVPQSFLKDDSIDNKVLTRSDKARGKSDNVPSEEVVKKMKNYWRQLLNAKLITQRKFDNLTKAERGGLSELDKAGFIKRQLVETRQITKHVAQILDSRMNTKYDENDKLIREVKVITLKSKLVSDFRKDFQFYKVREINNYHHAHDAYLNAVVGTALIKKYPKLESEFVYGDYKVYDVRKMIAKSEQEIGKATAKYFFYSNIMNFFKTEITLANGEIRKRPLIETNGETGEIVWDKGRDFATVRKVLSMPQVNIVKKTEVQTGGFSKESILPKRNSDKLIARKKDWDPKKYGGFDSPTVAYSVLVVAKVEKGKSKKLKSVKELLGITIMERSSFEKNPIDFLEAKGYKEVKKDLIIKLPKYSLFELENGRKRMLASAGELQKGNELALPSKYVNFLYLASHYEKLKGSPEDNEQKQLFVEQHKHYLDEIIEQISEFSKRVILADANLDKVLSAYNKHRDKPIREQAENIIHLFTLTNLGAPAAFKYFDTTIDRKRYTSTKEVLDATLIHQSITGLYETRIDLSQLGGDGGGGGEAAAKGSSGGVPWLMKKPLQLTVLVPLHEYQERLLQQTALPKEQKELLQKLFLKYDALWQHWENQVGHRRIKPHNIATGTLAPRPQKQYPINPKAKPSIQIVIDDLLKQGVLIQQNSTMNTPVYPVPKPDGKWRMVLDYREVNKTIPLIAAQNQHSAGILSSIYRGKYKTTLDLTNGFWAHPITPESYWLTAFTWQGKQYCWTRLPQGFLNSPALFTADVVDLLKEIPNVQAYVDDIYISHDDPQEHLEQLEKIFSILLNAGYVVSLKKSEIAQREVEFLGFNITKEGRGLTDTFKQKLLNITPPKDLKQLQSILGLLNFARNFIPNYSELVKPLYTIVANANGKFISWTEDNSNQLQHIISVLNQADNLEERNPETRLIIKVNSSPSAGYIRYYNEGSKRPIMYVNYIFSKAEAKFTQTEKLLTTMHKGLIKAMDLAMGQEILVYSPIVSMTKIQRTPLPERKALPVRWITWMTYLEDPRIQFHYDKSLPELQQIPNVTEDVIAKTKHPSEFAMVFYTDGSAIKHPDVNKSHSAGMGIAQVQFIPEYKIVHQWSIPLGDHTAQLAEIAAVEFACKKALKISGPVLIVTDSFYVAESANKELPYWKSNGFLNNKKKPLRHVSKWKSIAECLQLKPDIIIMHEKGHQQPMTTLHTEGNNLADKLATQGSYVVHAGKRTADGSEFEKRTADGSEFESPKKKAKVE

SEQ ID NO: 434 - protein, 2082 aa, synthetic construct
MPAAKRVKLDGGDKKYSIGLDIGTNSVGWAVITDEYKVPSKKFKVLGNTDRHSIKKNLIGALLFDSGETAEATRLKRTARRRYTRRKNRICYLQEIFSNEMAKVDDSFFHRLEESFLVEEDKKHERHPIFGNIVDEVAYHEKYPTIYHLRKKLVDSTDKADLRLIYLALAHMIKFRGHFLIEGDLNPDNSDVDKLFIQLVQTYNQLFEENPINASGVDAKAILSARLSKSRRLENLIAQLPGEKKNGLFGNLIALSLGLTPNFKSNFDLAEDAKLQLSKDTYDDDLDNLLAQIGDQYADLFLAAKNLSDAILLSDILRVNTEITKAPLSASMIKRYDEHHQDLTLLKALVRQQLPEKYKEIFFDQSKNGYAGYIDGGASQEEFYKFIKPILEKMDGTEELLVKLNREDLLRKQRTFDNGSIPHQIHLGELHAILRRQEDFYPFLKDNREKIEKILTFRIPYYVGPLARGNSRFAWMTRKSEETITPWNFEEVVDKGASAQSFIERMTNFDKNLPNEKVLPKHSLLYEYFTVYNELTKVKYVTEGMRKPAFLSGEQKKAIVDLLFKTNRKVTVKQLKEDYFKKIECFDSVEISGVEDRFNASLGTYHDLLKIIKDKDFLDNEENEDILEDIVLTLTLFEDREMIEERLKTYAHLFDDKVMKQLKRRRYTGWGRLSRKLINGIRDKQSGKTILDFLKSDGFANRNFMQLIHDDSLTFKEDIQKAQVSGQGDSLHEHIANLAGSPAIKKGILQTVKVVDELVKVMGRHKPENIVIEMARENQTTQKGQKNSRERMKRIEEGIKELGSQILKEHPVENTQLQNEKLYLYYLQNGRDMYVDQELDINRLSDYDVDHIVPQSFLKDDSIDNKVLTRSDKARGKSDNVPSEEVVKKMKNYWRQLLNAKLITQRKFDNLTKAERGGLSELDKAGFIKRQLVETRQITKHVAQILDSRMNTKYDENDKLIREVKVITLKSKLVSDFRKDFQFYKVREINNYHHAHDAYLNAVVGTALIKKYPKLESEFVYGDYKVYDVRKMIAKSEQEIGKATAKYFFYSNIMNFFKTEITLANGEIRKRPLIETNGETGEIVWDKGRDFATVRKVLSMPQVNIVKKTEVQTGGFSKESILPKRNSDKLIARKKDWDPKKYGGFDSPTVAYSVLVVAKVEKGKSKKLKSVKELLGITIMERSSFEKNPIDFLEAKGYKEVKKDLIIKLPKYSLFELENGRKRMLASAGELQKGNELALPSKYVNFLYLASHYEKLKGSPEDNEQKQLFVEQHKHYLDEIIEQISEFSKRVILADANLDKVLSAYNKHRDKPIREQAENIIHLFTLTNLGAPAAFKYFDTTIDRKRYTSTKEVLDATLIHQSITGLYETRIDLSQLGGDGGGSSGSSGGVPWLMKKPLQLTVLVPLHEYQERLLQQTALPKEQKELLQKLFLKYDALWQHWENQVGHRRIKPHNIATGTLAPRPQKQYPINPKAKPSIQIVIDDLLKQGVLIQQNSTMNTPVYPVPKPDGKWRMVLDYREVNKTIPLIAAQNQHSAGILSSIYRGKYKTTLDLTNGFWAHPITPESYWLTAFTWQGKQYCWTRLPQGFLNSPALFTADVVDLLKEIPNVQAYVDDIYISHDDPQEHLEQLEKIFSILLNAGYVVSLKKSEIAQREVEFLGFNITKEGRGLTDTFKQKLLNITPPKDLKQLQSILGLLNFARNFIPNYSELVKPLYTIVANANGKFISWTEDNSNQLQHIISVLNQADNLEERNPETRLIIKVNSSPSAGYIRYYNEGSKRPIMYVNYIFSKAEAKFTQTEKLLTTMHKGLIKAMDLAMGQEILVYSPIVSMTKIQRTPLPERKALPVRWITWMTYLEDPRIQFHYDKSLPELQQIPNVTEDVIAKTKHPSEFAMVFYTDGSAIKHPDVNKSHSAGMGIAQVQFIPEYKIVHQWSIPLGDHTAQLAEIAAVEFACKKALKISGPVLIVTDSFYVAESANKELPYWKSNGFLNNKKKPLRHVSKWKSIAECLQLKPDIIIMHEKGHQQPMTTLHTEGNNLADKLATQGSYVVHAGKRTADGSEFEKRTADGSEFESPKKKAKVE

SEQ ID NO: 435 - protein, 2084 aa, synthetic construct
MPAAKRVKLDGGDKKYSIGLDIGTNSVGWAVITDEYKVPSKKFKVLGNTDRHSIKKNLIGALLFDSGETAEATRLKRTARRRYTRRKNRICYLQEIFSNEMAKVDDSFFHRLEESFLVEEDKKHERHPIFGNIVDEVAYHEKYPTIYHLRKKLVDSTDKADLRLIYLALAHMIKFRGHFLIEGDLNPDNSDVDKLFIQLVQTYNQLFEENPINASGVDAKAILSARLSKSRRLENLIAQLPGEKKNGLFGNLIALSLGLTPNFKSNFDLAEDAKLQLSKDTYDDDLDNLLAQIGDQYADLFLAAKNLSDAILLSDILRVNTEITKAPLSASMIKRYDEHHQDLTLLKALVRQQLPEKYKEIFFDQSKNGYAGYIDGGASQEEFYKFIKPILEKMDGTEELLVKLNREDLLRKQRTFDNGSIPHQIHLGELHAILRRQEDFYPFLKDNREKIEKILTFRIPYYVGPLARGNSRFAWMTRKSEETITPWNFEEVVDKGASAQSFIERMTNFDKNLPNEKVLPKHSLLYEYFTVYNELTKVKYVTEGMRKPAFLSGEQKKAIVDLLFKTNRKVTVKQLKEDYFKKIECFDSVEISGVEDRFNASLGTYHDLLKIIKDKDFLDNEENEDILEDIVLTLTLFEDREMIEERLKTYAHLFDDKVMKQLKRRRYTGWGRLSRKLINGIRDKQSGKTILDFLKSDGFANRNFMQLIHDDSLTFKEDIQKAQVSGQGDSLHEHIANLAGSPAIKKGILQTVKVVDELVKVMGRHKPENIVIEMARENQTTQKGQKNSRERMKRIEEGIKELGSQILKEHPVENTQLQNEKLYLYYLQNGRDMYVDQELDINRLSDYDVDHIVPQSFLKDDSIDNKVLTRSDKARGKSDNVPSEEVVKKMKNYWRQLLNAKLITQRKFDNLTKAERGGLSELDKAGFIKRQLVETRQITKHVAQILDSRMNTKYDENDKLIREVKVITLKSKLVSDFRKDFQFYKVREINNYHHAHDAYLNAVVGTALIKKYPKLESEFVYGDYKVYDVRKMIAKSEQEIGKATAKYFFYSNIMNFFKTEITLANGEIRKRPLIETNGETGEIVWDKGRDFATVRKVLSMPQVNIVKKTEVQTGGFSKESILPKRNSDKLIARKKDWDPKKYGGFDSPTVAYSVLVVAKVEKGKSKKLKSVKELLGITIMERSSFEKNPIDFLEAKGYKEVKKDLIIKLPKYSLFELENGRKRMLASAGELQKGNELALPSKYVNFLYLASHYEKLKGSPEDNEQKQLFVEQHKHYLDEIIEQISEFSKRVILADANLDKVLSAYNKHRDKPIREQAENIIHLFTLTNLGAPAAFKYFDTTIDRKRYTSTKEVLDATLIHQSITGLYETRIDLSQLGGDGGGGGEAAAKGGVPWLMKKPLQLTVLVPLHEYQERLLQQTALPKEQKELLQKLFLKYDALWQHWENQVGHRRIKPHNIATGTLAPRPQKQYPINPKAKPSIQIVIDDLLKQGVLIQQNSTMNTPVYPVPKPDGKWRMVLDYREVNKTIPLIAAQNQHSAGILSSIYRGKYKTTLDLTNGFWAHPITPESYWLTAFTWQGKQYCWTRLPQGFLNSPALFTADVVDLLKEIPNVQAYVDDIYISHDDPQEHLEQLEKIFSILLNAGYVVSLKKSEIAQREVEFLGFNITKEGRGLTDTFKQKLLNITPPKDLKQLQSILGLLNFARNFIPNYSELVKPLYTIVANANGKFISWTEDNSNQLQHIISVLNQADNLEERNPETRLIIKVNSSPSAGYIRYYNEGSKRPIMYVNYIFSKAEAKFTQTEKLLTTMHKGLIKAMDLAMGQEILVYSPIVSMTKIQRTPLPERKALPVRWITWMTYLEDPRIQFHYDKSLPELQQIPNVTEDVIAKTKHPSEFAMVFYTDGSAIKHPDVNKSHSAGMGIAQVQFIPEYKIVHQWSIPLGDHTAQLAEIAAVEFACKKALKISGPVLIVTDSFYVAESANKELPYWKSNGFLNNKKKPLRHVSKWKSIAECLQLKPDIIIMHEKGHQQPMTTLHTEGNNLADKLATQGSYVVHAGKRTADGSEFEKRTADGSEFESPKKKAKVE

SEQ ID NO: 436 - protein, 2087 aa, synthetic construct
MPAAKRVKLDGGDKKYSIGLDIGTNSVGWAVITDEYKVPSKKFKVLGNTDRHSIKKNLIGALLFDSGETAEATRLKRTARRRYTRRKNRICYLQEIFSNEMAKVDDSFFHRLEESFLVEEDKKHERHPIFGNIVDEVAYHEKYPTIYHLRKKLVDSTDKADLRLIYLALAHMIKFRGHFLIEGDLNPDNSDVDKLFIQLVQTYNQLFEENPINASGVDAKAILSARLSKSRRLENLIAQLPGEKKNGLFGNLIALSLGLTPNFKSNFDLAEDAKLQLSKDTYDDDLDNLLAQIGDQYADLFLAAKNLSDAILLSDILRVNTEITKAPLSASMIKRYDEHHQDLTLLKALVRQQLPEKYKEIFFDQSKNGYAGYIDGGASQEEFYKFIKPILEKMDGTEELLVKLNREDLLRKQRTFDNGSIPHQIHLGELHAILRRQEDFYPFLKDNREKIEKILTFRIPYYVGPLARGNSRFAWMTRKSEETITPWNFEEVVDKGASAQSFIERMTNFDKNLPNEKVLPKHSLLYEYFTVYNELTKVKYVTEGMRKPAFLSGEQKKAIVDLLFKTNRKVTVKQLKEDYFKKIECFDSVEISGVEDRFNASLGTYHDLLKIIKDKDFLDNEENEDILEDIVLTLTLFEDREMIEERLKTYAHLFDDKVMKQLKRRRYTGWGRLSRKLINGIRDKQSGKTILDFLKSDGFANRNFMQLIHDDSLTFKEDIQKAQVSGQGDSLHEHIANLAGSPAIKKGILQTVKVVDELVKVMGRHKPENIVIEMARENQTTQKGQKNSRERMKRIEEGIKELGSQILKEHPVENTQLQNEKLYLYYLQNGRDMYVDQELDINRLSDYDVDHIVPQSFLKDDSIDNKVLTRSDKARGKSDNVPSEEVVKKMKNYWRQLLNAKLITQRKFDNLTKAERGGLSELDKAGFIKRQLVETRQITKHVAQILDSRMNTKYDENDKLIREVKVITLKSKLVSDFRKDFQFYKVREINNYHHAHDAYLNAVVGTALIKKYPKLESEFVYGDYKVYDVRKMIAKSEQEIGKATAKYFFYSNIMNFFKTEITLANGEIRKRPLIETNGETGEIVWDKGRDFATVRKVLSMPQVNIVKKTEVQTGGFSKESILPKRNSDKLIARKKDWDPKKYGGFDSPTVAYSVLVVAKVEKGKSKKLKSVKELLGITIMERSSFEKNPIDFLEAKGYKEVKKDLIIKLPKYSLFELENGRKRMLASAGELQKGNELALPSKYVNFLYLASHYEKLKGSPEDNEQKQLFVEQHKHYLDEIIEQISEFSKRVILADANLDKVLSAYNKHRDKPIREQAENIIHLFTLTNLGAPAAFKYFDTTIDRKRYTSTKEVLDATLIHQSITGLYETRIDLSQLGGDGGPAPGGGEAAAKGGVPWLMKKPLQLTVLVPLHEYQERLLQQTALPKEQKELLQKLFLKYDALWQHWENQVGHRRIKPHNIATGTLAPRPQKQYPINPKAKPSIQIVIDDLLKQGVLIQQNSTMNTPVYPVPKPDGKWRMVLDYREVNKTIPLIAAQNQHSAGILSSIYRGKYKTTLDLTNGFWAHPITPESYWLTAFTWQGKQYCWTRLPQGFLNSPALFTADVVDLLKEIPNVQAYVDDIYISHDDPQEHLEQLEKIFSILLNAGYVVSLKKSEIAQREVEFLGFNITKEGRGLTDTFKQKLLNITPPKDLKQLQSILGLLNFARNFIPNYSELVKPLYTIVANANGKFISWTEDNSNQLQHIISVLNQADNLEERNPETRLIIKVNSSPSAGYIRYYNEGSKRPIMYVNYIFSKAEAKFTQTEKLLTTMHKGLIKAMDLAMGQEILVYSPIVSMTKIQRTPLPERKALPVRWITWMTYLEDPRIQFHYDKSLPELQQIPNVTEDVIAKTKHPSEFAMVFYTDGSAIKHPDVNKSHSAGMGIAQVQFIPEYKIVHQWSIPLGDHTAQLAEIAAVEFACKKALKISGPVLIVTDSFYVAESANKELPYWKSNGFLNNKKKPLRHVSKWKSIAECLQLKPDIIIMHEKGHQQPMTTLHTEGNNLADKLATQGSYVVHAGKRTADGSEFEKRTADGSEFESPKKKAKVE

SEQ ID NO: 437 - protein, 2094 aa, synthetic construct
MPAAKRVKLDGGDKKYSIGLDIGTNSVGWAVITDEYKVPSKKFKVLGNTDRHSIKKNLIGALLFDSGETAEATRLKRTARRRYTRRKNRICYLQEIFSNEMAKVDDSFFHRLEESFLVEEDKKHERHPIFGNIVDEVAYHEKYPTIYHLRKKLVDSTDKADLRLIYLALAHMIKFRGHFLIEGDLNPDNSDVDKLFIQLVQTYNQLFEENPINASGVDAKAILSARLSKSRRLENLIAQLPGEKKNGLFGNLIALSLGLTPNFKSNFDLAEDAKLQLSKDTYDDDLDNLLAQIGDQYADLFLAAKNLSDAILLSDILRVNTEITKAPLSASMIKRYDEHHQDLTLLKALVRQQLPEKYKEIFFDQSKNGYAGYIDGGASQEEFYKFIKPILEKMDGTEELLVKLNREDLLRKQRTFDNGSIPHQIHLGELHAILRRQEDFYPFLKDNREKIEKILTFRIPYYVGPLARGNSRFAWMTRKSEETITPWNFEEVVDKGASAQSFIERMTNFDKNLPNEKVLPKHSLLYEYFTVYNELTKVKYVTEGMRKPAFLSGEQKKAIVDLLFKTNRKVTVKQLKEDYFKKIECFDSVEISGVEDRFNASLGTYHDLLKIIKDKDFLDNEENEDILEDIVLTLTLFEDREMIEERLKTYAHLFDDKVMKQLKRRRYTGWGRLSRKLINGIRDKQSGKTILDFLKSDGFANRNFMQLIHDDSLTFKEDIQKAQVSGQGDSLHEHIANLAGSPAIKKGILQTVKVVDELVKVMGRHKPENIVIEMARENQTTQKGQKNSRERMKRIEEGIKELGSQILKEHPVENTQLQNEKLYLYYLQNGRDMYVDQELDINRLSDYDVDHIVPQSFLKDDSIDNKVLTRSDKARGKSDNVPSEEVVKKMKNYWRQLLNAKLITQRKFDNLTKAERGGLSELDKAGFIKRQLVETRQITKHVAQILDSRMNTKYDENDKLIREVKVITLKSKLVSDFRKDFQFYKVREINNYHHAHDAYLNAVVGTALIKKYPKLESEFVYGDYKVYDVRKMIAKSEQEIGKATAKYFFYSNIMNFFKTEITLANGEIRKRPLIETNGETGEIVWDKGRDFATVRKVLSMPQVNIVKKTEVQTGGFSKESILPKRNSDKLIARKKDWDPKKYGGFDSPTVAYSVLVVAKVEKGKSKKLKSVKELLGITIMERSSFEKNPIDFLEAKGYKEVKKDLIIKLPKYSLFELENGRKRMLASAGELQKGNELALPSKYVNFLYLASHYEKLKGSPEDNEQKQLFVEQHKHYLDEIIEQISEFSKRVILADANLDKVLSAYNKHRDKPIREQAENIIHLFTLTNLGAPAAFKYFDTTIDRKRYTSTKEVLDATLIHQSITGLYETRIDLSQLGGDGGGSSGSSGSSGSSGSSGSSGGVPWLMKKPLQLTVLVPLHEYQERLLQQTALPKEQKELLQKLFLKYDALWQHWENQVGHRRIKPHNIATGTLAPRPQKQYPINPKAKPSIQIVIDDLLKQGVLIQQNSTMNTPVYPVPKPDGKWRMVLDYREVNKTIPLIAAQNQHSAGILSSIYRGKYKTTLDLTNGFWAHPITPESYWLTAFTWQGKQYCWTRLPQGFLNSPALFNADVVDLLKEIPNVQAYVDDIYISHDDPQEHLEQLEKIFSILLNAGYVVSLKKSEIAQREVEFLGFNITKEGRGLTDTFKQKLLNITPPKDLKQLQSILGLLNFARNFIPNYSELVKPLYTIVAPANGKFISWTEDNSNQLQHIISVLNQADNLEERNPETRLIIKVNSSPSAGYIRYYNEGSKRPIMYVNYIFSKAEAKFTQTEKLLTTMHKGLIKAMDLAMGQEILVYSPIVSMTKIQRTPLPERKALPVRWITWMTYLEDPRIQFHYDKSLPELQQIPNVTEDVIAKTKHPSEFAMVFYTDGSAIKHPDVNKSHSAGMGIAQVQFIPEYKIVHQWSIPLGDHTAQLAEIAAVEFACKKALKISGPVLIVTDSFYVAESANKELPYWKSNGFLNNKKKPLRHVSKWKSIAECLQLKPDIIIMHEKGHQQPMTTLHTEGNNLADKLATQGSYVVHAGKRTADGSEFEKRTADGSEFESPKKKAKVE

SEQ ID NO: 438 - protein, 2087 aa, synthetic construct
MPAAKRVKLDGGDKKYSIGLDIGTNSVGWAVITDEYKVPSKKFKVLGNTDRHSIKKNLIGALLFDSGETAEATRLKRTARRRYTRRKNRICYLQEIFSNEMAKVDDSFFHRLEESFLVEEDKKHERHPIFGNIVDEVAYHEKYPTIYHLRKKLVDSTDKADLRLIYLALAHMIKFRGHFLIEGDLNPDNSDVDKLFIQLVQTYNQLFEENPINASGVDAKAILSARLSKSRRLENLIAQLPGEKKNGLFGNLIALSLGLTPNFKSNFDLAEDAKLQLSKDTYDDDLDNLLAQIGDQYADLFLAAKNLSDAILLSDILRVNTEITKAPLSASMIKRYDEHHQDLTLLKALVRQQLPEKYKEIFFDQSKNGYAGYIDGGASQEEFYKFIKPILEKMDGTEELLVKLNREDLLRKQRTFDNGSIPHQIHLGELHAILRRQEDFYPFLKDNREKIEKILTFRIPYYVGPLARGNSRFAWMTRKSEETITPWNFEEVVDKGASAQSFIERMTNFDKNLPNEKVLPKHSLLYEYFTVYNELTKVKYVTEGMRKPAFLSGEQKKAIVDLLFKTNRKVTVKQLKEDYFKKIECFDSVEISGVEDRFNASLGTYHDLLKIIKDKDFLDNEENEDILEDIVLTLTLFEDREMIEERLKTYAHLFDDKVMKQLKRRRYTGWGRLSRKLINGIRDKQSGKTILDFLKSDGFANRNFMQLIHDDSLTFKEDIQKAQVSGQGDSLHEHIANLAGSPAIKKGILQTVKVVDELVKVMGRHKPENIVIEMARENQTTQKGQKNSRERMKRIEEGIKELGSQILKEHPVENTQLQNEKLYLYYLQNGRDMYVDQELDINRLSDYDVDHIVPQSFLKDDSIDNKVLTRSDKARGKSDNVPSEEVVKKMKNYWRQLLNAKLITQRKFDNLTKAERGGLSELDKAGFIKRQLVETRQITKHVAQILDSRMNTKYDENDKLIREVKVITLKSKLVSDFRKDFQFYKVREINNYHHAHDAYLNAVVGTALIKKYPKLESEFVYGDYKVYDVRKMIAKSEQEIGKATAKYFFYSNIMNFFKTEITLANGEIRKRPLIETNGETGEIVWDKGRDFATVRKVLSMPQVNIVKKTEVQTGGFSKESILPKRNSDKLIARKKDWDPKKYGGFDSPTVAYSVLVVAKVEKGKSKKLKSVKELLGITIMERSSFEKNPIDFLEAKGYKEVKKDLIIKLPKYSLFELENGRKRMLASAGELQKGNELALPSKYVNFLYLASHYEKLKGSPEDNEQKQLFVEQHKHYLDEIIEQISEFSKRVILADANLDKVLSAYNKHRDKPIREQAENIIHLFTLTNLGAPAAFKYFDTTIDRKRYTSTKEVLDATLIHQSITGLYETRIDLSQLGGDGGGSSGGGEAAAKGGVPWLMKKPLQLTVLVPLHEYQERLLQQTALPKEQKELLQKLFLKYDALWQHWENQVGHRRIKPHNIATGTLAPRPQKQYPINPKAKPSIQIVIDDLLKQGVLIQQNSTMNTPVYPVPKPDGKWRMVLDYREVNKTIPLIAAQNQHSAGILSSIYRGKYKTTLDLTNGFWAHPITPESYWLTAFTWQGKQYCWTRLPQGFLNSPALFNADVVDLLKEIPNVQAYVDDIYISHDDPQEHLEQLEKIFSILLNAGYVVSLKKSEIAQREVEFLGFNITKEGRGLTDTFKQKLLNITPPKDLKQLQSILGLLNFARNFIPNYSELVKPLYTIVAPANGKFISWTEDNSNQLQHIISVLNQADNLEERNPETRLIIKVNSSPSAGYIRYYNEGSKRPIMYVNYIFSKAEAKFTQTEKLLTTMHKGLIKAMDLAMGQEILVYSPIVSMTKIQRTPLPERKALPVRWITWMTYLEDPRIQFHYDKSLPELQQIPNVTEDVIAKTKHPSEFAMVFYTDGSAIKHPDVNKSHSAGMGIAQVQFIPEYKIVHQWSIPLGDHTAQLAEIAAVEFACKKALKISGPVLIVTDSFYVAESANKELPYWKSNGFLNNKKKPLRHVSKWKSIAECLQLKPDIIIMHEKGHQQPMTTLHTEGNNLADKLATQGSYVVHAGKRTADGSEFEKRTADGSEFESPKKKAKVE

SEQ ID NO: 439 - protein, 2091 aa, synthetic construct
MPAAKRVKLDGGDKKYSIGLDIGTNSVGWAVITDEYKVPSKKFKVLGNTDRHSIKKNLIGALLFDSGETAEATRLKRTARRRYTRRKNRICYLQEIFSNEMAKVDDSFFHRLEESFLVEEDKKHERHPIFGNIVDEVAYHEKYPTIYHLRKKLVDSTDKADLRLIYLALAHMIKFRGHFLIEGDLNPDNSDVDKLFIQLVQTYNQLFEENPINASGVDAKAILSARLSKSRRLENLIAQLPGEKKNGLFGNLIALSLGLTPNFKSNFDLAEDAKLQLSKDTYDDDLDNLLAQIGDQYADLFLAAKNLSDAILLSDILRVNTEITKAPLSASMIKRYDEHHQDLTLLKALVRQQLPEKYKEIFFDQSKNGYAGYIDGGASQEEFYKFIKPILEKMDGTEELLVKLNREDLLRKQRTFDNGSIPHQIHLGELHAILRRQEDFYPFLKDNREKIEKILTFRIPYYVGPLARGNSRFAWMTRKSEETITPWNFEEVVDKGASAQSFIERMTNFDKNLPNEKVLPKHSLLYEYFTVYNELTKVKYVTEGMRKPAFLSGEQKKAIVDLLFKTNRKVTVKQLKEDYFKKIECFDSVEISGVEDRFNASLGTYHDLLKIIKDKDFLDNEENEDILEDIVLTLTLFEDREMIEERLKTYAHLFDDKVMKQLKRRRYTGWGRLSRKLINGIRDKQSGKTILDFLKSDGFANRNFMQLIHDDSLTFKEDIQKAQVSGQGDSLHEHIANLAGSPAIKKGILQTVKVVDELVKVMGRHKPENIVIEMARENQTTQKGQKNSRERMKRIEEGIKELGSQILKEHPVENTQLQNEKLYLYYLQNGRDMYVDQELDINRLSDYDVDHIVPQSFLKDDSIDNKVLTRSDKARGKSDNVPSEEVVKKMKNYWRQLLNAKLITQRKFDNLTKAERGGLSELDKAGFIKRQLVETRQITKHVAQILDSRMNTKYDENDKLIREVKVITLKSKLVSDFRKDFQFYKVREINNYHHAHDAYLNAVVGTALIKKYPKLESEFVYGDYKVYDVRKMIAKSEQEIGKATAKYFFYSNIMNFFKTEITLANGEIRKRPLIETNGETGEIVWDKGRDFATVRKVLSMPQVNIVKKTEVQTGGFSKESILPKRNSDKLIARKKDWDPKKYGGFDSPTVAYSVLVVAKVEKGKSKKLKSVKELLGITIMERSSFEKNPIDFLEAKGYKEVKKDLIIKLPKYSLFELENGRKRMLASAGELQKGNELALPSKYVNFLYLASHYEKLKGSPEDNEQKQLFVEQHKHYLDEIIEQISEFSKRVILADANLDKVLSAYNKHRDKPIREQAENIIHLFTLTNLGAPAAFKYFDTTIDRKRYTSTKEVLDATLIHQSITGLYETRIDLSQLGGDGGGGGGSEAAAKGGGGSGGVPWLMKKPLQLTVLVPLHEYQERLLQQTALPKEQKELLQKLFLKYDALWQHWENQVGHRRIKPHNIATGTLAPRPQKQYPINPKAKPSIQIVIDDLLKQGVLIQQNSTMNTPVYPVPKPDGKWRMVLDYREVNKTIPLIAAQNQHSAGILSSIYRGKYKTTLDLTNGFWAHPITPESYWLTAFTWQGKQYCWTRLPQGFLNSPALFNADVVDLLKEIPNVQAYVDDIYISHDDPQEHLEQLEKIFSILLNAGYVVSLKKSEIAQREVEFLGFNITKEGRGLTDTFKQKLLNITPPKDLKQLQSILGLLNFARNFIPNYSELVKPLYTIVAPANGKFISWTEDNSNQLQHIISVLNQADNLEERNPETRLIIKVNSSPSAGYIRYYNEGSKRPIMYVNYIFSKAEAKFTQTEKLLTTMHKGLIKAMDLAMGQEILVYSPIVSMTKIQRTPLPERKALPVRWITWMTYLEDPRIQFHYDKSLPELQQIPNVTEDVIAKTKHPSEFAMVFYTDGSAIKHPDVNKSHSAGMGIAQVQFIPEYKIVHQWSIPLGDHTAQLAEIAAVEFACKKALKISGPVLIVTDSFYVAESANKELPYWKSNGFLNNKKKPLRHVSKWKSIAECLQLKPDIIIMHEKGHQQPMTTLHTEGNNLADKLATQGSYVVHAGKRTADGSEFEKRTADGSEFESPKKKAKVE

SEQ ID NO: 440 - protein, 2085 aa, synthetic construct
MPAAKRVKLDGGDKKYSIGLDIGTNSVGWAVITDEYKVPSKKFKVLGNTDRHSIKKNLIGALLFDSGETAEATRLKRTARRRYTRRKNRICYLQEIFSNEMAKVDDSFFHRLEESFLVEEDKKHERHPIFGNIVDEVAYHEKYPTIYHLRKKLVDSTDKADLRLIYLALAHMIKFRGHFLIEGDLNPDNSDVDKLFIQLVQTYNQLFEENPINASGVDAKAILSARLSKSRRLENLIAQLPGEKKNGLFGNLIALSLGLTPNFKSNFDLAEDAKLQLSKDTYDDDLDNLLAQIGDQYADLFLAAKNLSDAILLSDILRVNTEITKAPLSASMIKRYDEHHQDLTLLKALVRQQLPEKYKEIFFDQSKNGYAGYIDGGASQEEFYKFIKPILEKMDGTEELLVKLNREDLLRKQRTFDNGSIPHQIHLGELHAILRRQEDFYPFLKDNREKIEKILTFRIPYYVGPLARGNSRFAWMTRKSEETITPWNFEEVVDKGASAQSFIERMTNFDKNLPNEKVLPKHSLLYEYFTVYNELTKVKYVTEGMRKPAFLSGEQKKAIVDLLFKTNRKVTVKQLKEDYFKKIECFDSVEISGVEDRFNASLGTYHDLLKIIKDKDFLDNEENEDILEDIVLTLTLFEDREMIEERLKTYAHLFDDKVMKQLKRRRYTGWGRLSRKLINGIRDKQSGKTILDFLKSDGFANRNFMQLIHDDSLTFKEDIQKAQVSGQGDSLHEHIANLAGSPAIKKGILQTVKVVDELVKVMGRHKPENIVIEMARENQTTQKGQKNSRERMKRIEEGIKELGSQILKEHPVENTQLQNEKLYLYYLQNGRDMYVDQELDINRLSDYDVDHIVPQSFLKDDSIDNKVLTRSDKARGKSDNVPSEEVVKKMKNYWRQLLNAKLITQRKFDNLTKAERGGLSELDKAGFIKRQLVETRQITKHVAQILDSRMNTKYDENDKLIREVKVITLKSKLVSDFRKDFQFYKVREINNYHHAHDAYLNAVVGTALIKKYPKLESEFVYGDYKVYDVRKMIAKSEQEIGKATAKYFFYSNIMNFFKTEITLANGEIRKRPLIETNGETGEIVWDKGRDFATVRKVLSMPQVNIVKKTEVQTGGFSKESILPKRNSDKLIARKKDWDPKKYGGFDSPTVAYSVLVVAKVEKGKSKKLKSVKELLGITIMERSSFEKNPIDFLEAKGYKEVKKDLIIKLPKYSLFELENGRKRMLASAGELQKGNELALPSKYVNFLYLASHYEKLKGSPEDNEQKQLFVEQHKHYLDEIIEQISEFSKRVILADANLDKVLSAYNKHRDKPIREQAENIIHLFTLTNLGAPAAFKYFDTTIDRKRYTSTKEVLDATLIHQSITGLYETRIDLSQLGGDGGPAPGSSGGSGGVPWLMKKPLQLTVLVPLHEYQERLLQQTALPKEQKELLQKLFLKYDALWQHWENQVGHRRIKPHNIATGTLAPRPQKQYPINPKAKPSIQIVIDDLLKQGVLIQQNSTMNTPVYPVPKPDGKWRMVLDYREVNKTIPLIAAQNQHSAGILSSIYRGKYKTTLDLTNGFWAHPITPESYWLTAFTWQGKQYCWTRLPQGFLNSPALFNADVVDLLKEIPNVQAYVDDIYISHDDPQEHLEQLEKIFSILLNAGYVVSLKKSEIAQREVEFLGFNITKEGRGLTDTFKQKLLNITPPKDLKQLQSILGLLNFARNFIPNYSELVKPLYTIVAPANGKFISWTEDNSNQLQHIISVLNQADNLEERNPETRLIIKVNSSPSAGYIRYYNEGSKRPIMYVNYIFSKAEAKFTQTEKLLTTMHKGLIKAMDLAMGQEILVYSPIVSMTKIQRTPLPERKALPVRWITWMTYLEDPRIQFHYDKSLPELQQIPNVTEDVIAKTKHPSEFAMVFYTDGSAIKHPDVNKSHSAGMGIAQVQFIPEYKIVHQWSIPLGDHTAQLAEIAAVEFACKKALKISGPVLIVTDSFYVAESANKELPYWKSNGFLNNKKKPLRHVSKWKSIAECLQLKPDIIIMHEKGHQQPMTTLHTEGNNLADKLATQGSYVVHAGKRTADGSEFEKRTADGSEFESPKKKAKVE

SEQ ID NO: 441 - protein, 2087 aa, synthetic construct
MPAAKRVKLDGGDKKYSIGLDIGTNSVGWAVITDEYKVPSKKFKVLGNTDRHSIKKNLIGALLFDSGETAEATRLKRTARRRYTRRKNRICYLQEIFSNEMAKVDDSFFHRLEESFLVEEDKKHERHPIFGNIVDEVAYHEKYPTIYHLRKKLVDSTDKADLRLIYLALAHMIKFRGHFLIEGDLNPDNSDVDKLFIQLVQTYNQLFEENPINASGVDAKAILSARLSKSRRLENLIAQLPGEKKNGLFGNLIALSLGLTPNFKSNFDLAEDAKLQLSKDTYDDDLDNLLAQIGDQYADLFLAAKNLSDAILLSDILRVNTEITKAPLSASMIKRYDEHHQDLTLLKALVRQQLPEKYKEIFFDQSKNGYAGYIDGGASQEEFYKFIKPILEKMDGTEELLVKLNREDLLRKQRTFDNGSIPHQIHLGELHAILRRQEDFYPFLKDNREKIEKILTFRIPYYVGPLARGNSRFAWMTRKSEETITPWNFEEVVDKGASAQSFIERMTNFDKNLPNEKVLPKHSLLYEYFTVYNELTKVKYVTEGMRKPAFLSGEQKKAIVDLLFKTNRKVTVKQLKEDYFKKIECFDSVEISGVEDRFNASLGTYHDLLKIIKDKDFLDNEENEDILEDIVLTLTLFEDREMIEERLKTYAHLFDDKVMKQLKRRRYTGWGRLSRKLINGIRDKQSGKTILDFLKSDGFANRNFMQLIHDDSLTFKEDIQKAQVSGQGDSLHEHIANLAGSPAIKKGILQTVKVVDELVKVMGRHKPENIVIEMARENQTTQKGQKNSRERMKRIEEGIKELGSQILKEHPVENTQLQNEKLYLYYLQNGRDMYVDQELDINRLSDYDVDHIVPQSFLKDDSIDNKVLTRSDKARGKSDNVPSEEVVKKMKNYWRQLLNAKLITQRKFDNLTKAERGGLSELDKAGFIKRQLVETRQITKHVAQILDSRMNTKYDENDKLIREVKVITLKSKLVSDFRKDFQFYKVREINNYHHAHDAYLNAVVGTALIKKYPKLESEFVYGDYKVYDVRKMIAKSEQEIGKATAKYFFYSNIMNFFKTEITLANGEIRKRPLIETNGETGEIVWDKGRDFATVRKVLSMPQVNIVKKTEVQTGGFSKESILPKRNSDKLIARKKDWDPKKYGGFDSPTVAYSVLVVAKVEKGKSKKLKSVKELLGITIMERSSFEKNPIDFLEAKGYKEVKKDLIIKLPKYSLFELENGRKRMLASAGELQKGNELALPSKYVNFLYLASHYEKLKGSPEDNEQKQLFVEQHKHYLDEIIEQISEFSKRVILADANLDKVLSAYNKHRDKPIREQAENIIHLFTLTNLGAPAAFKYFDTTIDRKRYTSTKEVLDATLIHQSITGLYETRIDLSQLGGDGGGGGEAAAKPAPGGVPWLMKKPLQLTVLVPLHEYQERLLQQTALPKEQKELLQKLFLKYDALWQHWENQVGHRRIKPHNIATGTLAPRPQKQYPINPKAKPSIQIVIDDLLKQGVLIQQNSTMNTPVYPVPKPDGKWRMVLDYREVNKTIPLIAAQNQHSAGILSSIYRGKYKTTLDLTNGFWAHPITPESYWLTAFTWQGKQYCWTRLPQGFLNSPALFNADVVDLLKEIPNVQAYVDDIYISHDDPQEHLEQLEKIFSILLNAGYVVSLKKSEIAQREVEFLGFNITKEGRGLTDTFKQKLLNITPPKDLKQLQSILGLLNFARNFIPNYSELVKPLYTIVAPANGKFISWTEDNSNQLQHIISVLNQADNLEERNPETRLIIKVNSSPSAGYIRYYNEGSKRPIMYVNYIFSKAEAKFTQTEKLLTTMHKGLIKAMDLAMGQEILVYSPIVSMTKIQRTPLPERKALPVRWITWMTYLEDPRIQFHYDKSLPELQQIPNVTEDVIAKTKHPSEFAMVFYTDGSAIKHPDVNKSHSAGMGIAQVQFIPEYKIVHQWSIPLGDHTAQLAEIAAVEFACKKALKISGPVLIVTDSFYVAESANKELPYWKSNGFLNNKKKPLRHVSKWKSIAECLQLKPDIIIMHEKGHQQPMTTLHTEGNNLADKLATQGSYVVHAGKRTADGSEFEKRTADGSEFESPKKKAKVE

SEQ ID NO: 442 - protein, 2087 aa, synthetic construct
MPAAKRVKLDGGDKKYSIGLDIGTNSVGWAVITDEYKVPSKKFKVLGNTDRHSIKKNLIGALLFDSGETAEATRLKRTARRRYTRRKNRICYLQEIFSNEMAKVDDSFFHRLEESFLVEEDKKHERHPIFGNIVDEVAYHEKYPTIYHLRKKLVDSTDKADLRLIYLALAHMIKFRGHFLIEGDLNPDNSDVDKLFIQLVQTYNQLFEENPINASGVDAKAILSARLSKSRRLENLIAQLPGEKKNGLFGNLIALSLGLTPNFKSNFDLAEDAKLQLSKDTYDDDLDNLLAQIGDQYADLFLAAKNLSDAILLSDILRVNTEITKAPLSASMIKRYDEHHQDLTLLKALVRQQLPEKYKEIFFDQSKNGYAGYIDGGASQEEFYKFIKPILEKMDGTEELLVKLNREDLLRKQRTFDNGSIPHQIHLGELHAILRRQEDFYPFLKDNREKIEKILTFRIPYYVGPLARGNSRFAWMTRKSEETITPWNFEEVVDKGASAQSFIERMTNFDKNLPNEKVLPKHSLLYEYFTVYNELTKVKYVTEGMRKPAFLSGEQKKAIVDLLFKTNRKVTVKQLKEDYFKKIECFDSVEISGVEDRFNASLGTYHDLLKIIKDKDFLDNEENEDILEDIVLTLTLFEDREMIEERLKTYAHLFDDKVMKQLKRRRYTGWGRLSRKLINGIRDKQSGKTILDFLKSDGFANRNFMQLIHDDSLTFKEDIQKAQVSGQGDSLHEHIANLAGSPAIKKGILQTVKVVDELVKVMGRHKPENIVIEMARENQTTQKGQKNSRERMKRIEEGIKELGSQILKEHPVENTQLQNEKLYLYYLQNGRDMYVDQELDINRLSDYDVDHIVPQSFLKDDSIDNKVLTRSDKARGKSDNVPSEEVVKKMKNYWRQLLNAKLITQRKFDNLTKAERGGLSELDKAGFIKRQLVETRQITKHVAQILDSRMNTKYDENDKLIREVKVITLKSKLVSDFRKDFQFYKVREINNYHHAHDAYLNAVVGTALIKKYPKLESEFVYGDYKVYDVRKMIAKSEQEIGKATAKYFFYSNIMNFFKTEITLANGEIRKRPLIETNGETGEIVWDKGRDFATVRKVLSMPQVNIVKKTEVQTGGFSKESILPKRNSDKLIARKKDWDPKKYGGFDSPTVAYSVLVVAKVEKGKSKKLKSVKELLGITIMERSSFEKNPIDFLEAKGYKEVKKDLIIKLPKYSLFELENGRKRMLASAGELQKGNELALPSKYVNFLYLASHYEKLKGSPEDNEQKQLFVEQHKHYLDEIIEQISEFSKRVILADANLDKVLSAYNKHRDKPIREQAENIIHLFTLTNLGAPAAFKYFDTTIDRKRYTSTKEVLDATLIHQSITGLYETRIDLSQLGGDGGGGSPAPEAAAKGGVPWLMKKPLQLTVLVPLHEYQERLLQQTALPKEQKELLQKLFLKYDALWQHWENQVGHRRIKPHNIATGTLAPRPQKQYPINPKAKPSIQIVIDDLLKQGVLIQQNSTMNTPVYPVPKPDGKWRMVLDYREVNKTIPLIAAQNQHSAGILSSIYRGKYKTTLDLTNGFWAHPITPESYWLTAFTWQGKQYCWTRLPQGFLNSPALFNADVVDLLKEIPNVQAYVDDIYISHDDPQEHLEQLEKIFSILLNAGYVVSLKKSEIAQREVEFLGFNITKEGRGLTDTFKQKLLNITPPKDLKQLQSILGLLNFARNFIPNYSELVKPLYTIVAPANGKFISWTEDNSNQLQHIISVLNQADNLEERNPETRLIIKVNSSPSAGYIRYYNEGSKRPIMYVNYIFSKAEAKFTQTEKLLTTMHKGLIKAMDLAMGQEILVYSPIVSMTKIQRTPLPERKALPVRWITWMTYLEDPRIQFHYDKSLPELQQIPNVTEDVIAKTKHPSEFAMVFYTDGSAIKHPDVNKSHSAGMGIAQVQFIPEYKIVHQWSIPLGDHTAQLAEIAAVEFACKKALKISGPVLIVTDSFYVAESANKELPYWKSNGFLNNKKKPLRHVSKWKSIAECLQLKPDIIIMHEKGHQQPMTTLHTEGNNLADKLATQGSYVVHAGKRTADGSEFEKRTADGSEFESPKKKAKVE

SEQ ID NO: 443 - protein, 2084 aa, synthetic construct
MPAAKRVKLDGGDKKYSIGLDIGTNSVGWAVITDEYKVPSKKFKVLGNTDRHSIKKNLIGALLFDSGETAEATRLKRTARRRYTRRKNRICYLQEIFSNEMAKVDDSFFHRLEESFLVEEDKKHERHPIFGNIVDEVAYHEKYPTIYHLRKKLVDSTDKADLRLIYLALAHMIKFRGHFLIEGDLNPDNSDVDKLFIQLVQTYNQLFEENPINASGVDAKAILSARLSKSRRLENLIAQLPGEKKNGLFGNLIALSLGLTPNFKSNFDLAEDAKLQLSKDTYDDDLDNLLAQIGDQYADLFLAAKNLSDAILLSDILRVNTEITKAPLSASMIKRYDEHHQDLTLLKALVRQQLPEKYKEIFFDQSKNGYAGYIDGGASQEEFYKFIKPILEKMDGTEELLVKLNREDLLRKQRTFDNGSIPHQIHLGELHAILRRQEDFYPFLKDNREKIEKILTFRIPYYVGPLARGNSRFAWMTRKSEETITPWNFEEVVDKGASAQSFIERMTNFDKNLPNEKVLPKHSLLYEYFTVYNELTKVKYVTEGMRKPAFLSGEQKKAIVDLLFKTNRKVTVKQLKEDYFKKIECFDSVEISGVEDRFNASLGTYHDLLKIIKDKDFLDNEENEDILEDIVLTLTLFEDREMIEERLKTYAHLFDDKVMKQLKRRRYTGWGRLSRKLINGIRDKQSGKTILDFLKSDGFANRNFMQLIHDDSLTFKEDIQKAQVSGQGDSLHEHIANLAGSPAIKKGILQTVKVVDELVKVMGRHKPENIVIEMARENQTTQKGQKNSRERMKRIEEGIKELGSQILKEHPVENTQLQNEKLYLYYLQNGRDMYVDQELDINRLSDYDVDHIVPQSFLKDDSIDNKVLTRSDKARGKSDNVPSEEVVKKMKNYWRQLLNAKLITQRKFDNLTKAERGGLSELDKAGFIKRQLVETRQITKHVAQILDSRMNTKYDENDKLIREVKVITLKSKLVSDFRKDFQFYKVREINNYHHAHDAYLNAVVGTALIKKYPKLESEFVYGDYKVYDVRKMIAKSEQEIGKATAKYFFYSNIMNFFKTEITLANGEIRKRPLIETNGETGEIVWDKGRDFATVRKVLSMPQVNIVKKTEVQTGGFSKESILPKRNSDKLIARKKDWDPKKYGGFDSPTVAYSVLVVAKVEKGKSKKLKSVKELLGITIMERSSFEKNPIDFLEAKGYKEVKKDLIIKLPKYSLFELENGRKRMLASAGELQKGNELALPSKYVNFLYLASHYEKLKGSPEDNEQKQLFVEQHKHYLDEIIEQISEFSKRVILADANLDKVLSAYNKHRDKPIREQAENIIHLFTLTNLGAPAAFKYFDTTIDRKRYTSTKEVLDATLIHQSITGLYETRIDLSQLGGDGGEAAAKGGGGGVPWLMKKPLQLTVLVPLHEYQERLLQQTALPKEQKELLQKLFLKYDALWQHWENQVGHRRIKPHNIATGTLAPRPQKQYPINPKAKPSIQIVIDDLLKQGVLIQQNSTMNTPVYPVPKPDGKWRMVLDYREVNKTIPLIAAQNQHSAGILSSIYRGKYKTTLDLTNGFWAHPITPESYWLTAFTWQGKQYCWTRLPQGFLNSPALFNADVVDLLKEIPNVQAYVDDIYISHDDPQEHLEQLEKIFSILLNAGYVVSLKKSEIAQREVEFLGFNITKEGRGLTDTFKQKLLNITPPKDLKQLQSILGLLNFARNFIPNYSELVKPLYTIVAPANGKFISWTEDNSNQLQHIISVLNQADNLEERNPETRLIIKVNSSPSAGYIRYYNEGSKRPIMYVNYIFSKAEAKFTQTEKLLTTMHKGLIKAMDLAMGQEILVYSPIVSMTKIQRTPLPERKALPVRWITWMTYLEDPRIQFHYDKSLPELQQIPNVTEDVIAKTKHPSEFAMVFYTDGSAIKHPDVNKSHSAGMGIAQVQFIPEYKIVHQWSIPLGDHTAQLAEIAAVEFACKKALKISGPVLIVTDSFYVAESANKELPYWKSNGFLNNKKKPLRHVSKWKSIAECLQLKPDIIIMHEKGHQQPMTTLHTEGNNLADKLATQGSYVVHAGKRTADGSEFEKRTADGSEFESPKKKAKVE

SEQ ID NO: 444 - protein, 2087 aa, synthetic construct
MPAAKRVKLDGGDKKYSIGLDIGTNSVGWAVITDEYKVPSKKFKVLGNTDRHSIKKNLIGALLFDSGETAEATRLKRTARRRYTRRKNRICYLQEIFSNEMAKVDDSFFHRLEESFLVEEDKKHERHPIFGNIVDEVAYHEKYPTIYHLRKKLVDSTDKADLRLIYLALAHMIKFRGHFLIEGDLNPDNSDVDKLFIQLVQTYNQLFEENPINASGVDAKAILSARLSKSRRLENLIAQLPGEKKNGLFGNLIALSLGLTPNFKSNFDLAEDAKLQLSKDTYDDDLDNLLAQIGDQYADLFLAAKNLSDAILLSDILRVNTEITKAPLSASMIKRYDEHHQDLTLLKALVRQQLPEKYKEIFFDQSKNGYAGYIDGGASQEEFYKFIKPILEKMDGTEELLVKLNREDLLRKQRTFDNGSIPHQIHLGELHAILRRQEDFYPFLKDNREKIEKILTFRIPYYVGPLARGNSRFAWMTRKSEETITPWNFEEVVDKGASAQSFIERMTNFDKNLPNEKVLPKHSLLYEYFTVYNELTKVKYVTEGMRKPAFLSGEQKKAIVDLLFKTNRKVTVKQLKEDYFKKIECFDSVEISGVEDRFNASLGTYHDLLKIIKDKDFLDNEENEDILEDIVLTLTLFEDREMIEERLKTYAHLFDDKVMKQLKRRRYTGWGRLSRKLINGIRDKQSGKTILDFLKSDGFANRNFMQLIHDDSLTFKEDIQKAQVSGQGDSLHEHIANLAGSPAIKKGILQTVKVVDELVKVMGRHKPENIVIEMARENQTTQKGQKNSRERMKRIEEGIKELGSQILKEHPVENTQLQNEKLYLYYLQNGRDMYVDQELDINRLSDYDVDHIVPQSFLKDDSIDNKVLTRSDKARGKSDNVPSEEVVKKMKNYWRQLLNAKLITQRKFDNLTKAERGGLSELDKAGFIKRQLVETRQITKHVAQILDSRMNTKYDENDKLIREVKVITLKSKLVSDFRKDFQFYKVREINNYHHAHDAYLNAVVGTALIKKYPKLESEFVYGDYKVYDVRKMIAKSEQEIGKATAKYFFYSNIMNFFKTEITLANGEIRKRPLIETNGETGEIVWDKGRDFATVRKVLSMPQVNIVKKTEVQTGGFSKESILPKRNSDKLIARKKDWDPKKYGGFDSPTVAYSVLVVAKVEKGKSKKLKSVKELLGITIMERSSFEKNPIDFLEAKGYKEVKKDLIIKLPKYSLFELENGRKRMLASAGELQKGNELALPSKYVNFLYLASHYEKLKGSPEDNEQKQLFVEQHKHYLDEIIEQISEFSKRVILADANLDKVLSAYNKHRDKPIREQAENIIHLFTLTNLGAPAAFKYFDTTIDRKRYTSTKEVLDATLIHQSITGLYETRIDLSQLGGDGGPAPGGSEAAAKGGVPWLMKKPLQLTVLVPLHEYQERLLQQTALPKEQKELLQKLFLKYDALWQHWENQVGHRRIKPHNIATGTLAPRPQKQYPINPKAKPSIQIVIDDLLKQGVLIQQNSTMNTPVYPVPKPDGKWRMVLDYREVNKTIPLIAAQNQHSAGILSSIYRGKYKTTLDLTNGFWAHPITPESYWLTAFTWQGKQYCWTRLPQGFLNSPALFNADVVDLLKEIPNVQAYVDDIYISHDDPQEHLEQLEKIFSILLNAGYVVSLKKSEIAQREVEFLGFNITKEGRGLTDTFKQKLLNITPPKDLKQLQSILGLLNFARNFIPNYSELVKPLYTIVAPANGKFISWTEDNSNQLQHIISVLNQADNLEERNPETRLIIKVNSSPSAGYIRYYNEGSKRPIMYVNYIFSKAEAKFTQTEKLLTTMHKGLIKAMDLAMGQEILVYSPIVSMTKIQRTPLPERKALPVRWITWMTYLEDPRIQFHYDKSLPELQQIPNVTEDVIAKTKHPSEFAMVFYTDGSAIKHPDVNKSHSAGMGIAQVQFIPEYKIVHQWSIPLGDHTAQLAEIAAVEFACKKALKISGPVLIVTDSFYVAESANKELPYWKSNGFLNNKKKPLRHVSKWKSIAECLQLKPDIIIMHEKGHQQPMTTLHTEGNNLADKLATQGSYVVHAGKRTADGSEFEKRTADGSEFESPKKKAKVE

SEQ ID NO: 445 - protein, 2091 aa, synthetic construct
MPAAKRVKLDGGDKKYSIGLDIGTNSVGWAVITDEYKVPSKKFKVLGNTDRHSIKKNLIGALLFDSGETAEATRLKRTARRRYTRRKNRICYLQEIFSNEMAKVDDSFFHRLEESFLVEEDKKHERHPIFGNIVDEVAYHEKYPTIYHLRKKLVDSTDKADLRLIYLALAHMIKFRGHFLIEGDLNPDNSDVDKLFIQLVQTYNQLFEENPINASGVDAKAILSARLSKSRRLENLIAQLPGEKKNGLFGNLIALSLGLTPNFKSNFDLAEDAKLQLSKDTYDDDLDNLLAQIGDQYADLFLAAKNLSDAILLSDILRVNTEITKAPLSASMIKRYDEHHQDLTLLKALVRQQLPEKYKEIFFDQSKNGYAGYIDGGASQEEFYKFIKPILEKMDGTEELLVKLNREDLLRKQRTFDNGSIPHQIHLGELHAILRRQEDFYPFLKDNREKIEKILTFRIPYYVGPLARGNSRFAWMTRKSEETITPWNFEEVVDKGASAQSFIERMTNFDKNLPNEKVLPKHSLLYEYFTVYNELTKVKYVTEGMRKPAFLSGEQKKAIVDLLFKTNRKVTVKQLKEDYFKKIECFDSVEISGVEDRFNASLGTYHDLLKIIKDKDFLDNEENEDILEDIVLTLTLFEDREMIEERLKTYAHLFDDKVMKQLKRRRYTGWGRLSRKLINGIRDKQSGKTILDFLKSDGFANRNFMQLIHDDSLTFKEDIQKAQVSGQGDSLHEHIANLAGSPAIKKGILQTVKVVDELVKVMGRHKPENIVIEMARENQTTQKGQKNSRERMKRIEEGIKELGSQILKEHPVENTQLQNEKLYLYYLQNGRDMYVDQELDINRLSDYDVDHIVPQSFLKDDSIDNKVLTRSDKARGKSDNVPSEEVVKKMKNYWRQLLNAKLITQRKFDNLTKAERGGLSELDKAGFIKRQLVETRQITKHVAQILDSRMNTKYDENDKLIREVKVITLKSKLVSDFRKDFQFYKVREINNYHHAHDAYLNAVVGTALIKKYPKLESEFVYGDYKVYDVRKMIAKSEQEIGKATAKYFFYSNIMNFFKTEITLANGEIRKRPLIETNGETGEIVWDKGRDFATVRKVLSMPQVNIVKKTEVQTGGFSKESILPKRNSDKLIARKKDWDPKKYGGFDSPTVAYSVLVVAKVEKGKSKKLKSVKELLGITIMERSSFEKNPIDFLEAKGYKEVKKDLIIKLPKYSLFELENGRKRMLASAGELQKGNELALPSKYVNFLYLASHYEKLKGSPEDNEQKQLFVEQHKHYLDEIIEQISEFSKRVILADANLDKVLSAYNKHRDKPIREQAENIIHLFTLTNLGAPAAFKYFDTTIDRKRYTSTKEVLDATLIHQSITGLYETRIDLSQLGGDGGGGGGSEAAAKGGGGSGGVPWLMKKPLQLTVLVPLHEYQERLLQQTALPKEQKELLQKLFLKYDALWQHWENQVGHRRIKPHNIATGTLAPRPQKQYPINPKAKPSIQIVIDDLLKQGVLIQQNSTMNTPVYPVPKPDGKWRMVLDYREVNKTIPLIAAQNQHSAGILSSIYRGKYKTTLDLTNGFWAHPITPESYWLTAFTWQGKQYCWTRLPQGFLNSPALFNADVVDLLKEIPNVQAYVDDIYISHDDPQEHLEQLEKIFSILLNAGYVVSLKKSEIAQREVEFLGFNITKEGRGLTDTFKQKLLNITPPKDLKQLQSILGKLNFARNFIPNYSELVKPLYTIVAPANGKFISWTEDNSNQLQHIISVLNQADNLEERNPETRLIIKVNSSPSAGYIRYYNEGSKRPIMYVNYIFSKAEAKFTQTEKLLTTMHKGLIKAMDLAMGQEILVYSPIVSMTKIQRTPLPERKALPVRWITWMTYLEDPRIQFHYDKSLPELQQIPNVTEDVIAKTKHPSEFAMVFYTDGSAIKHPDVNKSHSAGMGIAQVQFIPEYKIVHQWSIPLGDHTAQLAEIAAVEFACKKALKISGPVLIVTDSFYVAESANKELPYWKSNGFLNNKKKPLRHVSKWKSIAECLQLKPDIIIMHEKGHQQPMTTLHTEGNNLADKLATQGSYVVHAGKRTADGSEFEKRTADGSEFESPKKKAKVE

SEQ ID NO: 446 - protein, 2082 aa, synthetic construct
MPAAKRVKLDGGDKKYSIGLDIGTNSVGWAVITDEYKVPSKKFKVLGNTDRHSIKKNLIGALLFDSGETAEATRLKRTARRRYTRRKNRICYLQEIFSNEMAKVDDSFFHRLEESFLVEEDKKHERHPIFGNIVDEVAYHEKYPTIYHLRKKLVDSTDKADLRLIYLALAHMIKFRGHFLIEGDLNPDNSDVDKLFIQLVQTYNQLFEENPINASGVDAKAILSARLSKSRRLENLIAQLPGEKKNGLFGNLIALSLGLTPNFKSNFDLAEDAKLQLSKDTYDDDLDNLLAQIGDQYADLFLAAKNLSDAILLSDILRVNTEITKAPLSASMIKRYDEHHQDLTLLKALVRQQLPEKYKEIFFDQSKNGYAGYIDGGASQEEFYKFIKPILEKMDGTEELLVKLNREDLLRKQRTFDNGSIPHQIHLGELHAILRRQEDFYPFLKDNREKIEKILTFRIPYYVGPLARGNSRFAWMTRKSEETITPWNFEEVVDKGASAQSFIERMTNFDKNLPNEKVLPKHSLLYEYFTVYNELTKVKYVTEGMRKPAFLSGEQKKAIVDLLFKTNRKVTVKQLKEDYFKKIECFDSVEISGVEDRFNASLGTYHDLLKIIKDKDFLDNEENEDILEDIVLTLTLFEDREMIEERLKTYAHLFDDKVMKQLKRRRYTGWGRLSRKLINGIRDKQSGKTILDFLKSDGFANRNFMQLIHDDSLTFKEDIQKAQVSGQGDSLHEHIANLAGSPAIKKGILQTVKVVDELVKVMGRHKPENIVIEMARENQTTQKGQKNSRERMKRIEEGIKELGSQILKEHPVENTQLQNEKLYLYYLQNGRDMYVDQELDINRLSDYDVDHIVPQSFLKDDSIDNKVLTRSDKARGKSDNVPSEEVVKKMKNYWRQLLNAKLITQRKFDNLTKAERGGLSELDKAGFIKRQLVETRQITKHVAQILDSRMNTKYDENDKLIREVKVITLKSKLVSDFRKDFQFYKVREINNYHHAHDAYLNAVVGTALIKKYPKLESEFVYGDYKVYDVRKMIAKSEQEIGKATAKYFFYSNIMNFFKTEITLANGEIRKRPLIETNGETGEIVWDKGRDFATVRKVLSMPQVNIVKKTEVQTGGFSKESILPKRNSDKLIARKKDWDPKKYGGFDSPTVAYSVLVVAKVEKGKSKKLKSVKELLGITIMERSSFEKNPIDFLEAKGYKEVKKDLIIKLPKYSLFELENGRKRMLASAGELQKGNELALPSKYVNFLYLASHYEKLKGSPEDNEQKQLFVEQHKHYLDEIIEQISEFSKRVILADANLDKVLSAYNKHRDKPIREQAENIIHLFTLTNLGAPAAFKYFDTTIDRKRYTSTKEVLDATLIHQSITGLYETRIDLSQLGGDGGGGGGSSGGVPWLMKKPLQLTVLVPLHEYQERLLQQTALPKEQKELLQKLFLKYDALWQHWENQVGHRRIKPHNIATGTLAPRPQKQYPINPKAKPSIQIVIDDLLKQGVLIQQNSTMNTPVYPVPKPDGKWRMVLDYREVNKTIPLIAAQNQHSAGILSSIYRGKYKTTLDLTNGFWAHPITPESYWLTAFTWQGKQYCWTRLPQGFLNSPALFNADVVDLLKEIPNVQAYVDDIYISHDDPQEHLEQLEKIFSILLNAGYVVSLKKSEIAQREVEFLGFNITKEGRGLTDTFKQKLLNITPPKDLKQLQSILGKLNFARNFIPNYSELVKPLYTIVAPANGKFISWTEDNSNQLQHIISVLNQADNLEERNPETRLIIKVNSSPSAGYIRYYNEGSKRPIMYVNYIFSKAEAKFTQTEKLLTTMHKGLIKAMDLAMGQEILVYSPIVSMTKIQRTPLPERKALPVRWITWMTYLEDPRIQFHYDKSLPELQQIPNVTEDVIAKTKHPSEFAMVFYTDGSAIKHPDVNKSHSAGMGIAQVQFIPEYKIVHQWSIPLGDHTAQLAEIAAVEFACKKALKISGPVLIVTDSFYVAESANKELPYWKSNGFLNNKKKPLRHVSKWKSIAECLQLKPDIIIMHEKGHQQPMTTLHTEGNNLADKLATQGSYVVHAGKRTADGSEFEKRTADGSEFESPKKKAKVE

SEQ ID NO: 447 - protein, 2101 aa, synthetic construct
MPAAKRVKLDGGDKKYSIGLDIGTNSVGWAVITDEYKVPSKKFKVLGNTDRHSIKKNLIGALLFDSGETAEATRLKRTARRRYTRRKNRICYLQEIFSNEMAKVDDSFFHRLEESFLVEEDKKHERHPIFGNIVDEVAYHEKYPTIYHLRKKLVDSTDKADLRLIYLALAHMIKFRGHFLIEGDLNPDNSDVDKLFIQLVQTYNQLFEENPINASGVDAKAILSARLSKSRRLENLIAQLPGEKKNGLFGNLIALSLGLTPNFKSNFDLAEDAKLQLSKDTYDDDLDNLLAQIGDQYADLFLAAKNLSDAILLSDILRVNTEITKAPLSASMIKRYDEHHQDLTLLKALVRQQLPEKYKEIFFDQSKNGYAGYIDGGASQEEFYKFIKPILEKMDGTEELLVKLNREDLLRKQRTFDNGSIPHQIHLGELHAILRRQEDFYPFLKDNREKIEKILTFRIPYYVGPLARGNSRFAWMTRKSEETITPWNFEEVVDKGASAQSFIERMTNFDKNLPNEKVLPKHSLLYEYFTVYNELTKVKYVTEGMRKPAFLSGEQKKAIVDLLFKTNRKVTVKQLKEDYFKKIECFDSVEISGVEDRFNASLGTYHDLLKIIKDKDFLDNEENEDILEDIVLTLTLFEDREMIEERLKTYAHLFDDKVMKQLKRRRYTGWGRLSRKLINGIRDKQSGKTILDFLKSDGFANRNFMQLIHDDSLTFKEDIQKAQVSGQGDSLHEHIANLAGSPAIKKGILQTVKVVDELVKVMGRHKPENIVIEMARENQTTQKGQKNSRERMKRIEEGIKELGSQILKEHPVENTQLQNEKLYLYYLQNGRDMYVDQELDINRLSDYDVDHIVPQSFLKDDSIDNKVLTRSDKARGKSDNVPSEEVVKKMKNYWRQLLNAKLITQRKFDNLTKAERGGLSELDKAGFIKRQLVETRQITKHVAQILDSRMNTKYDENDKLIREVKVITLKSKLVSDFRKDFQFYKVREINNYHHAHDAYLNAVVGTALIKKYPKLESEFVYGDYKVYDVRKMIAKSEQEIGKATAKYFFYSNIMNFFKTEITLANGEIRKRPLIETNGETGEIVWDKGRDFATVRKVLSMPQVNIVKKTEVQTGGFSKESILPKRNSDKLIARKKDWDPKKYGGFDSPTVAYSVLVVAKVEKGKSKKLKSVKELLGITIMERSSFEKNPIDFLEAKGYKEVKKDLIIKLPKYSLFELENGRKRMLASAGELQKGNELALPSKYVNFLYLASHYEKLKGSPEDNEQKQLFVEQHKHYLDEIIEQISEFSKRVILADANLDKVLSAYNKHRDKPIREQAENIIHLFTLTNLGAPAAFKYFDTTIDRKRYTSTKEVLDATLIHQSITGLYETRIDLSQLGGDGGEAAAKEAAAKEAAAKEAAAKEAAAKGGVPWLMKKPLQLTVLVPLHEYQERLLQQTALPKEQKELLQKLFLKYDALWQHWENQVGHRRIKPHNIATGTLAPRPQKQYPINPKAKPSIQIVIDDLLKQGVLIQQNSTMNTPVYPVPKPDGKWRMVLDYREVNKTIPLIAAQNQHSAGILSSIYRGKYKTTLDLTNGFWAHPITPESYWLTAFTWQGKQYCWTRLPQGFLNSPALFNADVVDLLKEIPNVQAYVDDIYISHDDPQEHLEQLEKIFSILLNAGYVVSLKKSEIAQREVEFLGFNITKEGRGLTDTFKQKLLNITPPKDLKQLQSILGKLNFARNFIPNYSELVKPLYTIVAPANGKFISWTEDNSNQLQHIISVLNQADNLEERNPETRLIIKVNSSPSAGYIRYYNEGSKRPIMYVNYIFSKAEAKFTQTEKLLTTMHKGLIKAMDLAMGQEILVYSPIVSMTKIQRTPLPERKALPVRWITWMTYLEDPRIQFHYDKSLPELQQIPNVTEDVIAKTKHPSEFAMVFYTDGSAIKHPDVNKSHSAGMGIAQVQFIPEYKIVHQWSIPLGDHTAQLAEIAAVEFACKKALKISGPVLIVTDSFYVAESANKELPYWKSNGFLNNKKKPLRHVSKWKSIAECLQLKPDIIIMHEKGHQQPMTTLHTEGNNLADKLATQGSYVVHAGKRTADGSEFEKRTADGSEFESPKKKAKVE

SEQ ID NO: 448 - protein, 2085 aa, synthetic construct
MPAAKRVKLDGGDKKYSIGLDIGTNSVGWAVITDEYKVPSKKFKVLGNTDRHSIKKNLIGALLFDSGETAEATRLKRTARRRYTRRKNRICYLQEIFSNEMAKVDDSFFHRLEESFLVEEDKKHERHPIFGNIVDEVAYHEKYPTIYHLRKKLVDSTDKADLRLIYLALAHMIKFRGHFLIEGDLNPDNSDVDKLFIQLVQTYNQLFEENPINASGVDAKAILSARLSKSRRLENLIAQLPGEKKNGLFGNLIALSLGLTPNFKSNFDLAEDAKLQLSKDTYDDDLDNLLAQIGDQYADLFLAAKNLSDAILLSDILRVNTEITKAPLSASMIKRYDEHHQDLTLLKALVRQQLPEKYKEIFFDQSKNGYAGYIDGGASQEEFYKFIKPILEKMDGTEELLVKLNREDLLRKQRTFDNGSIPHQIHLGELHAILRRQEDFYPFLKDNREKIEKILTFRIPYYVGPLARGNSRFAWMTRKSEETITPWNFEEVVDKGASAQSFIERMTNFDKNLPNEKVLPKHSLLYEYFTVYNELTKVKYVTEGMRKPAFLSGEQKKAIVDLLFKTNRKVTVKQLKEDYFKKIECFDSVEISGVEDRFNASLGTYHDLLKIIKDKDFLDNEENEDILEDIVLTLTLFEDREMIEERLKTYAHLFDDKVMKQLKRRRYTGWGRLSRKLINGIRDKQSGKTILDFLKSDGFANRNFMQLIHDDSLTFKEDIQKAQVSGQGDSLHEHIANLAGSPAIKKGILQTVKVVDELVKVMGRHKPENIVIEMARENQTTQKGQKNSRERMKRIEEGIKELGSQILKEHPVENTQLQNEKLYLYYLQNGRDMYVDQELDINRLSDYDVDHIVPQSFLKDDSIDNKVLTRSDKARGKSDNVPSEEVVKKMKNYWRQLLNAKLITQRKFDNLTKAERGGLSELDKAGFIKRQLVETRQITKHVAQILDSRMNTKYDENDKLIREVKVITLKSKLVSDFRKDFQFYKVREINNYHHAHDAYLNAVVGTALIKKYPKLESEFVYGDYKVYDVRKMIAKSEQEIGKATAKYFFYSNIMNFFKTEITLANGEIRKRPLIETNGETGEIVWDKGRDFATVRKVLSMPQVNIVKKTEVQTGGFSKESILPKRNSDKLIARKKDWDPKKYGGFDSPTVAYSVLVVAKVEKGKSKKLKSVKELLGITIMERSSFEKNPIDFLEAKGYKEVKKDLIIKLPKYSLFELENGRKRMLASAGELQKGNELALPSKYVNFLYLASHYEKLKGSPEDNEQKQLFVEQHKHYLDEIIEQISEFSKRVILADANLDKVLSAYNKHRDKPIREQAENIIHLFTLTNLGAPAAFKYFDTTIDRKRYTSTKEVLDATLIHQSITGLYETRIDLSQLGGDGGGGGPAPGGSGGVPWLMKKPLQLTVLVPLHEYQERLLQQTALPKEQKELLQKLFLKYDALWQHWENQVGHRRIKPHNIATGTLAPRPQKQYPINPKAKPSIQIVIDDLLKQGVLIQQNSTMNTPVYPVPKPDGKWRMVLDYREVNKTIPLIAAQNQHSAGILSSIYRGKYKTTLDLTNGFWAHPITPESYWLTAFTWQGKQYCWTRLPQGFLNSPALFNADVVDLLKEIPNVQAYVDDIYISHDDPQEHLEQLEKIFSILLNAGYVVSLKKSEIAQREVEFLGFNITKEGRGLTDTFKQKLLNITPPKDLKQLQSILGKLNFARNFIPNYSELVKPLYTIVAPANGKFISWTEDNSNQLQHIISVLNQADNLEERNPETRLIIKVNSSPSAGYIRYYNEGSKRPIMYVNYIFSKAEAKFTQTEKLLTTMHKGLIKAMDLAMGQEILVYSPIVSMTKIQRTPLPERKALPVRWITWMTYLEDPRIQFHYDKSLPELQQIPNVTEDVIAKTKHPSEFAMVFYTDGSAIKHPDVNKSHSAGMGIAQVQFIPEYKIVHQWSIPLGDHTAQLAEIAAVEFACKKALKISGPVLIVTDSFYVAESANKELPYWKSNGFLNNKKKPLRHVSKWKSIAECLQLKPDIIIMHEKGHQQPMTTLHTEGNNLADKLATQGSYVVHAGKRTADGSEFEKRTADGSEFESPKKKAKVE

SEQ ID NO: 449 - protein, 2088 aa, synthetic construct
MPAAKRVKLDGGDKKYSIGLDIGTNSVGWAVITDEYKVPSKKFKVLGNTDRHSIKKNLIGALLFDSGETAEATRLKRTARRRYTRRKNRICYLQEIFSNEMAKVDDSFFHRLEESFLVEEDKKHERHPIFGNIVDEVAYHEKYPTIYHLRKKLVDSTDKADLRLIYLALAHMIKFRGHFLIEGDLNPDNSDVDKLFIQLVQTYNQLFEENPINASGVDAKAILSARLSKSRRLENLIAQLPGEKKNGLFGNLIALSLGLTPNFKSNFDLAEDAKLQLSKDTYDDDLDNLLAQIGDQYADLFLAAKNLSDAILLSDILRVNTEITKAPLSASMIKRYDEHHQDLTLLKALVRQQLPEKYKEIFFDQSKNGYAGYIDGGASQEEFYKFIKPILEKMDGTEELLVKLNREDLLRKQRTFDNGSIPHQIHLGELHAILRRQEDFYPFLKDNREKIEKILTFRIPYYVGPLARGNSRFAWMTRKSEETITPWNFEEVVDKGASAQSFIERMTNFDKNLPNEKVLPKHSLLYEYFTVYNELTKVKYVTEGMRKPAFLSGEQKKAIVDLLFKTNRKVTVKQLKEDYFKKIECFDSVEISGVEDRFNASLGTYHDLLKIIKDKDFLDNEENEDILEDIVLTLTLFEDREMIEERLKTYAHLFDDKVMKQLKRRRYTGWGRLSRKLINGIRDKQSGKTILDFLKSDGFANRNFMQLIHDDSLTFKEDIQKAQVSGQGDSLHEHIANLAGSPAIKKGILQTVKVVDELVKVMGRHKPENIVIEMARENQTTQKGQKNSRERMKRIEEGIKELGSQILKEHPVENTQLQNEKLYLYYLQNGRDMYVDQELDINRLSDYDVDHIVPQSFLKDDSIDNKVLTRSDKARGKSDNVPSEEVVKKMKNYWRQLLNAKLITQRKFDNLTKAERGGLSELDKAGFIKRQLVETRQITKHVAQILDSRMNTKYDENDKLIREVKVITLKSKLVSDFRKDFQFYKVREINNYHHAHDAYLNAVVGTALIKKYPKLESEFVYGDYKVYDVRKMIAKSEQEIGKATAKYFFYSNIMNFFKTEITLANGEIRKRPLIETNGETGEIVWDKGRDFATVRKVLSMPQVNIVKKTEVQTGGFSKESILPKRNSDKLIARKKDWDPKKYGGFDSPTVAYSVLVVAKVEKGKSKKLKSVKELLGITIMERSSFEKNPIDFLEAKGYKEVKKDLIIKLPKYSLFELENGRKRMLASAGELQKGNELALPSKYVNFLYLASHYEKLKGSPEDNEQKQLFVEQHKHYLDEIIEQISEFSKRVILADANLDKVLSAYNKHRDKPIREQAENIIHLFTLTNLGAPAAFKYFDTTIDRKRYTSTKEVLDATLIHQSITGLYETRIDLSQLGGDGGGSSGSSGSSGSSGGVPWLMKKPLQLTVLVPLHEYQERLLQQTALPKEQKELLQKLFLKYDALWQHWENQVGHRRIKPHNIATGTLAPRPQKQYPINPKAKPSIQIVIDDLLKQGVLIQQNSTMNTPVYPVPKPDGKWRMVLDYREVNKTIPLIAAQNQHSAGILSSIYRGKYKTTLDLTNGFWAHPITPESYWLTAFTWQGKQYCWTRLPQGFLNSPALFNADVVDLLKEIPNVQAYVDDIYISHDDPQEHLEQLEKIFSILLNAGYVVSLKKSEIAQREVEFLGFNITKEGRGLTDTFKQKLLNITPPKDLKQLQSILGKLNFARNFIPNYSELVKPLYTIVAPANGKFISWTEDNSNQLQHIISVLNQADNLEERNPETRLIIKVNSSPSAGYIRYYNEGSKRPIMYVNYIFSKAEAKFTQTEKLLTTMHKGLIKAMDLAMGQEILVYSPIVSMTKIQRTPLPERKALPVRWITWMTYLEDPRIQFHYDKSLPELQQIPNVTEDVIAKTKHPSEFAMVFYTDGSAIKHPDVNKSHSAGMGIAQVQFIPEYKIVHQWSIPLGDHTAQLAEIAAVEFACKKALKISGPVLIVTDSFYVAESANKELPYWKSNGFLNNKKKPLRHVSKWKSIAECLQLKPDIIIMHEKGHQQPMTTLHTEGNNLADKLATQGSYVVHAGKRTADGSEFEKRTADGSEFESPKKKAKVE

SEQ ID NO: 450 - protein, 2094 aa, synthetic construct
MPAAKRVKLDGGDKKYSIGLDIGTNSVGWAVITDEYKVPSKKFKVLGNTDRHSIKKNLIGALLFDSGETAEATRLKRTARRRYTRRKNRICYLQEIFSNEMAKVDDSFFHRLEESFLVEEDKKHERHPIFGNIVDEVAYHEKYPTIYHLRKKLVDSTDKADLRLIYLALAHMIKFRGHFLIEGDLNPDNSDVDKLFIQLVQTYNQLFEENPINASGVDAKAILSARLSKSRRLENLIAQLPGEKKNGLFGNLIALSLGLTPNFKSNFDLAEDAKLQLSKDTYDDDLDNLLAQIGDQYADLFLAAKNLSDAILLSDILRVNTEITKAPLSASMIKRYDEHHQDLTLLKALVRQQLPEKYKEIFFDQSKNGYAGYIDGGASQEEFYKFIKPILEKMDGTEELLVKLNREDLLRKQRTFDNGSIPHQIHLGELHAILRRQEDFYPFLKDNREKIEKILTFRIPYYVGPLARGNSRFAWMTRKSEETITPWNFEEVVDKGASAQSFIERMTNFDKNLPNEKVLPKHSLLYEYFTVYNELTKVKYVTEGMRKPAFLSGEQKKAIVDLLFKTNRKVTVKQLKEDYFKKIECFDSVEISGVEDRFNASLGTYHDLLKIIKDKDFLDNEENEDILEDIVLTLTLFEDREMIEERLKTYAHLFDDKVMKQLKRRRYTGWGRLSRKLINGIRDKQSGKTILDFLKSDGFANRNFMQLIHDDSLTFKEDIQKAQVSGQGDSLHEHIANLAGSPAIKKGILQTVKVVDELVKVMGRHKPENIVIEMARENQTTQKGQKNSRERMKRIEEGIKELGSQILKEHPVENTQLQNEKLYLYYLQNGRDMYVDQELDINRLSDYDVDHIVPQSFLKDDSIDNKVLTRSDKARGKSDNVPSEEVVKKMKNYWRQLLNAKLITQRKFDNLTKAERGGLSELDKAGFIKRQLVETRQITKHVAQILDSRMNTKYDENDKLIREVKVITLKSKLVSDFRKDFQFYKVREINNYHHAHDAYLNAVVGTALIKKYPKLESEFVYGDYKVYDVRKMIAKSEQEIGKATAKYFFYSNIMNFFKTEITLANGEIRKRPLIETNGETGEIVWDKGRDFATVRKVLSMPQVNIVKKTEVQTGGFSKESILPKRNSDKLIARKKDWDPKKYGGFDSPTVAYSVLVVAKVEKGKSKKLKSVKELLGITIMERSSFEKNPIDFLEAKGYKEVKKDLIIKLPKYSLFELENGRKRMLASAGELQKGNELALPSKYVNFLYLASHYEKLKGSPEDNEQKQLFVEQHKHYLDEIIEQISEFSKRVILADANLDKVLSAYNKHRDKPIREQAENIIHLFTLTNLGAPAAFKYFDTTIDRKRYTSTKEVLDATLIHQSITGLYETRIDLSQLGGDGGGSSGSSGSSGSSGSSGSSGGVPWLMKKPLQLTVLVPLHEYQERLLQQTALPKEQKELLQKLFLKYDALWQHWENQVGHRRIKPHNIATGTLAPRPQKQYPINPKAKPSIQIVIDDLLKQGVLIQQNSTMNTPVYPVPKPDGKWRMVLDYREVNKTIPLIAAQNQHSAGILSSIYRGKYKTTLDLTNGFWAHPITPESYWLTAFTWQGKQYCWTRLPQGFLNSPALFNADVVDLLKEIPNVQAYVDDIYISHDDPQEHLEQLEKIFSILLNAGYVVSLKKSEIAQREVEFLGFNITKEGRGLTDTFKQKLLNITPPKDLKQLQSILGKLNFARNFIPNYSELVKPLYTIVAPANGKFISWTEDNSNQLQHIISVLNQADNLEERNPETRLIIKVNSSPSAGYIRYYNEGSKRPIMYVNYIFSKAEAKFTQTEKLLTTMHKGLIKAMDLAMGQEILVYSPIVSMTKIQRTPLPERKALPVRWITWMTYLEDPRIQFHYDKSLPELQQIPNVTEDVIAKTKHPSEFAMVFYTDGSAIKHPDVNKSHSAGMGIAQVQFIPEYKIVHQWSIPLGDHTAQLAEIAAVEFACKKALKISGPVLIVTDSFYVAESANKELPYWKSNGFLNNKKKPLRHVSKWKSIAECLQLKPDIIIMHEKGHQQPMTTLHTEGNNLADKLATQGSYVVHAGKRTADGSEFEKRTADGSEFESPKKKAKVE

SEQ ID NO: 451 - protein, 2087 aa, synthetic construct
MPAAKRVKLDGGDKKYSIGLDIGTNSVGWAVITDEYKVPSKKFKVLGNTDRHSIKKNLIGALLFDSGETAEATRLKRTARRRYTRRKNRICYLQEIFSNEMAKVDDSFFHRLEESFLVEEDKKHERHPIFGNIVDEVAYHEKYPTIYHLRKKLVDSTDKADLRLIYLALAHMIKFRGHFLIEGDLNPDNSDVDKLFIQLVQTYNQLFEENPINASGVDAKAILSARLSKSRRLENLIAQLPGEKKNGLFGNLIALSLGLTPNFKSNFDLAEDAKLQLSKDTYDDDLDNLLAQIGDQYADLFLAAKNLSDAILLSDILRVNTEITKAPLSASMIKRYDEHHQDLTLLKALVRQQLPEKYKEIFFDQSKNGYAGYIDGGASQEEFYKFIKPILEKMDGTEELLVKLNREDLLRKQRTFDNGSIPHQIHLGELHAILRRQEDFYPFLKDNREKIEKILTFRIPYYVGPLARGNSRFAWMTRKSEETITPWNFEEVVDKGASAQSFIERMTNFDKNLPNEKVLPKHSLLYEYFTVYNELTKVKYVTEGMRKPAFLSGEQKKAIVDLLFKTNRKVTVKQLKEDYFKKIECFDSVEISGVEDRFNASLGTYHDLLKIIKDKDFLDNEENEDILEDIVLTLTLFEDREMIEERLKTYAHLFDDKVMKQLKRRRYTGWGRLSRKLINGIRDKQSGKTILDFLKSDGFANRNFMQLIHDDSLTFKEDIQKAQVSGQGDSLHEHIANLAGSPAIKKGILQTVKVVDELVKVMGRHKPENIVIEMARENQTTQKGQKNSRERMKRIEEGIKELGSQILKEHPVENTQLQNEKLYLYYLQNGRDMYVDQELDINRLSDYDVDHIVPQSFLKDDSIDNKVLTRSDKARGKSDNVPSEEVVKKMKNYWRQLLNAKLITQRKFDNLTKAERGGLSELDKAGFIKRQLVETRQITKHVAQILDSRMNTKYDENDKLIREVKVITLKSKLVSDFRKDFQFYKVREINNYHHAHDAYLNAVVGTALIKKYPKLESEFVYGDYKVYDVRKMIAKSEQEIGKATAKYFFYSNIMNFFKTEITLANGEIRKRPLIETNGETGEIVWDKGRDFATVRKVLSMPQVNIVKKTEVQTGGFSKESILPKRNSDKLIARKKDWDPKKYGGFDSPTVAYSVLVVAKVEKGKSKKLKSVKELLGITIMERSSFEKNPIDFLEAKGYKEVKKDLIIKLPKYSLFELENGRKRMLASAGELQKGNELALPSKYVNFLYLASHYEKLKGSPEDNEQKQLFVEQHKHYLDEIIEQISEFSKRVILADANLDKVLSAYNKHRDKPIREQAENIIHLFTLTNLGAPAAFKYFDTTIDRKRYTSTKEVLDATLIHQSITGLYETRIDLSQLGGDGGPAPGGGEAAAKGGVPWLMKKPLQLTVLVPLHEYQERLLQQTALPKEQKELLQKLFLKYDALWQHWENQVGHRRIKPHNIATGTLAPRPQKQYPINPKAKPSIQIVIDDLLKQGVLIQQNSTMNTPVYPVPKPDGKWRMVLDYREVNKTIPLIAAQNQHSAGILSSIYRGKYKTTLDLTNGFWAHPITPESYWLTAFTWQGKQYCWTRLPQGFLNSPALFNADVVDLLKEIPNVQAYVDDIYISHDDPQEHLEQLEKIFSILLNAGYVVSLKKSEIAQREVEFLGFNITKEGRGLTDTFKQKLLNITPPKDLKQLQSILGKLNFARNFIPNYSELVKPLYTIVAPANGKFISWTEDNSNQLQHIISVLNQADNLEERNPETRLIIKVNSSPSAGYIRYYNEGSKRPIMYVNYIFSKAEAKFTQTEKLLTTMHKGLIKAMDLAMGQEILVYSPIVSMTKIQRTPLPERKALPVRWITWMTYLEDPRIQFHYDKSLPELQQIPNVTEDVIAKTKHPSEFAMVFYTDGSAIKHPDVNKSHSAGMGIAQVQFIPEYKIVHQWSIPLGDHTAQLAEIAAVEFACKKALKISGPVLIVTDSFYVAESANKELPYWKSNGFLNNKKKPLRHVSKWKSIAECLQLKPDIIIMHEKGHQQPMTTLHTEGNNLADKLATQGSYVVHAGKRTADGSEFEKRTADGSEFESPKKKAKVE

SEQ ID NO: 452 - protein, 2081 aa, synthetic construct
MPAAKRVKLDGGDKKYSIGLDIGTNSVGWAVITDEYKVPSKKFKVLGNTDRHSIKKNLIGALLFDSGETAEATRLKRTARRRYTRRKNRICYLQEIFSNEMAKVDDSFFHRLEESFLVEEDKKHERHPIFGNIVDEVAYHEKYPTIYHLRKKLVDSTDKADLRLIYLALAHMIKFRGHFLIEGDLNPDNSDVDKLFIQLVQTYNQLFEENPINASGVDAKAILSARLSKSRRLENLIAQLPGEKKNGLFGNLIALSLGLTPNFKSNFDLAEDAKLQLSKDTYDDDLDNLLAQIGDQYADLFLAAKNLSDAILLSDILRVNTEITKAPLSASMIKRYDEHHQDLTLLKALVRQQLPEKYKEIFFDQSKNGYAGYIDGGASQEEFYKFIKPILEKMDGTEELLVKLNREDLLRKQRTFDNGSIPHQIHLGELHAILRRQEDFYPFLKDNREKIEKILTFRIPYYVGPLARGNSRFAWMTRKSEETITPWNFEEVVDKGASAQSFIERMTNFDKNLPNEKVLPKHSLLYEYFTVYNELTKVKYVTEGMRKPAFLSGEQKKAIVDLLFKTNRKVTVKQLKEDYFKKIECFDSVEISGVEDRFNASLGTYHDLLKIIKDKDFLDNEENEDILEDIVLTLTLFEDREMIEERLKTYAHLFDDKVMKQLKRRRYTGWGRLSRKLINGIRDKQSGKTILDFLKSDGFANRNFMQLIHDDSLTFKEDIQKAQVSGQGDSLHEHIANLAGSPAIKKGILQTVKVVDELVKVMGRHKPENIVIEMARENQTTQKGQKNSRERMKRIEEGIKELGSQILKEHPVENTQLQNEKLYLYYLQNGRDMYVDQELDINRLSDYDVDHIVPQSFLKDDSIDNKVLTRSDKARGKSDNVPSEEVVKKMKNYWRQLLNAKLITQRKFDNLTKAERGGLSELDKAGFIKRQLVETRQITKHVAQILDSRMNTKYDENDKLIREVKVITLKSKLVSDFRKDFQFYKVREINNYHHAHDAYLNAVVGTALIKKYPKLESEFVYGDYKVYDVRKMIAKSEQEIGKATAKYFFYSNIMNFFKTEITLANGEIRKRPLIETNGETGEIVWDKGRDFATVRKVLSMPQVNIVKKTEVQTGGFSKESILPKRNSDKLIARKKDWDPKKYGGFDSPTVAYSVLVVAKVEKGKSKKLKSVKELLGITIMERSSFEKNPIDFLEAKGYKEVKKDLIIKLPKYSLFELENGRKRMLASAGELQKGNELALPSKYVNFLYLASHYEKLKGSPEDNEQKQLFVEQHKHYLDEIIEQISEFSKRVILADANLDKVLSAYNKHRDKPIREQAENIIHLFTLTNLGAPAAFKYFDTTIDRKRYTSTKEVLDATLIHQSITGLYETRIDLSQLGGDGGGGGGSGGVPWLMKKPLQLTVLVPLHEYQERLLQQTALPKEQKELLQKLFLKYDALWQHWENQVGHRRIKPHNIATGTLAPRPQKQYPINPKAKPSIQIVIDDLLKQGVLIQQNSTMNTPVYPVPKPDGKWRMVLDYREVNKTIPLIAAQNQHSAGILSSIYRGKYKTTLDLTNGFWAHPITPESYWLTAFTWQGKQYCWTRLPQGFLNSPALFNADVVDLLKEIPNVQAYVDDIYISHDDPQEHLEQLEKIFSILLNAGYVVSLKKSEIAQREVEFLGFNITKEGRGLTDTFKQKLLNITPPKDLKQLQSILGKLNFARNFIPNYSELVKPLYTIVAPANGKFISWTEDNSNQLQHIISVLNQADNLEERNPETRLIIKVNSSPSAGYIRYYNEGSKRPIMYVNYIFSKAEAKFTQTEKLLTTMHKGLIKAMDLAMGQEILVYSPIVSMTKIQRTPLPERKALPVRWITWMTYLEDPRIQFHYDKSLPELQQIPNVTEDVIAKTKHPSEFAMVFYTDGSAIKHPDVNKSHSAGMGIAQVQFIPEYKIVHQWSIPLGDHTAQLAEIAAVEFACKKALKISGPVLIVTDSFYVAESANKELPYWKSNGFLNNKKKPLRHVSKWKSIAECLQLKPDIIIMHEKGHQQPMTTLHTEGNNLADKLATQGSYVVHAGKRTADGSEFEKRTADGSEFESPKKKAKVE

SEQ ID NO: 453 - protein, 2084 aa, synthetic construct
MPAAKRVKLDGGDKKYSIGLDIGTNSVGWAVITDEYKVPSKKFKVLGNTDRHSIKKNLIGALLFDSGETAEATRLKRTARRRYTRRKNRICYLQEIFSNEMAKVDDSFFHRLEESFLVEEDKKHERHPIFGNIVDEVAYHEKYPTIYHLRKKLVDSTDKADLRLIYLALAHMIKFRGHFLIEGDLNPDNSDVDKLFIQLVQTYNQLFEENPINASGVDAKAILSARLSKSRRLENLIAQLPGEKKNGLFGNLIALSLGLTPNFKSNFDLAEDAKLQLSKDTYDDDLDNLLAQIGDQYADLFLAAKNLSDAILLSDILRVNTEITKAPLSASMIKRYDEHHQDLTLLKALVRQQLPEKYKEIFFDQSKNGYAGYIDGGASQEEFYKFIKPILEKMDGTEELLVKLNREDLLRKQRTFDNGSIPHQIHLGELHAILRRQEDFYPFLKDNREKIEKILTFRIPYYVGPLARGNSRFAWMTRKSEETITPWNFEEVVDKGASAQSFIERMTNFDKNLPNEKVLPKHSLLYEYFTVYNELTKVKYVTEGMRKPAFLSGEQKKAIVDLLFKTNRKVTVKQLKEDYFKKIECFDSVEISGVEDRFNASLGTYHDLLKIIKDKDFLDNEENEDILEDIVLTLTLFEDREMIEERLKTYAHLFDDKVMKQLKRRRYTGWGRLSRKLINGIRDKQSGKTILDFLKSDGFANRNFMQLIHDDSLTFKEDIQKAQVSGQGDSLHEHIANLAGSPAIKKGILQTVKVVDELVKVMGRHKPENIVIEMARENQTTQKGQKNSRERMKRIEEGIKELGSQILKEHPVENTQLQNEKLYLYYLQNGRDMYVDQELDINRLSDYDVDHIVPQSFLKDDSIDNKVLTRSDKARGKSDNVPSEEVVKKMKNYWRQLLNAKLITQRKFDNLTKAERGGLSELDKAGFIKRQLVETRQITKHVAQILDSRMNTKYDENDKLIREVKVITLKSKLVSDFRKDFQFYKVREINNYHHAHDAYLNAVVGTALIKKYPKLESEFVYGDYKVYDVRKMIAKSEQEIGKATAKYFFYSNIMNFFKTEITLANGEIRKRPLIETNGETGEIVWDKGRDFATVRKVLSMPQVNIVKKTEVQTGGFSKESILPKRNSDKLIARKKDWDPKKYGGFDSPTVAYSVLVVAKVEKGKSKKLKSVKELLGITIMERSSFEKNPIDFLEAKGYKEVKKDLIIKLPKYSLFELENGRKRMLASAGELQKGNELALPSKYVNFLYLASHYEKLKGSPEDNEQKQLFVEQHKHYLDEIIEQISEFSKRVILADANLDKVLSAYNKHRDKPIREQAENIIHLFTLTNLGAPAAFKYFDTTIDRKRYTSTKEVLDATLIHQSITGLYETRIDLSQLGGDGGEAAAKPAPGGVPWLMKKPLQLTVLVPLHEYQERLLQQTALPKEQKELLQKLFLKYDALWQHWENQVGHRRIKPHNIATGTLAPRPQKQYPINPKAKPSIQIVIDDLLKQGVLIQQNSTMNTPVYPVPKPDGKWRMVLDYREVNKTIPLIAAQNQHSAGILSSIYRGKYKTTLDLTNGFWAHPITPESYWLTAFTWQGKQYCWTRLPQGFLNSPALFNADVVDLLKEIPNVQAYVDDIYISHDDPQEHLEQLEKIFSILLNAGYVVSLKKSEIAQREVEFLGFNITKEGRGLTDTFKQKLLNITPPKDLKQLQSILGKLNFARNFIPNYSELVKPLYTIVAPANGKFISWTEDNSNQLQHIISVLNQADNLEERNPETRLIIKVNSSPSAGYIRYYNEGSKRPIMYVNYIFSKAEAKFTQTEKLLTTMHKGLIKAMDLAMGQEILVYSPIVSMTKIQRTPLPERKALPVRWITWMTYLEDPRIQFHYDKSLPELQQIPNVTEDVIAKTKHPSEFAMVFYTDGSAIKHPDVNKSHSAGMGIAQVQFIPEYKIVHQWSIPLGDHTAQLAEIAAVEFACKKALKISGPVLIVTDSFYVAESANKELPYWKSNGFLNNKKKPLRHVSKWKSIAECLQLKPDIIIMHEKGHQQPMTTLHTEGNNLADKLATQGSYVVHAGKRTADGSEFEKRTADGSEFESPKKKAKVE

SEQ ID NO: 454 - protein, 2085 aa, synthetic construct
MPAAKRVKLDGGDKKYSIGLDIGTNSVGWAVITDEYKVPSKKFKVLGNTDRHSIKKNLIGALLFDSGETAEATRLKRTARRRYTRRKNRICYLQEIFSNEMAKVDDSFFHRLEESFLVEEDKKHERHPIFGNIVDEVAYHEKYPTIYHLRKKLVDSTDKADLRLIYLALAHMIKFRGHFLIEGDLNPDNSDVDKLFIQLVQTYNQLFEENPINASGVDAKAILSARLSKSRRLENLIAQLPGEKKNGLFGNLIALSLGLTPNFKSNFDLAEDAKLQLSKDTYDDDLDNLLAQIGDQYADLFLAAKNLSDAILLSDILRVNTEITKAPLSASMIKRYDEHHQDLTLLKALVRQQLPEKYKEIFFDQSKNGYAGYIDGGASQEEFYKFIKPILEKMDGTEELLVKLNREDLLRKQRTFDNGSIPHQIHLGELHAILRRQEDFYPFLKDNREKIEKILTFRIPYYVGPLARGNSRFAWMTRKSEETITPWNFEEVVDKGASAQSFIERMTNFDKNLPNEKVLPKHSLLYEYFTVYNELTKVKYVTEGMRKPAFLSGEQKKAIVDLLFKTNRKVTVKQLKEDYFKKIECFDSVEISGVEDRFNASLGTYHDLLKIIKDKDFLDNEENEDILEDIVLTLTLFEDREMIEERLKTYAHLFDDKVMKQLKRRRYTGWGRLSRKLINGIRDKQSGKTILDFLKSDGFANRNFMQLIHDDSLTFKEDIQKAQVSGQGDSLHEHIANLAGSPAIKKGILQTVKVVDELVKVMGRHKPENIVIEMARENQTTQKGQKNSRERMKRIEEGIKELGSQILKEHPVENTQLQNEKLYLYYLQNGRDMYVDQELDINRLSDYDVDHIVPQSFLKDDSIDNKVLTRSDKARGKSDNVPSEEVVKKMKNYWRQLLNAKLITQRKFDNLTKAERGGLSELDKAGFIKRQLVETRQITKHVAQILDSRMNTKYDENDKLIREVKVITLKSKLVSDFRKDFQFYKVREINNYHHAHDAYLNAVVGTALIKKYPKLESEFVYGDYKVYDVRKMIAKSEQEIGKATAKYFFYSNIMNFFKTEITLANGEIRKRPLIETNGETGEIVWDKGRDFATVRKVLSMPQVNIVKKTEVQTGGFSKESILPKRNSDKLIARKKDWDPKKYGGFDSPTVAYSVLVVAKVEKGKSKKLKSVKELLGITIMERSSFEKNPIDFLEAKGYKEVKKDLIIKLPKYSLFELENGRKRMLASAGELQKGNELALPSKYVNFLYLASHYEKLKGSPEDNEQKQLFVEQHKHYLDEIIEQISEFSKRVILADANLDKVLSAYNKHRDKPIREQAENIIHLFTLTNLGAPAAFKYFDTTIDRKRYTSTKEVLDATLIHQSITGLYETRIDLSQLGGDGGGGGGSSGGSGGVPWLMKKPLQLTVLVPLHEYQERLLQQTALPKEQKELLQKLFLKYDALWQHWENQVGHRRIKPHNIATGTLAPRPQKQYPINPKAKPSIQIVIDDLLKQGVLIQQNSTMNTPVYPVPKPDGKWRMVLDYREVNKTIPLIAAQNQHSAGILSSIYRGKYKTTLDLTNGFWAHPITPESYWLTAFTWQGKQYCWTRLPQGFLNSPALFNADVVDLLKEIPNVQAYVDDIYISHDDPQEHLEQLEKIFSILLNAGYVVSLKKSEIAQREVEFLGFNITKEGRGLTDTFKQKLLNITPPKDLKQLQSILGKLNFARNFIPNYSELVKPLYTIVAPANGKFISWTEDNSNQLQHIISVLNQADNLEERNPETRLIIKVNSSPSAGYIRYYNEGSKRPIMYVNYIFSKAEAKFTQTEKLLTTMHKGLIKAMDLAMGQEILVYSPIVSMTKIQRTPLPERKALPVRWITWMTYLEDPRIQFHYDKSLPELQQIPNVTEDVIAKTKHPSEFAMVFYTDGSAIKHPDVNKSHSAGMGIAQVQFIPEYKIVHQWSIPLGDHTAQLAEIAAVEFACKKALKISGPVLIVTDSFYVAESANKELPYWKSNGFLNNKKKPLRHVSKWKSIAECLQLKPDIIIMHEKGHQQPMTTLHTEGNNLADKLATQGSYVVHAGKRTADGSEFEKRTADGSEFESPKKKAKVE

SEQ ID NO: 455 - protein, 2085 aa, synthetic construct
MPAAKRVKLDGGDKKYSIGLDIGTNSVGWAVITDEYKVPSKKFKVLGNTDRHSIKKNLIGALLFDSGETAEATRLKRTARRRYTRRKNRICYLQEIFSNEMAKVDDSFFHRLEESFLVEEDKKHERHPIFGNIVDEVAYHEKYPTIYHLRKKLVDSTDKADLRLIYLALAHMIKFRGHFLIEGDLNPDNSDVDKLFIQLVQTYNQLFEENPINASGVDAKAILSARLSKSRRLENLIAQLPGEKKNGLFGNLIALSLGLTPNFKSNFDLAEDAKLQLSKDTYDDDLDNLLAQIGDQYADLFLAAKNLSDAILLSDILRVNTEITKAPLSASMIKRYDEHHQDLTLLKALVRQQLPEKYKEIFFDQSKNGYAGYIDGGASQEEFYKFIKPILEKMDGTEELLVKLNREDLLRKQRTFDNGSIPHQIHLGELHAILRRQEDFYPFLKDNREKIEKILTFRIPYYVGPLARGNSRFAWMTRKSEETITPWNFEEVVDKGASAQSFIERMTNFDKNLPNEKVLPKHSLLYEYFTVYNELTKVKYVTEGMRKPAFLSGEQKKAIVDLLFKTNRKVTVKQLKEDYFKKIECFDSVEISGVEDRFNASLGTYHDLLKIIKDKDFLDNEENEDILEDIVLTLTLFEDREMIEERLKTYAHLFDDKVMKQLKRRRYTGWGRLSRKLINGIRDKQSGKTILDFLKSDGFANRNFMQLIHDDSLTFKEDIQKAQVSGQGDSLHEHIANLAGSPAIKKGILQTVKVVDELVKVMGRHKPENIVIEMARENQTTQKGQKNSRERMKRIEEGIKELGSQILKEHPVENTQLQNEKLYLYYLQNGRDMYVDQELDINRLSDYDVDHIVPQSFLKDDSIDNKVLTRSDKARGKSDNVPSEEVVKKMKNYWRQLLNAKLITQRKFDNLTKAERGGLSELDKAGFIKRQLVETRQITKHVAQILDSRMNTKYDENDKLIREVKVITLKSKLVSDFRKDFQFYKVREINNYHHAHDAYLNAVVGTALIKKYPKLESEFVYGDYKVYDVRKMIAKSEQEIGKATAKYFFYSNIMNFFKTEITLANGEIRKRPLIETNGETGEIVWDKGRDFATVRKVLSMPQVNIVKKTEVQTGGFSKESILPKRNSDKLIARKKDWDPKKYGGFDSPTVAYSVLVVAKVEKGKSKKLKSVKELLGITIMERSSFEKNPIDFLEAKGYKEVKKDLIIKLPKYSLFELENGRKRMLASAGELQKGNELALPSKYVNFLYLASHYEKLKGSPEDNEQKQLFVEQHKHYLDEIIEQISEFSKRVILADANLDKVLSAYNKHRDKPIREQAENIIHLFTLTNLGAPAAFKYFDTTIDRKRYTSTKEVLDATLIHQSITGLYETRIDLSQLGGDGGGSSPAPGGSGGVPWLMKKPLQLTVLVPLHEYQERLLQQTALPKEQKELLQKLFLKYDALWQHWENQVGHRRIKPHNIATGTLAPRPQKQYPINPKAKPSIQIVIDDLLKQGVLIQQNSTMNTPVYPVPKPDGKWRMVLDYREVNKTIPLIAAQNQHSAGILSSIYRGKYKTTLDLTNGFWAHPITPESYWLTAFTWQGKQYCWTRLPQGFLNSPALFNADVVDLLKEIPNVQAYVDDIYISHDDPQEHLEQLEKIFSILLNAGYVVSLKKSEIAQREVEFLGFNITKEGRGLTDTFKQKLLNITPPKDLKQLQSILGKLNFARNFIPNYSELVKPLYTIVAPANGKFISWTEDNSNQLQHIISVLNQADNLEERNPETRLIIKVNSSPSAGYIRYYNEGSKRPIMYVNYIFSKAEAKFTQTEKLLTTMHKGLIKAMDLAMGQEILVYSPIVSMTKIQRTPLPERKALPVRWITWMTYLEDPRIQFHYDKSLPELQQIPNVTEDVIAKTKHPSEFAMVFYTDGSAIKHPDVNKSHSAGMGIAQVQFIPEYKIVHQWSIPLGDHTAQLAEIAAVEFACKKALKISGPVLIVTDSFYVAESANKELPYWKSNGFLNNKKKPLRHVSKWKSIAECLQLKPDIIIMHEKGHQQPMTTLHTEGNNLADKLATQGSYVVHAGKRTADGSEFEKRTADGSEFESPKKKAKVE

SEQ ID NO: 456 - protein, 2085 aa, synthetic construct
MPAAKRVKLDGGDKKYSIGLDIGTNSVGWAVITDEYKVPSKKFKVLGNTDRHSIKKNLIGALLFDSGETAEATRLKRTARRRYTRRKNRICYLQEIFSNEMAKVDDSFFHRLEESFLVEEDKKHERHPIFGNIVDEVAYHEKYPTIYHLRKKLVDSTDKADLRLIYLALAHMIKFRGHFLIEGDLNPDNSDVDKLFIQLVQTYNQLFEENPINASGVDAKAILSARLSKSRRLENLIAQLPGEKKNGLFGNLIALSLGLTPNFKSNFDLAEDAKLQLSKDTYDDDLDNLLAQIGDQYADLFLAAKNLSDAILLSDILRVNTEITKAPLSASMIKRYDEHHQDLTLLKALVRQQLPEKYKEIFFDQSKNGYAGYIDGGASQEEFYKFIKPILEKMDGTEELLVKLNREDLLRKQRTFDNGSIPHQIHLGELHAILRRQEDFYPFLKDNREKIEKILTFRIPYYVGPLARGNSRFAWMTRKSEETITPWNFEEVVDKGASAQSFIERMTNFDKNLPNEKVLPKHSLLYEYFTVYNELTKVKYVTEGMRKPAFLSGEQKKAIVDLLFKTNRKVTVKQLKEDYFKKIECFDSVEISGVEDRFNASLGTYHDLLKIIKDKDFLDNEENEDILEDIVLTLTLFEDREMIEERLKTYAHLFDDKVMKQLKRRRYTGWGRLSRKLINGIRDKQSGKTILDFLKSDGFANRNFMQLIHDDSLTFKEDIQKAQVSGQGDSLHEHIANLAGSPAIKKGILQTVKVVDELVKVMGRHKPENIVIEMARENQTTQKGQKNSRERMKRIEEGIKELGSQILKEHPVENTQLQNEKLYLYYLQNGRDMYVDQELDINRLSDYDVDHIVPQSFLKDDSIDNKVLTRSDKARGKSDNVPSEEVVKKMKNYWRQLLNAKLITQRKFDNLTKAERGGLSELDKAGFIKRQLVETRQITKHVAQILDSRMNTKYDENDKLIREVKVITLKSKLVSDFRKDFQFYKVREINNYHHAHDAYLNAVVGTALIKKYPKLESEFVYGDYKVYDVRKMIAKSEQEIGKATAKYFFYSNIMNFFKTEITLANGEIRKRPLIETNGETGEIVWDKGRDFATVRKVLSMPQVNIVKKTEVQTGGFSKESILPKRNSDKLIARKKDWDPKKYGGFDSPTVAYSVLVVAKVEKGKSKKLKSVKELLGITIMERSSFEKNPIDFLEAKGYKEVKKDLIIKLPKYSLFELENGRKRMLASAGELQKGNELALPSKYVNFLYLASHYEKLKGSPEDNEQKQLFVEQHKHYLDEIIEQISEFSKRVILADANLDKVLSAYNKHRDKPIREQAENIIHLFTLTNLGAPAAFKYFDTTIDRKRYTSTKEVLDATLIHQSITGLYETRIDLSQLGGDGGPAPGSSGGGGGVPWLMKKPLQLTVLVPLHEYQERLLQQTALPKEQKELLQKLFLKYDALWQHWENQVGHRRIKPHNIATGTLAPRPQKQYPINPKAKPSIQIVIDDLLKQGVLIQQNSTMNTPVYPVPKPDGKWRMVLDYREVNKTIPLIAAQNQHSAGILSSIYRGKYKTTLDLTNGFWAHPITPESYWLTAFTWQGKQYCWTRLPQGFLNSPALFNADVVDLLKEIPNVQAYVDDIYISHDDPQEHLEQLEKIFSILLNAGYVVSLKKSEIAQREVEFLGFNITKEGRGLTDTFKQKLLNITPPKDLKQLQSILGKLNFARNFIPNYSELVKPLYTIVAPANGKFISWTEDNSNQLQHIISVLNQADNLEERNPETRLIIKVNSSPSAGYIRYYNEGSKRPIMYVNYIFSKAEAKFTQTEKLLTTMHKGLIKAMDLAMGQEILVYSPIVSMTKIQRTPLPERKALPVRWITWMTYLEDPRIQFHYDKSLPELQQIPNVTEDVIAKTKHPSEFAMVFYTDGSAIKHPDVNKSHSAGMGIAQVQFIPEYKIVHQWSIPLGDHTAQLAEIAAVEFACKKALKISGPVLIVTDSFYVAESANKELPYWKSNGFLNNKKKPLRHVSKWKSIAECLQLKPDIIIMHEKGHQQPMTTLHTEGNNLADKLATQGSYVVHAGKRTADGSEFEKRTADGSEFESPKKKAKVE

SEQ ID NO: 457 - protein, 2082 aa, synthetic construct
MPAAKRVKLDGGDKKYSIGLDIGTNSVGWAVITDEYKVPSKKFKVLGNTDRHSIKKNLIGALLFDSGETAEATRLKRTARRRYTRRKNRICYLQEIFSNEMAKVDDSFFHRLEESFLVEEDKKHERHPIFGNIVDEVAYHEKYPTIYHLRKKLVDSTDKADLRLIYLALAHMIKFRGHFLIEGDLNPDNSDVDKLFIQLVQTYNQLFEENPINASGVDAKAILSARLSKSRRLENLIAQLPGEKKNGLFGNLIALSLGLTPNFKSNFDLAEDAKLQLSKDTYDDDLDNLLAQIGDQYADLFLAAKNLSDAILLSDILRVNTEITKAPLSASMIKRYDEHHQDLTLLKALVRQQLPEKYKEIFFDQSKNGYAGYIDGGASQEEFYKFIKPILEKMDGTEELLVKLNREDLLRKQRTFDNGSIPHQIHLGELHAILRRQEDFYPFLKDNREKIEKILTFRIPYYVGPLARGNSRFAWMTRKSEETITPWNFEEVVDKGASAQSFIERMTNFDKNLPNEKVLPKHSLLYEYFTVYNELTKVKYVTEGMRKPAFLSGEQKKAIVDLLFKTNRKVTVKQLKEDYFKKIECFDSVEISGVEDRFNASLGTYHDLLKIIKDKDFLDNEENEDILEDIVLTLTLFEDREMIEERLKTYAHLFDDKVMKQLKRRRYTGWGRLSRKLINGIRDKQSGKTILDFLKSDGFANRNFMQLIHDDSLTFKEDIQKAQVSGQGDSLHEHIANLAGSPAIKKGILQTVKVVDELVKVMGRHKPENIVIEMARENQTTQKGQKNSRERMKRIEEGIKELGSQILKEHPVENTQLQNEKLYLYYLQNGRDMYVDQELDINRLSDYDVDHIVPQSFLKDDSIDNKVLTRSDKARGKSDNVPSEEVVKKMKNYWRQLLNAKLITQRKFDNLTKAERGGLSELDKAGFIKRQLVETRQITKHVAQILDSRMNTKYDENDKLIREVKVITLKSKLVSDFRKDFQFYKVREINNYHHAHDAYLNAVVGTALIKKYPKLESEFVYGDYKVYDVRKMIAKSEQEIGKATAKYFFYSNIMNFFKTEITLANGEIRKRPLIETNGETGEIVWDKGRDFATVRKVLSMPQVNIVKKTEVQTGGFSKESILPKRNSDKLIARKKDWDPKKYGGFDSPTVAYSVLVVAKVEKGKSKKLKSVKELLGITIMERSSFEKNPIDFLEAKGYKEVKKDLIIKLPKYSLFELENGRKRMLASAGELQKGNELALPSKYVNFLYLASHYEKLKGSPEDNEQKQLFVEQHKHYLDEIIEQISEFSKRVILADANLDKVLSAYNKHRDKPIREQAENIIHLFTLTNLGAPAAFKYFDTTIDRKRYTSTKEVLDATLIHQSITGLYETRIDLSQLGGDGGGGSGGSGGVPWLMKKPLQLTVLVPLHEYQERLLQQTALPKEQKELLQKLFLKYDALWQHWENQVGHRRIKPHNIATGTLAPRPQKQYPINPKAKPSIQIVIDDLLKQGVLIQQNSTMNTPVYPVPKPDGKWRMVLDYREVNKTIPLIAAQNQHSAGILSSIYRGKYKTTLDLTNGFWAHPITPESYWLTAFTWQGKQYCWTRLPQGFLNSPALFNADVVDLLKEIPNVQAYVDDIYISHDDPQEHLEQLEKIFSILLNAGYVVSLKKSEIAQREVEFLGFNITKEGRGLTDTFKQKLLNITPPKDLKQLQSILGKLNFARNFIPNYSELVKPLYTIVAPANGKFISWTEDNSNQLQHIISVLNQADNLEERNPETRLIIKVNSSPSAGYIRYYNEGSKRPIMYVNYIFSKAEAKFTQTEKLLTTMHKGLIKAMDLAMGQEILVYSPIVSMTKIQRTPLPERKALPVRWITWMTYLEDPRIQFHYDKSLPELQQIPNVTEDVIAKTKHPSEFAMVFYTDGSAIKHPDVNKSHSAGMGIAQVQFIPEYKIVHQWSIPLGDHTAQLAEIAAVEFACKKALKISGPVLIVTDSFYVAESANKELPYWKSNGFLNNKKKPLRHVSKWKSIAECLQLKPDIIIMHEKGHQQPMTTLHTEGNNLADKLATQGSYVVHAGKRTADGSEFEKRTADGSEFESPKKKAKVE

SEQ ID NO: 458 - protein, 2087 aa, synthetic construct
MPAAKRVKLDGGDKKYSIGLDIGTNSVGWAVITDEYKVPSKKFKVLGNTDRHSIKKNLIGALLFDSGETAEATRLKRTARRRYTRRKNRICYLQEIFSNEMAKVDDSFFHRLEESFLVEEDKKHERHPIFGNIVDEVAYHEKYPTIYHLRKKLVDSTDKADLRLIYLALAHMIKFRGHFLIEGDLNPDNSDVDKLFIQLVQTYNQLFEENPINASGVDAKAILSARLSKSRRLENLIAQLPGEKKNGLFGNLIALSLGLTPNFKSNFDLAEDAKLQLSKDTYDDDLDNLLAQIGDQYADLFLAAKNLSDAILLSDILRVNTEITKAPLSASMIKRYDEHHQDLTLLKALVRQQLPEKYKEIFFDQSKNGYAGYIDGGASQEEFYKFIKPILEKMDGTEELLVKLNREDLLRKQRTFDNGSIPHQIHLGELHAILRRQEDFYPFLKDNREKIEKILTFRIPYYVGPLARGNSRFAWMTRKSEETITPWNFEEVVDKGASAQSFIERMTNFDKNLPNEKVLPKHSLLYEYFTVYNELTKVKYVTEGMRKPAFLSGEQKKAIVDLLFKTNRKVTVKQLKEDYFKKIECFDSVEISGVEDRFNASLGTYHDLLKIIKDKDFLDNEENEDILEDIVLTLTLFEDREMIEERLKTYAHLFDDKVMKQLKRRRYTGWGRLSRKLINGIRDKQSGKTILDFLKSDGFANRNFMQLIHDDSLTFKEDIQKAQVSGQGDSLHEHIANLAGSPAIKKGILQTVKVVDELVKVMGRHKPENIVIEMARENQTTQKGQKNSRERMKRIEEGIKELGSQILKEHPVENTQLQNEKLYLYYLQNGRDMYVDQELDINRLSDYDVDHIVPQSFLKDDSIDNKVLTRSDKARGKSDNVPSEEVVKKMKNYWRQLLNAKLITQRKFDNLTKAERGGLSELDKAGFIKRQLVETRQITKHVAQILDSRMNTKYDENDKLIREVKVITLKSKLVSDFRKDFQFYKVREINNYHHAHDAYLNAVVGTALIKKYPKLESEFVYGDYKVYDVRKMIAKSEQEIGKATAKYFFYSNIMNFFKTEITLANGEIRKRPLIETNGETGEIVWDKGRDFATVRKVLSMPQVNIVKKTEVQTGGFSKESILPKRNSDKLIARKKDWDPKKYGGFDSPTVAYSVLVVAKVEKGKSKKLKSVKELLGITIMERSSFEKNPIDFLEAKGYKEVKKDLIIKLPKYSLFELENGRKRMLASAGELQKGNELALPSKYVNFLYLASHYEKLKGSPEDNEQKQLFVEQHKHYLDEIIEQISEFSKRVILADANLDKVLSAYNKHRDKPIREQAENIIHLFTLTNLGAPAAFKYFDTTIDRKRYTSTKEVLDATLIHQSITGLYETRIDLSQLGGDGGGGGEAAAKGSSGGVPWLMKKPLQLTVLVPLHEYQERLLQQTALPKEQKELLQKLFLKYDALWQHWENQVGHRRIKPHNIATGTLAPRPQKQYPINPKAKPSIQIVIDDLLKQGVLIQQNSTMNTPVYPVPKPDGKWRMVLDYREVNKTIPLIAAQNQHSAGILSSIYRGKYKTTLDLTNGFWAHPITPESYWLTAFTWQGKQYCWTRLPQGFLNSPALFNADVVDLLKEIPNVQAYVDDIYISHDDPQEHLEQLEKIFSILLNAGYVVSLKKSEIAQREVEFLGFNITKEGRGLTDTFKQKLLNITPPKDLKQLQSILGKLNFARNFIPNYSELVKPLYTIVAPANGKFISWTEDNSNQLQHIISVLNQADNLEERNPETRLIIKVNSSPSAGYIRYYNEGSKRPIMYVNYIFSKAEAKFTQTEKLLTTMHKGLIKAMDLAMGQEILVYSPIVSMTKIQRTPLPERKALPVRWITWMTYLEDPRIQFHYDKSLPELQQIPNVTEDVIAKTKHPSEFAMVFYTDGSAIKHPDVNKSHSAGMGIAQVQFIPEYKIVHQWSIPLGDHTAQLAEIAAVEFACKKALKISGPVLIVTDSFYVAESANKELPYWKSNGFLNNKKKPLRHVSKWKSIAECLQLKPDIIIMHEKGHQQPMTTLHTEGNNLADKLATQGSYVVHAGKRTADGSEFEKRTADGSEFESPKKKAKVE

SEQ ID NO: 459 - protein, 2087 aa, synthetic construct
MPAAKRVKLDGGDKKYSIGLDIGTNSVGWAVITDEYKVPSKKFKVLGNTDRHSIKKNLIGALLFDSGETAEATRLKRTARRRYTRRKNRICYLQEIFSNEMAKVDDSFFHRLEESFLVEEDKKHERHPIFGNIVDEVAYHEKYPTIYHLRKKLVDSTDKADLRLIYLALAHMIKFRGHFLIEGDLNPDNSDVDKLFIQLVQTYNQLFEENPINASGVDAKAILSARLSKSRRLENLIAQLPGEKKNGLFGNLIALSLGLTPNFKSNFDLAEDAKLQLSKDTYDDDLDNLLAQIGDQYADLFLAAKNLSDAILLSDILRVNTEITKAPLSASMIKRYDEHHQDLTLLKALVRQQLPEKYKEIFFDQSKNGYAGYIDGGASQEEFYKFIKPILEKMDGTEELLVKLNREDLLRKQRTFDNGSIPHQIHLGELHAILRRQEDFYPFLKDNREKIEKILTFRIPYYVGPLARGNSRFAWMTRKSEETITPWNFEEVVDKGASAQSFIERMTNFDKNLPNEKVLPKHSLLYEYFTVYNELTKVKYVTEGMRKPAFLSGEQKKAIVDLLFKTNRKVTVKQLKEDYFKKIECFDSVEISGVEDRFNASLGTYHDLLKIIKDKDFLDNEENEDILEDIVLTLTLFEDREMIEERLKTYAHLFDDKVMKQLKRRRYTGWGRLSRKLINGIRDKQSGKTILDFLKSDGFANRNFMQLIHDDSLTFKEDIQKAQVSGQGDSLHEHIANLAGSPAIKKGILQTVKVVDELVKVMGRHKPENIVIEMARENQTTQKGQKNSRERMKRIEEGIKELGSQILKEHPVENTQLQNEKLYLYYLQNGRDMYVDQELDINRLSDYDVDHIVPQSFLKDDSIDNKVLTRSDKARGKSDNVPSEEVVKKMKNYWRQLLNAKLITQRKFDNLTKAERGGLSELDKAGFIKRQLVETRQITKHVAQILDSRMNTKYDENDKLIREVKVITLKSKLVSDFRKDFQFYKVREINNYHHAHDAYLNAVVGTALIKKYPKLESEFVYGDYKVYDVRKMIAKSEQEIGKATAKYFFYSNIMNFFKTEITLANGEIRKRPLIETNGETGEIVWDKGRDFATVRKVLSMPQVNIVKKTEVQTGGFSKESILPKRNSDKLIARKKDWDPKKYGGFDSPTVAYSVLVVAKVEKGKSKKLKSVKELLGITIMERSSFEKNPIDFLEAKGYKEVKKDLIIKLPKYSLFELENGRKRMLASAGELQKGNELALPSKYVNFLYLASHYEKLKGSPEDNEQKQLFVEQHKHYLDEIIEQISEFSKRVILADANLDKVLSAYNKHRDKPIREQAENIIHLFTLTNLGAPAAFKYFDTTIDRKRYTSTKEVLDATLIHQSITGLYETRIDLSQLGGDGGGGSGGGEAAAKGGVPWLMKKPLQLTVLVPLHEYQERLLQQTALPKEQKELLQKLFLKYDALWQHWENQVGHRRIKPHNIATGTLAPRPQKQYPINPKAKPSIQIVIDDLLKQGVLIQQNSTMNTPVYPVPKPDGKWRMVLDYREVNKTIPLIAAQNQHSAGILSSIYRGKYKTTLDLTNGFWAHPITPESYWLTAFTWQGKQYCWTRLPQGFLNSPALFNADVVDLLKEIPNVQAYVDDIYISHDDPQEHLEQLEKIFSILLNAGYVVSLKKSEIAQREVEFLGFNITKEGRGLTDTFKQKLLNITPPKDLKQLQSILGKLNFARNFIPNYSELVKPLYTIVAPANGKFISWTEDNSNQLQHIISVLNQADNLEERNPETRLIIKVNSSPSAGYIRYYNEGSKRPIMYVNYIFSKAEAKFTQTEKLLTTMHKGLIKAMDLAMGQEILVYSPIVSMTKIQRTPLPERKALPVRWITWMTYLEDPRIQFHYDKSLPELQQIPNVTEDVIAKTKHPSEFAMVFYTDGSAIKHPDVNKSHSAGMGIAQVQFIPEYKIVHQWSIPLGDHTAQLAEIAAVEFACKKALKISGPVLIVTDSFYVAESANKELPYWKSNGFLNNKKKPLRHVSKWKSIAECLQLKPDIIIMHEKGHQQPMTTLHTEGNNLADKLATQGSYVVHAGKRTADGSEFEKRTADGSEFESPKKKAKVE

SEQ ID NO: 460 - protein, 2185 aa, synthetic construct
MPAAKRVKLDGGDKKYSIGLDIGTNSVGWAVITDEYKVPSKKFKVLGNTDRHSIKKNLIGALLFDSGETAEATRLKRTARRRYTRRKNRICYLQEIFSNEMAKVDDSFFHRLEESFLVEEDKKHERHPIFGNIVDEVAYHEKYPTIYHLRKKLVDSTDKADLRLIYLALAHMIKFRGHFLIEGDLNPDNSDVDKLFIQLVQTYNQLFEENPINASGVDAKAILSARLSKSRRLENLIAQLPGEKKNGLFGNLIALSLGLTPNFKSNFDLAEDAKLQLSKDTYDDDLDNLLAQIGDQYADLFLAAKNLSDAILLSDILRVNTEITKAPLSASMIKRYDEHHQDLTLLKALVRQQLPEKYKEIFFDQSKNGYAGYIDGGASQEEFYKFIKPILEKMDGTEELLVKLNREDLLRKQRTFDNGSIPHQIHLGELHAILRRQEDFYPFLKDNREKIEKILTFRIPYYVGPLARGNSRFAWMTRKSEETITPWNFEEVVDKGASAQSFIERMTNFDKNLPNEKVLPKHSLLYEYFTVYNELTKVKYVTEGMRKPAFLSGEQKKAIVDLLFKTNRKVTVKQLKEDYFKKIECFDSVEISGVEDRFNASLGTYHDLLKIIKDKDFLDNEENEDILEDIVLTLTLFEDREMIEERLKTYAHLFDDKVMKQLKRRRYTGWGRLSRKLINGIRDKQSGKTILDFLKSDGFANRNFMQLIHDDSLTFKEDIQKAQVSGQGDSLHEHIANLAGSPAIKKGILQTVKVVDELVKVMGRHKPENIVIEMARENQTTQKGQKNSRERMKRIEEGIKELGSQILKEHPVENTQLQNEKLYLYYLQNGRDMYVDQELDINRLSDYDVDHIVPQSFLKDDSIDNKVLTRSDKARGKSDNVPSEEVVKKMKNYWRQLLNAKLITQRKFDNLTKAERGGLSELDKAGFIKRQLVETRQITKHVAQILDSRMNTKYDENDKLIREVKVITLKSKLVSDFRKDFQFYKVREINNYHHAHDAYLNAVVGTALIKKYPKLESEFVYGDYKVYDVRKMIAKSEQEIGKATAKYFFYSNIMNFFKTEITLANGEIRKRPLIETNGETGEIVWDKGRDFATVRKVLSMPQVNIVKKTEVQTGGFSKESILPKRNSDKLIARKKDWDPKKYGGFDSPTVAYSVLVVAKVEKGKSKKLKSVKELLGITIMERSSFEKNPIDFLEAKGYKEVKKDLIIKLPKYSLFELENGRKRMLASAGELQKGNELALPSKYVNFLYLASHYEKLKGSPEDNEQKQLFVEQHKHYLDEIIEQISEFSKRVILADANLDKVLSAYNKHRDKPIREQAENIIHLFTLTNLGAPAAFKYFDTTIDRKRYTSTKEVLDATLIHQSITGLYETRIDLSQLGGDGGGGGGSGGGGSGGGGSGGGGSGGMDPLQLLQPLEAEIKGTKLKAHWNSGATITCVPEAFLEDERPIQTMLIKTIHGEKQQDVYYLTFKVQGRKVEAEVLASPYDYILLNPSDVPWLMKKPLQLTVLVPLHEYQERLLQQTALPKEQKELLQKLFLKYDALWQHWENQVGHRRIKPHNIATGTLAPRPQKQYPINPKAKPSIQIVIDDLLKQGVLIQQNSTMNTPVYPVPKPDGKWRMVLDYREVNKTIPLIAAQNQHSAGILSSIYRGKYKTTLDLTNGFWAHPITPESYWLTAFTWQGKQYCWTRLPQGFLNSPALFNADVVDLLKEIPNVQAYVDDIYISHDDPQEHLEQLEKIFSILLNAGYVVSLKKSEIAQREVEFLGFNITKEGRGLTDTFKQKLLNITPPKDLKQLQSILGLLNFARNFIPNYSELVKPLYTIVAPANGKFISWTEDNSNQLQHIISVLNQADNLEERNPETRLIIKVNSSPSAGYIRYYNEGSKRPIMYVNYIFSKAEAKFTQTEKLLTTMHKGLIKAMDLAMGQEILVYSPIVSMTKIQRTPLPERKALPVRWITWMTYLEDPRIQFHYDKSLPELQQIPNVTEDVIAKTKHPSEFAMVFYTDGSAIKHPDVNKSHSAGMGIAQVQFIPEYKIVHQWSIPLGDHTAQLAEIAAVEFACKKALKISGPVLIVTDSFYVAESANKELPYWKSNGFLNNKKKPLRHVSKWKSIAECLQLKPDIIIMHEKGHQQPMTTLHTEGNNLADKLATQGSYVVHAGKRTADGSEFEKRTADGSEFESPKKKAKVE

SEQ ID NO: 461 - protein, 2180 aa, synthetic construct
MPAAKRVKLDGGDKKYSIGLDIGTNSVGWAVITDEYKVPSKKFKVLGNTDRHSIKKNLIGALLFDSGETAEATRLKRTARRRYTRRKNRICYLQEIFSNEMAKVDDSFFHRLEESFLVEEDKKHERHPIFGNIVDEVAYHEKYPTIYHLRKKLVDSTDKADLRLIYLALAHMIKFRGHFLIEGDLNPDNSDVDKLFIQLVQTYNQLFEENPINASGVDAKAILSARLSKSRRLENLIAQLPGEKKNGLFGNLIALSLGLTPNFKSNFDLAEDAKLQLSKDTYDDDLDNLLAQIGDQYADLFLAAKNLSDAILLSDILRVNTEITKAPLSASMIKRYDEHHQDLTLLKALVRQQLPEKYKEIFFDQSKNGYAGYIDGGASQEEFYKFIKPILEKMDGTEELLVKLNREDLLRKQRTFDNGSIPHQIHLGELHAILRRQEDFYPFLKDNREKIEKILTFRIPYYVGPLARGNSRFAWMTRKSEETITPWNFEEVVDKGASAQSFIERMTNFDKNLPNEKVLPKHSLLYEYFTVYNELTKVKYVTEGMRKPAFLSGEQKKAIVDLLFKTNRKVTVKQLKEDYFKKIECFDSVEISGVEDRFNASLGTYHDLLKIIKDKDFLDNEENEDILEDIVLTLTLFEDREMIEERLKTYAHLFDDKVMKQLKRRRYTGWGRLSRKLINGIRDKQSGKTILDFLKSDGFANRNFMQLIHDDSLTFKEDIQKAQVSGQGDSLHEHIANLAGSPAIKKGILQTVKVVDELVKVMGRHKPENIVIEMARENQTTQKGQKNSRERMKRIEEGIKELGSQILKEHPVENTQLQNEKLYLYYLQNGRDMYVDQELDINRLSDYDVDHIVPQSFLKDDSIDNKVLTRSDKARGKSDNVPSEEVVKKMKNYWRQLLNAKLITQRKFDNLTKAERGGLSELDKAGFIKRQLVETRQITKHVAQILDSRMNTKYDENDKLIREVKVITLKSKLVSDFRKDFQFYKVREINNYHHAHDAYLNAVVGTALIKKYPKLESEFVYGDYKVYDVRKMIAKSEQEIGKATAKYFFYSNIMNFFKTEITLANGEIRKRPLIETNGETGEIVWDKGRDFATVRKVLSMPQVNIVKKTEVQTGGFSKESILPKRNSDKLIARKKDWDPKKYGGFDSPTVAYSVLVVAKVEKGKSKKLKSVKELLGITIMERSSFEKNPIDFLEAKGYKEVKKDLIIKLPKYSLFELENGRKRMLASAGELQKGNELALPSKYVNFLYLASHYEKLKGSPEDNEQKQLFVEQHKHYLDEIIEQISEFSKRVILADANLDKVLSAYNKHRDKPIREQAENIIHLFTLTNLGAPAAFKYFDTTIDRKRYTSTKEVLDATLIHQSITGLYETRIDLSQLGGDGGGSSGSSGSSGSSGSSGGMDPLQLLQPLEAEIKGTKLKAHWNSGATITCVPEAFLEDERPIQTMLIKTIHGEKQQDVYYLTFKVQGRKVEAEVLASPYDYILLNPSDVPWLMKKPLQLTVLVPLHEYQERLLQQTALPKEQKELLQKLFLKYDALWQHWENQVGHRRIKPHNIATGTLAPRPQKQYPINPKAKPSIQIVIDDLLKQGVLIQQNSTMNTPVYPVPKPDGKWRMVLDYREVNKTIPLIAAQNQHSAGILSSIYRGKYKTTLDLTNGFWAHPITPESYWLTAFTWQGKQYCWTRLPQGFLNSPALFNADVVDLLKEIPNVQAYVDDIYISHDDPQEHLEQLEKIFSILLNAGYVVSLKKSEIAQREVEFLGFNITKEGRGLTDTFKQKLLNITPPKDLKQLQSILGLLNFARNFIPNYSELVKPLYTIVAPANGKFISWTEDNSNQLQHIISVLNQADNLEERNPETRLIIKVNSSPSAGYIRYYNEGSKRPIMYVNYIFSKAEAKFTQTEKLLTTMHKGLIKAMDLAMGQEILVYSPIVSMTKIQRTPLPERKALPVRWITWMTYLEDPRIQFHYDKSLPELQQIPNVTEDVIAKTKHPSEFAMVFYTDGSAIKHPDVNKSHSAGMGIAQVQFIPEYKIVHQWSIPLGDHTAQLAEIAAVEFACKKALKISGPVLIVTDSFYVAESANKELPYWKSNGFLNNKKKPLRHVSKWKSIAECLQLKPDIIIMHEKGHQQPMTTLHTEGNNLADKLATQGSYVVHAGKRTADGSEFEKRTADGSEFESPKKKAKVE

SEQ ID NO: 462 - protein, 2176 aa, synthetic construct
MPAAKRVKLDGGDKKYSIGLDIGTNSVGWAVITDEYKVPSKKFKVLGNTDRHSIKKNLIGALLFDSGETAEATRLKRTARRRYTRRKNRICYLQEIFSNEMAKVDDSFFHRLEESFLVEEDKKHERHPIFGNIVDEVAYHEKYPTIYHLRKKLVDSTDKADLRLIYLALAHMIKFRGHFLIEGDLNPDNSDVDKLFIQLVQTYNQLFEENPINASGVDAKAILSARLSKSRRLENLIAQLPGEKKNGLFGNLIALSLGLTPNFKSNFDLAEDAKLQLSKDTYDDDLDNLLAQIGDQYADLFLAAKNLSDAILLSDILRVNTEITKAPLSASMIKRYDEHHQDLTLLKALVRQQLPEKYKEIFFDQSKNGYAGYIDGGASQEEFYKFIKPILEKMDGTEELLVKLNREDLLRKQRTFDNGSIPHQIHLGELHAILRRQEDFYPFLKDNREKIEKILTFRIPYYVGPLARGNSRFAWMTRKSEETITPWNFEEVVDKGASAQSFIERMTNFDKNLPNEKVLPKHSLLYEYFTVYNELTKVKYVTEGMRKPAFLSGEQKKAIVDLLFKTNRKVTVKQLKEDYFKKIECFDSVEISGVEDRFNASLGTYHDLLKIIKDKDFLDNEENEDILEDIVLTLTLFEDREMIEERLKTYAHLFDDKVMKQLKRRRYTGWGRLSRKLINGIRDKQSGKTILDFLKSDGFANRNFMQLIHDDSLTFKEDIQKAQVSGQGDSLHEHIANLAGSPAIKKGILQTVKVVDELVKVMGRHKPENIVIEMARENQTTQKGQKNSRERMKRIEEGIKELGSQILKEHPVENTQLQNEKLYLYYLQNGRDMYVDQELDINRLSDYDVDHIVPQSFLKDDSIDNKVLTRSDKARGKSDNVPSEEVVKKMKNYWRQLLNAKLITQRKFDNLTKAERGGLSELDKAGFIKRQLVETRQITKHVAQILDSRMNTKYDENDKLIREVKVITLKSKLVSDFRKDFQFYKVREINNYHHAHDAYLNAVVGTALIKKYPKLESEFVYGDYKVYDVRKMIAKSEQEIGKATAKYFFYSNIMNFFKTEITLANGEIRKRPLIETNGETGEIVWDKGRDFATVRKVLSMPQVNIVKKTEVQTGGFSKESILPKRNSDKLIARKKDWDPKKYGGFDSPTVAYSVLVVAKVEKGKSKKLKSVKELLGITIMERSSFEKNPIDFLEAKGYKEVKKDLIIKLPKYSLFELENGRKRMLASAGELQKGNELALPSKYVNFLYLASHYEKLKGSPEDNEQKQLFVEQHKHYLDEIIEQISEFSKRVILADANLDKVLSAYNKHRDKPIREQAENIIHLFTLTNLGAPAAFKYFDTTIDRKRYTSTKEVLDATLIHQSITGLYETRIDLSQLGGDGGGGGEAAAKGSSGGMDPLQLLQPLEAEIKGTKLKAHWNSGATITCVPEAFLEDERPIQTMLIKTIHGEKQQDVYYLTFKVQGRKVEAEVLASPYDYILLNPSDVPWLMKKPLQLTVLVPLHEYQERLLQQTALPKEQKELLQKLFLKYDALWQHWENQVGHRRIKPHNIATGTLAPRPQKQYPINPKAKPSIQIVIDDLLKQGVLIQQNSTMNTPVYPVPKPDGKWRMVLDYREVNKTIPLIAAQNQHSAGILSSIYRGKYKTTLDLTNGFWAHPITPESYWLTAFTWQGKQYCWTRLPQGFLNSPALFNADVVDLLKEIPNVQAYVDDIYISHDDPQEHLEQLEKIFSILLNAGYVVSLKKSEIAQREVEFLGFNITKEGRGLTDTFKQKLLNITPPKDLKQLQSILGLLNFARNFIPNYSELVKPLYTIVAPANGKFISWTEDNSNQLQHIISVLNQADNLEERNPETRLIIKVNSSPSAGYIRYYNEGSKRPIMYVNYIFSKAEAKFTQTEKLLTTMHKGLIKAMDLAMGQEILVYSPIVSMTKIQRTPLPERKALPVRWITWMTYLEDPRIQFHYDKSLPELQQIPNVTEDVIAKTKHPSEFAMVFYTDGSAIKHPDVNKSHSAGMGIAQVQFIPEYKIVHQWSIPLGDHTAQLAEIAAVEFACKKALKISGPVLIVTDSFYVAESANKELPYWKSNGFLNNKKKPLRHVSKWKSIAECLQLKPDIIIMHEKGHQQPMTTLHTEGNNLADKLATQGSYVVHAGKRTADGSEFEKRTADGSEFESPKKKAKVE

SEQ ID NO: 463 - protein, 2176 aa, synthetic construct
MPAAKRVKLDGGDKKYSIGLDIGTNSVGWAVITDEYKVPSKKFKVLGNTDRHSIKKNLIGALLFDSGETAEATRLKRTARRRYTRRKNRICYLQEIFSNEMAKVDDSFFHRLEESFLVEEDKKHERHPIFGNIVDEVAYHEKYPTIYHLRKKLVDSTDKADLRLIYLALAHMIKFRGHFLIEGDLNPDNSDVDKLFIQLVQTYNQLFEENPINASGVDAKAILSARLSKSRRLENLIAQLPGEKKNGLFGNLIALSLGLTPNFKSNFDLAEDAKLQLSKDTYDDDLDNLLAQIGDQYADLFLAAKNLSDAILLSDILRVNTEITKAPLSASMIKRYDEHHQDLTLLKALVRQQLPEKYKEIFFDQSKNGYAGYIDGGASQEEFYKFIKPILEKMDGTEELLVKLNREDLLRKQRTFDNGSIPHQIHLGELHAILRRQEDFYPFLKDNREKIEKILTFRIPYYVGPLARGNSRFAWMTRKSEETITPWNFEEVVDKGASAQSFIERMTNFDKNLPNEKVLPKHSLLYEYFTVYNELTKVKYVTEGMRKPAFLSGEQKKAIVDLLFKTNRKVTVKQLKEDYFKKIECFDSVEISGVEDRFNASLGTYHDLLKIIKDKDFLDNEENEDILEDIVLTLTLFEDREMIEERLKTYAHLFDDKVMKQLKRRRYTGWGRLSRKLINGIRDKQSGKTILDFLKSDGFANRNFMQLIHDDSLTFKEDIQKAQVSGQGDSLHEHIANLAGSPAIKKGILQTVKVVDELVKVMGRHKPENIVIEMARENQTTQKGQKNSRERMKRIEEGIKELGSQILKEHPVENTQLQNEKLYLYYLQNGRDMYVDQELDINRLSDYDVDHIVPQSFLKDDSIDNKVLTRSDKARGKSDNVPSEEVVKKMKNYWRQLLNAKLITQRKFDNLTKAERGGLSELDKAGFIKRQLVETRQITKHVAQILDSRMNTKYDENDKLIREVKVITLKSKLVSDFRKDFQFYKVREINNYHHAHDAYLNAVVGTALIKKYPKLESEFVYGDYKVYDVRKMIAKSEQEIGKATAKYFFYSNIMNFFKTEITLANGEIRKRPLIETNGETGEIVWDKGRDFATVRKVLSMPQVNIVKKTEVQTGGFSKESILPKRNSDKLIARKKDWDPKKYGGFDSPTVAYSVLVVAKVEKGKSKKLKSVKELLGITIMERSSFEKNPIDFLEAKGYKEVKKDLIIKLPKYSLFELENGRKRMLASAGELQKGNELALPSKYVNFLYLASHYEKLKGSPEDNEQKQLFVEQHKHYLDEIIEQISEFSKRVILADANLDKVLSAYNKHRDKPIREQAENIIHLFTLTNLGAPAAFKYFDTTIDRKRYTSTKEVLDATLIHQSITGLYETRIDLSQLGGDGGGGGEAAAKPAPGGMDPLQLLQPLEAEIKGTKLKAHWNSGATITCVPEAFLEDERPIQTMLIKTIHGEKQQDVYYLTFKVQGRKVEAEVLASPYDYILLNPSDVPWLMKKPLQLTVLVPLHEYQERLLQQTALPKEQKELLQKLFLKYDALWQHWENQVGHRRIKPHNIATGTLAPRPQKQYPINPKAKPSIQIVIDDLLKQGVLIQQNSTMNTPVYPVPKPDGKWRMVLDYREVNKTIPLIAAQNQHSAGILSSIYRGKYKTTLDLTNGFWAHPITPESYWLTAFTWQGKQYCWTRLPQGFLNSPALFNADVVDLLKEIPNVQAYVDDIYISHDDPQEHLEQLEKIFSILLNAGYVVSLKKSEIAQREVEFLGFNITKEGRGLTDTFKQKLLNITPPKDLKQLQSILGLLNFARNFIPNYSELVKPLYTIVAPANGKFISWTEDNSNQLQHIISVLNQADNLEERNPETRLIIKVNSSPSAGYIRYYNEGSKRPIMYVNYIFSKAEAKFTQTEKLLTTMHKGLIKAMDLAMGQEILVYSPIVSMTKIQRTPLPERKALPVRWITWMTYLEDPRIQFHYDKSLPELQQIPNVTEDVIAKTKHPSEFAMVFYTDGSAIKHPDVNKSHSAGMGIAQVQFIPEYKIVHQWSIPLGDHTAQLAEIAAVEFACKKALKISGPVLIVTDSFYVAESANKELPYWKSNGFLNNKKKPLRHVSKWKSIAECLQLKPDIIIMHEKGHQQPMTTLHTEGNNLADKLATQGSYVVHAGKRTADGSEFEKRTADGSEFESPKKKAKVE

SEQ ID NO: 464 - protein, 2176 aa, synthetic construct
MPAAKRVKLDGGDKKYSIGLDIGTNSVGWAVITDEYKVPSKKFKVLGNTDRHSIKKNLIGALLFDSGETAEATRLKRTARRRYTRRKNRICYLQEIFSNEMAKVDDSFFHRLEESFLVEEDKKHERHPIFGNIVDEVAYHEKYPTIYHLRKKLVDSTDKADLRLIYLALAHMIKFRGHFLIEGDLNPDNSDVDKLFIQLVQTYNQLFEENPINASGVDAKAILSARLSKSRRLENLIAQLPGEKKNGLFGNLIALSLGLTPNFKSNFDLAEDAKLQLSKDTYDDDLDNLLAQIGDQYADLFLAAKNLSDAILLSDILRVNTEITKAPLSASMIKRYDEHHQDLTLLKALVRQQLPEKYKEIFFDQSKNGYAGYIDGGASQEEFYKFIKPILEKMDGTEELLVKLNREDLLRKQRTFDNGSIPHQIHLGELHAILRRQEDFYPFLKDNREKIEKILTFRIPYYVGPLARGNSRFAWMTRKSEETITPWNFEEVVDKGASAQSFIERMTNFDKNLPNEKVLPKHSLLYEYFTVYNELTKVKYVTEGMRKPAFLSGEQKKAIVDLLFKTNRKVTVKQLKEDYFKKIECFDSVEISGVEDRFNASLGTYHDLLKIIKDKDFLDNEENEDILEDIVLTLTLFEDREMIEERLKTYAHLFDDKVMKQLKRRRYTGWGRLSRKLINGIRDKQSGKTILDFLKSDGFANRNFMQLIHDDSLTFKEDIQKAQVSGQGDSLHEHIANLAGSPAIKKGILQTVKVVDELVKVMGRHKPENIVIEMARENQTTQKGQKNSRERMKRIEEGIKELGSQILKEHPVENTQLQNEKLYLYYLQNGRDMYVDQELDINRLSDYDVDHIVPQSFLKDDSIDNKVLTRSDKARGKSDNVPSEEVVKKMKNYWRQLLNAKLITQRKFDNLTKAERGGLSELDKAGFIKRQLVETRQITKHVAQILDSRMNTKYDENDKLIREVKVITLKSKLVSDFRKDFQFYKVREINNYHHAHDAYLNAVVGTALIKKYPKLESEFVYGDYKVYDVRKMIAKSEQEIGKATAKYFFYSNIMNFFKTEITLANGEIRKRPLIETNGETGEIVWDKGRDFATVRKVLSMPQVNIVKKTEVQTGGFSKESILPKRNSDKLIARKKDWDPKKYGGFDSPTVAYSVLVVAKVEKGKSKKLKSVKELLGITIMERSSFEKNPIDFLEAKGYKEVKKDLIIKLPKYSLFELENGRKRMLASAGELQKGNELALPSKYVNFLYLASHYEKLKGSPEDNEQKQLFVEQHKHYLDEIIEQISEFSKRVILADANLDKVLSAYNKHRDKPIREQAENIIHLFTLTNLGAPAAFKYFDTTIDRKRYTSTKEVLDATLIHQSITGLYETRIDLSQLGGDGGGGSEAAAKPAPGGMDPLQLLQPLEAEIKGTKLKAHWNSGATITCVPEAFLEDERPIQTMLIKTIHGEKQQDVYYLTFKVQGRKVEAEVLASPYDYILLNPSDVPWLMKKPLQLTVLVPLHEYQERLLQQTALPKEQKELLQKLFLKYDALWQHWENQVGHRRIKPHNIATGTLAPRPQKQYPINPKAKPSIQIVIDDLLKQGVLIQQNSTMNTPVYPVPKPDGKWRMVLDYREVNKTIPLIAAQNQHSAGILSSIYRGKYKTTLDLTNGFWAHPITPESYWLTAFTWQGKQYCWTRLPQGFLNSPALFNADVVDLLKEIPNVQAYVDDIYISHDDPQEHLEQLEKIFSILLNAGYVVSLKKSEIAQREVEFLGFNITKEGRGLTDTFKQKLLNITPPKDLKQLQSILGLLNFARNFIPNYSELVKPLYTIVAPANGKFISWTEDNSNQLQHIISVLNQADNLEERNPETRLIIKVNSSPSAGYIRYYNEGSKRPIMYVNYIFSKAEAKFTQTEKLLTTMHKGLIKAMDLAMGQEILVYSPIVSMTKIQRTPLPERKALPVRWITWMTYLEDPRIQFHYDKSLPELQQIPNVTEDVIAKTKHPSEFAMVFYTDGSAIKHPDVNKSHSAGMGIAQVQFIPEYKIVHQWSIPLGDHTAQLAEIAAVEFACKKALKISGPVLIVTDSFYVAESANKELPYWKSNGFLNNKKKPLRHVSKWKSIAECLQLKPDIIIMHEKGHQQPMTTLHTEGNNLADKLATQGSYVVHAGKRTADGSEFEKRTADGSEFESPKKKAKVE

SEQ ID NO: 465 - protein, 2170 aa, synthetic construct
MPAAKRVKLDGGDKKYSIGLDIGTNSVGWAVITDEYKVPSKKFKVLGNTDRHSIKKNLIGALLFDSGETAEATRLKRTARRRYTRRKNRICYLQEIFSNEMAKVDDSFFHRLEESFLVEEDKKHERHPIFGNIVDEVAYHEKYPTIYHLRKKLVDSTDKADLRLIYLALAHMIKFRGHFLIEGDLNPDNSDVDKLFIQLVQTYNQLFEENPINASGVDAKAILSARLSKSRRLENLIAQLPGEKKNGLFGNLIALSLGLTPNFKSNFDLAEDAKLQLSKDTYDDDLDNLLAQIGDQYADLFLAAKNLSDAILLSDILRVNTEITKAPLSASMIKRYDEHHQDLTLLKALVRQQLPEKYKEIFFDQSKNGYAGYIDGGASQEEFYKFIKPILEKMDGTEELLVKLNREDLLRKQRTFDNGSIPHQIHLGELHAILRRQEDFYPFLKDNREKIEKILTFRIPYYVGPLARGNSRFAWMTRKSEETITPWNFEEVVDKGASAQSFIERMTNFDKNLPNEKVLPKHSLLYEYFTVYNELTKVKYVTEGMRKPAFLSGEQKKAIVDLLFKTNRKVTVKQLKEDYFKKIECFDSVEISGVEDRFNASLGTYHDLLKIIKDKDFLDNEENEDILEDIVLTLTLFEDREMIEERLKTYAHLFDDKVMKQLKRRRYTGWGRLSRKLINGIRDKQSGKTILDFLKSDGFANRNFMQLIHDDSLTFKEDIQKAQVSGQGDSLHEHIANLAGSPAIKKGILQTVKVVDELVKVMGRHKPENIVIEMARENQTTQKGQKNSRERMKRIEEGIKELGSQILKEHPVENTQLQNEKLYLYYLQNGRDMYVDQELDINRLSDYDVDHIVPQSFLKDDSIDNKVLTRSDKARGKSDNVPSEEVVKKMKNYWRQLLNAKLITQRKFDNLTKAERGGLSELDKAGFIKRQLVETRQITKHVAQILDSRMNTKYDENDKLIREVKVITLKSKLVSDFRKDFQFYKVREINNYHHAHDAYLNAVVGTALIKKYPKLESEFVYGDYKVYDVRKMIAKSEQEIGKATAKYFFYSNIMNFFKTEITLANGEIRKRPLIETNGETGEIVWDKGRDFATVRKVLSMPQVNIVKKTEVQTGGFSKESILPKRNSDKLIARKKDWDPKKYGGFDSPTVAYSVLVVAKVEKGKSKKLKSVKELLGITIMERSSFEKNPIDFLEAKGYKEVKKDLIIKLPKYSLFELENGRKRMLASAGELQKGNELALPSKYVNFLYLASHYEKLKGSPEDNEQKQLFVEQHKHYLDEIIEQISEFSKRVILADANLDKVLSAYNKHRDKPIREQAENIIHLFTLTNLGAPAAFKYFDTTIDRKRYTSTKEVLDATLIHQSITGLYETRIDLSQLGGDGGEAAAKGGMDPLQLLQPLEAEIKGTKLKAHWNSGATITCVPEAFLEDERPIQTMLIKTIHGEKQQDVYYLTFKVQGRKVEAEVLASPYDYILLNPSDVPWLMKKPLQLTVLVPLHEYQERLLQQTALPKEQKELLQKLFLKYDALWQHWENQVGHRRIKPHNIATGTLAPRPQKQYPINPKAKPSIQIVIDDLLKQGVLIQQNSTMNTPVYPVPKPDGKWRMVLDYREVNKTIPLIAAQNQHSAGILSSIYRGKYKTTLDLTNGFWAHPITPESYWLTAFTWQGKQYCWTRLPQGFLNSPALFNADVVDLLKEIPNVQAYVDDIYISHDDPQEHLEQLEKIFSILLNAGYVVSLKKSEIAQREVEFLGFNITKEGRGLTDTFKQKLLNITPPKDLKQLQSILGLLNFARNFIPNYSELVKPLYTIVAPANGKFISWTEDNSNQLQHIISVLNQADNLEERNPETRLIIKVNSSPSAGYIRYYNEGSKRPIMYVNYIFSKAEAKFTQTEKLLTTMHKGLIKAMDLAMGQEILVYSPIVSMTKIQRTPLPERKALPVRWITWMTYLEDPRIQFHYDKSLPELQQIPNVTEDVIAKTKHPSEFAMVFYTDGSAIKHPDVNKSHSAGMGIAQVQFIPEYKIVHQWSIPLGDHTAQLAEIAAVEFACKKALKISGPVLIVTDSFYVAESANKELPYWKSNGFLNNKKKPLRHVSKWKSIAECLQLKPDIIIMHEKGHQQPMTTLHTEGNNLADKLATQGSYVVHAGKRTADGSEFEKRTADGSEFESPKKKAKVE

SEQ ID NO: 466 - protein, 2176 aa, synthetic construct
MPAAKRVKLDGGDKKYSIGLDIGTNSVGWAVITDEYKVPSKKFKVLGNTDRHSIKKNLIGALLFDSGETAEATRLKRTARRRYTRRKNRICYLQEIFSNEMAKVDDSFFHRLEESFLVEEDKKHERHPIFGNIVDEVAYHEKYPTIYHLRKKLVDSTDKADLRLIYLALAHMIKFRGHFLIEGDLNPDNSDVDKLFIQLVQTYNQLFEENPINASGVDAKAILSARLSKSRRLENLIAQLPGEKKNGLFGNLIALSLGLTPNFKSNFDLAEDAKLQLSKDTYDDDLDNLLAQIGDQYADLFLAAKNLSDAILLSDILRVNTEITKAPLSASMIKRYDEHHQDLTLLKALVRQQLPEKYKEIFFDQSKNGYAGYIDGGASQEEFYKFIKPILEKMDGTEELLVKLNREDLLRKQRTFDNGSIPHQIHLGELHAILRRQEDFYPFLKDNREKIEKILTFRIPYYVGPLARGNSRFAWMTRKSEETITPWNFEEVVDKGASAQSFIERMTNFDKNLPNEKVLPKHSLLYEYFTVYNELTKVKYVTEGMRKPAFLSGEQKKAIVDLLFKTNRKVTVKQLKEDYFKKIECFDSVEISGVEDRFNASLGTYHDLLKIIKDKDFLDNEENEDILEDIVLTLTLFEDREMIEERLKTYAHLFDDKVMKQLKRRRYTGWGRLSRKLINGIRDKQSGKTILDFLKSDGFANRNFMQLIHDDSLTFKEDIQKAQVSGQGDSLHEHIANLAGSPAIKKGILQTVKVVDELVKVMGRHKPENIVIEMARENQTTQKGQKNSRERMKRIEEGIKELGSQILKEHPVENTQLQNEKLYLYYLQNGRDMYVDQELDINRLSDYDVDHIVPQSFLKDDSIDNKVLTRSDKARGKSDNVPSEEVVKKMKNYWRQLLNAKLITQRKFDNLTKAERGGLSELDKAGFIKRQLVETRQITKHVAQILDSRMNTKYDENDKLIREVKVITLKSKLVSDFRKDFQFYKVREINNYHHAHDAYLNAVVGTALIKKYPKLESEFVYGDYKVYDVRKMIAKSEQEIGKATAKYFFYSNIMNFFKTEITLANGEIRKRPLIETNGETGEIVWDKGRDFATVRKVLSMPQVNIVKKTEVQTGGFSKESILPKRNSDKLIARKKDWDPKKYGGFDSPTVAYSVLVVAKVEKGKSKKLKSVKELLGITIMERSSFEKNPIDFLEAKGYKEVKKDLIIKLPKYSLFELENGRKRMLASAGELQKGNELALPSKYVNFLYLASHYEKLKGSPEDNEQKQLFVEQHKHYLDEIIEQISEFSKRVILADANLDKVLSAYNKHRDKPIREQAENIIHLFTLTNLGAPAAFKYFDTTIDRKRYTSTKEVLDATLIHQSITGLYETRIDLSQLGGDGGGGSGSSEAAAKGGMDPLQLLQPLEAEIKGTKLKAHWNSGATITCVPEAFLEDERPIQTMLIKTIHGEKQQDVYYLTFKVQGRKVEAEVLASPYDYILLNPSDVPWLMKKPLQLTVLVPLHEYQERLLQQTALPKEQKELLQKLFLKYDALWQHWENQVGHRRIKPHNIATGTLAPRPQKQYPINPKAKPSIQIVIDDLLKQGVLIQQNSTMNTPVYPVPKPDGKWRMVLDYREVNKTIPLIAAQNQHSAGILSSIYRGKYKTTLDLTNGFWAHPITPESYWLTAFTWQGKQYCWTRLPQGFLNSPALFNADVVDLLKEIPNVQAYVDDIYISHDDPQEHLEQLEKIFSILLNAGYVVSLKKSEIAQREVEFLGFNITKEGRGLTDTFKQKLLNITPPKDLKQLQSILGLLNFARNFIPNYSELVKPLYTIVAPANGKFISWTEDNSNQLQHIISVLNQADNLEERNPETRLIIKVNSSPSAGYIRYYNEGSKRPIMYVNYIFSKAEAKFTQTEKLLTTMHKGLIKAMDLAMGQEILVYSPIVSMTKIQRTPLPERKALPVRWITWMTYLEDPRIQFHYDKSLPELQQIPNVTEDVIAKTKHPSEFAMVFYTDGSAIKHPDVNKSHSAGMGIAQVQFIPEYKIVHQWSIPLGDHTAQLAEIAAVEFACKKALKISGPVLIVTDSFYVAESANKELPYWKSNGFLNNKKKPLRHVSKWKSIAECLQLKPDIIIMHEKGHQQPMTTLHTEGNNLADKLATQGSYVVHAGKRTADGSEFEKRTADGSEFESPKKKAKVE

SEQ ID NO: 467 - protein, 2177 aa, synthetic construct
MPAAKRVKLDGGDKKYSIGLDIGTNSVGWAVITDEYKVPSKKFKVLGNTDRHSIKKNLIGALLFDSGETAEATRLKRTARRRYTRRKNRICYLQEIFSNEMAKVDDSFFHRLEESFLVEEDKKHERHPIFGNIVDEVAYHEKYPTIYHLRKKLVDSTDKADLRLIYLALAHMIKFRGHFLIEGDLNPDNSDVDKLFIQLVQTYNQLFEENPINASGVDAKAILSARLSKSRRLENLIAQLPGEKKNGLFGNLIALSLGLTPNFKSNFDLAEDAKLQLSKDTYDDDLDNLLAQIGDQYADLFLAAKNLSDAILLSDILRVNTEITKAPLSASMIKRYDEHHQDLTLLKALVRQQLPEKYKEIFFDQSKNGYAGYIDGGASQEEFYKFIKPILEKMDGTEELLVKLNREDLLRKQRTFDNGSIPHQIHLGELHAILRRQEDFYPFLKDNREKIEKILTFRIPYYVGPLARGNSRFAWMTRKSEETITPWNFEEVVDKGASAQSFIERMTNFDKNLPNEKVLPKHSLLYEYFTVYNELTKVKYVTEGMRKPAFLSGEQKKAIVDLLFKTNRKVTVKQLKEDYFKKIECFDSVEISGVEDRFNASLGTYHDLLKIIKDKDFLDNEENEDILEDIVLTLTLFEDREMIEERLKTYAHLFDDKVMKQLKRRRYTGWGRLSRKLINGIRDKQSGKTILDFLKSDGFANRNFMQLIHDDSLTFKEDIQKAQVSGQGDSLHEHIANLAGSPAIKKGILQTVKVVDELVKVMGRHKPENIVIEMARENQTTQKGQKNSRERMKRIEEGIKELGSQILKEHPVENTQLQNEKLYLYYLQNGRDMYVDQELDINRLSDYDVDHIVPQSFLKDDSIDNKVLTRSDKARGKSDNVPSEEVVKKMKNYWRQLLNAKLITQRKFDNLTKAERGGLSELDKAGFIKRQLVETRQITKHVAQILDSRMNTKYDENDKLIREVKVITLKSKLVSDFRKDFQFYKVREINNYHHAHDAYLNAVVGTALIKKYPKLESEFVYGDYKVYDVRKMIAKSEQEIGKATAKYFFYSNIMNFFKTEITLANGEIRKRPLIETNGETGEIVWDKGRDFATVRKVLSMPQVNIVKKTEVQTGGFSKESILPKRNSDKLIARKKDWDPKKYGGFDSPTVAYSVLVVAKVEKGKSKKLKSVKELLGITIMERSSFEKNPIDFLEAKGYKEVKKDLIIKLPKYSLFELENGRKRMLASAGELQKGNELALPSKYVNFLYLASHYEKLKGSPEDNEQKQLFVEQHKHYLDEIIEQISEFSKRVILADANLDKVLSAYNKHRDKPIREQAENIIHLFTLTNLGAPAAFKYFDTTIDRKRYTSTKEVLDATLIHQSITGLYETRIDLSQLGGDGGGSSGSSGSSGSSGGMDPLQLLQPLEAEIKGTKLKAHWNSGATITCVPEAFLEDERPIQTMLIKTIHGEKQQDVYYLTFKVQGRKVEAEVLASPYDYILLNPSDVPWLMKKPLQLTVLVPLHEYQERLLQQTALPKEQKELLQKLFLKYDALWQHWENQVGHRRIKPHNIATGTLAPRPQKQYPINPKAKPSIQIVIDDLLKQGVLIQQNSTMNTPVYPVPKPDGKWRMVLDYREVNKTIPLIAAQNQHSAGILSSIYRGKYKTTLDLTNGFWAHPITPESYWLTAFTWQGKQYCWTRLPQGFLNSPALFNADVVDLLKEIPNVQAYVDDIYISHDDPQEHLEQLEKIFSILLNAGYVVSLKKSEIAQREVEFLGFNITKEGRGLTDTFKQKLLNITPPKDLKQLQSILGLLNFARNFIPNYSELVKPLYTIVAPANGKFISWTEDNSNQLQHIISVLNQADNLEERNPETRLIIKVNSSPSAGYIRYYNEGSKRPIMYVNYIFSKAEAKFTQTEKLLTTMHKGLIKAMDLAMGQEILVYSPIVSMTKIQRTPLPERKALPVRWITWMTYLEDPRIQFHYDKSLPELQQIPNVTEDVIAKTKHPSEFAMVFYTDGSAIKHPDVNKSHSAGMGIAQVQFIPEYKIVHQWSIPLGDHTAQLAEIAAVEFACKKALKISGPVLIVTDSFYVAESANKELPYWKSNGFLNNKKKPLRHVSKWKSIAECLQLKPDIIIMHEKGHQQPMTTLHTEGNNLADKLATQGSYVVHAGKRTADGSEFEKRTADGSEFESPKKKAKVE

SEQ ID NO: 468 - protein, 2177 aa, synthetic construct
MPAAKRVKLDGGDKKYSIGLDIGTNSVGWAVITDEYKVPSKKFKVLGNTDRHSIKKNLIGALLFDSGETAEATRLKRTARRRYTRRKNRICYLQEIFSNEMAKVDDSFFHRLEESFLVEEDKKHERHPIFGNIVDEVAYHEKYPTIYHLRKKLVDSTDKADLRLIYLALAHMIKFRGHFLIEGDLNPDNSDVDKLFIQLVQTYNQLFEENPINASGVDAKAILSARLSKSRRLENLIAQLPGEKKNGLFGNLIALSLGLTPNFKSNFDLAEDAKLQLSKDTYDDDLDNLLAQIGDQYADLFLAAKNLSDAILLSDILRVNTEITKAPLSASMIKRYDEHHQDLTLLKALVRQQLPEKYKEIFFDQSKNGYAGYIDGGASQEEFYKFIKPILEKMDGTEELLVKLNREDLLRKQRTFDNGSIPHQIHLGELHAILRRQEDFYPFLKDNREKIEKILTFRIPYYVGPLARGNSRFAWMTRKSEETITPWNFEEVVDKGASAQSFIERMTNFDKNLPNEKVLPKHSLLYEYFTVYNELTKVKYVTEGMRKPAFLSGEQKKAIVDLLFKTNRKVTVKQLKEDYFKKIECFDSVEISGVEDRFNASLGTYHDLLKIIKDKDFLDNEENEDILEDIVLTLTLFEDREMIEERLKTYAHLFDDKVMKQLKRRRYTGWGRLSRKLINGIRDKQSGKTILDFLKSDGFANRNFMQLIHDDSLTFKEDIQKAQVSGQGDSLHEHIANLAGSPAIKKGILQTVKVVDELVKVMGRHKPENIVIEMARENQTTQKGQKNSRERMKRIEEGIKELGSQILKEHPVENTQLQNEKLYLYYLQNGRDMYVDQELDINRLSDYDVDHIVPQSFLKDDSIDNKVLTRSDKARGKSDNVPSEEVVKKMKNYWRQLLNAKLITQRKFDNLTKAERGGLSELDKAGFIKRQLVETRQITKHVAQILDSRMNTKYDENDKLIREVKVITLKSKLVSDFRKDFQFYKVREINNYHHAHDAYLNAVVGTALIKKYPKLESEFVYGDYKVYDVRKMIAKSEQEIGKATAKYFFYSNIMNFFKTEITLANGEIRKRPLIETNGETGEIVWDKGRDFATVRKVLSMPQVNIVKKTEVQTGGFSKESILPKRNSDKLIARKKDWDPKKYGGFDSPTVAYSVLVVAKVEKGKSKKLKSVKELLGITIMERSSFEKNPIDFLEAKGYKEVKKDLIIKLPKYSLFELENGRKRMLASAGELQKGNELALPSKYVNFLYLASHYEKLKGSPEDNEQKQLFVEQHKHYLDEIIEQISEFSKRVILADANLDKVLSAYNKHRDKPIREQAENIIHLFTLTNLGAPAAFKYFDTTIDRKRYTSTKEVLDATLIHQSITGLYETRIDLSQLGGDGGGSAGSAAGSGEFGGMDPLQLLQPLEAEIKGTKLKAHWNSGATITCVPEAFLEDERPIQTMLIKTIHGEKQQDVYYLTFKVQGRKVEAEVLASPYDYILLNPSDVPWLMKKPLQLTVLVPLHEYQERLLQQTALPKEQKELLQKLFLKYDALWQHWENQVGHRRIKPHNIATGTLAPRPQKQYPINPKAKPSIQIVIDDLLKQGVLIQQNSTMNTPVYPVPKPDGKWRMVLDYREVNKTIPLIAAQNQHSAGILSSIYRGKYKTTLDLTNGFWAHPITPESYWLTAFTWQGKQYCWTRLPQGFLNSPALFNADVVDLLKEIPNVQAYVDDIYISHDDPQEHLEQLEKIFSILLNAGYVVSLKKSEIAQREVEFLGFNITKEGRGLTDTFKQKLLNITPPKDLKQLQSILGLLNFARNFIPNYSELVKPLYTIVAPANGKFISWTEDNSNQLQHIISVLNQADNLEERNPETRLIIKVNSSPSAGYIRYYNEGSKRPIMYVNYIFSKAEAKFTQTEKLLTTMHKGLIKAMDLAMGQEILVYSPIVSMTKIQRTPLPERKALPVRWITWMTYLEDPRIQFHYDKSLPELQQIPNVTEDVIAKTKHPSEFAMVFYTDGSAIKHPDVNKSHSAGMGIAQVQFIPEYKIVHQWSIPLGDHTAQLAEIAAVEFACKKALKISGPVLIVTDSFYVAESANKELPYWKSNGFLNNKKKPLRHVSKWKSIAECLQLKPDIIIMHEKGHQQPMTTLHTEGNNLADKLATQGSYVVHAGKRTADGSEFEKRTADGSEFESPKKKAKVE

SEQ ID NO: 469 - protein, 2171 aa, synthetic construct
MPAAKRVKLDGGDKKYSIGLDIGTNSVGWAVITDEYKVPSKKFKVLGNTDRHSIKKNLIGALLFDSGETAEATRLKRTARRRYTRRKNRICYLQEIFSNEMAKVDDSFFHRLEESFLVEEDKKHERHPIFGNIVDEVAYHEKYPTIYHLRKKLVDSTDKADLRLIYLALAHMIKFRGHFLIEGDLNPDNSDVDKLFIQLVQTYNQLFEENPINASGVDAKAILSARLSKSRRLENLIAQLPGEKKNGLFGNLIALSLGLTPNFKSNFDLAEDAKLQLSKDTYDDDLDNLLAQIGDQYADLFLAAKNLSDAILLSDILRVNTEITKAPLSASMIKRYDEHHQDLTLLKALVRQQLPEKYKEIFFDQSKNGYAGYIDGGASQEEFYKFIKPILEKMDGTEELLVKLNREDLLRKQRTFDNGSIPHQIHLGELHAILRRQEDFYPFLKDNREKIEKILTFRIPYYVGPLARGNSRFAWMTRKSEETITPWNFEEVVDKGASAQSFIERMTNFDKNLPNEKVLPKHSLLYEYFTVYNELTKVKYVTEGMRKPAFLSGEQKKAIVDLLFKTNRKVTVKQLKEDYFKKIECFDSVEISGVEDRFNASLGTYHDLLKIIKDKDFLDNEENEDILEDIVLTLTLFEDREMIEERLKTYAHLFDDKVMKQLKRRRYTGWGRLSRKLINGIRDKQSGKTILDFLKSDGFANRNFMQLIHDDSLTFKEDIQKAQVSGQGDSLHEHIANLAGSPAIKKGILQTVKVVDELVKVMGRHKPENIVIEMARENQTTQKGQKNSRERMKRIEEGIKELGSQILKEHPVENTQLQNEKLYLYYLQNGRDMYVDQELDINRLSDYDVDHIVPQSFLKDDSIDNKVLTRSDKARGKSDNVPSEEVVKKMKNYWRQLLNAKLITQRKFDNLTKAERGGLSELDKAGFIKRQLVETRQITKHVAQILDSRMNTKYDENDKLIREVKVITLKSKLVSDFRKDFQFYKVREINNYHHAHDAYLNAVVGTALIKKYPKLESEFVYGDYKVYDVRKMIAKSEQEIGKATAKYFFYSNIMNFFKTEITLANGEIRKRPLIETNGETGEIVWDKGRDFATVRKVLSMPQVNIVKKTEVQTGGFSKESILPKRNSDKLIARKKDWDPKKYGGFDSPTVAYSVLVVAKVEKGKSKKLKSVKELLGITIMERSSFEKNPIDFLEAKGYKEVKKDLIIKLPKYSLFELENGRKRMLASAGELQKGNELALPSKYVNFLYLASHYEKLKGSPEDNEQKQLFVEQHKHYLDEIIEQISEFSKRVILADANLDKVLSAYNKHRDKPIREQAENIIHLFTLTNLGAPAAFKYFDTTIDRKRYTSTKEVLDATLIHQSITGLYETRIDLSQLGGDGGGGSGGSGGMDPLQLLQPLEAEIKGTKLKAHWNSGATITCVPEAFLEDERPIQTMLIKTIHGEKQQDVYYLTFKVQGRKVEAEVLASPYDYILLNPSDVPWLMKKPLQLTVLVPLHEYQERLLQQTALPKEQKELLQKLFLKYDALWQHWENQVGHRRIKPHNIATGTLAPRPQKQYPINPKAKPSIQIVIDDLLKQGVLIQQNSTMNTPVYPVPKPDGKWRMVLDYREVNKTIPLIAAQNQHSAGILSSIYRGKYKTTLDLTNGFWAHPITPESYWLTAFTWQGKQYCWTRLPQGFLNSPALFNADVVDLLKEIPNVQAYVDDIYISHDDPQEHLEQLEKIFSILLNAGYVVSLKKSEIAQREVEFLGFNITKEGRGLTDTFKQKLLNITPPKDLKQLQSILGLLNFARNFIPNYSELVKPLYTIVAPANGKFISWTEDNSNQLQHIISVLNQADNLEERNPETRLIIKVNSSPSAGYIRYYNEGSKRPIMYVNYIFSKAEAKFTQTEKLLTTMHKGLIKAMDLAMGQEILVYSPIVSMTKIQRTPLPERKALPVRWITWMTYLEDPRIQFHYDKSLPELQQIPNVTEDVIAKTKHPSEFAMVFYTDGSAIKHPDVNKSHSAGMGIAQVQFIPEYKIVHQWSIPLGDHTAQLAEIAAVEFACKKALKISGPVLIVTDSFYVAESANKELPYWKSNGFLNNKKKPLRHVSKWKSIAECLQLKPDIIIMHEKGHQQPMTTLHTEGNNLADKLATQGSYVVHAGKRTADGSEFEKRTADGSEFESPKKKAKVE

SEQ ID NO: 470 - protein, 2176 aa, synthetic construct
MPAAKRVKLDGGDKKYSIGLDIGTNSVGWAVITDEYKVPSKKFKVLGNTDRHSIKKNLIGALLFDSGETAEATRLKRTARRRYTRRKNRICYLQEIFSNEMAKVDDSFFHRLEESFLVEEDKKHERHPIFGNIVDEVAYHEKYPTIYHLRKKLVDSTDKADLRLIYLALAHMIKFRGHFLIEGDLNPDNSDVDKLFIQLVQTYNQLFEENPINASGVDAKAILSARLSKSRRLENLIAQLPGEKKNGLFGNLIALSLGLTPNFKSNFDLAEDAKLQLSKDTYDDDLDNLLAQIGDQYADLFLAAKNLSDAILLSDILRVNTEITKAPLSASMIKRYDEHHQDLTLLKALVRQQLPEKYKEIFFDQSKNGYAGYIDGGASQEEFYKFIKPILEKMDGTEELLVKLNREDLLRKQRTFDNGSIPHQIHLGELHAILRRQEDFYPFLKDNREKIEKILTFRIPYYVGPLARGNSRFAWMTRKSEETITPWNFEEVVDKGASAQSFIERMTNFDKNLPNEKVLPKHSLLYEYFTVYNELTKVKYVTEGMRKPAFLSGEQKKAIVDLLFKTNRKVTVKQLKEDYFKKIECFDSVEISGVEDRFNASLGTYHDLLKIIKDKDFLDNEENEDILEDIVLTLTLFEDREMIEERLKTYAHLFDDKVMKQLKRRRYTGWGRLSRKLINGIRDKQSGKTILDFLKSDGFANRNFMQLIHDDSLTFKEDIQKAQVSGQGDSLHEHIANLAGSPAIKKGILQTVKVVDELVKVMGRHKPENIVIEMARENQTTQKGQKNSRERMKRIEEGIKELGSQILKEHPVENTQLQNEKLYLYYLQNGRDMYVDQELDINRLSDYDVDHIVPQSFLKDDSIDNKVLTRSDKARGKSDNVPSEEVVKKMKNYWRQLLNAKLITQRKFDNLTKAERGGLSELDKAGFIKRQLVETRQITKHVAQILDSRMNTKYDENDKLIREVKVITLKSKLVSDFRKDFQFYKVREINNYHHAHDAYLNAVVGTALIKKYPKLESEFVYGDYKVYDVRKMIAKSEQEIGKATAKYFFYSNIMNFFKTEITLANGEIRKRPLIETNGETGEIVWDKGRDFATVRKVLSMPQVNIVKKTEVQTGGFSKESILPKRNSDKLIARKKDWDPKKYGGFDSPTVAYSVLVVAKVEKGKSKKLKSVKELLGITIMERSSFEKNPIDFLEAKGYKEVKKDLIIKLPKYSLFELENGRKRMLASAGELQKGNELALPSKYVNFLYLASHYEKLKGSPEDNEQKQLFVEQHKHYLDEIIEQISEFSKRVILADANLDKVLSAYNKHRDKPIREQAENIIHLFTLTNLGAPAAFKYFDTTIDRKRYTSTKEVLDATLIHQSITGLYETRIDLSQLGGDGGGGGEAAAKGGSGGMDPLQLLQPLEAEIKGTKLKAHWNSGATITCVPEAFLEDERPIQTMLIKTIHGEKQQDVYYLTFKVQGRKVEAEVLASPYDYILLNPSDVPWLMKKPLQLTVLVPLHEYQERLLQQTALPKEQKELLQKLFLKYDALWQHWENQVGHRRIKPHNIATGTLAPRPQKQYPINPKAKPSIQIVIDDLLKQGVLIQQNSTMNTPVYPVPKPDGKWRMVLDYREVNKTIPLIAAQNQHSAGILSSIYRGKYKTTLDLTNGFWAHPITPESYWLTAFTWQGKQYCWTRLPQGFLNSPALFNADVVDLLKEIPNVQAYVDDIYISHDDPQEHLEQLEKIFSILLNAGYVVSLKKSEIAQREVEFLGFNITKEGRGLTDTFKQKLLNITPPKDLKQLQSILGLLNFARNFIPNYSELVKPLYTIVAPANGKFISWTEDNSNQLQHIISVLNQADNLEERNPETRLIIKVNSSPSAGYIRYYNEGSKRPIMYVNYIFSKAEAKFTQTEKLLTTMHKGLIKAMDLAMGQEILVYSPIVSMTKIQRTPLPERKALPVRWITWMTYLEDPRIQFHYDKSLPELQQIPNVTEDVIAKTKHPSEFAMVFYTDGSAIKHPDVNKSHSAGMGIAQVQFIPEYKIVHQWSIPLGDHTAQLAEIAAVEFACKKALKISGPVLIVTDSFYVAESANKELPYWKSNGFLNNKKKPLRHVSKWKSIAECLQLKPDIIIMHEKGHQQPMTTLHTEGNNLADKLATQGSYVVHAGKRTADGSEFEKRTADGSEFESPKKKAKVE

SEQ ID NO: 471 - protein, 2174 aa, synthetic construct
MPAAKRVKLDGGDKKYSIGLDIGTNSVGWAVITDEYKVPSKKFKVLGNTDRHSIKKNLIGALLFDSGETAEATRLKRTARRRYTRRKNRICYLQEIFSNEMAKVDDSFFHRLEESFLVEEDKKHERHPIFGNIVDEVAYHEKYPTIYHLRKKLVDSTDKADLRLIYLALAHMIKFRGHFLIEGDLNPDNSDVDKLFIQLVQTYNQLFEENPINASGVDAKAILSARLSKSRRLENLIAQLPGEKKNGLFGNLIALSLGLTPNFKSNFDLAEDAKLQLSKDTYDDDLDNLLAQIGDQYADLFLAAKNLSDAILLSDILRVNTEITKAPLSASMIKRYDEHHQDLTLLKALVRQQLPEKYKEIFFDQSKNGYAGYIDGGASQEEFYKFIKPILEKMDGTEELLVKLNREDLLRKQRTFDNGSIPHQIHLGELHAILRRQEDFYPFLKDNREKIEKILTFRIPYYVGPLARGNSRFAWMTRKSEETITPWNFEEVVDKGASAQSFIERMTNFDKNLPNEKVLPKHSLLYEYFTVYNELTKVKYVTEGMRKPAFLSGEQKKAIVDLLFKTNRKVTVKQLKEDYFKKIECFDSVEISGVEDRFNASLGTYHDLLKIIKDKDFLDNEENEDILEDIVLTLTLFEDREMIEERLKTYAHLFDDKVMKQLKRRRYTGWGRLSRKLINGIRDKQSGKTILDFLKSDGFANRNFMQLIHDDSLTFKEDIQKAQVSGQGDSLHEHIANLAGSPAIKKGILQTVKVVDELVKVMGRHKPENIVIEMARENQTTQKGQKNSRERMKRIEEGIKELGSQILKEHPVENTQLQNEKLYLYYLQNGRDMYVDQELDINRLSDYDVDHIVPQSFLKDDSIDNKVLTRSDKARGKSDNVPSEEVVKKMKNYWRQLLNAKLITQRKFDNLTKAERGGLSELDKAGFIKRQLVETRQITKHVAQILDSRMNTKYDENDKLIREVKVITLKSKLVSDFRKDFQFYKVREINNYHHAHDAYLNAVVGTALIKKYPKLESEFVYGDYKVYDVRKMIAKSEQEIGKATAKYFFYSNIMNFFKTEITLANGEIRKRPLIETNGETGEIVWDKGRDFATVRKVLSMPQVNIVKKTEVQTGGFSKESILPKRNSDKLIARKKDWDPKKYGGFDSPTVAYSVLVVAKVEKGKSKKLKSVKELLGITIMERSSFEKNPIDFLEAKGYKEVKKDLIIKLPKYSLFELENGRKRMLASAGELQKGNELALPSKYVNFLYLASHYEKLKGSPEDNEQKQLFVEQHKHYLDEIIEQISEFSKRVILADANLDKVLSAYNKHRDKPIREQAENIIHLFTLTNLGAPAAFKYFDTTIDRKRYTSTKEVLDATLIHQSITGLYETRIDLSQLGGDGGPAPAPAPAPGGMDPLQLLQPLEAEIKGTKLKAHWNSGATITCVPEAFLEDERPIQTMLIKTIHGEKQQDVYYLTFKVQGRKVEAEVLASPYDYILLNPSDVPWLMKKPLQLTVLVPLHEYQERLLQQTALPKEQKELLQKLFLKYDALWQHWENQVGHRRIKPHNIATGTLAPRPQKQYPINPKAKPSIQIVIDDLLKQGVLIQQNSTMNTPVYPVPKPDGKWRMVLDYREVNKTIPLIAAQNQHSAGILSSIYRGKYKTTLDLTNGFWAHPITPESYWLTAFTWQGKQYCWTRLPQGFLNSPALFNADVVDLLKEIPNVQAYVDDIYISHDDPQEHLEQLEKIFSILLNAGYVVSLKKSEIAQREVEFLGFNITKEGRGLTDTFKQKLLNITPPKDLKQLQSILGLLNFARNFIPNYSELVKPLYTIVAPANGKFISWTEDNSNQLQHIISVLNQADNLEERNPETRLIIKVNSSPSAGYIRYYNEGSKRPIMYVNYIFSKAEAKFTQTEKLLTTMHKGLIKAMDLAMGQEILVYSPIVSMTKIQRTPLPERKALPVRWITWMTYLEDPRIQFHYDKSLPELQQIPNVTEDVIAKTKHPSEFAMVFYTDGSAIKHPDVNKSHSAGMGIAQVQFIPEYKIVHQWSIPLGDHTAQLAEIAAVEFACKKALKISGPVLIVTDSFYVAESANKELPYWKSNGFLNNKKKPLRHVSKWKSIAECLQLKPDIIIMHEKGHQQPMTTLHTEGNNLADKLATQGSYVVHAGKRTADGSEFEKRTADGSEFESPKKKAKVE

SEQ ID NO: 472 - protein, 2174 aa, synthetic construct
MPAAKRVKLDGGDKKYSIGLDIGTNSVGWAVITDEYKVPSKKFKVLGNTDRHSIKKNLIGALLFDSGETAEATRLKRTARRRYTRRKNRICYLQEIFSNEMAKVDDSFFHRLEESFLVEEDKKHERHPIFGNIVDEVAYHEKYPTIYHLRKKLVDSTDKADLRLIYLALAHMIKFRGHFLIEGDLNPDNSDVDKLFIQLVQTYNQLFEENPINASGVDAKAILSARLSKSRRLENLIAQLPGEKKNGLFGNLIALSLGLTPNFKSNFDLAEDAKLQLSKDTYDDDLDNLLAQIGDQYADLFLAAKNLSDAILLSDILRVNTEITKAPLSASMIKRYDEHHQDLTLLKALVRQQLPEKYKEIFFDQSKNGYAGYIDGGASQEEFYKFIKPILEKMDGTEELLVKLNREDLLRKQRTFDNGSIPHQIHLGELHAILRRQEDFYPFLKDNREKIEKILTFRIPYYVGPLARGNSRFAWMTRKSEETITPWNFEEVVDKGASAQSFIERMTNFDKNLPNEKVLPKHSLLYEYFTVYNELTKVKYVTEGMRKPAFLSGEQKKAIVDLLFKTNRKVTVKQLKEDYFKKIECFDSVEISGVEDRFNASLGTYHDLLKIIKDKDFLDNEENEDILEDIVLTLTLFEDREMIEERLKTYAHLFDDKVMKQLKRRRYTGWGRLSRKLINGIRDKQSGKTILDFLKSDGFANRNFMQLIHDDSLTFKEDIQKAQVSGQGDSLHEHIANLAGSPAIKKGILQTVKVVDELVKVMGRHKPENIVIEMARENQTTQKGQKNSRERMKRIEEGIKELGSQILKEHPVENTQLQNEKLYLYYLQNGRDMYVDQELDINRLSDYDVDHIVPQSFLKDDSIDNKVLTRSDKARGKSDNVPSEEVVKKMKNYWRQLLNAKLITQRKFDNLTKAERGGLSELDKAGFIKRQLVETRQITKHVAQILDSRMNTKYDENDKLIREVKVITLKSKLVSDFRKDFQFYKVREINNYHHAHDAYLNAVVGTALIKKYPKLESEFVYGDYKVYDVRKMIAKSEQEIGKATAKYFFYSNIMNFFKTEITLANGEIRKRPLIETNGETGEIVWDKGRDFATVRKVLSMPQVNIVKKTEVQTGGFSKESILPKRNSDKLIARKKDWDPKKYGGFDSPTVAYSVLVVAKVEKGKSKKLKSVKELLGITIMERSSFEKNPIDFLEAKGYKEVKKDLIIKLPKYSLFELENGRKRMLASAGELQKGNELALPSKYVNFLYLASHYEKLKGSPEDNEQKQLFVEQHKHYLDEIIEQISEFSKRVILADANLDKVLSAYNKHRDKPIREQAENIIHLFTLTNLGAPAAFKYFDTTIDRKRYTSTKEVLDATLIHQSITGLYETRIDLSQLGGDGGGSSGGSGGGGGMDPLQLLQPLEAEIKGTKLKAHWNSGATITCVPEAFLEDERPIQTMLIKTIHGEKQQDVYYLTFKVQGRKVEAEVLASPYDYILLNPSDVPWLMKKPLQLTVLVPLHEYQERLLQQTALPKEQKELLQKLFLKYDALWQHWENQVGHRRIKPHNIATGTLAPRPQKQYPINPKAKPSIQIVIDDLLKQGVLIQQNSTMNTPVYPVPKPDGKWRMVLDYREVNKTIPLIAAQNQHSAGILSSIYRGKYKTTLDLTNGFWAHPITPESYWLTAFTWQGKQYCWTRLPQGFLNSPALFNADVVDLLKEIPNVQAYVDDIYISHDDPQEHLEQLEKIFSILLNAGYVVSLKKSEIAQREVEFLGFNITKEGRGLTDTFKQKLLNITPPKDLKQLQSILGLLNFARNFIPNYSELVKPLYTIVAPANGKFISWTEDNSNQLQHIISVLNQADNLEERNPETRLIIKVNSSPSAGYIRYYNEGSKRPIMYVNYIFSKAEAKFTQTEKLLTTMHKGLIKAMDLAMGQEILVYSPIVSMTKIQRTPLPERKALPVRWITWMTYLEDPRIQFHYDKSLPELQQIPNVTEDVIAKTKHPSEFAMVFYTDGSAIKHPDVNKSHSAGMGIAQVQFIPEYKIVHQWSIPLGDHTAQLAEIAAVEFACKKALKISGPVLIVTDSFYVAESANKELPYWKSNGFLNNKKKPLRHVSKWKSIAECLQLKPDIIIMHEKGHQQPMTTLHTEGNNLADKLATQGSYVVHAGKRTADGSEFEKRTADGSEFESPKKKAKVE

SEQ ID NO: 473 - protein, 2174 aa, synthetic construct
MPAAKRVKLDGGDKKYSIGLDIGTNSVGWAVITDEYKVPSKKFKVLGNTDRHSIKKNLIGALLFDSGETAEATRLKRTARRRYTRRKNRICYLQEIFSNEMAKVDDSFFHRLEESFLVEEDKKHERHPIFGNIVDEVAYHEKYPTIYHLRKKLVDSTDKADLRLIYLALAHMIKFRGHFLIEGDLNPDNSDVDKLFIQLVQTYNQLFEENPINASGVDAKAILSARLSKSRRLENLIAQLPGEKKNGLFGNLIALSLGLTPNFKSNFDLAEDAKLQLSKDTYDDDLDNLLAQIGDQYADLFLAAKNLSDAILLSDILRVNTEITKAPLSASMIKRYDEHHQDLTLLKALVRQQLPEKYKEIFFDQSKNGYAGYIDGGASQEEFYKFIKPILEKMDGTEELLVKLNREDLLRKQRTFDNGSIPHQIHLGELHAILRRQEDFYPFLKDNREKIEKILTFRIPYYVGPLARGNSRFAWMTRKSEETITPWNFEEVVDKGASAQSFIERMTNFDKNLPNEKVLPKHSLLYEYFTVYNELTKVKYVTEGMRKPAFLSGEQKKAIVDLLFKTNRKVTVKQLKEDYFKKIECFDSVEISGVEDRFNASLGTYHDLLKIIKDKDFLDNEENEDILEDIVLTLTLFEDREMIEERLKTYAHLFDDKVMKQLKRRRYTGWGRLSRKLINGIRDKQSGKTILDFLKSDGFANRNFMQLIHDDSLTFKEDIQKAQVSGQGDSLHEHIANLAGSPAIKKGILQTVKVVDELVKVMGRHKPENIVIEMARENQTTQKGQKNSRERMKRIEEGIKELGSQILKEHPVENTQLQNEKLYLYYLQNGRDMYVDQELDINRLSDYDVDHIVPQSFLKDDSIDNKVLTRSDKARGKSDNVPSEEVVKKMKNYWRQLLNAKLITQRKFDNLTKAERGGLSELDKAGFIKRQLVETRQITKHVAQILDSRMNTKYDENDKLIREVKVITLKSKLVSDFRKDFQFYKVREINNYHHAHDAYLNAVVGTALIKKYPKLESEFVYGDYKVYDVRKMIAKSEQEIGKATAKYFFYSNIMNFFKTEITLANGEIRKRPLIETNGETGEIVWDKGRDFATVRKVLSMPQVNIVKKTEVQTGGFSKESILPKRNSDKLIARKKDWDPKKYGGFDSPTVAYSVLVVAKVEKGKSKKLKSVKELLGITIMERSSFEKNPIDFLEAKGYKEVKKDLIIKLPKYSLFELENGRKRMLASAGELQKGNELALPSKYVNFLYLASHYEKLKGSPEDNEQKQLFVEQHKHYLDEIIEQISEFSKRVILADANLDKVLSAYNKHRDKPIREQAENIIHLFTLTNLGAPAAFKYFDTTIDRKRYTSTKEVLDATLIHQSITGLYETRIDLSQLGGDGGPAPGSSGGSGGMDPLQLLQPLEAEIKGTKLKAHWNSGATITCVPEAFLEDERPIQTMLIKTIHGEKQQDVYYLTFKVQGRKVEAEVLASPYDYILLNPSDVPWLMKKPLQLTVLVPLHEYQERLLQQTALPKEQKELLQKLFLKYDALWQHWENQVGHRRIKPHNIATGTLAPRPQKQYPINPKAKPSIQIVIDDLLKQGVLIQQNSTMNTPVYPVPKPDGKWRMVLDYREVNKTIPLIAAQNQHSAGILSSIYRGKYKTTLDLTNGFWAHPITPESYWLTAFTWQGKQYCWTRLPQGFLNSPALFNADVVDLLKEIPNVQAYVDDIYISHDDPQEHLEQLEKIFSILLNAGYVVSLKKSEIAQREVEFLGFNITKEGRGLTDTFKQKLLNITPPKDLKQLQSILGLLNFARNFIPNYSELVKPLYTIVAPANGKFISWTEDNSNQLQHIISVLNQADNLEERNPETRLIIKVNSSPSAGYIRYYNEGSKRPIMYVNYIFSKAEAKFTQTEKLLTTMHKGLIKAMDLAMGQEILVYSPIVSMTKIQRTPLPERKALPVRWITWMTYLEDPRIQFHYDKSLPELQQIPNVTEDVIAKTKHPSEFAMVFYTDGSAIKHPDVNKSHSAGMGIAQVQFIPEYKIVHQWSIPLGDHTAQLAEIAAVEFACKKALKISGPVLIVTDSFYVAESANKELPYWKSNGFLNNKKKPLRHVSKWKSIAECLQLKPDIIIMHEKGHQQPMTTLHTEGNNLADKLATQGSYVVHAGKRTADGSEFEKRTADGSEFESPKKKAKVE

SEQ ID NO: 474 - protein, 2176 aa, synthetic construct
MPAAKRVKLDGGDKKYSIGLDIGTNSVGWAVITDEYKVPSKKFKVLGNTDRHSIKKNLIGALLFDSGETAEATRLKRTARRRYTRRKNRICYLQEIFSNEMAKVDDSFFHRLEESFLVEEDKKHERHPIFGNIVDEVAYHEKYPTIYHLRKKLVDSTDKADLRLIYLALAHMIKFRGHFLIEGDLNPDNSDVDKLFIQLVQTYNQLFEENPINASGVDAKAILSARLSKSRRLENLIAQLPGEKKNGLFGNLIALSLGLTPNFKSNFDLAEDAKLQLSKDTYDDDLDNLLAQIGDQYADLFLAAKNLSDAILLSDILRVNTEITKAPLSASMIKRYDEHHQDLTLLKALVRQQLPEKYKEIFFDQSKNGYAGYIDGGASQEEFYKFIKPILEKMDGTEELLVKLNREDLLRKQRTFDNGSIPHQIHLGELHAILRRQEDFYPFLKDNREKIEKILTFRIPYYVGPLARGNSRFAWMTRKSEETITPWNFEEVVDKGASAQSFIERMTNFDKNLPNEKVLPKHSLLYEYFTVYNELTKVKYVTEGMRKPAFLSGEQKKAIVDLLFKTNRKVTVKQLKEDYFKKIECFDSVEISGVEDRFNASLGTYHDLLKIIKDKDFLDNEENEDILEDIVLTLTLFEDREMIEERLKTYAHLFDDKVMKQLKRRRYTGWGRLSRKLINGIRDKQSGKTILDFLKSDGFANRNFMQLIHDDSLTFKEDIQKAQVSGQGDSLHEHIANLAGSPAIKKGILQTVKVVDELVKVMGRHKPENIVIEMARENQTTQKGQKNSRERMKRIEEGIKELGSQILKEHPVENTQLQNEKLYLYYLQNGRDMYVDQELDINRLSDYDVDHIVPQSFLKDDSIDNKVLTRSDKARGKSDNVPSEEVVKKMKNYWRQLLNAKLITQRKFDNLTKAERGGLSELDKAGFIKRQLVETRQITKHVAQILDSRMNTKYDENDKLIREVKVITLKSKLVSDFRKDFQFYKVREINNYHHAHDAYLNAVVGTALIKKYPKLESEFVYGDYKVYDVRKMIAKSEQEIGKATAKYFFYSNIMNFFKTEITLANGEIRKRPLIETNGETGEIVWDKGRDFATVRKVLSMPQVNIVKKTEVQTGGFSKESILPKRNSDKLIARKKDWDPKKYGGFDSPTVAYSVLVVAKVEKGKSKKLKSVKELLGITIMERSSFEKNPIDFLEAKGYKEVKKDLIIKLPKYSLFELENGRKRMLASAGELQKGNELALPSKYVNFLYLASHYEKLKGSPEDNEQKQLFVEQHKHYLDEIIEQISEFSKRVILADANLDKVLSAYNKHRDKPIREQAENIIHLFTLTNLGAPAAFKYFDTTIDRKRYTSTKEVLDATLIHQSITGLYETRIDLSQLGGDGGPAPGGSEAAAKGGMDPLQLLQPLEAEIKGTKLKAHWNSGATITCVPEAFLEDERPIQTMLIKTIHGEKQQDVYYLTFKVQGRKVEAEVLASPYDYILLNPSDVPWLMKKPLQLTVLVPLHEYQERLLQQTALPKEQKELLQKLFLKYDALWQHWENQVGHRRIKPHNIATGTLAPRPQKQYPINPKAKPSIQIVIDDLLKQGVLIQQNSTMNTPVYPVPKPDGKWRMVLDYREVNKTIPLIAAQNQHSAGILSSIYRGKYKTTLDLTNGFWAHPITPESYWLTAFTWQGKQYCWTRLPQGFLNSPALFNADVVDLLKEIPNVQAYVDDIYISHDDPQEHLEQLEKIFSILLNAGYVVSLKKSEIAQREVEFLGFNITKEGRGLTDTFKQKLLNITPPKDLKQLQSILGLLNFARNFIPNYSELVKPLYTIVAPANGKFISWTEDNSNQLQHIISVLNQADNLEERNPETRLIIKVNSSPSAGYIRYYNEGSKRPIMYVNYIFSKAEAKFTQTEKLLTTMHKGLIKAMDLAMGQEILVYSPIVSMTKIQRTPLPERKALPVRWITWMTYLEDPRIQFHYDKSLPELQQIPNVTEDVIAKTKHPSEFAMVFYTDGSAIKHPDVNKSHSAGMGIAQVQFIPEYKIVHQWSIPLGDHTAQLAEIAAVEFACKKALKISGPVLIVTDSFYVAESANKELPYWKSNGFLNNKKKPLRHVSKWKSIAECLQLKPDIIIMHEKGHQQPMTTLHTEGNNLADKLATQGSYVVHAGKRTADGSEFEKRTADGSEFESPKKKAKVE

SEQ ID NO: 475 - protein, 2176 aa, synthetic construct
MPAAKRVKLDGGDKKYSIGLDIGTNSVGWAVITDEYKVPSKKFKVLGNTDRHSIKKNLIGALLFDSGETAEATRLKRTARRRYTRRKNRICYLQEIFSNEMAKVDDSFFHRLEESFLVEEDKKHERHPIFGNIVDEVAYHEKYPTIYHLRKKLVDSTDKADLRLIYLALAHMIKFRGHFLIEGDLNPDNSDVDKLFIQLVQTYNQLFEENPINASGVDAKAILSARLSKSRRLENLIAQLPGEKKNGLFGNLIALSLGLTPNFKSNFDLAEDAKLQLSKDTYDDDLDNLLAQIGDQYADLFLAAKNLSDAILLSDILRVNTEITKAPLSASMIKRYDEHHQDLTLLKALVRQQLPEKYKEIFFDQSKNGYAGYIDGGASQEEFYKFIKPILEKMDGTEELLVKLNREDLLRKQRTFDNGSIPHQIHLGELHAILRRQEDFYPFLKDNREKIEKILTFRIPYYVGPLARGNSRFAWMTRKSEETITPWNFEEVVDKGASAQSFIERMTNFDKNLPNEKVLPKHSLLYEYFTVYNELTKVKYVTEGMRKPAFLSGEQKKAIVDLLFKTNRKVTVKQLKEDYFKKIECFDSVEISGVEDRFNASLGTYHDLLKIIKDKDFLDNEENEDILEDIVLTLTLFEDREMIEERLKTYAHLFDDKVMKQLKRRRYTGWGRLSRKLINGIRDKQSGKTILDFLKSDGFANRNFMQLIHDDSLTFKEDIQKAQVSGQGDSLHEHIANLAGSPAIKKGILQTVKVVDELVKVMGRHKPENIVIEMARENQTTQKGQKNSRERMKRIEEGIKELGSQILKEHPVENTQLQNEKLYLYYLQNGRDMYVDQELDINRLSDYDVDHIVPQSFLKDDSIDNKVLTRSDKARGKSDNVPSEEVVKKMKNYWRQLLNAKLITQRKFDNLTKAERGGLSELDKAGFIKRQLVETRQITKHVAQILDSRMNTKYDENDKLIREVKVITLKSKLVSDFRKDFQFYKVREINNYHHAHDAYLNAVVGTALIKKYPKLESEFVYGDYKVYDVRKMIAKSEQEIGKATAKYFFYSNIMNFFKTEITLANGEIRKRPLIETNGETGEIVWDKGRDFATVRKVLSMPQVNIVKKTEVQTGGFSKESILPKRNSDKLIARKKDWDPKKYGGFDSPTVAYSVLVVAKVEKGKSKKLKSVKELLGITIMERSSFEKNPIDFLEAKGYKEVKKDLIIKLPKYSLFELENGRKRMLASAGELQKGNELALPSKYVNFLYLASHYEKLKGSPEDNEQKQLFVEQHKHYLDEIIEQISEFSKRVILADANLDKVLSAYNKHRDKPIREQAENIIHLFTLTNLGAPAAFKYFDTTIDRKRYTSTKEVLDATLIHQSITGLYETRIDLSQLGGDGGEAAAKGGGGSSGGMDPLQLLQPLEAEIKGTKLKAHWNSGATITCVPEAFLEDERPIQTMLIKTIHGEKQQDVYYLTFKVQGRKVEAEVLASPYDYILLNPSDVPWLMKKPLQLTVLVPLHEYQERLLQQTALPKEQKELLQKLFLKYDALWQHWENQVGHRRIKPHNIATGTLAPRPQKQYPINPKAKPSIQIVIDDLLKQGVLIQQNSTMNTPVYPVPKPDGKWRMVLDYREVNKTIPLIAAQNQHSAGILSSIYRGKYKTTLDLTNGFWAHPITPESYWLTAFTWQGKQYCWTRLPQGFLNSPALFNADVVDLLKEIPNVQAYVDDIYISHDDPQEHLEQLEKIFSILLNAGYVVSLKKSEIAQREVEFLGFNITKEGRGLTDTFKQKLLNITPPKDLKQLQSILGLLNFARNFIPNYSELVKPLYTIVAPANGKFISWTEDNSNQLQHIISVLNQADNLEERNPETRLIIKVNSSPSAGYIRYYNEGSKRPIMYVNYIFSKAEAKFTQTEKLLTTMHKGLIKAMDLAMGQEILVYSPIVSMTKIQRTPLPERKALPVRWITWMTYLEDPRIQFHYDKSLPELQQIPNVTEDVIAKTKHPSEFAMVFYTDGSAIKHPDVNKSHSAGMGIAQVQFIPEYKIVHQWSIPLGDHTAQLAEIAAVEFACKKALKISGPVLIVTDSFYVAESANKELPYWKSNGFLNNKKKPLRHVSKWKSIAECLQLKPDIIIMHEKGHQQPMTTLHTEGNNLADKLATQGSYVVHAGKRTADGSEFEKRTADGSEFESPKKKAKVE

SEQ ID NO: 476 - protein, 2174 aa, synthetic construct
MPAAKRVKLDGGDKKYSIGLDIGTNSVGWAVITDEYKVPSKKFKVLGNTDRHSIKKNLIGALLFDSGETAEATRLKRTARRRYTRRKNRICYLQEIFSNEMAKVDDSFFHRLEESFLVEEDKKHERHPIFGNIVDEVAYHEKYPTIYHLRKKLVDSTDKADLRLIYLALAHMIKFRGHFLIEGDLNPDNSDVDKLFIQLVQTYNQLFEENPINASGVDAKAILSARLSKSRRLENLIAQLPGEKKNGLFGNLIALSLGLTPNFKSNFDLAEDAKLQLSKDTYDDDLDNLLAQIGDQYADLFLAAKNLSDAILLSDILRVNTEITKAPLSASMIKRYDEHHQDLTLLKALVRQQLPEKYKEIFFDQSKNGYAGYIDGGASQEEFYKFIKPILEKMDGTEELLVKLNREDLLRKQRTFDNGSIPHQIHLGELHAILRRQEDFYPFLKDNREKIEKILTFRIPYYVGPLARGNSRFAWMTRKSEETITPWNFEEVVDKGASAQSFIERMTNFDKNLPNEKVLPKHSLLYEYFTVYNELTKVKYVTEGMRKPAFLSGEQKKAIVDLLFKTNRKVTVKQLKEDYFKKIECFDSVEISGVEDRFNASLGTYHDLLKIIKDKDFLDNEENEDILEDIVLTLTLFEDREMIEERLKTYAHLFDDKVMKQLKRRRYTGWGRLSRKLINGIRDKQSGKTILDFLKSDGFANRNFMQLIHDDSLTFKEDIQKAQVSGQGDSLHEHIANLAGSPAIKKGILQTVKVVDELVKVMGRHKPENIVIEMARENQTTQKGQKNSRERMKRIEEGIKELGSQILKEHPVENTQLQNEKLYLYYLQNGRDMYVDQELDINRLSDYDVDHIVPQSFLKDDSIDNKVLTRSDKARGKSDNVPSEEVVKKMKNYWRQLLNAKLITQRKFDNLTKAERGGLSELDKAGFIKRQLVETRQITKHVAQILDSRMNTKYDENDKLIREVKVITLKSKLVSDFRKDFQFYKVREINNYHHAHDAYLNAVVGTALIKKYPKLESEFVYGDYKVYDVRKMIAKSEQEIGKATAKYFFYSNIMNFFKTEITLANGEIRKRPLIETNGETGEIVWDKGRDFATVRKVLSMPQVNIVKKTEVQTGGFSKESILPKRNSDKLIARKKDWDPKKYGGFDSPTVAYSVLVVAKVEKGKSKKLKSVKELLGITIMERSSFEKNPIDFLEAKGYKEVKKDLIIKLPKYSLFELENGRKRMLASAGELQKGNELALPSKYVNFLYLASHYEKLKGSPEDNEQKQLFVEQHKHYLDEIIEQISEFSKRVILADANLDKVLSAYNKHRDKPIREQAENIIHLFTLTNLGAPAAFKYFDTTIDRKRYTSTKEVLDATLIHQSITGLYETRIDLSQLGGDGGGSSGGGGGSGGMDPLQLLQPLEAEIKGTKLKAHWNSGATITCVPEAFLEDERPIQTMLIKTIHGEKQQDVYYLTFKVQGRKVEAEVLASPYDYILLNPSDVPWLMKKPLQLTVLVPLHEYQERLLQQTALPKEQKELLQKLFLKYDALWQHWENQVGHRRIKPHNIATGTLAPRPQKQYPINPKAKPSIQIVIDDLLKQGVLIQQNSTMNTPVYPVPKPDGKWRMVLDYREVNKTIPLIAAQNQHSAGILSSIYRGKYKTTLDLTNGFWAHPITPESYWLTAFTWQGKQYCWTRLPQGFLNSPALFNADVVDLLKEIPNVQAYVDDIYISHDDPQEHLEQLEKIFSILLNAGYVVSLKKSEIAQREVEFLGFNITKEGRGLTDTFKQKLLNITPPKDLKQLQSILGLLNFARNFIPNYSELVKPLYTIVAPANGKFISWTEDNSNQLQHIISVLNQADNLEERNPETRLIIKVNSSPSAGYIRYYNEGSKRPIMYVNYIFSKAEAKFTQTEKLLTTMHKGLIKAMDLAMGQEILVYSPIVSMTKIQRTPLPERKALPVRWITWMTYLEDPRIQFHYDKSLPELQQIPNVTEDVIAKTKHPSEFAMVFYTDGSAIKHPDVNKSHSAGMGIAQVQFIPEYKIVHQWSIPLGDHTAQLAEIAAVEFACKKALKISGPVLIVTDSFYVAESANKELPYWKSNGFLNNKKKPLRHVSKWKSIAECLQLKPDIIIMHEKGHQQPMTTLHTEGNNLADKLATQGSYVVHAGKRTADGSEFEKRTADGSEFESPKKKAKVE

SEQ ID NO: 477 - protein, 2171 aa, synthetic construct
MPAAKRVKLDGGDKKYSIGLDIGTNSVGWAVITDEYKVPSKKFKVLGNTDRHSIKKNLIGALLFDSGETAEATRLKRTARRRYTRRKNRICYLQEIFSNEMAKVDDSFFHRLEESFLVEEDKKHERHPIFGNIVDEVAYHEKYPTIYHLRKKLVDSTDKADLRLIYLALAHMIKFRGHFLIEGDLNPDNSDVDKLFIQLVQTYNQLFEENPINASGVDAKAILSARLSKSRRLENLIAQLPGEKKNGLFGNLIALSLGLTPNFKSNFDLAEDAKLQLSKDTYDDDLDNLLAQIGDQYADLFLAAKNLSDAILLSDILRVNTEITKAPLSASMIKRYDEHHQDLTLLKALVRQQLPEKYKEIFFDQSKNGYAGYIDGGASQEEFYKFIKPILEKMDGTEELLVKLNREDLLRKQRTFDNGSIPHQIHLGELHAILRRQEDFYPFLKDNREKIEKILTFRIPYYVGPLARGNSRFAWMTRKSEETITPWNFEEVVDKGASAQSFIERMTNFDKNLPNEKVLPKHSLLYEYFTVYNELTKVKYVTEGMRKPAFLSGEQKKAIVDLLFKTNRKVTVKQLKEDYFKKIECFDSVEISGVEDRFNASLGTYHDLLKIIKDKDFLDNEENEDILEDIVLTLTLFEDREMIEERLKTYAHLFDDKVMKQLKRRRYTGWGRLSRKLINGIRDKQSGKTILDFLKSDGFANRNFMQLIHDDSLTFKEDIQKAQVSGQGDSLHEHIANLAGSPAIKKGILQTVKVVDELVKVMGRHKPENIVIEMARENQTTQKGQKNSRERMKRIEEGIKELGSQILKEHPVENTQLQNEKLYLYYLQNGRDMYVDQELDINRLSDYDVDHIVPQSFLKDDSIDNKVLTRSDKARGKSDNVPSEEVVKKMKNYWRQLLNAKLITQRKFDNLTKAERGGLSELDKAGFIKRQLVETRQITKHVAQILDSRMNTKYDENDKLIREVKVITLKSKLVSDFRKDFQFYKVREINNYHHAHDAYLNAVVGTALIKKYPKLESEFVYGDYKVYDVRKMIAKSEQEIGKATAKYFFYSNIMNFFKTEITLANGEIRKRPLIETNGETGEIVWDKGRDFATVRKVLSMPQVNIVKKTEVQTGGFSKESILPKRNSDKLIARKKDWDPKKYGGFDSPTVAYSVLVVAKVEKGKSKKLKSVKELLGITIMERSSFEKNPIDFLEAKGYKEVKKDLIIKLPKYSLFELENGRKRMLASAGELQKGNELALPSKYVNFLYLASHYEKLKGSPEDNEQKQLFVEQHKHYLDEIIEQISEFSKRVILADANLDKVLSAYNKHRDKPIREQAENIIHLFTLTNLGAPAAFKYFDTTIDRKRYTSTKEVLDATLIHQSITGLYETRIDLSQLGGDGGGSSPAPGGMDPLQLLQPLEAEIKGTKLKAHWNSGATITCVPEAFLEDERPIQTMLIKTIHGEKQQDVYYLTFKVQGRKVEAEVLASPYDYILLNPSDVPWLMKKPLQLTVLVPLHEYQERLLQQTALPKEQKELLQKLFLKYDALWQHWENQVGHRRIKPHNIATGTLAPRPQKQYPINPKAKPSIQIVIDDLLKQGVLIQQNSTMNTPVYPVPKPDGKWRMVLDYREVNKTIPLIAAQNQHSAGILSSIYRGKYKTTLDLTNGFWAHPITPESYWLTAFTWQGKQYCWTRLPQGFLNSPALFNADVVDLLKEIPNVQAYVDDIYISHDDPQEHLEQLEKIFSILLNAGYVVSLKKSEIAQREVEFLGFNITKEGRGLTDTFKQKLLNITPPKDLKQLQSILGLLNFARNFIPNYSELVKPLYTIVAPANGKFISWTEDNSNQLQHIISVLNQADNLEERNPETRLIIKVNSSPSAGYIRYYNEGSKRPIMYVNYIFSKAEAKFTQTEKLLTTMHKGLIKAMDLAMGQEILVYSPIVSMTKIQRTPLPERKALPVRWITWMTYLEDPRIQFHYDKSLPELQQIPNVTEDVIAKTKHPSEFAMVFYTDGSAIKHPDVNKSHSAGMGIAQVQFIPEYKIVHQWSIPLGDHTAQLAEIAAVEFACKKALKISGPVLIVTDSFYVAESANKELPYWKSNGFLNNKKKPLRHVSKWKSIAECLQLKPDIIIMHEKGHQQPMTTLHTEGNNLADKLATQGSYVVHAGKRTADGSEFEKRTADGSEFESPKKKAKVE

SEQ ID NO: 478 - protein, 2178 aa, synthetic construct
MPAAKRVKLDGGDKKYSIGLDIGTNSVGWAVITDEYKVPSKKFKVLGNTDRHSIKKNLIGALLFDSGETAEATRLKRTARRRYTRRKNRICYLQEIFSNEMAKVDDSFFHRLEESFLVEEDKKHERHPIFGNIVDEVAYHEKYPTIYHLRKKLVDSTDKADLRLIYLALAHMIKFRGHFLIEGDLNPDNSDVDKLFIQLVQTYNQLFEENPINASGVDAKAILSARLSKSRRLENLIAQLPGEKKNGLFGNLIALSLGLTPNFKSNFDLAEDAKLQLSKDTYDDDLDNLLAQIGDQYADLFLAAKNLSDAILLSDILRVNTEITKAPLSASMIKRYDEHHQDLTLLKALVRQQLPEKYKEIFFDQSKNGYAGYIDGGASQEEFYKFIKPILEKMDGTEELLVKLNREDLLRKQRTFDNGSIPHQIHLGELHAILRRQEDFYPFLKDNREKIEKILTFRIPYYVGPLARGNSRFAWMTRKSEETITPWNFEEVVDKGASAQSFIERMTNFDKNLPNEKVLPKHSLLYEYFTVYNELTKVKYVTEGMRKPAFLSGEQKKAIVDLLFKTNRKVTVKQLKEDYFKKIECFDSVEISGVEDRFNASLGTYHDLLKIIKDKDFLDNEENEDILEDIVLTLTLFEDREMIEERLKTYAHLFDDKVMKQLKRRRYTGWGRLSRKLINGIRDKQSGKTILDFLKSDGFANRNFMQLIHDDSLTFKEDIQKAQVSGQGDSLHEHIANLAGSPAIKKGILQTVKVVDELVKVMGRHKPENIVIEMARENQTTQKGQKNSRERMKRIEEGIKELGSQILKEHPVENTQLQNEKLYLYYLQNGRDMYVDQELDINRLSDYDVDHIVPQSFLKDDSIDNKVLTRSDKARGKSDNVPSEEVVKKMKNYWRQLLNAKLITQRKFDNLTKAERGGLSELDKAGFIKRQLVETRQITKHVAQILDSRMNTKYDENDKLIREVKVITLKSKLVSDFRKDFQFYKVREINNYHHAHDAYLNAVVGTALIKKYPKLESEFVYGDYKVYDVRKMIAKSEQEIGKATAKYFFYSNIMNFFKTEITLANGEIRKRPLIETNGETGEIVWDKGRDFATVRKVLSMPQVNIVKKTEVQTGGFSKESILPKRNSDKLIARKKDWDPKKYGGFDSPTVAYSVLVVAKVEKGKSKKLKSVKELLGITIMERSSFEKNPIDFLEAKGYKEVKKDLIIKLPKYSLFELENGRKRMLASAGELQKGNELALPSKYVNFLYLASHYEKLKGSPEDNEQKQLFVEQHKHYLDEIIEQISEFSKRVILADANLDKVLSAYNKHRDKPIREQAENIIHLFTLTNLGAPAAFKYFDTTIDRKRYTSTKEVLDATLIHQSITGLYETRIDLSQLGGDGGPAPAPAPAPAPAPGGMDPLQLLQPLEAEIKGTKLKAHWNSGATITCVPEAFLEDERPIQTMLIKTIHGEKQQDVYYLTFKVQGRKVEAEVLASPYDYILLNPSDVPWLMKKPLQLTVLVPLHEYQERLLQQTALPKEQKELLQKLFLKYDALWQHWENQVGHRRIKPHNIATGTLAPRPQKQYPINPKAKPSIQIVIDDLLKQGVLIQQNSTMNTPVYPVPKPDGKWRMVLDYREVNKTIPLIAAQNQHSAGILSSIYRGKYKTTLDLTNGFWAHPITPESYWLTAFTWQGKQYCWTRLPQGFLNSPALFNADVVDLLKEIPNVQAYVDDIYISHDDPQEHLEQLEKIFSILLNAGYVVSLKKSEIAQREVEFLGFNITKEGRGLTDTFKQKLLNITPPKDLKQLQSILGLLNFARNFIPNYSELVKPLYTIVAPANGKFISWTEDNSNQLQHIISVLNQADNLEERNPETRLIIKVNSSPSAGYIRYYNEGSKRPIMYVNYIFSKAEAKFTQTEKLLTTMHKGLIKAMDLAMGQEILVYSPIVSMTKIQRTPLPERKALPVRWITWMTYLEDPRIQFHYDKSLPELQQIPNVTEDVIAKTKHPSEFAMVFYTDGSAIKHPDVNKSHSAGMGIAQVQFIPEYKIVHQWSIPLGDHTAQLAEIAAVEFACKKALKISGPVLIVTDSFYVAESANKELPYWKSNGFLNNKKKPLRHVSKWKSIAECLQLKPDIIIMHEKGHQQPMTTLHTEGNNLADKLATQGSYVVHAGKRTADGSEFEKRTADGSEFESPKKKAKVE

SEQ ID NO: 479 - protein, 2170 aa, synthetic construct
MPAAKRVKLDGGDKKYSIGLDIGTNSVGWAVITDEYKVPSKKFKVLGNTDRHSIKKNLIGALLFDSGETAEATRLKRTARRRYTRRKNRICYLQEIFSNEMAKVDDSFFHRLEESFLVEEDKKHERHPIFGNIVDEVAYHEKYPTIYHLRKKLVDSTDKADLRLIYLALAHMIKFRGHFLIEGDLNPDNSDVDKLFIQLVQTYNQLFEENPINASGVDAKAILSARLSKSRRLENLIAQLPGEKKNGLFGNLIALSLGLTPNFKSNFDLAEDAKLQLSKDTYDDDLDNLLAQIGDQYADLFLAAKNLSDAILLSDILRVNTEITKAPLSASMIKRYDEHHQDLTLLKALVRQQLPEKYKEIFFDQSKNGYAGYIDGGASQEEFYKFIKPILEKMDGTEELLVKLNREDLLRKQRTFDNGSIPHQIHLGELHAILRRQEDFYPFLKDNREKIEKILTFRIPYYVGPLARGNSRFAWMTRKSEETITPWNFEEVVDKGASAQSFIERMTNFDKNLPNEKVLPKHSLLYEYFTVYNELTKVKYVTEGMRKPAFLSGEQKKAIVDLLFKTNRKVTVKQLKEDYFKKIECFDSVEISGVEDRFNASLGTYHDLLKIIKDKDFLDNEENEDILEDIVLTLTLFEDREMIEERLKTYAHLFDDKVMKQLKRRRYTGWGRLSRKLINGIRDKQSGKTILDFLKSDGFANRNFMQLIHDDSLTFKEDIQKAQVSGQGDSLHEHIANLAGSPAIKKGILQTVKVVDELVKVMGRHKPENIVIEMARENQTTQKGQKNSRERMKRIEEGIKELGSQILKEHPVENTQLQNEKLYLYYLQNGRDMYVDQELDINRLSDYDVDHIVPQSFLKDDSIDNKVLTRSDKARGKSDNVPSEEVVKKMKNYWRQLLNAKLITQRKFDNLTKAERGGLSELDKAGFIKRQLVETRQITKHVAQILDSRMNTKYDENDKLIREVKVITLKSKLVSDFRKDFQFYKVREINNYHHAHDAYLNAVVGTALIKKYPKLESEFVYGDYKVYDVRKMIAKSEQEIGKATAKYFFYSNIMNFFKTEITLANGEIRKRPLIETNGETGEIVWDKGRDFATVRKVLSMPQVNIVKKTEVQTGGFSKESILPKRNSDKLIARKKDWDPKKYGGFDSPTVAYSVLVVAKVEKGKSKKLKSVKELLGITIMERSSFEKNPIDFLEAKGYKEVKKDLIIKLPKYSLFELENGRKRMLASAGELQKGNELALPSKYVNFLYLASHYEKLKGSPEDNEQKQLFVEQHKHYLDEIIEQISEFSKRVILADANLDKVLSAYNKHRDKPIREQAENIIHLFTLTNLGAPAAFKYFDTTIDRKRYTSTKEVLDATLIHQSITGLYETRIDLSQLGGDGGGGGGGGGMDPLQLLQPLEAEIKGTKLKAHWNSGATITCVPEAFLEDERPIQTMLIKTIHGEKQQDVYYLTFKVQGRKVEAEVLASPYDYILLNPSDVPWLMKKPLQLTVLVPLHEYQERLLQQTALPKEQKELLQKLFLKYDALWQHWENQVGHRRIKPHNIATGTLAPRPQKQYPINPKAKPSIQIVIDDLLKQGVLIQQNSTMNTPVYPVPKPDGKWRMVLDYREVNKTIPLIAAQNQHSAGILSSIYRGKYKTTLDLTNGFWAHPITPESYWLTAFTWQGKQYCWTRLPQGFLNSPALFNADVVDLLKEIPNVQAYVDDIYISHDDPQEHLEQLEKIFSILLNAGYVVSLKKSEIAQREVEFLGFNITKEGRGLTDTFKQKLLNITPPKDLKQLQSILGLLNFARNFIPNYSELVKPLYTIVAPANGKFISWTEDNSNQLQHIISVLNQADNLEERNPETRLIIKVNSSPSAGYIRYYNEGSKRPIMYVNYIFSKAEAKFTQTEKLLTTMHKGLIKAMDLAMGQEILVYSPIVSMTKIQRTPLPERKALPVRWITWMTYLEDPRIQFHYDKSLPELQQIPNVTEDVIAKTKHPSEFAMVFYTDGSAIKHPDVNKSHSAGMGIAQVQFIPEYKIVHQWSIPLGDHTAQLAEIAAVEFACKKALKISGPVLIVTDSFYVAESANKELPYWKSNGFLNNKKKPLRHVSKWKSIAECLQLKPDIIIMHEKGHQQPMTTLHTEGNNLADKLATQGSYVVHAGKRTADGSEFEKRTADGSEFESPKKKAKVE

SEQ ID NO: 480 - protein, 2211 aa, synthetic construct
MPAAKRVKLDGGDKKYSIGLDIGTNSVGWAVITDEYKVPSKKFKVLGNTDRHSIKKNLIGALLFDSGETAEATRLKRTARRRYTRRKNRICYLQEIFSNEMAKVDDSFFHRLEESFLVEEDKKHERHPIFGNIVDEVAYHEKYPTIYHLRKKLVDSTDKADLRLIYLALAHMIKFRGHFLIEGDLNPDNSDVDKLFIQLVQTYNQLFEENPINASGVDAKAILSARLSKSRRLENLIAQLPGEKKNGLFGNLIALSLGLTPNFKSNFDLAEDAKLQLSKDTYDDDLDNLLAQIGDQYADLFLAAKNLSDAILLSDILRVNTEITKAPLSASMIKRYDEHHQDLTLLKALVRQQLPEKYKEIFFDQSKNGYAGYIDGGASQEEFYKFIKPILEKMDGTEELLVKLNREDLLRKQRTFDNGSIPHQIHLGELHAILRRQEDFYPFLKDNREKIEKILTFRIPYYVGPLARGNSRFAWMTRKSEETITPWNFEEVVDKGASAQSFIERMTNFDKNLPNEKVLPKHSLLYEYFTVYNELTKVKYVTEGMRKPAFLSGEQKKAIVDLLFKTNRKVTVKQLKEDYFKKIECFDSVEISGVEDRFNASLGTYHDLLKIIKDKDFLDNEENEDILEDIVLTLTLFEDREMIEERLKTYAHLFDDKVMKQLKRRRYTGWGRLSRKLINGIRDKQSGKTILDFLKSDGFANRNFMQLIHDDSLTFKEDIQKAQVSGQGDSLHEHIANLAGSPAIKKGILQTVKVVDELVKVMGRHKPENIVIEMARENQTTQKGQKNSRERMKRIEEGIKELGSQILKEHPVENTQLQNEKLYLYYLQNGRDMYVDQELDINRLSDYDVDHIVPQSFLKDDSIDNKVLTRSDKARGKSDNVPSEEVVKKMKNYWRQLLNAKLITQRKFDNLTKAERGGLSELDKAGFIKRQLVETRQITKHVAQILDSRMNTKYDENDKLIREVKVITLKSKLVSDFRKDFQFYKVREINNYHHAHDAYLNAVVGTALIKKYPKLESEFVYGDYKVYDVRKMIAKSEQEIGKATAKYFFYSNIMNFFKTEITLANGEIRKRPLIETNGETGEIVWDKGRDFATVRKVLSMPQVNIVKKTEVQTGGFSKESILPKRNSDKLIARKKDWDPKKYGGFDSPTVAYSVLVVAKVEKGKSKKLKSVKELLGITIMERSSFEKNPIDFLEAKGYKEVKKDLIIKLPKYSLFELENGRKRMLASAGELQKGNELALPSKYVNFLYLASHYEKLKGSPEDNEQKQLFVEQHKHYLDEIIEQISEFSKRVILADANLDKVLSAYNKHRDKPIREQAENIIHLFTLTNLGAPAAFKYFDTTIDRKRYTSTKEVLDATLIHQSITGLYETRIDLSQLGGDGGAEAAAKEAAAKEAAAKEAAAKALEAEAAAKEAAAKEAAAKEAAAKAGGMDPLQLLQPLEAEIKGTKLKAHWNSGATITCVPEAFLEDERPIQTMLIKTIHGEKQQDVYYLTFKVQGRKVEAEVLASPYDYILLNPSDVPWLMKKPLQLTVLVPLHEYQERLLQQTALPKEQKELLQKLFLKYDALWQHWENQVGHRRIKPHNIATGTLAPRPQKQYPINPKAKPSIQIVIDDLLKQGVLIQQNSTMNTPVYPVPKPDGKWRMVLDYREVNKTIPLIAAQNQHSAGILSSIYRGKYKTTLDLTNGFWAHPITPESYWLTAFTWQGKQYCWTRLPQGFLNSPALFNADVVDLLKEIPNVQAYVDDIYISHDDPQEHLEQLEKIFSILLNAGYVVSLKKSEIAQREVEFLGFNITKEGRGLTDTFKQKLLNITPPKDLKQLQSILGKLNFARNFIPNYSELVKPLYTIVAPANGKFISWTEDNSNQLQHIISVLNQADNLEERNPETRLIIKVNSSPSAGYIRYYNEGSKRPIMYVNYIFSKAEAKFTQTEKLLTTMHKGLIKAMDLAMGQEILVYSPIVSMTKIQRTPLPERKALPVRWITWMTYLEDPRIQFHYDKSLPELQQIPNVTEDVIAKTKHPSEFAMVFYTDGSAIKHPDVNKSHSAGMGIAQVQFIPEYKIVHQWSIPLGDHTAQLAEIAAVEFACKKALKISGPVLIVTDSFYVAESANKELPYWKSNGFLNNKKKPLRHVSKWKSIAECLQLKPDIIIMHEKGHQQPMTTLHTEGNNLADKLATQGSYVVHAGKRTADGSEFEKRTADGSEFESPKKKAKVE

SEQ ID NO: 481 - protein, 2195 aa, synthetic construct
MPAAKRVKLDGGDKKYSIGLDIGTNSVGWAVITDEYKVPSKKFKVLGNTDRHSIKKNLIGALLFDSGETAEATRLKRTARRRYTRRKNRICYLQEIFSNEMAKVDDSFFHRLEESFLVEEDKKHERHPIFGNIVDEVAYHEKYPTIYHLRKKLVDSTDKADLRLIYLALAHMIKFRGHFLIEGDLNPDNSDVDKLFIQLVQTYNQLFEENPINASGVDAKAILSARLSKSRRLENLIAQLPGEKKNGLFGNLIALSLGLTPNFKSNFDLAEDAKLQLSKDTYDDDLDNLLAQIGDQYADLFLAAKNLSDAILLSDILRVNTEITKAPLSASMIKRYDEHHQDLTLLKALVRQQLPEKYKEIFFDQSKNGYAGYIDGGASQEEFYKFIKPILEKMDGTEELLVKLNREDLLRKQRTFDNGSIPHQIHLGELHAILRRQEDFYPFLKDNREKIEKILTFRIPYYVGPLARGNSRFAWMTRKSEETITPWNFEEVVDKGASAQSFIERMTNFDKNLPNEKVLPKHSLLYEYFTVYNELTKVKYVTEGMRKPAFLSGEQKKAIVDLLFKTNRKVTVKQLKEDYFKKIECFDSVEISGVEDRFNASLGTYHDLLKIIKDKDFLDNEENEDILEDIVLTLTLFEDREMIEERLKTYAHLFDDKVMKQLKRRRYTGWGRLSRKLINGIRDKQSGKTILDFLKSDGFANRNFMQLIHDDSLTFKEDIQKAQVSGQGDSLHEHIANLAGSPAIKKGILQTVKVVDELVKVMGRHKPENIVIEMARENQTTQKGQKNSRERMKRIEEGIKELGSQILKEHPVENTQLQNEKLYLYYLQNGRDMYVDQELDINRLSDYDVDHIVPQSFLKDDSIDNKVLTRSDKARGKSDNVPSEEVVKKMKNYWRQLLNAKLITQRKFDNLTKAERGGLSELDKAGFIKRQLVETRQITKHVAQILDSRMNTKYDENDKLIREVKVITLKSKLVSDFRKDFQFYKVREINNYHHAHDAYLNAVVGTALIKKYPKLESEFVYGDYKVYDVRKMIAKSEQEIGKATAKYFFYSNIMNFFKTEITLANGEIRKRPLIETNGETGEIVWDKGRDFATVRKVLSMPQVNIVKKTEVQTGGFSKESILPKRNSDKLIARKKDWDPKKYGGFDSPTVAYSVLVVAKVEKGKSKKLKSVKELLGITIMERSSFEKNPIDFLEAKGYKEVKKDLIIKLPKYSLFELENGRKRMLASAGELQKGNELALPSKYVNFLYLASHYEKLKGSPEDNEQKQLFVEQHKHYLDEIIEQISEFSKRVILADANLDKVLSAYNKHRDKPIREQAENIIHLFTLTNLGAPAAFKYFDTTIDRKRYTSTKEVLDATLIHQSITGLYETRIDLSQLGGDGGEAAAKEAAAKEAAAKEAAAKEAAAKEAAAKGGMDPLQLLQPLEAEIKGTKLKAHWNSGATITCVPEAFLEDERPIQTMLIKTIHGEKQQDVYYLTFKVQGRKVEAEVLASPYDYILLNPSDVPWLMKKPLQLTVLVPLHEYQERLLQQTALPKEQKELLQKLFLKYDALWQHWENQVGHRRIKPHNIATGTLAPRPQKQYPINPKAKPSIQIVIDDLLKQGVLIQQNSTMNTPVYPVPKPDGKWRMVLDYREVNKTIPLIAAQNQHSAGILSSIYRGKYKTTLDLTNGFWAHPITPESYWLTAFTWQGKQYCWTRLPQGFLNSPALFNADVVDLLKEIPNVQAYVDDIYISHDDPQEHLEQLEKIFSILLNAGYVVSLKKSEIAQREVEFLGFNITKEGRGLTDTFKQKLLNITPPKDLKQLQSILGKLNFARNFIPNYSELVKPLYTIVAPANGKFISWTEDNSNQLQHIISVLNQADNLEERNPETRLIIKVNSSPSAGYIRYYNEGSKRPIMYVNYIFSKAEAKFTQTEKLLTTMHKGLIKAMDLAMGQEILVYSPIVSMTKIQRTPLPERKALPVRWITWMTYLEDPRIQFHYDKSLPELQQIPNVTEDVIAKTKHPSEFAMVFYTDGSAIKHPDVNKSHSAGMGIAQVQFIPEYKIVHQWSIPLGDHTAQLAEIAAVEFACKKALKISGPVLIVTDSFYVAESANKELPYWKSNGFLNNKKKPLRHVSKWKSIAECLQLKPDIIIMHEKGHQQPMTTLHTEGNNLADKLATQGSYVVHAGKRTADGSEFEKRTADGSEFESPKKKAKVE

SEQ ID NO: 482 - protein, 2176 aa, synthetic construct
MPAAKRVKLDGGDKKYSIGLDIGTNSVGWAVITDEYKVPSKKFKVLGNTDRHSIKKNLIGALLFDSGETAEATRLKRTARRRYTRRKNRICYLQEIFSNEMAKVDDSFFHRLEESFLVEEDKKHERHPIFGNIVDEVAYHEKYPTIYHLRKKLVDSTDKADLRLIYLALAHMIKFRGHFLIEGDLNPDNSDVDKLFIQLVQTYNQLFEENPINASGVDAKAILSARLSKSRRLENLIAQLPGEKKNGLFGNLIALSLGLTPNFKSNFDLAEDAKLQLSKDTYDDDLDNLLAQIGDQYADLFLAAKNLSDAILLSDILRVNTEITKAPLSASMIKRYDEHHQDLTLLKALVRQQLPEKYKEIFFDQSKNGYAGYIDGGASQEEFYKFIKPILEKMDGTEELLVKLNREDLLRKQRTFDNGSIPHQIHLGELHAILRRQEDFYPFLKDNREKIEKILTFRIPYYVGPLARGNSRFAWMTRKSEETITPWNFEEVVDKGASAQSFIERMTNFDKNLPNEKVLPKHSLLYEYFTVYNELTKVKYVTEGMRKPAFLSGEQKKAIVDLLFKTNRKVTVKQLKEDYFKKIECFDSVEISGVEDRFNASLGTYHDLLKIIKDKDFLDNEENEDILEDIVLTLTLFEDREMIEERLKTYAHLFDDKVMKQLKRRRYTGWGRLSRKLINGIRDKQSGKTILDFLKSDGFANRNFMQLIHDDSLTFKEDIQKAQVSGQGDSLHEHIANLAGSPAIKKGILQTVKVVDELVKVMGRHKPENIVIEMARENQTTQKGQKNSRERMKRIEEGIKELGSQILKEHPVENTQLQNEKLYLYYLQNGRDMYVDQELDINRLSDYDVDHIVPQSFLKDDSIDNKVLTRSDKARGKSDNVPSEEVVKKMKNYWRQLLNAKLITQRKFDNLTKAERGGLSELDKAGFIKRQLVETRQITKHVAQILDSRMNTKYDENDKLIREVKVITLKSKLVSDFRKDFQFYKVREINNYHHAHDAYLNAVVGTALIKKYPKLESEFVYGDYKVYDVRKMIAKSEQEIGKATAKYFFYSNIMNFFKTEITLANGEIRKRPLIETNGETGEIVWDKGRDFATVRKVLSMPQVNIVKKTEVQTGGFSKESILPKRNSDKLIARKKDWDPKKYGGFDSPTVAYSVLVVAKVEKGKSKKLKSVKELLGITIMERSSFEKNPIDFLEAKGYKEVKKDLIIKLPKYSLFELENGRKRMLASAGELQKGNELALPSKYVNFLYLASHYEKLKGSPEDNEQKQLFVEQHKHYLDEIIEQISEFSKRVILADANLDKVLSAYNKHRDKPIREQAENIIHLFTLTNLGAPAAFKYFDTTIDRKRYTSTKEVLDATLIHQSITGLYETRIDLSQLGGDGGEAAAKGGSPAPGGMDPLQLLQPLEAEIKGTKLKAHWNSGATITCVPEAFLEDERPIQTMLIKTIHGEKQQDVYYLTFKVQGRKVEAEVLASPYDYILLNPSDVPWLMKKPLQLTVLVPLHEYQERLLQQTALPKEQKELLQKLFLKYDALWQHWENQVGHRRIKPHNIATGTLAPRPQKQYPINPKAKPSIQIVIDDLLKQGVLIQQNSTMNTPVYPVPKPDGKWRMVLDYREVNKTIPLIAAQNQHSAGILSSIYRGKYKTTLDLTNGFWAHPITPESYWLTAFTWQGKQYCWTRLPQGFLNSPALFNADVVDLLKEIPNVQAYVDDIYISHDDPQEHLEQLEKIFSILLNAGYVVSLKKSEIAQREVEFLGFNITKEGRGLTDTFKQKLLNITPPKDLKQLQSILGKLNFARNFIPNYSELVKPLYTIVAPANGKFISWTEDNSNQLQHIISVLNQADNLEERNPETRLIIKVNSSPSAGYIRYYNEGSKRPIMYVNYIFSKAEAKFTQTEKLLTTMHKGLIKAMDLAMGQEILVYSPIVSMTKIQRTPLPERKALPVRWITWMTYLEDPRIQFHYDKSLPELQQIPNVTEDVIAKTKHPSEFAMVFYTDGSAIKHPDVNKSHSAGMGIAQVQFIPEYKIVHQWSIPLGDHTAQLAEIAAVEFACKKALKISGPVLIVTDSFYVAESANKELPYWKSNGFLNNKKKPLRHVSKWKSIAECLQLKPDIIIMHEKGHQQPMTTLHTEGNNLADKLATQGSYVVHAGKRTADGSEFEKRTADGSEFESPKKKAKVE

SEQ ID NO: 483 - protein, 2174 aa, synthetic construct
MPAAKRVKLDGGDKKYSIGLDIGTNSVGWAVITDEYKVPSKKFKVLGNTDRHSIKKNLIGALLFDSGETAEATRLKRTARRRYTRRKNRICYLQEIFSNEMAKVDDSFFHRLEESFLVEEDKKHERHPIFGNIVDEVAYHEKYPTIYHLRKKLVDSTDKADLRLIYLALAHMIKFRGHFLIEGDLNPDNSDVDKLFIQLVQTYNQLFEENPINASGVDAKAILSARLSKSRRLENLIAQLPGEKKNGLFGNLIALSLGLTPNFKSNFDLAEDAKLQLSKDTYDDDLDNLLAQIGDQYADLFLAAKNLSDAILLSDILRVNTEITKAPLSASMIKRYDEHHQDLTLLKALVRQQLPEKYKEIFFDQSKNGYAGYIDGGASQEEFYKFIKPILEKMDGTEELLVKLNREDLLRKQRTFDNGSIPHQIHLGELHAILRRQEDFYPFLKDNREKIEKILTFRIPYYVGPLARGNSRFAWMTRKSEETITPWNFEEVVDKGASAQSFIERMTNFDKNLPNEKVLPKHSLLYEYFTVYNELTKVKYVTEGMRKPAFLSGEQKKAIVDLLFKTNRKVTVKQLKEDYFKKIECFDSVEISGVEDRFNASLGTYHDLLKIIKDKDFLDNEENEDILEDIVLTLTLFEDREMIEERLKTYAHLFDDKVMKQLKRRRYTGWGRLSRKLINGIRDKQSGKTILDFLKSDGFANRNFMQLIHDDSLTFKEDIQKAQVSGQGDSLHEHIANLAGSPAIKKGILQTVKVVDELVKVMGRHKPENIVIEMARENQTTQKGQKNSRERMKRIEEGIKELGSQILKEHPVENTQLQNEKLYLYYLQNGRDMYVDQELDINRLSDYDVDHIVPQSFLKDDSIDNKVLTRSDKARGKSDNVPSEEVVKKMKNYWRQLLNAKLITQRKFDNLTKAERGGLSELDKAGFIKRQLVETRQITKHVAQILDSRMNTKYDENDKLIREVKVITLKSKLVSDFRKDFQFYKVREINNYHHAHDAYLNAVVGTALIKKYPKLESEFVYGDYKVYDVRKMIAKSEQEIGKATAKYFFYSNIMNFFKTEITLANGEIRKRPLIETNGETGEIVWDKGRDFATVRKVLSMPQVNIVKKTEVQTGGFSKESILPKRNSDKLIARKKDWDPKKYGGFDSPTVAYSVLVVAKVEKGKSKKLKSVKELLGITIMERSSFEKNPIDFLEAKGYKEVKKDLIIKLPKYSLFELENGRKRMLASAGELQKGNELALPSKYVNFLYLASHYEKLKGSPEDNEQKQLFVEQHKHYLDEIIEQISEFSKRVILADANLDKVLSAYNKHRDKPIREQAENIIHLFTLTNLGAPAAFKYFDTTIDRKRYTSTKEVLDATLIHQSITGLYETRIDLSQLGGDGGGGSGSSPAPGGMDPLQLLQPLEAEIKGTKLKAHWNSGATITCVPEAFLEDERPIQTMLIKTIHGEKQQDVYYLTFKVQGRKVEAEVLASPYDYILLNPSDVPWLMKKPLQLTVLVPLHEYQERLLQQTALPKEQKELLQKLFLKYDALWQHWENQVGHRRIKPHNIATGTLAPRPQKQYPINPKAKPSIQIVIDDLLKQGVLIQQNSTMNTPVYPVPKPDGKWRMVLDYREVNKTIPLIAAQNQHSAGILSSIYRGKYKTTLDLTNGFWAHPITPESYWLTAFTWQGKQYCWTRLPQGFLNSPALFNADVVDLLKEIPNVQAYVDDIYISHDDPQEHLEQLEKIFSILLNAGYVVSLKKSEIAQREVEFLGFNITKEGRGLTDTFKQKLLNITPPKDLKQLQSILGKLNFARNFIPNYSELVKPLYTIVAPANGKFISWTEDNSNQLQHIISVLNQADNLEERNPETRLIIKVNSSPSAGYIRYYNEGSKRPIMYVNYIFSKAEAKFTQTEKLLTTMHKGLIKAMDLAMGQEILVYSPIVSMTKIQRTPLPERKALPVRWITWMTYLEDPRIQFHYDKSLPELQQIPNVTEDVIAKTKHPSEFAMVFYTDGSAIKHPDVNKSHSAGMGIAQVQFIPEYKIVHQWSIPLGDHTAQLAEIAAVEFACKKALKISGPVLIVTDSFYVAESANKELPYWKSNGFLNNKKKPLRHVSKWKSIAECLQLKPDIIIMHEKGHQQPMTTLHTEGNNLADKLATQGSYVVHAGKRTADGSEFEKRTADGSEFESPKKKAKVE

SEQ ID NO: 484 - protein, 2171 aa, synthetic construct
MPAAKRVKLDGGDKKYSIGLDIGTNSVGWAVITDEYKVPSKKFKVLGNTDRHSIKKNLIGALLFDSGETAEATRLKRTARRRYTRRKNRICYLQEIFSNEMAKVDDSFFHRLEESFLVEEDKKHERHPIFGNIVDEVAYHEKYPTIYHLRKKLVDSTDKADLRLIYLALAHMIKFRGHFLIEGDLNPDNSDVDKLFIQLVQTYNQLFEENPINASGVDAKAILSARLSKSRRLENLIAQLPGEKKNGLFGNLIALSLGLTPNFKSNFDLAEDAKLQLSKDTYDDDLDNLLAQIGDQYADLFLAAKNLSDAILLSDILRVNTEITKAPLSASMIKRYDEHHQDLTLLKALVRQQLPEKYKEIFFDQSKNGYAGYIDGGASQEEFYKFIKPILEKMDGTEELLVKLNREDLLRKQRTFDNGSIPHQIHLGELHAILRRQEDFYPFLKDNREKIEKILTFRIPYYVGPLARGNSRFAWMTRKSEETITPWNFEEVVDKGASAQSFIERMTNFDKNLPNEKVLPKHSLLYEYFTVYNELTKVKYVTEGMRKPAFLSGEQKKAIVDLLFKTNRKVTVKQLKEDYFKKIECFDSVEISGVEDRFNASLGTYHDLLKIIKDKDFLDNEENEDILEDIVLTLTLFEDREMIEERLKTYAHLFDDKVMKQLKRRRYTGWGRLSRKLINGIRDKQSGKTILDFLKSDGFANRNFMQLIHDDSLTFKEDIQKAQVSGQGDSLHEHIANLAGSPAIKKGILQTVKVVDELVKVMGRHKPENIVIEMARENQTTQKGQKNSRERMKRIEEGIKELGSQILKEHPVENTQLQNEKLYLYYLQNGRDMYVDQELDINRLSDYDVDHIVPQSFLKDDSIDNKVLTRSDKARGKSDNVPSEEVVKKMKNYWRQLLNAKLITQRKFDNLTKAERGGLSELDKAGFIKRQLVETRQITKHVAQILDSRMNTKYDENDKLIREVKVITLKSKLVSDFRKDFQFYKVREINNYHHAHDAYLNAVVGTALIKKYPKLESEFVYGDYKVYDVRKMIAKSEQEIGKATAKYFFYSNIMNFFKTEITLANGEIRKRPLIETNGETGEIVWDKGRDFATVRKVLSMPQVNIVKKTEVQTGGFSKESILPKRNSDKLIARKKDWDPKKYGGFDSPTVAYSVLVVAKVEKGKSKKLKSVKELLGITIMERSSFEKNPIDFLEAKGYKEVKKDLIIKLPKYSLFELENGRKRMLASAGELQKGNELALPSKYVNFLYLASHYEKLKGSPEDNEQKQLFVEQHKHYLDEIIEQISEFSKRVILADANLDKVLSAYNKHRDKPIREQAENIIHLFTLTNLGAPAAFKYFDTTIDRKRYTSTKEVLDATLIHQSITGLYETRIDLSQLGGDGGGGGGGGGGMDPLQLLQPLEAEIKGTKLKAHWNSGATITCVPEAFLEDERPIQTMLIKTIHGEKQQDVYYLTFKVQGRKVEAEVLASPYDYILLNPSDVPWLMKKPLQLTVLVPLHEYQERLLQQTALPKEQKELLQKLFLKYDALWQHWENQVGHRRIKPHNIATGTLAPRPQKQYPINPKAKPSIQIVIDDLLKQGVLIQQNSTMNTPVYPVPKPDGKWRMVLDYREVNKTIPLIAAQNQHSAGILSSIYRGKYKTTLDLTNGFWAHPITPESYWLTAFTWQGKQYCWTRLPQGFLNSPALFNADVVDLLKEIPNVQAYVDDIYISHDDPQEHLEQLEKIFSILLNAGYVVSLKKSEIAQREVEFLGFNITKEGRGLTDTFKQKLLNITPPKDLKQLQSILGKLNFARNFIPNYSELVKPLYTIVAPANGKFISWTEDNSNQLQHIISVLNQADNLEERNPETRLIIKVNSSPSAGYIRYYNEGSKRPIMYVNYIFSKAEAKFTQTEKLLTTMHKGLIKAMDLAMGQEILVYSPIVSMTKIQRTPLPERKALPVRWITWMTYLEDPRIQFHYDKSLPELQQIPNVTEDVIAKTKHPSEFAMVFYTDGSAIKHPDVNKSHSAGMGIAQVQFIPEYKIVHQWSIPLGDHTAQLAEIAAVEFACKKALKISGPVLIVTDSFYVAESANKELPYWKSNGFLNNKKKPLRHVSKWKSIAECLQLKPDIIIMHEKGHQQPMTTLHTEGNNLADKLATQGSYVVHAGKRTADGSEFEKRTADGSEFESPKKKAKVE

SEQ ID NO: 485 - protein, 2176 aa, synthetic construct
MPAAKRVKLDGGDKKYSIGLDIGTNSVGWAVITDEYKVPSKKFKVLGNTDRHSIKKNLIGALLFDSGETAEATRLKRTARRRYTRRKNRICYLQEIFSNEMAKVDDSFFHRLEESFLVEEDKKHERHPIFGNIVDEVAYHEKYPTIYHLRKKLVDSTDKADLRLIYLALAHMIKFRGHFLIEGDLNPDNSDVDKLFIQLVQTYNQLFEENPINASGVDAKAILSARLSKSRRLENLIAQLPGEKKNGLFGNLIALSLGLTPNFKSNFDLAEDAKLQLSKDTYDDDLDNLLAQIGDQYADLFLAAKNLSDAILLSDILRVNTEITKAPLSASMIKRYDEHHQDLTLLKALVRQQLPEKYKEIFFDQSKNGYAGYIDGGASQEEFYKFIKPILEKMDGTEELLVKLNREDLLRKQRTFDNGSIPHQIHLGELHAILRRQEDFYPFLKDNREKIEKILTFRIPYYVGPLARGNSRFAWMTRKSEETITPWNFEEVVDKGASAQSFIERMTNFDKNLPNEKVLPKHSLLYEYFTVYNELTKVKYVTEGMRKPAFLSGEQKKAIVDLLFKTNRKVTVKQLKEDYFKKIECFDSVEISGVEDRFNASLGTYHDLLKIIKDKDFLDNEENEDILEDIVLTLTLFEDREMIEERLKTYAHLFDDKVMKQLKRRRYTGWGRLSRKLINGIRDKQSGKTILDFLKSDGFANRNFMQLIHDDSLTFKEDIQKAQVSGQGDSLHEHIANLAGSPAIKKGILQTVKVVDELVKVMGRHKPENIVIEMARENQTTQKGQKNSRERMKRIEEGIKELGSQILKEHPVENTQLQNEKLYLYYLQNGRDMYVDQELDINRLSDYDVDHIVPQSFLKDDSIDNKVLTRSDKARGKSDNVPSEEVVKKMKNYWRQLLNAKLITQRKFDNLTKAERGGLSELDKAGFIKRQLVETRQITKHVAQILDSRMNTKYDENDKLIREVKVITLKSKLVSDFRKDFQFYKVREINNYHHAHDAYLNAVVGTALIKKYPKLESEFVYGDYKVYDVRKMIAKSEQEIGKATAKYFFYSNIMNFFKTEITLANGEIRKRPLIETNGETGEIVWDKGRDFATVRKVLSMPQVNIVKKTEVQTGGFSKESILPKRNSDKLIARKKDWDPKKYGGFDSPTVAYSVLVVAKVEKGKSKKLKSVKELLGITIMERSSFEKNPIDFLEAKGYKEVKKDLIIKLPKYSLFELENGRKRMLASAGELQKGNELALPSKYVNFLYLASHYEKLKGSPEDNEQKQLFVEQHKHYLDEIIEQISEFSKRVILADANLDKVLSAYNKHRDKPIREQAENIIHLFTLTNLGAPAAFKYFDTTIDRKRYTSTKEVLDATLIHQSITGLYETRIDLSQLGGDGGGSSGGGEAAAKGGMDPLQLLQPLEAEIKGTKLKAHWNSGATITCVPEAFLEDERPIQTMLIKTIHGEKQQDVYYLTFKVQGRKVEAEVLASPYDYILLNPSDVPWLMKKPLQLTVLVPLHEYQERLLQQTALPKEQKELLQKLFLKYDALWQHWENQVGHRRIKPHNIATGTLAPRPQKQYPINPKAKPSIQIVIDDLLKQGVLIQQNSTMNTPVYPVPKPDGKWRMVLDYREVNKTIPLIAAQNQHSAGILSSIYRGKYKTTLDLTNGFWAHPITPESYWLTAFTWQGKQYCWTRLPQGFLNSPALFNADVVDLLKEIPNVQAYVDDIYISHDDPQEHLEQLEKIFSILLNAGYVVSLKKSEIAQREVEFLGFNITKEGRGLTDTFKQKLLNITPPKDLKQLQSILGKLNFARNFIPNYSELVKPLYTIVAPANGKFISWTEDNSNQLQHIISVLNQADNLEERNPETRLIIKVNSSPSAGYIRYYNEGSKRPIMYVNYIFSKAEAKFTQTEKLLTTMHKGLIKAMDLAMGQEILVYSPIVSMTKIQRTPLPERKALPVRWITWMTYLEDPRIQFHYDKSLPELQQIPNVTEDVIAKTKHPSEFAMVFYTDGSAIKHPDVNKSHSAGMGIAQVQFIPEYKIVHQWSIPLGDHTAQLAEIAAVEFACKKALKISGPVLIVTDSFYVAESANKELPYWKSNGFLNNKKKPLRHVSKWKSIAECLQLKPDIIIMHEKGHQQPMTTLHTEGNNLADKLATQGSYVVHAGKRTADGSEFEKRTADGSEFESPKKKAKVE

SEQ ID NO: 486 - protein, 2176 aa, synthetic construct
MPAAKRVKLDGGDKKYSIGLDIGTNSVGWAVITDEYKVPSKKFKVLGNTDRHSIKKNLIGALLFDSGETAEATRLKRTARRRYTRRKNRICYLQEIFSNEMAKVDDSFFHRLEESFLVEEDKKHERHPIFGNIVDEVAYHEKYPTIYHLRKKLVDSTDKADLRLIYLALAHMIKFRGHFLIEGDLNPDNSDVDKLFIQLVQTYNQLFEENPINASGVDAKAILSARLSKSRRLENLIAQLPGEKKNGLFGNLIALSLGLTPNFKSNFDLAEDAKLQLSKDTYDDDLDNLLAQIGDQYADLFLAAKNLSDAILLSDILRVNTEITKAPLSASMIKRYDEHHQDLTLLKALVRQQLPEKYKEIFFDQSKNGYAGYIDGGASQEEFYKFIKPILEKMDGTEELLVKLNREDLLRKQRTFDNGSIPHQIHLGELHAILRRQEDFYPFLKDNREKIEKILTFRIPYYVGPLARGNSRFAWMTRKSEETITPWNFEEVVDKGASAQSFIERMTNFDKNLPNEKVLPKHSLLYEYFTVYNELTKVKYVTEGMRKPAFLSGEQKKAIVDLLFKTNRKVTVKQLKEDYFKKIECFDSVEISGVEDRFNASLGTYHDLLKIIKDKDFLDNEENEDILEDIVLTLTLFEDREMIEERLKTYAHLFDDKVMKQLKRRRYTGWGRLSRKLINGIRDKQSGKTILDFLKSDGFANRNFMQLIHDDSLTFKEDIQKAQVSGQGDSLHEHIANLAGSPAIKKGILQTVKVVDELVKVMGRHKPENIVIEMARENQTTQKGQKNSRERMKRIEEGIKELGSQILKEHPVENTQLQNEKLYLYYLQNGRDMYVDQELDINRLSDYDVDHIVPQSFLKDDSIDNKVLTRSDKARGKSDNVPSEEVVKKMKNYWRQLLNAKLITQRKFDNLTKAERGGLSELDKAGFIKRQLVETRQITKHVAQILDSRMNTKYDENDKLIREVKVITLKSKLVSDFRKDFQFYKVREINNYHHAHDAYLNAVVGTALIKKYPKLESEFVYGDYKVYDVRKMIAKSEQEIGKATAKYFFYSNIMNFFKTEITLANGEIRKRPLIETNGETGEIVWDKGRDFATVRKVLSMPQVNIVKKTEVQTGGFSKESILPKRNSDKLIARKKDWDPKKYGGFDSPTVAYSVLVVAKVEKGKSKKLKSVKELLGITIMERSSFEKNPIDFLEAKGYKEVKKDLIIKLPKYSLFELENGRKRMLASAGELQKGNELALPSKYVNFLYLASHYEKLKGSPEDNEQKQLFVEQHKHYLDEIIEQISEFSKRVILADANLDKVLSAYNKHRDKPIREQAENIIHLFTLTNLGAPAAFKYFDTTIDRKRYTSTKEVLDATLIHQSITGLYETRIDLSQLGGDGGPAPAPAPAPAPGGMDPLQLLQPLEAEIKGTKLKAHWNSGATITCVPEAFLEDERPIQTMLIKTIHGEKQQDVYYLTFKVQGRKVEAEVLASPYDYILLNPSDVPWLMKKPLQLTVLVPLHEYQERLLQQTALPKEQKELLQKLFLKYDALWQHWENQVGHRRIKPHNIATGTLAPRPQKQYPINPKAKPSIQIVIDDLLKQGVLIQQNSTMNTPVYPVPKPDGKWRMVLDYREVNKTIPLIAAQNQHSAGILSSIYRGKYKTTLDLTNGFWAHPITPESYWLTAFTWQGKQYCWTRLPQGFLNSPALFNADVVDLLKEIPNVQAYVDDIYISHDDPQEHLEQLEKIFSILLNAGYVVSLKKSEIAQREVEFLGFNITKEGRGLTDTFKQKLLNITPPKDLKQLQSILGKLNFARNFIPNYSELVKPLYTIVAPANGKFISWTEDNSNQLQHIISVLNQADNLEERNPETRLIIKVNSSPSAGYIRYYNEGSKRPIMYVNYIFSKAEAKFTQTEKLLTTMHKGLIKAMDLAMGQEILVYSPIVSMTKIQRTPLPERKALPVRWITWMTYLEDPRIQFHYDKSLPELQQIPNVTEDVIAKTKHPSEFAMVFYTDGSAIKHPDVNKSHSAGMGIAQVQFIPEYKIVHQWSIPLGDHTAQLAEIAAVEFACKKALKISGPVLIVTDSFYVAESANKELPYWKSNGFLNNKKKPLRHVSKWKSIAECLQLKPDIIIMHEKGHQQPMTTLHTEGNNLADKLATQGSYVVHAGKRTADGSEFEKRTADGSEFESPKKKAKVE

SEQ ID NO: 487 - protein, 2177 aa, synthetic construct
MPAAKRVKLDGGDKKYSIGLDIGTNSVGWAVITDEYKVPSKKFKVLGNTDRHSIKKNLIGALLFDSGETAEATRLKRTARRRYTRRKNRICYLQEIFSNEMAKVDDSFFHRLEESFLVEEDKKHERHPIFGNIVDEVAYHEKYPTIYHLRKKLVDSTDKADLRLIYLALAHMIKFRGHFLIEGDLNPDNSDVDKLFIQLVQTYNQLFEENPINASGVDAKAILSARLSKSRRLENLIAQLPGEKKNGLFGNLIALSLGLTPNFKSNFDLAEDAKLQLSKDTYDDDLDNLLAQIGDQYADLFLAAKNLSDAILLSDILRVNTEITKAPLSASMIKRYDEHHQDLTLLKALVRQQLPEKYKEIFFDQSKNGYAGYIDGGASQEEFYKFIKPILEKMDGTEELLVKLNREDLLRKQRTFDNGSIPHQIHLGELHAILRRQEDFYPFLKDNREKIEKILTFRIPYYVGPLARGNSRFAWMTRKSEETITPWNFEEVVDKGASAQSFIERMTNFDKNLPNEKVLPKHSLLYEYFTVYNELTKVKYVTEGMRKPAFLSGEQKKAIVDLLFKTNRKVTVKQLKEDYFKKIECFDSVEISGVEDRFNASLGTYHDLLKIIKDKDFLDNEENEDILEDIVLTLTLFEDREMIEERLKTYAHLFDDKVMKQLKRRRYTGWGRLSRKLINGIRDKQSGKTILDFLKSDGFANRNFMQLIHDDSLTFKEDIQKAQVSGQGDSLHEHIANLAGSPAIKKGILQTVKVVDELVKVMGRHKPENIVIEMARENQTTQKGQKNSRERMKRIEEGIKELGSQILKEHPVENTQLQNEKLYLYYLQNGRDMYVDQELDINRLSDYDVDHIVPQSFLKDDSIDNKVLTRSDKARGKSDNVPSEEVVKKMKNYWRQLLNAKLITQRKFDNLTKAERGGLSELDKAGFIKRQLVETRQITKHVAQILDSRMNTKYDENDKLIREVKVITLKSKLVSDFRKDFQFYKVREINNYHHAHDAYLNAVVGTALIKKYPKLESEFVYGDYKVYDVRKMIAKSEQEIGKATAKYFFYSNIMNFFKTEITLANGEIRKRPLIETNGETGEIVWDKGRDFATVRKVLSMPQVNIVKKTEVQTGGFSKESILPKRNSDKLIARKKDWDPKKYGGFDSPTVAYSVLVVAKVEKGKSKKLKSVKELLGITIMERSSFEKNPIDFLEAKGYKEVKKDLIIKLPKYSLFELENGRKRMLASAGELQKGNELALPSKYVNFLYLASHYEKLKGSPEDNEQKQLFVEQHKHYLDEIIEQISEFSKRVILADANLDKVLSAYNKHRDKPIREQAENIIHLFTLTNLGAPAAFKYFDTTIDRKRYTSTKEVLDATLIHQSITGLYETRIDLSQLGGDGGGGSGGSGGSGGSGGMDPLQLLQPLEAEIKGTKLKAHWNSGATITCVPEAFLEDERPIQTMLIKTIHGEKQQDVYYLTFKVQGRKVEAEVLASPYDYILLNPSDVPWLMKKPLQLTVLVPLHEYQERLLQQTALPKEQKELLQKLFLKYDALWQHWENQVGHRRIKPHNIATGTLAPRPQKQYPINPKAKPSIQIVIDDLLKQGVLIQQNSTMNTPVYPVPKPDGKWRMVLDYREVNKTIPLIAAQNQHSAGILSSIYRGKYKTTLDLTNGFWAHPITPESYWLTAFTWQGKQYCWTRLPQGFLNSPALFNADVVDLLKEIPNVQAYVDDIYISHDDPQEHLEQLEKIFSILLNAGYVVSLKKSEIAQREVEFLGFNITKEGRGLTDTFKQKLLNITPPKDLKQLQSILGKLNFARNFIPNYSELVKPLYTIVAPANGKFISWTEDNSNQLQHIISVLNQADNLEERNPETRLIIKVNSSPSAGYIRYYNEGSKRPIMYVNYIFSKAEAKFTQTEKLLTTMHKGLIKAMDLAMGQEILVYSPIVSMTKIQRTPLPERKALPVRWITWMTYLEDPRIQFHYDKSLPELQQIPNVTEDVIAKTKHPSEFAMVFYTDGSAIKHPDVNKSHSAGMGIAQVQFIPEYKIVHQWSIPLGDHTAQLAEIAAVEFACKKALKISGPVLIVTDSFYVAESANKELPYWKSNGFLNNKKKPLRHVSKWKSIAECLQLKPDIIIMHEKGHQQPMTTLHTEGNNLADKLATQGSYVVHAGKRTADGSEFEKRTADGSEFESPKKKAKVE

SEQ ID NO: 488 - protein, 2171 aa, synthetic construct
MPAAKRVKLDGGDKKYSIGLDIGTNSVGWAVITDEYKVPSKKFKVLGNTDRHSIKKNLIGALLFDSGETAEATRLKRTARRRYTRRKNRICYLQEIFSNEMAKVDDSFFHRLEESFLVEEDKKHERHPIFGNIVDEVAYHEKYPTIYHLRKKLVDSTDKADLRLIYLALAHMIKFRGHFLIEGDLNPDNSDVDKLFIQLVQTYNQLFEENPINASGVDAKAILSARLSKSRRLENLIAQLPGEKKNGLFGNLIALSLGLTPNFKSNFDLAEDAKLQLSKDTYDDDLDNLLAQIGDQYADLFLAAKNLSDAILLSDILRVNTEITKAPLSASMIKRYDEHHQDLTLLKALVRQQLPEKYKEIFFDQSKNGYAGYIDGGASQEEFYKFIKPILEKMDGTEELLVKLNREDLLRKQRTFDNGSIPHQIHLGELHAILRRQEDFYPFLKDNREKIEKILTFRIPYYVGPLARGNSRFAWMTRKSEETITPWNFEEVVDKGASAQSFIERMTNFDKNLPNEKVLPKHSLLYEYFTVYNELTKVKYVTEGMRKPAFLSGEQKKAIVDLLFKTNRKVTVKQLKEDYFKKIECFDSVEISGVEDRFNASLGTYHDLLKIIKDKDFLDNEENEDILEDIVLTLTLFEDREMIEERLKTYAHLFDDKVMKQLKRRRYTGWGRLSRKLINGIRDKQSGKTILDFLKSDGFANRNFMQLIHDDSLTFKEDIQKAQVSGQGDSLHEHIANLAGSPAIKKGILQTVKVVDELVKVMGRHKPENIVIEMARENQTTQKGQKNSRERMKRIEEGIKELGSQILKEHPVENTQLQNEKLYLYYLQNGRDMYVDQELDINRLSDYDVDHIVPQSFLKDDSIDNKVLTRSDKARGKSDNVPSEEVVKKMKNYWRQLLNAKLITQRKFDNLTKAERGGLSELDKAGFIKRQLVETRQITKHVAQILDSRMNTKYDENDKLIREVKVITLKSKLVSDFRKDFQFYKVREINNYHHAHDAYLNAVVGTALIKKYPKLESEFVYGDYKVYDVRKMIAKSEQEIGKATAKYFFYSNIMNFFKTEITLANGEIRKRPLIETNGETGEIVWDKGRDFATVRKVLSMPQVNIVKKTEVQTGGFSKESILPKRNSDKLIARKKDWDPKKYGGFDSPTVAYSVLVVAKVEKGKSKKLKSVKELLGITIMERSSFEKNPIDFLEAKGYKEVKKDLIIKLPKYSLFELENGRKRMLASAGELQKGNELALPSKYVNFLYLASHYEKLKGSPEDNEQKQLFVEQHKHYLDEIIEQISEFSKRVILADANLDKVLSAYNKHRDKPIREQAENIIHLFTLTNLGAPAAFKYFDTTIDRKRYTSTKEVLDATLIHQSITGLYETRIDLSQLGGDGGGGGGGSGGMDPLQLLQPLEAEIKGTKLKAHWNSGATITCVPEAFLEDERPIQTMLIKTIHGEKQQDVYYLTFKVQGRKVEAEVLASPYDYILLNPSDVPWLMKKPLQLTVLVPLHEYQERLLQQTALPKEQKELLQKLFLKYDALWQHWENQVGHRRIKPHNIATGTLAPRPQKQYPINPKAKPSIQIVIDDLLKQGVLIQQNSTMNTPVYPVPKPDGKWRMVLDYREVNKTIPLIAAQNQHSAGILSSIYRGKYKTTLDLTNGFWAHPITPESYWLTAFTWQGKQYCWTRLPQGFLNSPALFNADVVDLLKEIPNVQAYVDDIYISHDDPQEHLEQLEKIFSILLNAGYVVSLKKSEIAQREVEFLGFNITKEGRGLTDTFKQKLLNITPPKDLKQLQSILGKLNFARNFIPNYSELVKPLYTIVAPANGKFISWTEDNSNQLQHIISVLNQADNLEERNPETRLIIKVNSSPSAGYIRYYNEGSKRPIMYVNYIFSKAEAKFTQTEKLLTTMHKGLIKAMDLAMGQEILVYSPIVSMTKIQRTPLPERKALPVRWITWMTYLEDPRIQFHYDKSLPELQQIPNVTEDVIAKTKHPSEFAMVFYTDGSAIKHPDVNKSHSAGMGIAQVQFIPEYKIVHQWSIPLGDHTAQLAEIAAVEFACKKALKISGPVLIVTDSFYVAESANKELPYWKSNGFLNNKKKPLRHVSKWKSIAECLQLKPDIIIMHEKGHQQPMTTLHTEGNNLADKLATQGSYVVHAGKRTADGSEFEKRTADGSEFESPKKKAKVE

SEQ ID NO: 489 - protein, 2211 aa, synthetic construct
MPAAKRVKLDGGDKKYSIGLDIGTNSVGWAVITDEYKVPSKKFKVLGNTDRHSIKKNLIGALLFDSGETAEATRLKRTARRRYTRRKNRICYLQEIFSNEMAKVDDSFFHRLEESFLVEEDKKHERHPIFGNIVDEVAYHEKYPTIYHLRKKLVDSTDKADLRLIYLALAHMIKFRGHFLIEGDLNPDNSDVDKLFIQLVQTYNQLFEENPINASGVDAKAILSARLSKSRRLENLIAQLPGEKKNGLFGNLIALSLGLTPNFKSNFDLAEDAKLQLSKDTYDDDLDNLLAQIGDQYADLFLAAKNLSDAILLSDILRVNTEITKAPLSASMIKRYDEHHQDLTLLKALVRQQLPEKYKEIFFDQSKNGYAGYIDGGASQEEFYKFIKPILEKMDGTEELLVKLNREDLLRKQRTFDNGSIPHQIHLGELHAILRRQEDFYPFLKDNREKIEKILTFRIPYYVGPLARGNSRFAWMTRKSEETITPWNFEEVVDKGASAQSFIERMTNFDKNLPNEKVLPKHSLLYEYFTVYNELTKVKYVTEGMRKPAFLSGEQKKAIVDLLFKTNRKVTVKQLKEDYFKKIECFDSVEISGVEDRFNASLGTYHDLLKIIKDKDFLDNEENEDILEDIVLTLTLFEDREMIEERLKTYAHLFDDKVMKQLKRRRYTGWGRLSRKLINGIRDKQSGKTILDFLKSDGFANRNFMQLIHDDSLTFKEDIQKAQVSGQGDSLHEHIANLAGSPAIKKGILQTVKVVDELVKVMGRHKPENIVIEMARENQTTQKGQKNSRERMKRIEEGIKELGSQILKEHPVENTQLQNEKLYLYYLQNGRDMYVDQELDINRLSDYDVDHIVPQSFLKDDSIDNKVLTRSDKARGKSDNVPSEEVVKKMKNYWRQLLNAKLITQRKFDNLTKAERGGLSELDKAGFIKRQLVETRQITKHVAQILDSRMNTKYDENDKLIREVKVITLKSKLVSDFRKDFQFYKVREINNYHHAHDAYLNAVVGTALIKKYPKLESEFVYGDYKVYDVRKMIAKSEQEIGKATAKYFFYSNIMNFFKTEITLANGEIRKRPLIETNGETGEIVWDKGRDFATVRKVLSMPQVNIVKKTEVQTGGFSKESILPKRNSDKLIARKKDWDPKKYGGFDSPTVAYSVLVVAKVEKGKSKKLKSVKELLGITIMERSSFEKNPIDFLEAKGYKEVKKDLIIKLPKYSLFELENGRKRMLASAGELQKGNELALPSKYVNFLYLASHYEKLKGSPEDNEQKQLFVEQHKHYLDEIIEQISEFSKRVILADANLDKVLSAYNKHRDKPIREQAENIIHLFTLTNLGAPAAFKYFDTTIDRKRYTSTKEVLDATLIHQSITGLYETRIDLSQLGGDGGAEAAAKEAAAKEAAAKEAAAKALEAEAAAKEAAAKEAAAKEAAAKAGGMDPLQLLQPLEAEIKGTKLKAHWNSGATITCVPQAFLEEEVPIKNIWIKTIHGEKEQPVYYLTFKIQGRKVEAEVISSPYDYILVSPSDIPWLMKKPLQLTTLVPLQEYEERLLKQTMLTGSYKEKLQSLFLKYDALWQHWENQVGHRRIKPHHIATGTVNPRPQKQYPINPKAKASIQTVINDLLKQGVLIQQNSIMNTPVYPVPKPDGKWRMVLDYREVNKTIPLIAAQNQHSAGILSSIFRGKYKTTLDLSNGFWAHSITPESYWLTAFTWLGQQYCWTRLPQGFLNSPALFTADVVDLLKEVPNVQVYVDDIYISHDDPREHLEQLEKVFSLLLNAGYVVSLKKSEIAQHEVEFLGFNITKEGRGLTETFKQKLLNITPPRDLKQLQSILGLLNFARNFIPNFSELVKPLYNIIATANGKYITWTTDNSQQLQNIISMLNSAENLEERNPEVRLIMKVNTSPSAGYIRFYNEFAKRPIMYLNYVYTKAEVKFTNTEKLLTTIHKGLIKALDLGMGQEILVYSPIVSMTKIQKTPLPERKALPIRWITWMSYLEDPRIQFHYDKTLPELQQVPTVTDDIIAKIKHPSEFSMVFYTDGSAIKHPNVNKSHNAGMGIAQVQFKPEFTVINTWSIPLGDHTAQLAEVAAVEFACKKALKIDGPVLIVTDSFYVAESVNKELPYWQSNGFFNNKKKPLKHVSKWKSIADCIQLKPDIIIIHEKGHQPTASTFHTEGNNLADKLATQGSYVVNAGKRTADGSEFEKRTADGSEFESPKKKAKVE

SEQ ID NO: 490 - protein, 2190 aa, synthetic construct
MPAAKRVKLDGGDKKYSIGLDIGTNSVGWAVITDEYKVPSKKFKVLGNTDRHSIKKNLIGALLFDSGETAEATRLKRTARRRYTRRKNRICYLQEIFSNEMAKVDDSFFHRLEESFLVEEDKKHERHPIFGNIVDEVAYHEKYPTIYHLRKKLVDSTDKADLRLIYLALAHMIKFRGHFLIEGDLNPDNSDVDKLFIQLVQTYNQLFEENPINASGVDAKAILSARLSKSRRLENLIAQLPGEKKNGLFGNLIALSLGLTPNFKSNFDLAEDAKLQLSKDTYDDDLDNLLAQIGDQYADLFLAAKNLSDAILLSDILRVNTEITKAPLSASMIKRYDEHHQDLTLLKALVRQQLPEKYKEIFFDQSKNGYAGYIDGGASQEEFYKFIKPILEKMDGTEELLVKLNREDLLRKQRTFDNGSIPHQIHLGELHAILRRQEDFYPFLKDNREKIEKILTFRIPYYVGPLARGNSRFAWMTRKSEETITPWNFEEVVDKGASAQSFIERMTNFDKNLPNEKVLPKHSLLYEYFTVYNELTKVKYVTEGMRKPAFLSGEQKKAIVDLLFKTNRKVTVKQLKEDYFKKIECFDSVEISGVEDRFNASLGTYHDLLKIIKDKDFLDNEENEDILEDIVLTLTLFEDREMIEERLKTYAHLFDDKVMKQLKRRRYTGWGRLSRKLINGIRDKQSGKTILDFLKSDGFANRNFMQLIHDDSLTFKEDIQKAQVSGQGDSLHEHIANLAGSPAIKKGILQTVKVVDELVKVMGRHKPENIVIEMARENQTTQKGQKNSRERMKRIEEGIKELGSQILKEHPVENTQLQNEKLYLYYLQNGRDMYVDQELDINRLSDYDVDHIVPQSFLKDDSIDNKVLTRSDKARGKSDNVPSEEVVKKMKNYWRQLLNAKLITQRKFDNLTKAERGGLSELDKAGFIKRQLVETRQITKHVAQILDSRMNTKYDENDKLIREVKVITLKSKLVSDFRKDFQFYKVREINNYHHAHDAYLNAVVGTALIKKYPKLESEFVYGDYKVYDVRKMIAKSEQEIGKATAKYFFYSNIMNFFKTEITLANGEIRKRPLIETNGETGEIVWDKGRDFATVRKVLSMPQVNIVKKTEVQTGGFSKESILPKRNSDKLIARKKDWDPKKYGGFDSPTVAYSVLVVAKVEKGKSKKLKSVKELLGITIMERSSFEKNPIDFLEAKGYKEVKKDLIIKLPKYSLFELENGRKRMLASAGELQKGNELALPSKYVNFLYLASHYEKLKGSPEDNEQKQLFVEQHKHYLDEIIEQISEFSKRVILADANLDKVLSAYNKHRDKPIREQAENIIHLFTLTNLGAPAAFKYFDTTIDRKRYTSTKEVLDATLIHQSITGLYETRIDLSQLGGDGGEAAAKEAAAKEAAAKEAAAKEAAAKGGMDPLQLLQPLEAEIKGTKLKAHWNSGATITCVPQAFLEEEVPIKNIWIKTIHGEKEQPVYYLTFKIQGRKVEAEVISSPYDYILVSPSDIPWLMKKPLQLTTLVPLQEYEERLLKQTMLTGSYKEKLQSLFLKYDALWQHWENQVGHRRIKPHHIATGTVNPRPQKQYPINPKAKASIQTVINDLLKQGVLIQQNSIMNTPVYPVPKPDGKWRMVLDYREVNKTIPLIAAQNQHSAGILSSIFRGKYKTTLDLSNGFWAHSITPESYWLTAFTWLGQQYCWTRLPQGFLNSPALFTADVVDLLKEVPNVQVYVDDIYISHDDPREHLEQLEKVFSLLLNAGYVVSLKKSEIAQHEVEFLGFNITKEGRGLTETFKQKLLNITPPRDLKQLQSILGLLNFARNFIPNFSELVKPLYNIIATANGKYITWTTDNSQQLQNIISMLNSAENLEERNPEVRLIMKVNTSPSAGYIRFYNEFAKRPIMYLNYVYTKAEVKFTNTEKLLTTIHKGLIKALDLGMGQEILVYSPIVSMTKIQKTPLPERKALPIRWITWMSYLEDPRIQFHYDKTLPELQQVPTVTDDIIAKIKHPSEFSMVFYTDGSAIKHPNVNKSHNAGMGIAQVQFKPEFTVINTWSIPLGDHTAQLAEVAAVEFACKKALKIDGPVLIVTDSFYVAESVNKELPYWQSNGFFNNKKKPLKHVSKWKSIADCIQLKPDIIIIHEKGHQPTASTFHTEGNNLADKLATQGSYVVNAGKRTADGSEFEKRTADGSEFESPKKKAKVE

SEQ ID NO: 491 - protein, 2176 aa, synthetic construct
MPAAKRVKLDGGDKKYSIGLDIGTNSVGWAVITDEYKVPSKKFKVLGNTDRHSIKKNLIGALLFDSGETAEATRLKRTARRRYTRRKNRICYLQEIFSNEMAKVDDSFFHRLEESFLVEEDKKHERHPIFGNIVDEVAYHEKYPTIYHLRKKLVDSTDKADLRLIYLALAHMIKFRGHFLIEGDLNPDNSDVDKLFIQLVQTYNQLFEENPINASGVDAKAILSARLSKSRRLENLIAQLPGEKKNGLFGNLIALSLGLTPNFKSNFDLAEDAKLQLSKDTYDDDLDNLLAQIGDQYADLFLAAKNLSDAILLSDILRVNTEITKAPLSASMIKRYDEHHQDLTLLKALVRQQLPEKYKEIFFDQSKNGYAGYIDGGASQEEFYKFIKPILEKMDGTEELLVKLNREDLLRKQRTFDNGSIPHQIHLGELHAILRRQEDFYPFLKDNREKIEKILTFRIPYYVGPLARGNSRFAWMTRKSEETITPWNFEEVVDKGASAQSFIERMTNFDKNLPNEKVLPKHSLLYEYFTVYNELTKVKYVTEGMRKPAFLSGEQKKAIVDLLFKTNRKVTVKQLKEDYFKKIECFDSVEISGVEDRFNASLGTYHDLLKIIKDKDFLDNEENEDILEDIVLTLTLFEDREMIEERLKTYAHLFDDKVMKQLKRRRYTGWGRLSRKLINGIRDKQSGKTILDFLKSDGFANRNFMQLIHDDSLTFKEDIQKAQVSGQGDSLHEHIANLAGSPAIKKGILQTVKVVDELVKVMGRHKPENIVIEMARENQTTQKGQKNSRERMKRIEEGIKELGSQILKEHPVENTQLQNEKLYLYYLQNGRDMYVDQELDINRLSDYDVDHIVPQSFLKDDSIDNKVLTRSDKARGKSDNVPSEEVVKKMKNYWRQLLNAKLITQRKFDNLTKAERGGLSELDKAGFIKRQLVETRQITKHVAQILDSRMNTKYDENDKLIREVKVITLKSKLVSDFRKDFQFYKVREINNYHHAHDAYLNAVVGTALIKKYPKLESEFVYGDYKVYDVRKMIAKSEQEIGKATAKYFFYSNIMNFFKTEITLANGEIRKRPLIETNGETGEIVWDKGRDFATVRKVLSMPQVNIVKKTEVQTGGFSKESILPKRNSDKLIARKKDWDPKKYGGFDSPTVAYSVLVVAKVEKGKSKKLKSVKELLGITIMERSSFEKNPIDFLEAKGYKEVKKDLIIKLPKYSLFELENGRKRMLASAGELQKGNELALPSKYVNFLYLASHYEKLKGSPEDNEQKQLFVEQHKHYLDEIIEQISEFSKRVILADANLDKVLSAYNKHRDKPIREQAENIIHLFTLTNLGAPAAFKYFDTTIDRKRYTSTKEVLDATLIHQSITGLYETRIDLSQLGGDGGEAAAKGGGPAPGGMDPLQLLQPLEAEIKGTKLKAHWNSGATITCVPQAFLEEEVPIKNIWIKTIHGEKEQPVYYLTFKIQGRKVEAEVISSPYDYILVSPSDIPWLMKKPLQLTTLVPLQEYEERLLKQTMLTGSYKEKLQSLFLKYDALWQHWENQVGHRRIKPHHIATGTVNPRPQKQYPINPKAKASIQTVINDLLKQGVLIQQNSIMNTPVYPVPKPDGKWRMVLDYREVNKTIPLIAAQNQHSAGILSSIFRGKYKTTLDLSNGFWAHSITPESYWLTAFTWLGQQYCWTRLPQGFLNSPALFTADVVDLLKEVPNVQVYVDDIYISHDDPREHLEQLEKVFSLLLNAGYVVSLKKSEIAQHEVEFLGFNITKEGRGLTETFKQKLLNITPPRDLKQLQSILGLLNFARNFIPNFSELVKPLYNIIATANGKYITWTTDNSQQLQNIISMLNSAENLEERNPEVRLIMKVNTSPSAGYIRFYNEFAKRPIMYLNYVYTKAEVKFTNTEKLLTTIHKGLIKALDLGMGQEILVYSPIVSMTKIQKTPLPERKALPIRWITWMSYLEDPRIQFHYDKTLPELQQVPTVTDDIIAKIKHPSEFSMVFYTDGSAIKHPNVNKSHNAGMGIAQVQFKPEFTVINTWSIPLGDHTAQLAEVAAVEFACKKALKIDGPVLIVTDSFYVAESVNKELPYWQSNGFFNNKKKPLKHVSKWKSIADCIQLKPDIIIIHEKGHQPTASTFHTEGNNLADKLATQGSYVVNAGKRTADGSEFEKRTADGSEFESPKKKAKVE

SEQ ID NO: 492 - protein, 2180 aa, synthetic construct
MPAAKRVKLDGGDKKYSIGLDIGTNSVGWAVITDEYKVPSKKFKVLGNTDRHSIKKNLIGALLFDSGETAEATRLKRTARRRYTRRKNRICYLQEIFSNEMAKVDDSFFHRLEESFLVEEDKKHERHPIFGNIVDEVAYHEKYPTIYHLRKKLVDSTDKADLRLIYLALAHMIKFRGHFLIEGDLNPDNSDVDKLFIQLVQTYNQLFEENPINASGVDAKAILSARLSKSRRLENLIAQLPGEKKNGLFGNLIALSLGLTPNFKSNFDLAEDAKLQLSKDTYDDDLDNLLAQIGDQYADLFLAAKNLSDAILLSDILRVNTEITKAPLSASMIKRYDEHHQDLTLLKALVRQQLPEKYKEIFFDQSKNGYAGYIDGGASQEEFYKFIKPILEKMDGTEELLVKLNREDLLRKQRTFDNGSIPHQIHLGELHAILRRQEDFYPFLKDNREKIEKILTFRIPYYVGPLARGNSRFAWMTRKSEETITPWNFEEVVDKGASAQSFIERMTNFDKNLPNEKVLPKHSLLYEYFTVYNELTKVKYVTEGMRKPAFLSGEQKKAIVDLLFKTNRKVTVKQLKEDYFKKIECFDSVEISGVEDRFNASLGTYHDLLKIIKDKDFLDNEENEDILEDIVLTLTLFEDREMIEERLKTYAHLFDDKVMKQLKRRRYTGWGRLSRKLINGIRDKQSGKTILDFLKSDGFANRNFMQLIHDDSLTFKEDIQKAQVSGQGDSLHEHIANLAGSPAIKKGILQTVKVVDELVKVMGRHKPENIVIEMARENQTTQKGQKNSRERMKRIEEGIKELGSQILKEHPVENTQLQNEKLYLYYLQNGRDMYVDQELDINRLSDYDVDHIVPQSFLKDDSIDNKVLTRSDKARGKSDNVPSEEVVKKMKNYWRQLLNAKLITQRKFDNLTKAERGGLSELDKAGFIKRQLVETRQITKHVAQILDSRMNTKYDENDKLIREVKVITLKSKLVSDFRKDFQFYKVREINNYHHAHDAYLNAVVGTALIKKYPKLESEFVYGDYKVYDVRKMIAKSEQEIGKATAKYFFYSNIMNFFKTEITLANGEIRKRPLIETNGETGEIVWDKGRDFATVRKVLSMPQVNIVKKTEVQTGGFSKESILPKRNSDKLIARKKDWDPKKYGGFDSPTVAYSVLVVAKVEKGKSKKLKSVKELLGITIMERSSFEKNPIDFLEAKGYKEVKKDLIIKLPKYSLFELENGRKRMLASAGELQKGNELALPSKYVNFLYLASHYEKLKGSPEDNEQKQLFVEQHKHYLDEIIEQISEFSKRVILADANLDKVLSAYNKHRDKPIREQAENIIHLFTLTNLGAPAAFKYFDTTIDRKRYTSTKEVLDATLIHQSITGLYETRIDLSQLGGDGGGSSGSSGSSGSSGSSGGMDPLQLLQPLEAEIKGTKLKAHWNSGATITCVPQAFLEEEVPIKNIWIKTIHGEKEQPVYYLTFKIQGRKVEAEVISSPYDYILVSPSDIPWLMKKPLQLTTLVPLQEYEERLLKQTMLTGSYKEKLQSLFLKYDALWQHWENQVGHRRIKPHHIATGTVNPRPQKQYPINPKAKASIQTVINDLLKQGVLIQQNSIMNTPVYPVPKPDGKWRMVLDYREVNKTIPLIAAQNQHSAGILSSIFRGKYKTTLDLSNGFWAHSITPESYWLTAFTWLGQQYCWTRLPQGFLNSPALFTADVVDLLKEVPNVQVYVDDIYISHDDPREHLEQLEKVFSLLLNAGYVVSLKKSEIAQHEVEFLGFNITKEGRGLTETFKQKLLNITPPRDLKQLQSILGLLNFARNFIPNFSELVKPLYNIIATANGKYITWTTDNSQQLQNIISMLNSAENLEERNPEVRLIMKVNTSPSAGYIRFYNEFAKRPIMYLNYVYTKAEVKFTNTEKLLTTIHKGLIKALDLGMGQEILVYSPIVSMTKIQKTPLPERKALPIRWITWMSYLEDPRIQFHYDKTLPELQQVPTVTDDIIAKIKHPSEFSMVFYTDGSAIKHPNVNKSHNAGMGIAQVQFKPEFTVINTWSIPLGDHTAQLAEVAAVEFACKKALKIDGPVLIVTDSFYVAESVNKELPYWQSNGFFNNKKKPLKHVSKWKSIADCIQLKPDIIIIHEKGHQPTASTFHTEGNNLADKLATQGSYVVNAGKRTADGSEFEKRTADGSEFESPKKKAKVE

SEQ ID NO: 493 - protein, 2176 aa, synthetic construct
MPAAKRVKLDGGDKKYSIGLDIGTNSVGWAVITDEYKVPSKKFKVLGNTDRHSIKKNLIGALLFDSGETAEATRLKRTARRRYTRRKNRICYLQEIFSNEMAKVDDSFFHRLEESFLVEEDKKHERHPIFGNIVDEVAYHEKYPTIYHLRKKLVDSTDKADLRLIYLALAHMIKFRGHFLIEGDLNPDNSDVDKLFIQLVQTYNQLFEENPINASGVDAKAILSARLSKSRRLENLIAQLPGEKKNGLFGNLIALSLGLTPNFKSNFDLAEDAKLQLSKDTYDDDLDNLLAQIGDQYADLFLAAKNLSDAILLSDILRVNTEITKAPLSASMIKRYDEHHQDLTLLKALVRQQLPEKYKEIFFDQSKNGYAGYIDGGASQEEFYKFIKPILEKMDGTEELLVKLNREDLLRKQRTFDNGSIPHQIHLGELHAILRRQEDFYPFLKDNREKIEKILTFRIPYYVGPLARGNSRFAWMTRKSEETITPWNFEEVVDKGASAQSFIERMTNFDKNLPNEKVLPKHSLLYEYFTVYNELTKVKYVTEGMRKPAFLSGEQKKAIVDLLFKTNRKVTVKQLKEDYFKKIECFDSVEISGVEDRFNASLGTYHDLLKIIKDKDFLDNEENEDILEDIVLTLTLFEDREMIEERLKTYAHLFDDKVMKQLKRRRYTGWGRLSRKLINGIRDKQSGKTILDFLKSDGFANRNFMQLIHDDSLTFKEDIQKAQVSGQGDSLHEHIANLAGSPAIKKGILQTVKVVDELVKVMGRHKPENIVIEMARENQTTQKGQKNSRERMKRIEEGIKELGSQILKEHPVENTQLQNEKLYLYYLQNGRDMYVDQELDINRLSDYDVDHIVPQSFLKDDSIDNKVLTRSDKARGKSDNVPSEEVVKKMKNYWRQLLNAKLITQRKFDNLTKAERGGLSELDKAGFIKRQLVETRQITKHVAQILDSRMNTKYDENDKLIREVKVITLKSKLVSDFRKDFQFYKVREINNYHHAHDAYLNAVVGTALIKKYPKLESEFVYGDYKVYDVRKMIAKSEQEIGKATAKYFFYSNIMNFFKTEITLANGEIRKRPLIETNGETGEIVWDKGRDFATVRKVLSMPQVNIVKKTEVQTGGFSKESILPKRNSDKLIARKKDWDPKKYGGFDSPTVAYSVLVVAKVEKGKSKKLKSVKELLGITIMERSSFEKNPIDFLEAKGYKEVKKDLIIKLPKYSLFELENGRKRMLASAGELQKGNELALPSKYVNFLYLASHYEKLKGSPEDNEQKQLFVEQHKHYLDEIIEQISEFSKRVILADANLDKVLSAYNKHRDKPIREQAENIIHLFTLTNLGAPAAFKYFDTTIDRKRYTSTKEVLDATLIHQSITGLYETRIDLSQLGGDGGEAAAKGGSPAPGGMDPLQLLQPLEAEIKGTKLKAHWNSGATITCVPQAFLEEEVPIKNIWIKTIHGEKEQPVYYLTFKIQGRKVEAEVISSPYDYILVSPSDIPWLMKKPLQLTTLVPLQEYEERLLKQTMLTGSYKEKLQSLFLKYDALWQHWENQVGHRRIKPHHIATGTVNPRPQKQYPINPKAKASIQTVINDLLKQGVLIQQNSIMNTPVYPVPKPDGKWRMVLDYREVNKTIPLIAAQNQHSAGILSSIFRGKYKTTLDLSNGFWAHSITPESYWLTAFTWLGQQYCWTRLPQGFLNSPALFTADVVDLLKEVPNVQVYVDDIYISHDDPREHLEQLEKVFSLLLNAGYVVSLKKSEIAQHEVEFLGFNITKEGRGLTETFKQKLLNITPPRDLKQLQSILGLLNFARNFIPNFSELVKPLYNIIATANGKYITWTTDNSQQLQNIISMLNSAENLEERNPEVRLIMKVNTSPSAGYIRFYNEFAKRPIMYLNYVYTKAEVKFTNTEKLLTTIHKGLIKALDLGMGQEILVYSPIVSMTKIQKTPLPERKALPIRWITWMSYLEDPRIQFHYDKTLPELQQVPTVTDDIIAKIKHPSEFSMVFYTDGSAIKHPNVNKSHNAGMGIAQVQFKPEFTVINTWSIPLGDHTAQLAEVAAVEFACKKALKIDGPVLIVTDSFYVAESVNKELPYWQSNGFFNNKKKPLKHVSKWKSIADCIQLKPDIIIIHEKGHQPTASTFHTEGNNLADKLATQGSYVVNAGKRTADGSEFEKRTADGSEFESPKKKAKVE

SEQ ID NO: 494 - protein, 2181 aa, synthetic construct
MPAAKRVKLDGGDKKYSIGLDIGTNSVGWAVITDEYKVPSKKFKVLGNTDRHSIKKNLIGALLFDSGETAEATRLKRTARRRYTRRKNRICYLQEIFSNEMAKVDDSFFHRLEESFLVEEDKKHERHPIFGNIVDEVAYHEKYPTIYHLRKKLVDSTDKADLRLIYLALAHMIKFRGHFLIEGDLNPDNSDVDKLFIQLVQTYNQLFEENPINASGVDAKAILSARLSKSRRLENLIAQLPGEKKNGLFGNLIALSLGLTPNFKSNFDLAEDAKLQLSKDTYDDDLDNLLAQIGDQYADLFLAAKNLSDAILLSDILRVNTEITKAPLSASMIKRYDEHHQDLTLLKALVRQQLPEKYKEIFFDQSKNGYAGYIDGGASQEEFYKFIKPILEKMDGTEELLVKLNREDLLRKQRTFDNGSIPHQIHLGELHAILRRQEDFYPFLKDNREKIEKILTFRIPYYVGPLARGNSRFAWMTRKSEETITPWNFEEVVDKGASAQSFIERMTNFDKNLPNEKVLPKHSLLYEYFTVYNELTKVKYVTEGMRKPAFLSGEQKKAIVDLLFKTNRKVTVKQLKEDYFKKIECFDSVEISGVEDRFNASLGTYHDLLKIIKDKDFLDNEENEDILEDIVLTLTLFEDREMIEERLKTYAHLFDDKVMKQLKRRRYTGWGRLSRKLINGIRDKQSGKTILDFLKSDGFANRNFMQLIHDDSLTFKEDIQKAQVSGQGDSLHEHIANLAGSPAIKKGILQTVKVVDELVKVMGRHKPENIVIEMARENQTTQKGQKNSRERMKRIEEGIKELGSQILKEHPVENTQLQNEKLYLYYLQNGRDMYVDQELDINRLSDYDVDHIVPQSFLKDDSIDNKVLTRSDKARGKSDNVPSEEVVKKMKNYWRQLLNAKLITQRKFDNLTKAERGGLSELDKAGFIKRQLVETRQITKHVAQILDSRMNTKYDENDKLIREVKVITLKSKLVSDFRKDFQFYKVREINNYHHAHDAYLNAVVGTALIKKYPKLESEFVYGDYKVYDVRKMIAKSEQEIGKATAKYFFYSNIMNFFKTEITLANGEIRKRPLIETNGETGEIVWDKGRDFATVRKVLSMPQVNIVKKTEVQTGGFSKESILPKRNSDKLIARKKDWDPKKYGGFDSPTVAYSVLVVAKVEKGKSKKLKSVKELLGITIMERSSFEKNPIDFLEAKGYKEVKKDLIIKLPKYSLFELENGRKRMLASAGELQKGNELALPSKYVNFLYLASHYEKLKGSPEDNEQKQLFVEQHKHYLDEIIEQISEFSKRVILADANLDKVLSAYNKHRDKPIREQAENIIHLFTLTNLGAPAAFKYFDTTIDRKRYTSTKEVLDATLIHQSITGLYETRIDLSQLGGDGGSGSETPGTSESATPESGGMDPLQLLQPLEAEIKGTKLKAHWNSGATITCVPQAFLEEEVPIKNIWIKTIHGEKEQPVYYLTFKIQGRKVEAEVISSPYDYILVSPSDIPWLMKKPLQLTTLVPLQEYEERLLKQTMLTGSYKEKLQSLFLKYDALWQHWENQVGHRRIKPHHIATGTVNPRPQKQYPINPKAKASIQTVINDLLKQGVLIQQNSIMNTPVYPVPKPDGKWRMVLDYREVNKTIPLIAAQNQHSAGILSSIFRGKYKTTLDLSNGFWAHSITPESYWLTAFTWLGQQYCWTRLPQGFLNSPALFTADVVDLLKEVPNVQVYVDDIYISHDDPREHLEQLEKVFSLLLNAGYVVSLKKSEIAQHEVEFLGFNITKEGRGLTETFKQKLLNITPPRDLKQLQSILGLLNFARNFIPNFSELVKPLYNIIATANGKYITWTTDNSQQLQNIISMLNSAENLEERNPEVRLIMKVNTSPSAGYIRFYNEFAKRPIMYLNYVYTKAEVKFTNTEKLLTTIHKGLIKALDLGMGQEILVYSPIVSMTKIQKTPLPERKALPIRWITWMSYLEDPRIQFHYDKTLPELQQVPTVTDDIIAKIKHPSEFSMVFYTDGSAIKHPNVNKSHNAGMGIAQVQFKPEFTVINTWSIPLGDHTAQLAEVAAVEFACKKALKIDGPVLIVTDSFYVAESVNKELPYWQSNGFFNNKKKPLKHVSKWKSIADCIQLKPDIIIIHEKGHQPTASTFHTEGNNLADKLATQGSYVVNAGKRTADGSEFEKRTADGSEFESPKKKAKVE

SEQ ID NO: 495 - protein, 2176 aa, synthetic construct
MPAAKRVKLDGGDKKYSIGLDIGTNSVGWAVITDEYKVPSKKFKVLGNTDRHSIKKNLIGALLFDSGETAEATRLKRTARRRYTRRKNRICYLQEIFSNEMAKVDDSFFHRLEESFLVEEDKKHERHPIFGNIVDEVAYHEKYPTIYHLRKKLVDSTDKADLRLIYLALAHMIKFRGHFLIEGDLNPDNSDVDKLFIQLVQTYNQLFEENPINASGVDAKAILSARLSKSRRLENLIAQLPGEKKNGLFGNLIALSLGLTPNFKSNFDLAEDAKLQLSKDTYDDDLDNLLAQIGDQYADLFLAAKNLSDAILLSDILRVNTEITKAPLSASMIKRYDEHHQDLTLLKALVRQQLPEKYKEIFFDQSKNGYAGYIDGGASQEEFYKFIKPILEKMDGTEELLVKLNREDLLRKQRTFDNGSIPHQIHLGELHAILRRQEDFYPFLKDNREKIEKILTFRIPYYVGPLARGNSRFAWMTRKSEETITPWNFEEVVDKGASAQSFIERMTNFDKNLPNEKVLPKHSLLYEYFTVYNELTKVKYVTEGMRKPAFLSGEQKKAIVDLLFKTNRKVTVKQLKEDYFKKIECFDSVEISGVEDRFNASLGTYHDLLKIIKDKDFLDNEENEDILEDIVLTLTLFEDREMIEERLKTYAHLFDDKVMKQLKRRRYTGWGRLSRKLINGIRDKQSGKTILDFLKSDGFANRNFMQLIHDDSLTFKEDIQKAQVSGQGDSLHEHIANLAGSPAIKKGILQTVKVVDELVKVMGRHKPENIVIEMARENQTTQKGQKNSRERMKRIEEGIKELGSQILKEHPVENTQLQNEKLYLYYLQNGRDMYVDQELDINRLSDYDVDHIVPQSFLKDDSIDNKVLTRSDKARGKSDNVPSEEVVKKMKNYWRQLLNAKLITQRKFDNLTKAERGGLSELDKAGFIKRQLVETRQITKHVAQILDSRMNTKYDENDKLIREVKVITLKSKLVSDFRKDFQFYKVREINNYHHAHDAYLNAVVGTALIKKYPKLESEFVYGDYKVYDVRKMIAKSEQEIGKATAKYFFYSNIMNFFKTEITLANGEIRKRPLIETNGETGEIVWDKGRDFATVRKVLSMPQVNIVKKTEVQTGGFSKESILPKRNSDKLIARKKDWDPKKYGGFDSPTVAYSVLVVAKVEKGKSKKLKSVKELLGITIMERSSFEKNPIDFLEAKGYKEVKKDLIIKLPKYSLFELENGRKRMLASAGELQKGNELALPSKYVNFLYLASHYEKLKGSPEDNEQKQLFVEQHKHYLDEIIEQISEFSKRVILADANLDKVLSAYNKHRDKPIREQAENIIHLFTLTNLGAPAAFKYFDTTIDRKRYTSTKEVLDATLIHQSITGLYETRIDLSQLGGDGGEAAAKPAPGSSGGMDPLQLLQPLEAEIKGTKLKAHWNSGATITCVPQAFLEEEVPIKNIWIKTIHGEKEQPVYYLTFKIQGRKVEAEVISSPYDYILVSPSDIPWLMKKPLQLTTLVPLQEYEERLLKQTMLTGSYKEKLQSLFLKYDALWQHWENQVGHRRIKPHHIATGTVNPRPQKQYPINPKAKASIQTVINDLLKQGVLIQQNSIMNTPVYPVPKPDGKWRMVLDYREVNKTIPLIAAQNQHSAGILSSIFRGKYKTTLDLSNGFWAHSITPESYWLTAFTWLGQQYCWTRLPQGFLNSPALFTADVVDLLKEVPNVQVYVDDIYISHDDPREHLEQLEKVFSLLLNAGYVVSLKKSEIAQHEVEFLGFNITKEGRGLTETFKQKLLNITPPRDLKQLQSILGLLNFARNFIPNFSELVKPLYNIIATANGKYITWTTDNSQQLQNIISMLNSAENLEERNPEVRLIMKVNTSPSAGYIRFYNEFAKRPIMYLNYVYTKAEVKFTNTEKLLTTIHKGLIKALDLGMGQEILVYSPIVSMTKIQKTPLPERKALPIRWITWMSYLEDPRIQFHYDKTLPELQQVPTVTDDIIAKIKHPSEFSMVFYTDGSAIKHPNVNKSHNAGMGIAQVQFKPEFTVINTWSIPLGDHTAQLAEVAAVEFACKKALKIDGPVLIVTDSFYVAESVNKELPYWQSNGFFNNKKKPLKHVSKWKSIADCIQLKPDIIIIHEKGHQPTASTFHTEGNNLADKLATQGSYVVNAGKRTADGSEFEKRTADGSEFESPKKKAKVE

SEQ ID NO: 496 - protein, 2176 aa, synthetic construct
MPAAKRVKLDGGDKKYSIGLDIGTNSVGWAVITDEYKVPSKKFKVLGNTDRHSIKKNLIGALLFDSGETAEATRLKRTARRRYTRRKNRICYLQEIFSNEMAKVDDSFFHRLEESFLVEEDKKHERHPIFGNIVDEVAYHEKYPTIYHLRKKLVDSTDKADLRLIYLALAHMIKFRGHFLIEGDLNPDNSDVDKLFIQLVQTYNQLFEENPINASGVDAKAILSARLSKSRRLENLIAQLPGEKKNGLFGNLIALSLGLTPNFKSNFDLAEDAKLQLSKDTYDDDLDNLLAQIGDQYADLFLAAKNLSDAILLSDILRVNTEITKAPLSASMIKRYDEHHQDLTLLKALVRQQLPEKYKEIFFDQSKNGYAGYIDGGASQEEFYKFIKPILEKMDGTEELLVKLNREDLLRKQRTFDNGSIPHQIHLGELHAILRRQEDFYPFLKDNREKIEKILTFRIPYYVGPLARGNSRFAWMTRKSEETITPWNFEEVVDKGASAQSFIERMTNFDKNLPNEKVLPKHSLLYEYFTVYNELTKVKYVTEGMRKPAFLSGEQKKAIVDLLFKTNRKVTVKQLKEDYFKKIECFDSVEISGVEDRFNASLGTYHDLLKIIKDKDFLDNEENEDILEDIVLTLTLFEDREMIEERLKTYAHLFDDKVMKQLKRRRYTGWGRLSRKLINGIRDKQSGKTILDFLKSDGFANRNFMQLIHDDSLTFKEDIQKAQVSGQGDSLHEHIANLAGSPAIKKGILQTVKVVDELVKVMGRHKPENIVIEMARENQTTQKGQKNSRERMKRIEEGIKELGSQILKEHPVENTQLQNEKLYLYYLQNGRDMYVDQELDINRLSDYDVDHIVPQSFLKDDSIDNKVLTRSDKARGKSDNVPSEEVVKKMKNYWRQLLNAKLITQRKFDNLTKAERGGLSELDKAGFIKRQLVETRQITKHVAQILDSRMNTKYDENDKLIREVKVITLKSKLVSDFRKDFQFYKVREINNYHHAHDAYLNAVVGTALIKKYPKLESEFVYGDYKVYDVRKMIAKSEQEIGKATAKYFFYSNIMNFFKTEITLANGEIRKRPLIETNGETGEIVWDKGRDFATVRKVLSMPQVNIVKKTEVQTGGFSKESILPKRNSDKLIARKKDWDPKKYGGFDSPTVAYSVLVVAKVEKGKSKKLKSVKELLGITIMERSSFEKNPIDFLEAKGYKEVKKDLIIKLPKYSLFELENGRKRMLASAGELQKGNELALPSKYVNFLYLASHYEKLKGSPEDNEQKQLFVEQHKHYLDEIIEQISEFSKRVILADANLDKVLSAYNKHRDKPIREQAENIIHLFTLTNLGAPAAFKYFDTTIDRKRYTSTKEVLDATLIHQSITGLYETRIDLSQLGGDGGEAAAKGSSPAPGGMDPLQLLQPLEAEIKGTKLKAHWNSGATITCVPQAFLEEEVPIKNIWIKTIHGEKEQPVYYLTFKIQGRKVEAEVISSPYDYILVSPSDIPWLMKKPLQLTTLVPLQEYEERLLKQTMLTGSYKEKLQSLFLKYDALWQHWENQVGHRRIKPHHIATGTVNPRPQKQYPINPKAKASIQTVINDLLKQGVLIQQNSIMNTPVYPVPKPDGKWRMVLDYREVNKTIPLIAAQNQHSAGILSSIFRGKYKTTLDLSNGFWAHSITPESYWLTAFTWLGQQYCWTRLPQGFLNSPALFTADVVDLLKEVPNVQVYVDDIYISHDDPREHLEQLEKVFSLLLNAGYVVSLKKSEIAQHEVEFLGFNITKEGRGLTETFKQKLLNITPPRDLKQLQSILGLLNFARNFIPNFSELVKPLYNIIATANGKYITWTTDNSQQLQNIISMLNSAENLEERNPEVRLIMKVNTSPSAGYIRFYNEFAKRPIMYLNYVYTKAEVKFTNTEKLLTTIHKGLIKALDLGMGQEILVYSPIVSMTKIQKTPLPERKALPIRWITWMSYLEDPRIQFHYDKTLPELQQVPTVTDDIIAKIKHPSEFSMVFYTDGSAIKHPNVNKSHNAGMGIAQVQFKPEFTVINTWSIPLGDHTAQLAEVAAVEFACKKALKIDGPVLIVTDSFYVAESVNKELPYWQSNGFFNNKKKPLKHVSKWKSIADCIQLKPDIIIIHEKGHQPTASTFHTEGNNLADKLATQGSYVVNAGKRTADGSEFEKRTADGSEFESPKKKAKVE

SEQ ID NO: 497 - protein, 2176 aa, synthetic construct
MPAAKRVKLDGGDKKYSIGLDIGTNSVGWAVITDEYKVPSKKFKVLGNTDRHSIKKNLIGALLFDSGETAEATRLKRTARRRYTRRKNRICYLQEIFSNEMAKVDDSFFHRLEESFLVEEDKKHERHPIFGNIVDEVAYHEKYPTIYHLRKKLVDSTDKADLRLIYLALAHMIKFRGHFLIEGDLNPDNSDVDKLFIQLVQTYNQLFEENPINASGVDAKAILSARLSKSRRLENLIAQLPGEKKNGLFGNLIALSLGLTPNFKSNFDLAEDAKLQLSKDTYDDDLDNLLAQIGDQYADLFLAAKNLSDAILLSDILRVNTEITKAPLSASMIKRYDEHHQDLTLLKALVRQQLPEKYKEIFFDQSKNGYAGYIDGGASQEEFYKFIKPILEKMDGTEELLVKLNREDLLRKQRTFDNGSIPHQIHLGELHAILRRQEDFYPFLKDNREKIEKILTFRIPYYVGPLARGNSRFAWMTRKSEETITPWNFEEVVDKGASAQSFIERMTNFDKNLPNEKVLPKHSLLYEYFTVYNELTKVKYVTEGMRKPAFLSGEQKKAIVDLLFKTNRKVTVKQLKEDYFKKIECFDSVEISGVEDRFNASLGTYHDLLKIIKDKDFLDNEENEDILEDIVLTLTLFEDREMIEERLKTYAHLFDDKVMKQLKRRRYTGWGRLSRKLINGIRDKQSGKTILDFLKSDGFANRNFMQLIHDDSLTFKEDIQKAQVSGQGDSLHEHIANLAGSPAIKKGILQTVKVVDELVKVMGRHKPENIVIEMARENQTTQKGQKNSRERMKRIEEGIKELGSQILKEHPVENTQLQNEKLYLYYLQNGRDMYVDQELDINRLSDYDVDHIVPQSFLKDDSIDNKVLTRSDKARGKSDNVPSEEVVKKMKNYWRQLLNAKLITQRKFDNLTKAERGGLSELDKAGFIKRQLVETRQITKHVAQILDSRMNTKYDENDKLIREVKVITLKSKLVSDFRKDFQFYKVREINNYHHAHDAYLNAVVGTALIKKYPKLESEFVYGDYKVYDVRKMIAKSEQEIGKATAKYFFYSNIMNFFKTEITLANGEIRKRPLIETNGETGEIVWDKGRDFATVRKVLSMPQVNIVKKTEVQTGGFSKESILPKRNSDKLIARKKDWDPKKYGGFDSPTVAYSVLVVAKVEKGKSKKLKSVKELLGITIMERSSFEKNPIDFLEAKGYKEVKKDLIIKLPKYSLFELENGRKRMLASAGELQKGNELALPSKYVNFLYLASHYEKLKGSPEDNEQKQLFVEQHKHYLDEIIEQISEFSKRVILADANLDKVLSAYNKHRDKPIREQAENIIHLFTLTNLGAPAAFKYFDTTIDRKRYTSTKEVLDATLIHQSITGLYETRIDLSQLGGDGGPAPGGGEAAAKGGMDPLQLLQPLEAEIKGTKLKAHWNSGATITCVPQAFLEEEVPIKNIWIKTIHGEKEQPVYYLTFKIQGRKVEAEVISSPYDYILVSPSDIPWLMKKPLQLTTLVPLQEYEERLLKQTMLTGSYKEKLQSLFLKYDALWQHWENQVGHRRIKPHHIATGTVNPRPQKQYPINPKAKASIQTVINDLLKQGVLIQQNSIMNTPVYPVPKPDGKWRMVLDYREVNKTIPLIAAQNQHSAGILSSIFRGKYKTTLDLSNGFWAHSITPESYWLTAFTWLGQQYCWTRLPQGFLNSPALFTADVVDLLKEVPNVQVYVDDIYISHDDPREHLEQLEKVFSLLLNAGYVVSLKKSEIAQHEVEFLGFNITKEGRGLTETFKQKLLNITPPRDLKQLQSILGLLNFARNFIPNFSELVKPLYNIIATANGKYITWTTDNSQQLQNIISMLNSAENLEERNPEVRLIMKVNTSPSAGYIRFYNEFAKRPIMYLNYVYTKAEVKFTNTEKLLTTIHKGLIKALDLGMGQEILVYSPIVSMTKIQKTPLPERKALPIRWITWMSYLEDPRIQFHYDKTLPELQQVPTVTDDIIAKIKHPSEFSMVFYTDGSAIKHPNVNKSHNAGMGIAQVQFKPEFTVINTWSIPLGDHTAQLAEVAAVEFACKKALKIDGPVLIVTDSFYVAESVNKELPYWQSNGFFNNKKKPLKHVSKWKSIADCIQLKPDIIIIHEKGHQPTASTFHTEGNNLADKLATQGSYVVNAGKRTADGSEFEKRTADGSEFESPKKKAKVE

SEQ ID NO: 498 - protein, 2180 aa, synthetic construct
MPAAKRVKLDGGDKKYSIGLDIGTNSVGWAVITDEYKVPSKKFKVLGNTDRHSIKKNLIGALLFDSGETAEATRLKRTARRRYTRRKNRICYLQEIFSNEMAKVDDSFFHRLEESFLVEEDKKHERHPIFGNIVDEVAYHEKYPTIYHLRKKLVDSTDKADLRLIYLALAHMIKFRGHFLIEGDLNPDNSDVDKLFIQLVQTYNQLFEENPINASGVDAKAILSARLSKSRRLENLIAQLPGEKKNGLFGNLIALSLGLTPNFKSNFDLAEDAKLQLSKDTYDDDLDNLLAQIGDQYADLFLAAKNLSDAILLSDILRVNTEITKAPLSASMIKRYDEHHQDLTLLKALVRQQLPEKYKEIFFDQSKNGYAGYIDGGASQEEFYKFIKPILEKMDGTEELLVKLNREDLLRKQRTFDNGSIPHQIHLGELHAILRRQEDFYPFLKDNREKIEKILTFRIPYYVGPLARGNSRFAWMTRKSEETITPWNFEEVVDKGASAQSFIERMTNFDKNLPNEKVLPKHSLLYEYFTVYNELTKVKYVTEGMRKPAFLSGEQKKAIVDLLFKTNRKVTVKQLKEDYFKKIECFDSVEISGVEDRFNASLGTYHDLLKIIKDKDFLDNEENEDILEDIVLTLTLFEDREMIEERLKTYAHLFDDKVMKQLKRRRYTGWGRLSRKLINGIRDKQSGKTILDFLKSDGFANRNFMQLIHDDSLTFKEDIQKAQVSGQGDSLHEHIANLAGSPAIKKGILQTVKVVDELVKVMGRHKPENIVIEMARENQTTQKGQKNSRERMKRIEEGIKELGSQILKEHPVENTQLQNEKLYLYYLQNGRDMYVDQELDINRLSDYDVDHIVPQSFLKDDSIDNKVLTRSDKARGKSDNVPSEEVVKKMKNYWRQLLNAKLITQRKFDNLTKAERGGLSELDKAGFIKRQLVETRQITKHVAQILDSRMNTKYDENDKLIREVKVITLKSKLVSDFRKDFQFYKVREINNYHHAHDAYLNAVVGTALIKKYPKLESEFVYGDYKVYDVRKMIAKSEQEIGKATAKYFFYSNIMNFFKTEITLANGEIRKRPLIETNGETGEIVWDKGRDFATVRKVLSMPQVNIVKKTEVQTGGFSKESILPKRNSDKLIARKKDWDPKKYGGFDSPTVAYSVLVVAKVEKGKSKKLKSVKELLGITIMERSSFEKNPIDFLEAKGYKEVKKDLIIKLPKYSLFELENGRKRMLASAGELQKGNELALPSKYVNFLYLASHYEKLKGSPEDNEQKQLFVEQHKHYLDEIIEQISEFSKRVILADANLDKVLSAYNKHRDKPIREQAENIIHLFTLTNLGAPAAFKYFDTTIDRKRYTSTKEVLDATLIHQSITGLYETRIDLSQLGGDGGEAAAKEAAAKEAAAKGGMDPLQLLQPLEAEIKGTKLKAHWNSGATITCVPQAFLEEEVPIKNIWIKTIHGEKEQPVYYLTFKIQGRKVEAEVISSPYDYILVSPSDIPWLMKKPLQLTTLVPLQEYEERLLKQTMLTGSYKEKLQSLFLKYDALWQHWENQVGHRRIKPHHIATGTVNPRPQKQYPINPKAKASIQTVINDLLKQGVLIQQNSIMNTPVYPVPKPDGKWRMVLDYREVNKTIPLIAAQNQHSAGILSSIFRGKYKTTLDLSNGFWAHSITPESYWLTAFTWLGQQYCWTRLPQGFLNSPALFTADVVDLLKEVPNVQVYVDDIYISHDDPREHLEQLEKVFSLLLNAGYVVSLKKSEIAQHEVEFLGFNITKEGRGLTETFKQKLLNITPPRDLKQLQSILGLLNFARNFIPNFSELVKPLYNIIATANGKYITWTTDNSQQLQNIISMLNSAENLEERNPEVRLIMKVNTSPSAGYIRFYNEFAKRPIMYLNYVYTKAEVKFTNTEKLLTTIHKGLIKALDLGMGQEILVYSPIVSMTKIQKTPLPERKALPIRWITWMSYLEDPRIQFHYDKTLPELQQVPTVTDDIIAKIKHPSEFSMVFYTDGSAIKHPNVNKSHNAGMGIAQVQFKPEFTVINTWSIPLGDHTAQLAEVAAVEFACKKALKIDGPVLIVTDSFYVAESVNKELPYWQSNGFFNNKKKPLKHVSKWKSIADCIQLKPDIIIIHEKGHQPTASTFHTEGNNLADKLATQGSYVVNAGKRTADGSEFEKRTADGSEFESPKKKAKVE

SEQ ID NO: 499 - protein, 2176 aa, synthetic construct
MPAAKRVKLDGGDKKYSIGLDIGTNSVGWAVITDEYKVPSKKFKVLGNTDRHSIKKNLIGALLFDSGETAEATRLKRTARRRYTRRKNRICYLQEIFSNEMAKVDDSFFHRLEESFLVEEDKKHERHPIFGNIVDEVAYHEKYPTIYHLRKKLVDSTDKADLRLIYLALAHMIKFRGHFLIEGDLNPDNSDVDKLFIQLVQTYNQLFEENPINASGVDAKAILSARLSKSRRLENLIAQLPGEKKNGLFGNLIALSLGLTPNFKSNFDLAEDAKLQLSKDTYDDDLDNLLAQIGDQYADLFLAAKNLSDAILLSDILRVNTEITKAPLSASMIKRYDEHHQDLTLLKALVRQQLPEKYKEIFFDQSKNGYAGYIDGGASQEEFYKFIKPILEKMDGTEELLVKLNREDLLRKQRTFDNGSIPHQIHLGELHAILRRQEDFYPFLKDNREKIEKILTFRIPYYVGPLARGNSRFAWMTRKSEETITPWNFEEVVDKGASAQSFIERMTNFDKNLPNEKVLPKHSLLYEYFTVYNELTKVKYVTEGMRKPAFLSGEQKKAIVDLLFKTNRKVTVKQLKEDYFKKIECFDSVEISGVEDRFNASLGTYHDLLKIIKDKDFLDNEENEDILEDIVLTLTLFEDREMIEERLKTYAHLFDDKVMKQLKRRRYTGWGRLSRKLINGIRDKQSGKTILDFLKSDGFANRNFMQLIHDDSLTFKEDIQKAQVSGQGDSLHEHIANLAGSPAIKKGILQTVKVVDELVKVMGRHKPENIVIEMARENQTTQKGQKNSRERMKRIEEGIKELGSQILKEHPVENTQLQNEKLYLYYLQNGRDMYVDQELDINRLSDYDVDHIVPQSFLKDDSIDNKVLTRSDKARGKSDNVPSEEVVKKMKNYWRQLLNAKLITQRKFDNLTKAERGGLSELDKAGFIKRQLVETRQITKHVAQILDSRMNTKYDENDKLIREVKVITLKSKLVSDFRKDFQFYKVREINNYHHAHDAYLNAVVGTALIKKYPKLESEFVYGDYKVYDVRKMIAKSEQEIGKATAKYFFYSNIMNFFKTEITLANGEIRKRPLIETNGETGEIVWDKGRDFATVRKVLSMPQVNIVKKTEVQTGGFSKESILPKRNSDKLIARKKDWDPKKYGGFDSPTVAYSVLVVAKVEKGKSKKLKSVKELLGITIMERSSFEKNPIDFLEAKGYKEVKKDLIIKLPKYSLFELENGRKRMLASAGELQKGNELALPSKYVNFLYLASHYEKLKGSPEDNEQKQLFVEQHKHYLDEIIEQISEFSKRVILADANLDKVLSAYNKHRDKPIREQAENIIHLFTLTNLGAPAAFKYFDTTIDRKRYTSTKEVLDATLIHQSITGLYETRIDLSQLGGDGGEAAAKPAPGGSGGMDPLQLLQPLEAEIKGTKLKAHWNSGATITCVPQAFLEEEVPIKNIWIKTIHGEKEQPVYYLTFKIQGRKVEAEVISSPYDYILVSPSDIPWLMKKPLQLTTLVPLQEYEERLLKQTMLTGSYKEKLQSLFLKYDALWQHWENQVGHRRIKPHHIATGTVNPRPQKQYPINPKAKASIQTVINDLLKQGVLIQQNSIMNTPVYPVPKPDGKWRMVLDYREVNKTIPLIAAQNQHSAGILSSIFRGKYKTTLDLSNGFWAHSITPESYWLTAFTWLGQQYCWTRLPQGFLNSPALFTADVVDLLKEVPNVQVYVDDIYISHDDPREHLEQLEKVFSLLLNAGYVVSLKKSEIAQHEVEFLGFNITKEGRGLTETFKQKLLNITPPRDLKQLQSILGLLNFARNFIPNFSELVKPLYNIIATANGKYITWTTDNSQQLQNIISMLNSAENLEERNPEVRLIMKVNTSPSAGYIRFYNEFAKRPIMYLNYVYTKAEVKFTNTEKLLTTIHKGLIKALDLGMGQEILVYSPIVSMTKIQKTPLPERKALPIRWITWMSYLEDPRIQFHYDKTLPELQQVPTVTDDIIAKIKHPSEFSMVFYTDGSAIKHPNVNKSHNAGMGIAQVQFKPEFTVINTWSIPLGDHTAQLAEVAAVEFACKKALKIDGPVLIVTDSFYVAESVNKELPYWQSNGFFNNKKKPLKHVSKWKSIADCIQLKPDIIIIHEKGHQPTASTFHTEGNNLADKLATQGSYVVNAGKRTADGSEFEKRTADGSEFESPKKKAKVE

SEQ ID NO: 500 - protein, 2178 aa, synthetic construct
MPAAKRVKLDGGDKKYSIGLDIGTNSVGWAVITDEYKVPSKKFKVLGNTDRHSIKKNLIGALLFDSGETAEATRLKRTARRRYTRRKNRICYLQEIFSNEMAKVDDSFFHRLEESFLVEEDKKHERHPIFGNIVDEVAYHEKYPTIYHLRKKLVDSTDKADLRLIYLALAHMIKFRGHFLIEGDLNPDNSDVDKLFIQLVQTYNQLFEENPINASGVDAKAILSARLSKSRRLENLIAQLPGEKKNGLFGNLIALSLGLTPNFKSNFDLAEDAKLQLSKDTYDDDLDNLLAQIGDQYADLFLAAKNLSDAILLSDILRVNTEITKAPLSASMIKRYDEHHQDLTLLKALVRQQLPEKYKEIFFDQSKNGYAGYIDGGASQEEFYKFIKPILEKMDGTEELLVKLNREDLLRKQRTFDNGSIPHQIHLGELHAILRRQEDFYPFLKDNREKIEKILTFRIPYYVGPLARGNSRFAWMTRKSEETITPWNFEEVVDKGASAQSFIERMTNFDKNLPNEKVLPKHSLLYEYFTVYNELTKVKYVTEGMRKPAFLSGEQKKAIVDLLFKTNRKVTVKQLKEDYFKKIECFDSVEISGVEDRFNASLGTYHDLLKIIKDKDFLDNEENEDILEDIVLTLTLFEDREMIEERLKTYAHLFDDKVMKQLKRRRYTGWGRLSRKLINGIRDKQSGKTILDFLKSDGFANRNFMQLIHDDSLTFKEDIQKAQVSGQGDSLHEHIANLAGSPAIKKGILQTVKVVDELVKVMGRHKPENIVIEMARENQTTQKGQKNSRERMKRIEEGIKELGSQILKEHPVENTQLQNEKLYLYYLQNGRDMYVDQELDINRLSDYDVDHIVPQSFLKDDSIDNKVLTRSDKARGKSDNVPSEEVVKKMKNYWRQLLNAKLITQRKFDNLTKAERGGLSELDKAGFIKRQLVETRQITKHVAQILDSRMNTKYDENDKLIREVKVITLKSKLVSDFRKDFQFYKVREINNYHHAHDAYLNAVVGTALIKKYPKLESEFVYGDYKVYDVRKMIAKSEQEIGKATAKYFFYSNIMNFFKTEITLANGEIRKRPLIETNGETGEIVWDKGRDFATVRKVLSMPQVNIVKKTEVQTGGFSKESILPKRNSDKLIARKKDWDPKKYGGFDSPTVAYSVLVVAKVEKGKSKKLKSVKELLGITIMERSSFEKNPIDFLEAKGYKEVKKDLIIKLPKYSLFELENGRKRMLASAGELQKGNELALPSKYVNFLYLASHYEKLKGSPEDNEQKQLFVEQHKHYLDEIIEQISEFSKRVILADANLDKVLSAYNKHRDKPIREQAENIIHLFTLTNLGAPAAFKYFDTTIDRKRYTSTKEVLDATLIHQSITGLYETRIDLSQLGGDGGPAPAPAPAPAPAPGGMDPLQLLQPLEAEIKGTKLKAHWNSGATITCVPQAFLEEEVPIKNIWIKTIHGEKEQPVYYLTFKIQGRKVEAEVISSPYDYILVSPSDIPWLMKKPLQLTTLVPLQEYEERLLKQTMLTGSYKEKLQSLFLKYDALWQHWENQVGHRRIKPHHIATGTVNPRPQKQYPINPKAKASIQTVINDLLKQGVLIQQNSIMNTPVYPVPKPDGKWRMVLDYREVNKTIPLIAAQNQHSAGILSSIFRGKYKTTLDLSNGFWAHSITPESYWLTAFTWLGQQYCWTRLPQGFLNSPALFTADVVDLLKEVPNVQVYVDDIYISHDDPREHLEQLEKVFSLLLNAGYVVSLKKSEIAQHEVEFLGFNITKEGRGLTETFKQKLLNITPPRDLKQLQSILGLLNFARNFIPNFSELVKPLYNIIATANGKYITWTTDNSQQLQNIISMLNSAENLEERNPEVRLIMKVNTSPSAGYIRFYNEFAKRPIMYLNYVYTKAEVKFTNTEKLLTTIHKGLIKALDLGMGQEILVYSPIVSMTKIQKTPLPERKALPIRWITWMSYLEDPRIQFHYDKTLPELQQVPTVTDDIIAKIKHPSEFSMVFYTDGSAIKHPNVNKSHNAGMGIAQVQFKPEFTVINTWSIPLGDHTAQLAEVAAVEFACKKALKIDGPVLIVTDSFYVAESVNKELPYWQSNGFFNNKKKPLKHVSKWKSIADCIQLKPDIIIIHEKGHQPTASTFHTEGNNLADKLATQGSYVVNAGKRTADGSEFEKRTADGSEFESPKKKAKVE

SEQ ID NO: 501 - protein, 2176 aa, synthetic construct
MPAAKRVKLDGGDKKYSIGLDIGTNSVGWAVITDEYKVPSKKFKVLGNTDRHSIKKNLIGALLFDSGETAEATRLKRTARRRYTRRKNRICYLQEIFSNEMAKVDDSFFHRLEESFLVEEDKKHERHPIFGNIVDEVAYHEKYPTIYHLRKKLVDSTDKADLRLIYLALAHMIKFRGHFLIEGDLNPDNSDVDKLFIQLVQTYNQLFEENPINASGVDAKAILSARLSKSRRLENLIAQLPGEKKNGLFGNLIALSLGLTPNFKSNFDLAEDAKLQLSKDTYDDDLDNLLAQIGDQYADLFLAAKNLSDAILLSDILRVNTEITKAPLSASMIKRYDEHHQDLTLLKALVRQQLPEKYKEIFFDQSKNGYAGYIDGGASQEEFYKFIKPILEKMDGTEELLVKLNREDLLRKQRTFDNGSIPHQIHLGELHAILRRQEDFYPFLKDNREKIEKILTFRIPYYVGPLARGNSRFAWMTRKSEETITPWNFEEVVDKGASAQSFIERMTNFDKNLPNEKVLPKHSLLYEYFTVYNELTKVKYVTEGMRKPAFLSGEQKKAIVDLLFKTNRKVTVKQLKEDYFKKIECFDSVEISGVEDRFNASLGTYHDLLKIIKDKDFLDNEENEDILEDIVLTLTLFEDREMIEERLKTYAHLFDDKVMKQLKRRRYTGWGRLSRKLINGIRDKQSGKTILDFLKSDGFANRNFMQLIHDDSLTFKEDIQKAQVSGQGDSLHEHIANLAGSPAIKKGILQTVKVVDELVKVMGRHKPENIVIEMARENQTTQKGQKNSRERMKRIEEGIKELGSQILKEHPVENTQLQNEKLYLYYLQNGRDMYVDQELDINRLSDYDVDHIVPQSFLKDDSIDNKVLTRSDKARGKSDNVPSEEVVKKMKNYWRQLLNAKLITQRKFDNLTKAERGGLSELDKAGFIKRQLVETRQITKHVAQILDSRMNTKYDENDKLIREVKVITLKSKLVSDFRKDFQFYKVREINNYHHAHDAYLNAVVGTALIKKYPKLESEFVYGDYKVYDVRKMIAKSEQEIGKATAKYFFYSNIMNFFKTEITLANGEIRKRPLIETNGETGEIVWDKGRDFATVRKVLSMPQVNIVKKTEVQTGGFSKESILPKRNSDKLIARKKDWDPKKYGGFDSPTVAYSVLVVAKVEKGKSKKLKSVKELLGITIMERSSFEKNPIDFLEAKGYKEVKKDLIIKLPKYSLFELENGRKRMLASAGELQKGNELALPSKYVNFLYLASHYEKLKGSPEDNEQKQLFVEQHKHYLDEIIEQISEFSKRVILADANLDKVLSAYNKHRDKPIREQAENIIHLFTLTNLGAPAAFKYFDTTIDRKRYTSTKEVLDATLIHQSITGLYETRIDLSQLGGDGGGGGEAAAKGGSGGMDPLQLLQPLEAEIKGTKLKAHWNSGATITCVPQAFLEEEVPIKNIWIKTIHGEKEQPVYYLTFKIQGRKVEAEVISSPYDYILVSPSDIPWLMKKPLQLTTLVPLQEYEERLLKQTMLTGSYKEKLQSLFLKYDALWQHWENQVGHRRIKPHHIATGTVNPRPQKQYPINPKAKASIQTVINDLLKQGVLIQQNSIMNTPVYPVPKPDGKWRMVLDYREVNKTIPLIAAQNQHSAGILSSIFRGKYKTTLDLSNGFWAHSITPESYWLTAFTWLGQQYCWTRLPQGFLNSPALFTADVVDLLKEVPNVQVYVDDIYISHDDPREHLEQLEKVFSLLLNAGYVVSLKKSEIAQHEVEFLGFNITKEGRGLTETFKQKLLNITPPRDLKQLQSILGLLNFARNFIPNFSELVKPLYNIIATANGKYITWTTDNSQQLQNIISMLNSAENLEERNPEVRLIMKVNTSPSAGYIRFYNEFAKRPIMYLNYVYTKAEVKFTNTEKLLTTIHKGLIKALDLGMGQEILVYSPIVSMTKIQKTPLPERKALPIRWITWMSYLEDPRIQFHYDKTLPELQQVPTVTDDIIAKIKHPSEFSMVFYTDGSAIKHPNVNKSHNAGMGIAQVQFKPEFTVINTWSIPLGDHTAQLAEVAAVEFACKKALKIDGPVLIVTDSFYVAESVNKELPYWQSNGFFNNKKKPLKHVSKWKSIADCIQLKPDIIIIHEKGHQPTASTFHTEGNNLADKLATQGSYVVNAGKRTADGSEFEKRTADGSEFESPKKKAKVE

SEQ ID NO: 502 - protein, 2176 aa, synthetic construct
MPAAKRVKLDGGDKKYSIGLDIGTNSVGWAVITDEYKVPSKKFKVLGNTDRHSIKKNLIGALLFDSGETAEATRLKRTARRRYTRRKNRICYLQEIFSNEMAKVDDSFFHRLEESFLVEEDKKHERHPIFGNIVDEVAYHEKYPTIYHLRKKLVDSTDKADLRLIYLALAHMIKFRGHFLIEGDLNPDNSDVDKLFIQLVQTYNQLFEENPINASGVDAKAILSARLSKSRRLENLIAQLPGEKKNGLFGNLIALSLGLTPNFKSNFDLAEDAKLQLSKDTYDDDLDNLLAQIGDQYADLFLAAKNLSDAILLSDILRVNTEITKAPLSASMIKRYDEHHQDLTLLKALVRQQLPEKYKEIFFDQSKNGYAGYIDGGASQEEFYKFIKPILEKMDGTEELLVKLNREDLLRKQRTFDNGSIPHQIHLGELHAILRRQEDFYPFLKDNREKIEKILTFRIPYYVGPLARGNSRFAWMTRKSEETITPWNFEEVVDKGASAQSFIERMTNFDKNLPNEKVLPKHSLLYEYFTVYNELTKVKYVTEGMRKPAFLSGEQKKAIVDLLFKTNRKVTVKQLKEDYFKKIECFDSVEISGVEDRFNASLGTYHDLLKIIKDKDFLDNEENEDILEDIVLTLTLFEDREMIEERLKTYAHLFDDKVMKQLKRRRYTGWGRLSRKLINGIRDKQSGKTILDFLKSDGFANRNFMQLIHDDSLTFKEDIQKAQVSGQGDSLHEHIANLAGSPAIKKGILQTVKVVDELVKVMGRHKPENIVIEMARENQTTQKGQKNSRERMKRIEEGIKELGSQILKEHPVENTQLQNEKLYLYYLQNGRDMYVDQELDINRLSDYDVDHIVPQSFLKDDSIDNKVLTRSDKARGKSDNVPSEEVVKKMKNYWRQLLNAKLITQRKFDNLTKAERGGLSELDKAGFIKRQLVETRQITKHVAQILDSRMNTKYDENDKLIREVKVITLKSKLVSDFRKDFQFYKVREINNYHHAHDAYLNAVVGTALIKKYPKLESEFVYGDYKVYDVRKMIAKSEQEIGKATAKYFFYSNIMNFFKTEITLANGEIRKRPLIETNGETGEIVWDKGRDFATVRKVLSMPQVNIVKKTEVQTGGFSKESILPKRNSDKLIARKKDWDPKKYGGFDSPTVAYSVLVVAKVEKGKSKKLKSVKELLGITIMERSSFEKNPIDFLEAKGYKEVKKDLIIKLPKYSLFELENGRKRMLASAGELQKGNELALPSKYVNFLYLASHYEKLKGSPEDNEQKQLFVEQHKHYLDEIIEQISEFSKRVILADANLDKVLSAYNKHRDKPIREQAENIIHLFTLTNLGAPAAFKYFDTTIDRKRYTSTKEVLDATLIHQSITGLYETRIDLSQLGGDGGGGSPAPEAAAKGGMDPLQLLQPLEAEIKGTKLKAHWNSGATITCVPQAFLEEEVPIKNIWIKTIHGEKEQPVYYLTFKIQGRKVEAEVISSPYDYILVSPSDIPWLMKKPLQLTTLVPLQEYEERLLKQTMLTGSYKEKLQSLFLKYDALWQHWENQVGHRRIKPHHIATGTVNPRPQKQYPINPKAKASIQTVINDLLKQGVLIQQNSIMNTPVYPVPKPDGKWRMVLDYREVNKTIPLIAAQNQHSAGILSSIFRGKYKTTLDLSNGFWAHSITPESYWLTAFTWLGQQYCWTRLPQGFLNSPALFTADVVDLLKEVPNVQVYVDDIYISHDDPREHLEQLEKVFSLLLNAGYVVSLKKSEIAQHEVEFLGFNITKEGRGLTETFKQKLLNITPPRDLKQLQSILGLLNFARNFIPNFSELVKPLYNIIATANGKYITWTTDNSQQLQNIISMLNSAENLEERNPEVRLIMKVNTSPSAGYIRFYNEFAKRPIMYLNYVYTKAEVKFTNTEKLLTTIHKGLIKALDLGMGQEILVYSPIVSMTKIQKTPLPERKALPIRWITWMSYLEDPRIQFHYDKTLPELQQVPTVTDDIIAKIKHPSEFSMVFYTDGSAIKHPNVNKSHNAGMGIAQVQFKPEFTVINTWSIPLGDHTAQLAEVAAVEFACKKALKIDGPVLIVTDSFYVAESVNKELPYWQSNGFFNNKKKPLKHVSKWKSIADCIQLKPDIIIIHEKGHQPTASTFHTEGNNLADKLATQGSYVVNAGKRTADGSEFEKRTADGSEFESPKKKAKVE

SEQ ID NO: 503 - protein, 2174 aa, synthetic construct
MPAAKRVKLDGGDKKYSIGLDIGTNSVGWAVITDEYKVPSKKFKVLGNTDRHSIKKNLIGALLFDSGETAEATRLKRTARRRYTRRKNRICYLQEIFSNEMAKVDDSFFHRLEESFLVEEDKKHERHPIFGNIVDEVAYHEKYPTIYHLRKKLVDSTDKADLRLIYLALAHMIKFRGHFLIEGDLNPDNSDVDKLFIQLVQTYNQLFEENPINASGVDAKAILSARLSKSRRLENLIAQLPGEKKNGLFGNLIALSLGLTPNFKSNFDLAEDAKLQLSKDTYDDDLDNLLAQIGDQYADLFLAAKNLSDAILLSDILRVNTEITKAPLSASMIKRYDEHHQDLTLLKALVRQQLPEKYKEIFFDQSKNGYAGYIDGGASQEEFYKFIKPILEKMDGTEELLVKLNREDLLRKQRTFDNGSIPHQIHLGELHAILRRQEDFYPFLKDNREKIEKILTFRIPYYVGPLARGNSRFAWMTRKSEETITPWNFEEVVDKGASAQSFIERMTNFDKNLPNEKVLPKHSLLYEYFTVYNELTKVKYVTEGMRKPAFLSGEQKKAIVDLLFKTNRKVTVKQLKEDYFKKIECFDSVEISGVEDRFNASLGTYHDLLKIIKDKDFLDNEENEDILEDIVLTLTLFEDREMIEERLKTYAHLFDDKVMKQLKRRRYTGWGRLSRKLINGIRDKQSGKTILDFLKSDGFANRNFMQLIHDDSLTFKEDIQKAQVSGQGDSLHEHIANLAGSPAIKKGILQTVKVVDELVKVMGRHKPENIVIEMARENQTTQKGQKNSRERMKRIEEGIKELGSQILKEHPVENTQLQNEKLYLYYLQNGRDMYVDQELDINRLSDYDVDHIVPQSFLKDDSIDNKVLTRSDKARGKSDNVPSEEVVKKMKNYWRQLLNAKLITQRKFDNLTKAERGGLSELDKAGFIKRQLVETRQITKHVAQILDSRMNTKYDENDKLIREVKVITLKSKLVSDFRKDFQFYKVREINNYHHAHDAYLNAVVGTALIKKYPKLESEFVYGDYKVYDVRKMIAKSEQEIGKATAKYFFYSNIMNFFKTEITLANGEIRKRPLIETNGETGEIVWDKGRDFATVRKVLSMPQVNIVKKTEVQTGGFSKESILPKRNSDKLIARKKDWDPKKYGGFDSPTVAYSVLVVAKVEKGKSKKLKSVKELLGITIMERSSFEKNPIDFLEAKGYKEVKKDLIIKLPKYSLFELENGRKRMLASAGELQKGNELALPSKYVNFLYLASHYEKLKGSPEDNEQKQLFVEQHKHYLDEIIEQISEFSKRVILADANLDKVLSAYNKHRDKPIREQAENIIHLFTLTNLGAPAAFKYFDTTIDRKRYTSTKEVLDATLIHQSITGLYETRIDLSQLGGDGGPAPAPAPAPGGMDPLQLLQPLEAEIKGTKLKAHWNSGATITCVPQAFLEEEVPIKNIWIKTIHGEKEQPVYYLTFKIQGRKVEAEVISSPYDYILVSPSDIPWLMKKPLQLTTLVPLQEYEERLLKQTMLTGSYKEKLQSLFLKYDALWQHWENQVGHRRIKPHHIATGTVNPRPQKQYPINPKAKASIQTVINDLLKQGVLIQQNSIMNTPVYPVPKPDGKWRMVLDYREVNKTIPLIAAQNQHSAGILSSIFRGKYKTTLDLSNGFWAHSITPESYWLTAFTWLGQQYCWTRLPQGFLNSPALFTADVVDLLKEVPNVQVYVDDIYISHDDPREHLEQLEKVFSLLLNAGYVVSLKKSEIAQHEVEFLGFNITKEGRGLTETFKQKLLNITPPRDLKQLQSILGLLNFARNFIPNFSELVKPLYNIIATANGKYITWTTDNSQQLQNIISMLNSAENLEERNPEVRLIMKVNTSPSAGYIRFYNEFAKRPIMYLNYVYTKAEVKFTNTEKLLTTIHKGLIKALDLGMGQEILVYSPIVSMTKIQKTPLPERKALPIRWITWMSYLEDPRIQFHYDKTLPELQQVPTVTDDIIAKIKHPSEFSMVFYTDGSAIKHPNVNKSHNAGMGIAQVQFKPEFTVINTWSIPLGDHTAQLAEVAAVEFACKKALKIDGPVLIVTDSFYVAESVNKELPYWQSNGFFNNKKKPLKHVSKWKSIADCIQLKPDIIIIHEKGHQPTASTFHTEGNNLADKLATQGSYVVNAGKRTADGSEFEKRTADGSEFESPKKKAKVE

SEQ ID NO: 504 - protein, 2176 aa, synthetic construct
MPAAKRVKLDGGDKKYSIGLDIGTNSVGWAVITDEYKVPSKKFKVLGNTDRHSIKKNLIGALLFDSGETAEATRLKRTARRRYTRRKNRICYLQEIFSNEMAKVDDSFFHRLEESFLVEEDKKHERHPIFGNIVDEVAYHEKYPTIYHLRKKLVDSTDKADLRLIYLALAHMIKFRGHFLIEGDLNPDNSDVDKLFIQLVQTYNQLFEENPINASGVDAKAILSARLSKSRRLENLIAQLPGEKKNGLFGNLIALSLGLTPNFKSNFDLAEDAKLQLSKDTYDDDLDNLLAQIGDQYADLFLAAKNLSDAILLSDILRVNTEITKAPLSASMIKRYDEHHQDLTLLKALVRQQLPEKYKEIFFDQSKNGYAGYIDGGASQEEFYKFIKPILEKMDGTEELLVKLNREDLLRKQRTFDNGSIPHQIHLGELHAILRRQEDFYPFLKDNREKIEKILTFRIPYYVGPLARGNSRFAWMTRKSEETITPWNFEEVVDKGASAQSFIERMTNFDKNLPNEKVLPKHSLLYEYFTVYNELTKVKYVTEGMRKPAFLSGEQKKAIVDLLFKTNRKVTVKQLKEDYFKKIECFDSVEISGVEDRFNASLGTYHDLLKIIKDKDFLDNEENEDILEDIVLTLTLFEDREMIEERLKTYAHLFDDKVMKQLKRRRYTGWGRLSRKLINGIRDKQSGKTILDFLKSDGFANRNFMQLIHDDSLTFKEDIQKAQVSGQGDSLHEHIANLAGSPAIKKGILQTVKVVDELVKVMGRHKPENIVIEMARENQTTQKGQKNSRERMKRIEEGIKELGSQILKEHPVENTQLQNEKLYLYYLQNGRDMYVDQELDINRLSDYDVDHIVPQSFLKDDSIDNKVLTRSDKARGKSDNVPSEEVVKKMKNYWRQLLNAKLITQRKFDNLTKAERGGLSELDKAGFIKRQLVETRQITKHVAQILDSRMNTKYDENDKLIREVKVITLKSKLVSDFRKDFQFYKVREINNYHHAHDAYLNAVVGTALIKKYPKLESEFVYGDYKVYDVRKMIAKSEQEIGKATAKYFFYSNIMNFFKTEITLANGEIRKRPLIETNGETGEIVWDKGRDFATVRKVLSMPQVNIVKKTEVQTGGFSKESILPKRNSDKLIARKKDWDPKKYGGFDSPTVAYSVLVVAKVEKGKSKKLKSVKELLGITIMERSSFEKNPIDFLEAKGYKEVKKDLIIKLPKYSLFELENGRKRMLASAGELQKGNELALPSKYVNFLYLASHYEKLKGSPEDNEQKQLFVEQHKHYLDEIIEQISEFSKRVILADANLDKVLSAYNKHRDKPIREQAENIIHLFTLTNLGAPAAFKYFDTTIDRKRYTSTKEVLDATLIHQSITGLYETRIDLSQLGGDGGGGGEAAAKGSSGGMDPLQLLQPLEAEIKGTKLKAHWNSGATITCVPQAFLEEEVPIKNIWIKTIHGEKEQPVYYLTFKIQGRKVEAEVISSPYDYILVSPSDIPWLMKKPLQLTTLVPLQEYEERLLKQTMLTGSYKEKLQSLFLKYDALWQHWENQVGHRRIKPHHIATGTVNPRPQKQYPINPKAKASIQTVINDLLKQGVLIQQNSIMNTPVYPVPKPDGKWRMVLDYREVNKTIPLIAAQNQHSAGILSSIFRGKYKTTLDLSNGFWAHSITPESYWLTAFTWLGQQYCWTRLPQGFLNSPALFTADVVDLLKEVPNVQVYVDDIYISHDDPREHLEQLEKVFSLLLNAGYVVSLKKSEIAQHEVEFLGFNITKEGRGLTETFKQKLLNITPPRDLKQLQSILGLLNFARNFIPNFSELVKPLYNIIATANGKYITWTTDNSQQLQNIISMLNSAENLEERNPEVRLIMKVNTSPSAGYIRFYNEFAKRPIMYLNYVYTKAEVKFTNTEKLLTTIHKGLIKALDLGMGQEILVYSPIVSMTKIQKTPLPERKALPIRWITWMSYLEDPRIQFHYDKTLPELQQVPTVTDDIIAKIKHPSEFSMVFYTDGSAIKHPNVNKSHNAGMGIAQVQFKPEFTVINTWSIPLGDHTAQLAEVAAVEFACKKALKIDGPVLIVTDSFYVAESVNKELPYWQSNGFFNNKKKPLKHVSKWKSIADCIQLKPDIIIIHEKGHQPTASTFHTEGNNLADKLATQGSYVVNAGKRTADGSEFEKRTADGSEFESPKKKAKVE

SEQ ID NO: 505 - protein, 2176 aa, synthetic construct
MPAAKRVKLDGGDKKYSIGLDIGTNSVGWAVITDEYKVPSKKFKVLGNTDRHSIKKNLIGALLFDSGETAEATRLKRTARRRYTRRKNRICYLQEIFSNEMAKVDDSFFHRLEESFLVEEDKKHERHPIFGNIVDEVAYHEKYPTIYHLRKKLVDSTDKADLRLIYLALAHMIKFRGHFLIEGDLNPDNSDVDKLFIQLVQTYNQLFEENPINASGVDAKAILSARLSKSRRLENLIAQLPGEKKNGLFGNLIALSLGLTPNFKSNFDLAEDAKLQLSKDTYDDDLDNLLAQIGDQYADLFLAAKNLSDAILLSDILRVNTEITKAPLSASMIKRYDEHHQDLTLLKALVRQQLPEKYKEIFFDQSKNGYAGYIDGGASQEEFYKFIKPILEKMDGTEELLVKLNREDLLRKQRTFDNGSIPHQIHLGELHAILRRQEDFYPFLKDNREKIEKILTFRIPYYVGPLARGNSRFAWMTRKSEETITPWNFEEVVDKGASAQSFIERMTNFDKNLPNEKVLPKHSLLYEYFTVYNELTKVKYVTEGMRKPAFLSGEQKKAIVDLLFKTNRKVTVKQLKEDYFKKIECFDSVEISGVEDRFNASLGTYHDLLKIIKDKDFLDNEENEDILEDIVLTLTLFEDREMIEERLKTYAHLFDDKVMKQLKRRRYTGWGRLSRKLINGIRDKQSGKTILDFLKSDGFANRNFMQLIHDDSLTFKEDIQKAQVSGQGDSLHEHIANLAGSPAIKKGILQTVKVVDELVKVMGRHKPENIVIEMARENQTTQKGQKNSRERMKRIEEGIKELGSQILKEHPVENTQLQNEKLYLYYLQNGRDMYVDQELDINRLSDYDVDHIVPQSFLKDDSIDNKVLTRSDKARGKSDNVPSEEVVKKMKNYWRQLLNAKLITQRKFDNLTKAERGGLSELDKAGFIKRQLVETRQITKHVAQILDSRMNTKYDENDKLIREVKVITLKSKLVSDFRKDFQFYKVREINNYHHAHDAYLNAVVGTALIKKYPKLESEFVYGDYKVYDVRKMIAKSEQEIGKATAKYFFYSNIMNFFKTEITLANGEIRKRPLIETNGETGEIVWDKGRDFATVRKVLSMPQVNIVKKTEVQTGGFSKESILPKRNSDKLIARKKDWDPKKYGGFDSPTVAYSVLVVAKVEKGKSKKLKSVKELLGITIMERSSFEKNPIDFLEAKGYKEVKKDLIIKLPKYSLFELENGRKRMLASAGELQKGNELALPSKYVNFLYLASHYEKLKGSPEDNEQKQLFVEQHKHYLDEIIEQISEFSKRVILADANLDKVLSAYNKHRDKPIREQAENIIHLFTLTNLGAPAAFKYFDTTIDRKRYTSTKEVLDATLIHQSITGLYETRIDLSQLGGDGGEAAAKGGSGSSGGMDPLQLLQPLEAEIKGTKLKAHWNSGATITCVPQAFLEEEVPIKNIWIKTIHGEKEQPVYYLTFKIQGRKVEAEVISSPYDYILVSPSDIPWLMKKPLQLTTLVPLQEYEERLLKQTMLTGSYKEKLQSLFLKYDALWQHWENQVGHRRIKPHHIATGTVNPRPQKQYPINPKAKASIQTVINDLLKQGVLIQQNSIMNTPVYPVPKPDGKWRMVLDYREVNKTIPLIAAQNQHSAGILSSIFRGKYKTTLDLSNGFWAHSITPESYWLTAFTWLGQQYCWTRLPQGFLNSPALFTADVVDLLKEVPNVQVYVDDIYISHDDPREHLEQLEKVFSLLLNAGYVVSLKKSEIAQHEVEFLGFNITKEGRGLTETFKQKLLNITPPRDLKQLQSILGLLNFARNFIPNFSELVKPLYNIIATANGKYITWTTDNSQQLQNIISMLNSAENLEERNPEVRLIMKVNTSPSAGYIRFYNEFAKRPIMYLNYVYTKAEVKFTNTEKLLTTIHKGLIKALDLGMGQEILVYSPIVSMTKIQKTPLPERKALPIRWITWMSYLEDPRIQFHYDKTLPELQQVPTVTDDIIAKIKHPSEFSMVFYTDGSAIKHPNVNKSHNAGMGIAQVQFKPEFTVINTWSIPLGDHTAQLAEVAAVEFACKKALKIDGPVLIVTDSFYVAESVNKELPYWQSNGFFNNKKKPLKHVSKWKSIADCIQLKPDIIIIHEKGHQPTASTFHTEGNNLADKLATQGSYVVNAGKRTADGSEFEKRTADGSEFESPKKKAKVE

SEQ ID NO: 506 - protein, 2176 aa, synthetic construct
MPAAKRVKLDGGDKKYSIGLDIGTNSVGWAVITDEYKVPSKKFKVLGNTDRHSIKKNLIGALLFDSGETAEATRLKRTARRRYTRRKNRICYLQEIFSNEMAKVDDSFFHRLEESFLVEEDKKHERHPIFGNIVDEVAYHEKYPTIYHLRKKLVDSTDKADLRLIYLALAHMIKFRGHFLIEGDLNPDNSDVDKLFIQLVQTYNQLFEENPINASGVDAKAILSARLSKSRRLENLIAQLPGEKKNGLFGNLIALSLGLTPNFKSNFDLAEDAKLQLSKDTYDDDLDNLLAQIGDQYADLFLAAKNLSDAILLSDILRVNTEITKAPLSASMIKRYDEHHQDLTLLKALVRQQLPEKYKEIFFDQSKNGYAGYIDGGASQEEFYKFIKPILEKMDGTEELLVKLNREDLLRKQRTFDNGSIPHQIHLGELHAILRRQEDFYPFLKDNREKIEKILTFRIPYYVGPLARGNSRFAWMTRKSEETITPWNFEEVVDKGASAQSFIERMTNFDKNLPNEKVLPKHSLLYEYFTVYNELTKVKYVTEGMRKPAFLSGEQKKAIVDLLFKTNRKVTVKQLKEDYFKKIECFDSVEISGVEDRFNASLGTYHDLLKIIKDKDFLDNEENEDILEDIVLTLTLFEDREMIEERLKTYAHLFDDKVMKQLKRRRYTGWGRLSRKLINGIRDKQSGKTILDFLKSDGFANRNFMQLIHDDSLTFKEDIQKAQVSGQGDSLHEHIANLAGSPAIKKGILQTVKVVDELVKVMGRHKPENIVIEMARENQTTQKGQKNSRERMKRIEEGIKELGSQILKEHPVENTQLQNEKLYLYYLQNGRDMYVDQELDINRLSDYDVDHIVPQSFLKDDSIDNKVLTRSDKARGKSDNVPSEEVVKKMKNYWRQLLNAKLITQRKFDNLTKAERGGLSELDKAGFIKRQLVETRQITKHVAQILDSRMNTKYDENDKLIREVKVITLKSKLVSDFRKDFQFYKVREINNYHHAHDAYLNAVVGTALIKKYPKLESEFVYGDYKVYDVRKMIAKSEQEIGKATAKYFFYSNIMNFFKTEITLANGEIRKRPLIETNGETGEIVWDKGRDFATVRKVLSMPQVNIVKKTEVQTGGFSKESILPKRNSDKLIARKKDWDPKKYGGFDSPTVAYSVLVVAKVEKGKSKKLKSVKELLGITIMERSSFEKNPIDFLEAKGYKEVKKDLIIKLPKYSLFELENGRKRMLASAGELQKGNELALPSKYVNFLYLASHYEKLKGSPEDNEQKQLFVEQHKHYLDEIIEQISEFSKRVILADANLDKVLSAYNKHRDKPIREQAENIIHLFTLTNLGAPAAFKYFDTTIDRKRYTSTKEVLDATLIHQSITGLYETRIDLSQLGGDGGGSSEAAAKPAPGGMDPLQLLQPLEAEIKGTKLKAHWNSGATITCVPQAFLEEEVPIKNIWIKTIHGEKEQPVYYLTFKIQGRKVEAEVISSPYDYILVSPSDIPWLMKKPLQLTTLVPLQEYEERLLKQTMLTGSYKEKLQSLFLKYDALWQHWENQVGHRRIKPHHIATGTVNPRPQKQYPINPKAKASIQTVINDLLKQGVLIQQNSIMNTPVYPVPKPDGKWRMVLDYREVNKTIPLIAAQNQHSAGILSSIFRGKYKTTLDLSNGFWAHSITPESYWLTAFTWLGQQYCWTRLPQGFLNSPALFTADVVDLLKEVPNVQVYVDDIYISHDDPREHLEQLEKVFSLLLNAGYVVSLKKSEIAQHEVEFLGFNITKEGRGLTETFKQKLLNITPPRDLKQLQSILGLLNFARNFIPNFSELVKPLYNIIATANGKYITWTTDNSQQLQNIISMLNSAENLEERNPEVRLIMKVNTSPSAGYIRFYNEFAKRPIMYLNYVYTKAEVKFTNTEKLLTTIHKGLIKALDLGMGQEILVYSPIVSMTKIQKTPLPERKALPIRWITWMSYLEDPRIQFHYDKTLPELQQVPTVTDDIIAKIKHPSEFSMVFYTDGSAIKHPNVNKSHNAGMGIAQVQFKPEFTVINTWSIPLGDHTAQLAEVAAVEFACKKALKIDGPVLIVTDSFYVAESVNKELPYWQSNGFFNNKKKPLKHVSKWKSIADCIQLKPDIIIIHEKGHQPTASTFHTEGNNLADKLATQGSYVVNAGKRTADGSEFEKRTADGSEFESPKKKAKVE

SEQ ID NO: 507 - protein, 2176 aa, synthetic construct
MPAAKRVKLDGGDKKYSIGLDIGTNSVGWAVITDEYKVPSKKFKVLGNTDRHSIKKNLIGALLFDSGETAEATRLKRTARRRYTRRKNRICYLQEIFSNEMAKVDDSFFHRLEESFLVEEDKKHERHPIFGNIVDEVAYHEKYPTIYHLRKKLVDSTDKADLRLIYLALAHMIKFRGHFLIEGDLNPDNSDVDKLFIQLVQTYNQLFEENPINASGVDAKAILSARLSKSRRLENLIAQLPGEKKNGLFGNLIALSLGLTPNFKSNFDLAEDAKLQLSKDTYDDDLDNLLAQIGDQYADLFLAAKNLSDAILLSDILRVNTEITKAPLSASMIKRYDEHHQDLTLLKALVRQQLPEKYKEIFFDQSKNGYAGYIDGGASQEEFYKFIKPILEKMDGTEELLVKLNREDLLRKQRTFDNGSIPHQIHLGELHAILRRQEDFYPFLKDNREKIEKILTFRIPYYVGPLARGNSRFAWMTRKSEETITPWNFEEVVDKGASAQSFIERMTNFDKNLPNEKVLPKHSLLYEYFTVYNELTKVKYVTEGMRKPAFLSGEQKKAIVDLLFKTNRKVTVKQLKEDYFKKIECFDSVEISGVEDRFNASLGTYHDLLKIIKDKDFLDNEENEDILEDIVLTLTLFEDREMIEERLKTYAHLFDDKVMKQLKRRRYTGWGRLSRKLINGIRDKQSGKTILDFLKSDGFANRNFMQLIHDDSLTFKEDIQKAQVSGQGDSLHEHIANLAGSPAIKKGILQTVKVVDELVKVMGRHKPENIVIEMARENQTTQKGQKNSRERMKRIEEGIKELGSQILKEHPVENTQLQNEKLYLYYLQNGRDMYVDQELDINRLSDYDVDHIVPQSFLKDDSIDNKVLTRSDKARGKSDNVPSEEVVKKMKNYWRQLLNAKLITQRKFDNLTKAERGGLSELDKAGFIKRQLVETRQITKHVAQILDSRMNTKYDENDKLIREVKVITLKSKLVSDFRKDFQFYKVREINNYHHAHDAYLNAVVGTALIKKYPKLESEFVYGDYKVYDVRKMIAKSEQEIGKATAKYFFYSNIMNFFKTEITLANGEIRKRPLIETNGETGEIVWDKGRDFATVRKVLSMPQVNIVKKTEVQTGGFSKESILPKRNSDKLIARKKDWDPKKYGGFDSPTVAYSVLVVAKVEKGKSKKLKSVKELLGITIMERSSFEKNPIDFLEAKGYKEVKKDLIIKLPKYSLFELENGRKRMLASAGELQKGNELALPSKYVNFLYLASHYEKLKGSPEDNEQKQLFVEQHKHYLDEIIEQISEFSKRVILADANLDKVLSAYNKHRDKPIREQAENIIHLFTLTNLGAPAAFKYFDTTIDRKRYTSTKEVLDATLIHQSITGLYETRIDLSQLGGDGGGGGPAPEAAAKGGMDPLQLLQPLEAEIKGTKLKAHWNSGATITCVPQAFLEEEVPIKNIWIKTIHGEKEQPVYYLTFKIQGRKVEAEVISSPYDYILVSPSDIPWLMKKPLQLTTLVPLQEYEERLLKQTMLTGSYKEKLQSLFLKYDALWQHWENQVGHRRIKPHHIATGTVNPRPQKQYPINPKAKASIQTVINDLLKQGVLIQQNSIMNTPVYPVPKPDGKWRMVLDYREVNKTIPLIAAQNQHSAGILSSIFRGKYKTTLDLSNGFWAHSITPESYWLTAFTWLGQQYCWTRLPQGFLNSPALFTADVVDLLKEVPNVQVYVDDIYISHDDPREHLEQLEKVFSLLLNAGYVVSLKKSEIAQHEVEFLGFNITKEGRGLTETFKQKLLNITPPRDLKQLQSILGLLNFARNFIPNFSELVKPLYNIIATANGKYITWTTDNSQQLQNIISMLNSAENLEERNPEVRLIMKVNTSPSAGYIRFYNEFAKRPIMYLNYVYTKAEVKFTNTEKLLTTIHKGLIKALDLGMGQEILVYSPIVSMTKIQKTPLPERKALPIRWITWMSYLEDPRIQFHYDKTLPELQQVPTVTDDIIAKIKHPSEFSMVFYTDGSAIKHPNVNKSHNAGMGIAQVQFKPEFTVINTWSIPLGDHTAQLAEVAAVEFACKKALKIDGPVLIVTDSFYVAESVNKELPYWQSNGFFNNKKKPLKHVSKWKSIADCIQLKPDIIIIHEKGHQPTASTFHTEGNNLADKLATQGSYVVNAGKRTADGSEFEKRTADGSEFESPKKKAKVE

SEQ ID NO: 508 - protein, 2174 aa, synthetic construct
MPAAKRVKLDGGDKKYSIGLDIGTNSVGWAVITDEYKVPSKKFKVLGNTDRHSIKKNLIGALLFDSGETAEATRLKRTARRRYTRRKNRICYLQEIFSNEMAKVDDSFFHRLEESFLVEEDKKHERHPIFGNIVDEVAYHEKYPTIYHLRKKLVDSTDKADLRLIYLALAHMIKFRGHFLIEGDLNPDNSDVDKLFIQLVQTYNQLFEENPINASGVDAKAILSARLSKSRRLENLIAQLPGEKKNGLFGNLIALSLGLTPNFKSNFDLAEDAKLQLSKDTYDDDLDNLLAQIGDQYADLFLAAKNLSDAILLSDILRVNTEITKAPLSASMIKRYDEHHQDLTLLKALVRQQLPEKYKEIFFDQSKNGYAGYIDGGASQEEFYKFIKPILEKMDGTEELLVKLNREDLLRKQRTFDNGSIPHQIHLGELHAILRRQEDFYPFLKDNREKIEKILTFRIPYYVGPLARGNSRFAWMTRKSEETITPWNFEEVVDKGASAQSFIERMTNFDKNLPNEKVLPKHSLLYEYFTVYNELTKVKYVTEGMRKPAFLSGEQKKAIVDLLFKTNRKVTVKQLKEDYFKKIECFDSVEISGVEDRFNASLGTYHDLLKIIKDKDFLDNEENEDILEDIVLTLTLFEDREMIEERLKTYAHLFDDKVMKQLKRRRYTGWGRLSRKLINGIRDKQSGKTILDFLKSDGFANRNFMQLIHDDSLTFKEDIQKAQVSGQGDSLHEHIANLAGSPAIKKGILQTVKVVDELVKVMGRHKPENIVIEMARENQTTQKGQKNSRERMKRIEEGIKELGSQILKEHPVENTQLQNEKLYLYYLQNGRDMYVDQELDINRLSDYDVDHIVPQSFLKDDSIDNKVLTRSDKARGKSDNVPSEEVVKKMKNYWRQLLNAKLITQRKFDNLTKAERGGLSELDKAGFIKRQLVETRQITKHVAQILDSRMNTKYDENDKLIREVKVITLKSKLVSDFRKDFQFYKVREINNYHHAHDAYLNAVVGTALIKKYPKLESEFVYGDYKVYDVRKMIAKSEQEIGKATAKYFFYSNIMNFFKTEITLANGEIRKRPLIETNGETGEIVWDKGRDFATVRKVLSMPQVNIVKKTEVQTGGFSKESILPKRNSDKLIARKKDWDPKKYGGFDSPTVAYSVLVVAKVEKGKSKKLKSVKELLGITIMERSSFEKNPIDFLEAKGYKEVKKDLIIKLPKYSLFELENGRKRMLASAGELQKGNELALPSKYVNFLYLASHYEKLKGSPEDNEQKQLFVEQHKHYLDEIIEQISEFSKRVILADANLDKVLSAYNKHRDKPIREQAENIIHLFTLTNLGAPAAFKYFDTTIDRKRYTSTKEVLDATLIHQSITGLYETRIDLSQLGGDGGGSSGGGGGSGGMDPLQLLQPLEAEIKGTKLKAHWNSGATITCVPQAFLEEEVPIKNIWIKTIHGEKEQPVYYLTFKIQGRKVEAEVISSPYDYILVSPSDIPWLMKKPLQLTTLVPLQEYEERLLKQTMLTGSYKEKLQSLFLKYDALWQHWENQVGHRRIKPHHIATGTVNPRPQKQYPINPKAKASIQTVINDLLKQGVLIQQNSIMNTPVYPVPKPDGKWRMVLDYREVNKTIPLIAAQNQHSAGILSSIFRGKYKTTLDLSNGFWAHSITPESYWLTAFTWLGQQYCWTRLPQGFLNSPALFTADVVDLLKEVPNVQVYVDDIYISHDDPREHLEQLEKVFSLLLNAGYVVSLKKSEIAQHEVEFLGFNITKEGRGLTETFKQKLLNITPPRDLKQLQSILGLLNFARNFIPNFSELVKPLYNIIATANGKYITWTTDNSQQLQNIISMLNSAENLEERNPEVRLIMKVNTSPSAGYIRFYNEFAKRPIMYLNYVYTKAEVKFTNTEKLLTTIHKGLIKALDLGMGQEILVYSPIVSMTKIQKTPLPERKALPIRWITWMSYLEDPRIQFHYDKTLPELQQVPTVTDDIIAKIKHPSEFSMVFYTDGSAIKHPNVNKSHNAGMGIAQVQFKPEFTVINTWSIPLGDHTAQLAEVAAVEFACKKALKIDGPVLIVTDSFYVAESVNKELPYWQSNGFFNNKKKPLKHVSKWKSIADCIQLKPDIIIIHEKGHQPTASTFHTEGNNLADKLATQGSYVVNAGKRTADGSEFEKRTADGSEFESPKKKAKVE

SEQ ID NO: 509 - protein, 2183 aa, synthetic construct
MPAAKRVKLDGGDKKYSIGLDIGTNSVGWAVITDEYKVPSKKFKVLGNTDRHSIKKNLIGALLFDSGETAEATRLKRTARRRYTRRKNRICYLQEIFSNEMAKVDDSFFHRLEESFLVEEDKKHERHPIFGNIVDEVAYHEKYPTIYHLRKKLVDSTDKADLRLIYLALAHMIKFRGHFLIEGDLNPDNSDVDKLFIQLVQTYNQLFEENPINASGVDAKAILSARLSKSRRLENLIAQLPGEKKNGLFGNLIALSLGLTPNFKSNFDLAEDAKLQLSKDTYDDDLDNLLAQIGDQYADLFLAAKNLSDAILLSDILRVNTEITKAPLSASMIKRYDEHHQDLTLLKALVRQQLPEKYKEIFFDQSKNGYAGYIDGGASQEEFYKFIKPILEKMDGTEELLVKLNREDLLRKQRTFDNGSIPHQIHLGELHAILRRQEDFYPFLKDNREKIEKILTFRIPYYVGPLARGNSRFAWMTRKSEETITPWNFEEVVDKGASAQSFIERMTNFDKNLPNEKVLPKHSLLYEYFTVYNELTKVKYVTEGMRKPAFLSGEQKKAIVDLLFKTNRKVTVKQLKEDYFKKIECFDSVEISGVEDRFNASLGTYHDLLKIIKDKDFLDNEENEDILEDIVLTLTLFEDREMIEERLKTYAHLFDDKVMKQLKRRRYTGWGRLSRKLINGIRDKQSGKTILDFLKSDGFANRNFMQLIHDDSLTFKEDIQKAQVSGQGDSLHEHIANLAGSPAIKKGILQTVKVVDELVKVMGRHKPENIVIEMARENQTTQKGQKNSRERMKRIEEGIKELGSQILKEHPVENTQLQNEKLYLYYLQNGRDMYVDQELDINRLSDYDVDHIVPQSFLKDDSIDNKVLTRSDKARGKSDNVPSEEVVKKMKNYWRQLLNAKLITQRKFDNLTKAERGGLSELDKAGFIKRQLVETRQITKHVAQILDSRMNTKYDENDKLIREVKVITLKSKLVSDFRKDFQFYKVREINNYHHAHDAYLNAVVGTALIKKYPKLESEFVYGDYKVYDVRKMIAKSEQEIGKATAKYFFYSNIMNFFKTEITLANGEIRKRPLIETNGETGEIVWDKGRDFATVRKVLSMPQVNIVKKTEVQTGGFSKESILPKRNSDKLIARKKDWDPKKYGGFDSPTVAYSVLVVAKVEKGKSKKLKSVKELLGITIMERSSFEKNPIDFLEAKGYKEVKKDLIIKLPKYSLFELENGRKRMLASAGELQKGNELALPSKYVNFLYLASHYEKLKGSPEDNEQKQLFVEQHKHYLDEIIEQISEFSKRVILADANLDKVLSAYNKHRDKPIREQAENIIHLFTLTNLGAPAAFKYFDTTIDRKRYTSTKEVLDATLIHQSITGLYETRIDLSQLGGDGGGSSGSSGSSGSSGSSGSSGGMDPLQLLQPLEAEIKGTKLKAHWNSGATITCVPQAFLEEEVPIKNIWIKTIHGEKEQPVYYLTFKIQGRKVEAEVISSPYDYILVSPSDIPWLMKKPLQLTTLVPLQEYEERLLKQTMLTGSYKEKLQSLFLKYDALWQHWENQVGHRRIKPHHIATGTVNPRPQKQYPINPKAKASIQTVINDLLKQGVLIQQNSIMNTPVYPVPKPDGKWRMVLDYREVNKTIPLIAAQNQHSAGILSSIFRGKYKTTLDLSNGFWAHSITPESYWLTAFTWLGQQYCWTRLPQGFLNSPALFTADVVDLLKEVPNVQVYVDDIYISHDDPREHLEQLEKVFSLLLNAGYVVSLKKSEIAQHEVEFLGFNITKEGRGLTETFKQKLLNITPPRDLKQLQSILGLLNFARNFIPNFSELVKPLYNIIATANGKYITWTTDNSQQLQNIISMLNSAENLEERNPEVRLIMKVNTSPSAGYIRFYNEFAKRPIMYLNYVYTKAEVKFTNTEKLLTTIHKGLIKALDLGMGQEILVYSPIVSMTKIQKTPLPERKALPIRWITWMSYLEDPRIQFHYDKTLPELQQVPTVTDDIIAKIKHPSEFSMVFYTDGSAIKHPNVNKSHNAGMGIAQVQFKPEFTVINTWSIPLGDHTAQLAEVAAVEFACKKALKIDGPVLIVTDSFYVAESVNKELPYWQSNGFFNNKKKPLKHVSKWKSIADCIQLKPDIIIIHEKGHQPTASTFHTEGNNLADKLATQGSYVVNAGKRTADGSEFEKRTADGSEFESPKKKAKVE

SEQ ID NO: 510 - protein, 2176 aa, synthetic construct
MPAAKRVKLDGGDKKYSIGLDIGTNSVGWAVITDEYKVPSKKFKVLGNTDRHSIKKNLIGALLFDSGETAEATRLKRTARRRYTRRKNRICYLQEIFSNEMAKVDDSFFHRLEESFLVEEDKKHERHPIFGNIVDEVAYHEKYPTIYHLRKKLVDSTDKADLRLIYLALAHMIKFRGHFLIEGDLNPDNSDVDKLFIQLVQTYNQLFEENPINASGVDAKAILSARLSKSRRLENLIAQLPGEKKNGLFGNLIALSLGLTPNFKSNFDLAEDAKLQLSKDTYDDDLDNLLAQIGDQYADLFLAAKNLSDAILLSDILRVNTEITKAPLSASMIKRYDEHHQDLTLLKALVRQQLPEKYKEIFFDQSKNGYAGYIDGGASQEEFYKFIKPILEKMDGTEELLVKLNREDLLRKQRTFDNGSIPHQIHLGELHAILRRQEDFYPFLKDNREKIEKILTFRIPYYVGPLARGNSRFAWMTRKSEETITPWNFEEVVDKGASAQSFIERMTNFDKNLPNEKVLPKHSLLYEYFTVYNELTKVKYVTEGMRKPAFLSGEQKKAIVDLLFKTNRKVTVKQLKEDYFKKIECFDSVEISGVEDRFNASLGTYHDLLKIIKDKDFLDNEENEDILEDIVLTLTLFEDREMIEERLKTYAHLFDDKVMKQLKRRRYTGWGRLSRKLINGIRDKQSGKTILDFLKSDGFANRNFMQLIHDDSLTFKEDIQKAQVSGQGDSLHEHIANLAGSPAIKKGILQTVKVVDELVKVMGRHKPENIVIEMARENQTTQKGQKNSRERMKRIEEGIKELGSQILKEHPVENTQLQNEKLYLYYLQNGRDMYVDQELDINRLSDYDVDHIVPQSFLKDDSIDNKVLTRSDKARGKSDNVPSEEVVKKMKNYWRQLLNAKLITQRKFDNLTKAERGGLSELDKAGFIKRQLVETRQITKHVAQILDSRMNTKYDENDKLIREVKVITLKSKLVSDFRKDFQFYKVREINNYHHAHDAYLNAVVGTALIKKYPKLESEFVYGDYKVYDVRKMIAKSEQEIGKATAKYFFYSNIMNFFKTEITLANGEIRKRPLIETNGETGEIVWDKGRDFATVRKVLSMPQVNIVKKTEVQTGGFSKESILPKRNSDKLIARKKDWDPKKYGGFDSPTVAYSVLVVAKVEKGKSKKLKSVKELLGITIMERSSFEKNPIDFLEAKGYKEVKKDLIIKLPKYSLFELENGRKRMLASAGELQKGNELALPSKYVNFLYLASHYEKLKGSPEDNEQKQLFVEQHKHYLDEIIEQISEFSKRVILADANLDKVLSAYNKHRDKPIREQAENIIHLFTLTNLGAPAAFKYFDTTIDRKRYTSTKEVLDATLIHQSITGLYETRIDLSQLGGDGGPAPEAAAKGGGGGMDPLQLLQPLEAEIKGTKLKAHWNSGATITCVPQAFLEEEVPIKNIWIKTIHGEKEQPVYYLTFKIQGRKVEAEVISSPYDYILVSPSDIPWLMKKPLQLTTLVPLQEYEERLLKQTMLTGSYKEKLQSLFLKYDALWQHWENQVGHRRIKPHHIATGTVNPRPQKQYPINPKAKASIQTVINDLLKQGVLIQQNSIMNTPVYPVPKPDGKWRMVLDYREVNKTIPLIAAQNQHSAGILSSIFRGKYKTTLDLSNGFWAHSITPESYWLTAFTWLGQQYCWTRLPQGFLNSPALFTADVVDLLKEVPNVQVYVDDIYISHDDPREHLEQLEKVFSLLLNAGYVVSLKKSEIAQHEVEFLGFNITKEGRGLTETFKQKLLNITPPRDLKQLQSILGLLNFARNFIPNFSELVKPLYNIIATANGKYITWTTDNSQQLQNIISMLNSAENLEERNPEVRLIMKVNTSPSAGYIRFYNEFAKRPIMYLNYVYTKAEVKFTNTEKLLTTIHKGLIKALDLGMGQEILVYSPIVSMTKIQKTPLPERKALPIRWITWMSYLEDPRIQFHYDKTLPELQQVPTVTDDIIAKIKHPSEFSMVFYTDGSAIKHPNVNKSHNAGMGIAQVQFKPEFTVINTWSIPLGDHTAQLAEVAAVEFACKKALKIDGPVLIVTDSFYVAESVNKELPYWQSNGFFNNKKKPLKHVSKWKSIADCIQLKPDIIIIHEKGHQPTASTFHTEGNNLADKLATQGSYVVNAGKRTADGSEFEKRTADGSEFESPKKKAKVE

SEQ ID NO: 511 - protein, 2176 aa, synthetic construct
MPAAKRVKLDGGDKKYSIGLDIGTNSVGWAVITDEYKVPSKKFKVLGNTDRHSIKKNLIGALLFDSGETAEATRLKRTARRRYTRRKNRICYLQEIFSNEMAKVDDSFFHRLEESFLVEEDKKHERHPIFGNIVDEVAYHEKYPTIYHLRKKLVDSTDKADLRLIYLALAHMIKFRGHFLIEGDLNPDNSDVDKLFIQLVQTYNQLFEENPINASGVDAKAILSARLSKSRRLENLIAQLPGEKKNGLFGNLIALSLGLTPNFKSNFDLAEDAKLQLSKDTYDDDLDNLLAQIGDQYADLFLAAKNLSDAILLSDILRVNTEITKAPLSASMIKRYDEHHQDLTLLKALVRQQLPEKYKEIFFDQSKNGYAGYIDGGASQEEFYKFIKPILEKMDGTEELLVKLNREDLLRKQRTFDNGSIPHQIHLGELHAILRRQEDFYPFLKDNREKIEKILTFRIPYYVGPLARGNSRFAWMTRKSEETITPWNFEEVVDKGASAQSFIERMTNFDKNLPNEKVLPKHSLLYEYFTVYNELTKVKYVTEGMRKPAFLSGEQKKAIVDLLFKTNRKVTVKQLKEDYFKKIECFDSVEISGVEDRFNASLGTYHDLLKIIKDKDFLDNEENEDILEDIVLTLTLFEDREMIEERLKTYAHLFDDKVMKQLKRRRYTGWGRLSRKLINGIRDKQSGKTILDFLKSDGFANRNFMQLIHDDSLTFKEDIQKAQVSGQGDSLHEHIANLAGSPAIKKGILQTVKVVDELVKVMGRHKPENIVIEMARENQTTQKGQKNSRERMKRIEEGIKELGSQILKEHPVENTQLQNEKLYLYYLQNGRDMYVDQELDINRLSDYDVDHIVPQSFLKDDSIDNKVLTRSDKARGKSDNVPSEEVVKKMKNYWRQLLNAKLITQRKFDNLTKAERGGLSELDKAGFIKRQLVETRQITKHVAQILDSRMNTKYDENDKLIREVKVITLKSKLVSDFRKDFQFYKVREINNYHHAHDAYLNAVVGTALIKKYPKLESEFVYGDYKVYDVRKMIAKSEQEIGKATAKYFFYSNIMNFFKTEITLANGEIRKRPLIETNGETGEIVWDKGRDFATVRKVLSMPQVNIVKKTEVQTGGFSKESILPKRNSDKLIARKKDWDPKKYGGFDSPTVAYSVLVVAKVEKGKSKKLKSVKELLGITIMERSSFEKNPIDFLEAKGYKEVKKDLIIKLPKYSLFELENGRKRMLASAGELQKGNELALPSKYVNFLYLASHYEKLKGSPEDNEQKQLFVEQHKHYLDEIIEQISEFSKRVILADANLDKVLSAYNKHRDKPIREQAENIIHLFTLTNLGAPAAFKYFDTTIDRKRYTSTKEVLDATLIHQSITGLYETRIDLSQLGGDGGEAAAKGGGGSSGGMDPLQLLQPLEAEIKGTKLKAHWNSGATITCVPQAFLEEEVPIKNIWIKTIHGEKEQPVYYLTFKIQGRKVEAEVISSPYDYILVSPSDIPWLMKKPLQLTTLVPLQEYEERLLKQTMLTGSYKEKLQSLFLKYDALWQHWENQVGHRRIKPHHIATGTVNPRPQKQYPINPKAKASIQTVINDLLKQGVLIQQNSIMNTPVYPVPKPDGKWRMVLDYREVNKTIPLIAAQNQHSAGILSSIFRGKYKTTLDLSNGFWAHSITPESYWLTAFTWLGQQYCWTRLPQGFLNSPALFTADVVDLLKEVPNVQVYVDDIYISHDDPREHLEQLEKVFSLLLNAGYVVSLKKSEIAQHEVEFLGFNITKEGRGLTETFKQKLLNITPPRDLKQLQSILGLLNFARNFIPNFSELVKPLYNIIATANGKYITWTTDNSQQLQNIISMLNSAENLEERNPEVRLIMKVNTSPSAGYIRFYNEFAKRPIMYLNYVYTKAEVKFTNTEKLLTTIHKGLIKALDLGMGQEILVYSPIVSMTKIQKTPLPERKALPIRWITWMSYLEDPRIQFHYDKTLPELQQVPTVTDDIIAKIKHPSEFSMVFYTDGSAIKHPNVNKSHNAGMGIAQVQFKPEFTVINTWSIPLGDHTAQLAEVAAVEFACKKALKIDGPVLIVTDSFYVAESVNKELPYWQSNGFFNNKKKPLKHVSKWKSIADCIQLKPDIIIIHEKGHQPTASTFHTEGNNLADKLATQGSYVVNAGKRTADGSEFEKRTADGSEFESPKKKAKVE

SEQ ID NO: 512 - protein, 2171 aa, synthetic construct
MPAAKRVKLDGGDKKYSIGLDIGTNSVGWAVITDEYKVPSKKFKVLGNTDRHSIKKNLIGALLFDSGETAEATRLKRTARRRYTRRKNRICYLQEIFSNEMAKVDDSFFHRLEESFLVEEDKKHERHPIFGNIVDEVAYHEKYPTIYHLRKKLVDSTDKADLRLIYLALAHMIKFRGHFLIEGDLNPDNSDVDKLFIQLVQTYNQLFEENPINASGVDAKAILSARLSKSRRLENLIAQLPGEKKNGLFGNLIALSLGLTPNFKSNFDLAEDAKLQLSKDTYDDDLDNLLAQIGDQYADLFLAAKNLSDAILLSDILRVNTEITKAPLSASMIKRYDEHHQDLTLLKALVRQQLPEKYKEIFFDQSKNGYAGYIDGGASQEEFYKFIKPILEKMDGTEELLVKLNREDLLRKQRTFDNGSIPHQIHLGELHAILRRQEDFYPFLKDNREKIEKILTFRIPYYVGPLARGNSRFAWMTRKSEETITPWNFEEVVDKGASAQSFIERMTNFDKNLPNEKVLPKHSLLYEYFTVYNELTKVKYVTEGMRKPAFLSGEQKKAIVDLLFKTNRKVTVKQLKEDYFKKIECFDSVEISGVEDRFNASLGTYHDLLKIIKDKDFLDNEENEDILEDIVLTLTLFEDREMIEERLKTYAHLFDDKVMKQLKRRRYTGWGRLSRKLINGIRDKQSGKTILDFLKSDGFANRNFMQLIHDDSLTFKEDIQKAQVSGQGDSLHEHIANLAGSPAIKKGILQTVKVVDELVKVMGRHKPENIVIEMARENQTTQKGQKNSRERMKRIEEGIKELGSQILKEHPVENTQLQNEKLYLYYLQNGRDMYVDQELDINRLSDYDVDHIVPQSFLKDDSIDNKVLTRSDKARGKSDNVPSEEVVKKMKNYWRQLLNAKLITQRKFDNLTKAERGGLSELDKAGFIKRQLVETRQITKHVAQILDSRMNTKYDENDKLIREVKVITLKSKLVSDFRKDFQFYKVREINNYHHAHDAYLNAVVGTALIKKYPKLESEFVYGDYKVYDVRKMIAKSEQEIGKATAKYFFYSNIMNFFKTEITLANGEIRKRPLIETNGETGEIVWDKGRDFATVRKVLSMPQVNIVKKTEVQTGGFSKESILPKRNSDKLIARKKDWDPKKYGGFDSPTVAYSVLVVAKVEKGKSKKLKSVKELLGITIMERSSFEKNPIDFLEAKGYKEVKKDLIIKLPKYSLFELENGRKRMLASAGELQKGNELALPSKYVNFLYLASHYEKLKGSPEDNEQKQLFVEQHKHYLDEIIEQISEFSKRVILADANLDKVLSAYNKHRDKPIREQAENIIHLFTLTNLGAPAAFKYFDTTIDRKRYTSTKEVLDATLIHQSITGLYETRIDLSQLGGDGGGGGPAPGGMDPLQLLQPLEAEIKGTKLKAHWNSGATITCVPQAFLEEEVPIKNIWIKTIHGEKEQPVYYLTFKIQGRKVEAEVISSPYDYILVSPSDIPWLMKKPLQLTTLVPLQEYEERLLKQTMLTGSYKEKLQSLFLKYDALWQHWENQVGHRRIKPHHIATGTVNPRPQKQYPINPKAKASIQTVINDLLKQGVLIQQNSIMNTPVYPVPKPDGKWRMVLDYREVNKTIPLIAAQNQHSAGILSSIFRGKYKTTLDLSNGFWAHSITPESYWLTAFTWLGQQYCWTRLPQGFLNSPALFTADVVDLLKEVPNVQVYVDDIYISHDDPREHLEQLEKVFSLLLNAGYVVSLKKSEIAQHEVEFLGFNITKEGRGLTETFKQKLLNITPPRDLKQLQSILGLLNFARNFIPNFSELVKPLYNIIATANGKYITWTTDNSQQLQNIISMLNSAENLEERNPEVRLIMKVNTSPSAGYIRFYNEFAKRPIMYLNYVYTKAEVKFTNTEKLLTTIHKGLIKALDLGMGQEILVYSPIVSMTKIQKTPLPERKALPIRWITWMSYLEDPRIQFHYDKTLPELQQVPTVTDDIIAKIKHPSEFSMVFYTDGSAIKHPNVNKSHNAGMGIAQVQFKPEFTVINTWSIPLGDHTAQLAEVAAVEFACKKALKIDGPVLIVTDSFYVAESVNKELPYWQSNGFFNNKKKPLKHVSKWKSIADCIQLKPDIIIIHEKGHQPTASTFHTEGNNLADKLATQGSYVVNAGKRTADGSEFEKRTADGSEFESPKKKAKVE

SEQ ID NO: 513 - protein, 2176 aa, synthetic construct
MPAAKRVKLDGGDKKYSIGLDIGTNSVGWAVITDEYKVPSKKFKVLGNTDRHSIKKNLIGALLFDSGETAEATRLKRTARRRYTRRKNRICYLQEIFSNEMAKVDDSFFHRLEESFLVEEDKKHERHPIFGNIVDEVAYHEKYPTIYHLRKKLVDSTDKADLRLIYLALAHMIKFRGHFLIEGDLNPDNSDVDKLFIQLVQTYNQLFEENPINASGVDAKAILSARLSKSRRLENLIAQLPGEKKNGLFGNLIALSLGLTPNFKSNFDLAEDAKLQLSKDTYDDDLDNLLAQIGDQYADLFLAAKNLSDAILLSDILRVNTEITKAPLSASMIKRYDEHHQDLTLLKALVRQQLPEKYKEIFFDQSKNGYAGYIDGGASQEEFYKFIKPILEKMDGTEELLVKLNREDLLRKQRTFDNGSIPHQIHLGELHAILRRQEDFYPFLKDNREKIEKILTFRIPYYVGPLARGNSRFAWMTRKSEETITPWNFEEVVDKGASAQSFIERMTNFDKNLPNEKVLPKHSLLYEYFTVYNELTKVKYVTEGMRKPAFLSGEQKKAIVDLLFKTNRKVTVKQLKEDYFKKIECFDSVEISGVEDRFNASLGTYHDLLKIIKDKDFLDNEENEDILEDIVLTLTLFEDREMIEERLKTYAHLFDDKVMKQLKRRRYTGWGRLSRKLINGIRDKQSGKTILDFLKSDGFANRNFMQLIHDDSLTFKEDIQKAQVSGQGDSLHEHIANLAGSPAIKKGILQTVKVVDELVKVMGRHKPENIVIEMARENQTTQKGQKNSRERMKRIEEGIKELGSQILKEHPVENTQLQNEKLYLYYLQNGRDMYVDQELDINRLSDYDVDHIVPQSFLKDDSIDNKVLTRSDKARGKSDNVPSEEVVKKMKNYWRQLLNAKLITQRKFDNLTKAERGGLSELDKAGFIKRQLVETRQITKHVAQILDSRMNTKYDENDKLIREVKVITLKSKLVSDFRKDFQFYKVREINNYHHAHDAYLNAVVGTALIKKYPKLESEFVYGDYKVYDVRKMIAKSEQEIGKATAKYFFYSNIMNFFKTEITLANGEIRKRPLIETNGETGEIVWDKGRDFATVRKVLSMPQVNIVKKTEVQTGGFSKESILPKRNSDKLIARKKDWDPKKYGGFDSPTVAYSVLVVAKVEKGKSKKLKSVKELLGITIMERSSFEKNPIDFLEAKGYKEVKKDLIIKLPKYSLFELENGRKRMLASAGELQKGNELALPSKYVNFLYLASHYEKLKGSPEDNEQKQLFVEQHKHYLDEIIEQISEFSKRVILADANLDKVLSAYNKHRDKPIREQAENIIHLFTLTNLGAPAAFKYFDTTIDRKRYTSTKEVLDATLIHQSITGLYETRIDLSQLGGDGGEAAAKGGSGGGGGMDPLQLLQPLEAEIKGTKLKAHWNSGATITCVPQAFLEEEVPIKNIWIKTIHGEKEQPVYYLTFKIQGRKVEAEVISSPYDYILVSPSDIPWLMKKPLQLTTLVPLQEYEERLLKQTMLTGSYKEKLQSLFLKYDALWQHWENQVGHRRIKPHHIATGTVNPRPQKQYPINPKAKASIQTVINDLLKQGVLIQQNSIMNTPVYPVPKPDGKWRMVLDYREVNKTIPLIAAQNQHSAGILSSIFRGKYKTTLDLSNGFWAHSITPESYWLTAFTWLGQQYCWTRLPQGFLNSPALFTADVVDLLKEVPNVQVYVDDIYISHDDPREHLEQLEKVFSLLLNAGYVVSLKKSEIAQHEVEFLGFNITKEGRGLTETFKQKLLNITPPRDLKQLQSILGLLNFARNFIPNFSELVKPLYNIIATANGKYITWTTDNSQQLQNIISMLNSAENLEERNPEVRLIMKVNTSPSAGYIRFYNEFAKRPIMYLNYVYTKAEVKFTNTEKLLTTIHKGLIKALDLGMGQEILVYSPIVSMTKIQKTPLPERKALPIRWITWMSYLEDPRIQFHYDKTLPELQQVPTVTDDIIAKIKHPSEFSMVFYTDGSAIKHPNVNKSHNAGMGIAQVQFKPEFTVINTWSIPLGDHTAQLAEVAAVEFACKKALKIDGPVLIVTDSFYVAESVNKELPYWQSNGFFNNKKKPLKHVSKWKSIADCIQLKPDIIIIHEKGHQPTASTFHTEGNNLADKLATQGSYVVNAGKRTADGSEFEKRTADGSEFESPKKKAKVE

SEQ ID NO: 514 - protein, 2174 aa, synthetic construct
MPAAKRVKLDGGDKKYSIGLDIGTNSVGWAVITDEYKVPSKKFKVLGNTDRHSIKKNLIGALLFDSGETAEATRLKRTARRRYTRRKNRICYLQEIFSNEMAKVDDSFFHRLEESFLVEEDKKHERHPIFGNIVDEVAYHEKYPTIYHLRKKLVDSTDKADLRLIYLALAHMIKFRGHFLIEGDLNPDNSDVDKLFIQLVQTYNQLFEENPINASGVDAKAILSARLSKSRRLENLIAQLPGEKKNGLFGNLIALSLGLTPNFKSNFDLAEDAKLQLSKDTYDDDLDNLLAQIGDQYADLFLAAKNLSDAILLSDILRVNTEITKAPLSASMIKRYDEHHQDLTLLKALVRQQLPEKYKEIFFDQSKNGYAGYIDGGASQEEFYKFIKPILEKMDGTEELLVKLNREDLLRKQRTFDNGSIPHQIHLGELHAILRRQEDFYPFLKDNREKIEKILTFRIPYYVGPLARGNSRFAWMTRKSEETITPWNFEEVVDKGASAQSFIERMTNFDKNLPNEKVLPKHSLLYEYFTVYNELTKVKYVTEGMRKPAFLSGEQKKAIVDLLFKTNRKVTVKQLKEDYFKKIECFDSVEISGVEDRFNASLGTYHDLLKIIKDKDFLDNEENEDILEDIVLTLTLFEDREMIEERLKTYAHLFDDKVMKQLKRRRYTGWGRLSRKLINGIRDKQSGKTILDFLKSDGFANRNFMQLIHDDSLTFKEDIQKAQVSGQGDSLHEHIANLAGSPAIKKGILQTVKVVDELVKVMGRHKPENIVIEMARENQTTQKGQKNSRERMKRIEEGIKELGSQILKEHPVENTQLQNEKLYLYYLQNGRDMYVDQELDINRLSDYDVDHIVPQSFLKDDSIDNKVLTRSDKARGKSDNVPSEEVVKKMKNYWRQLLNAKLITQRKFDNLTKAERGGLSELDKAGFIKRQLVETRQITKHVAQILDSRMNTKYDENDKLIREVKVITLKSKLVSDFRKDFQFYKVREINNYHHAHDAYLNAVVGTALIKKYPKLESEFVYGDYKVYDVRKMIAKSEQEIGKATAKYFFYSNIMNFFKTEITLANGEIRKRPLIETNGETGEIVWDKGRDFATVRKVLSMPQVNIVKKTEVQTGGFSKESILPKRNSDKLIARKKDWDPKKYGGFDSPTVAYSVLVVAKVEKGKSKKLKSVKELLGITIMERSSFEKNPIDFLEAKGYKEVKKDLIIKLPKYSLFELENGRKRMLASAGELQKGNELALPSKYVNFLYLASHYEKLKGSPEDNEQKQLFVEQHKHYLDEIIEQISEFSKRVILADANLDKVLSAYNKHRDKPIREQAENIIHLFTLTNLGAPAAFKYFDTTIDRKRYTSTKEVLDATLIHQSITGLYETRIDLSQLGGDGGGGGPAPGGSGGMDPLQLLQPLEAEIKGTKLKAHWNSGATITCVPQAFLEEEVPIKNIWIKTIHGEKEQPVYYLTFKIQGRKVEAEVISSPYDYILVSPSDIPWLMKKPLQLTTLVPLQEYEERLLKQTMLTGSYKEKLQSLFLKYDALWQHWENQVGHRRIKPHHIATGTVNPRPQKQYPINPKAKASIQTVINDLLKQGVLIQQNSIMNTPVYPVPKPDGKWRMVLDYREVNKTIPLIAAQNQHSAGILSSIFRGKYKTTLDLSNGFWAHSITPESYWLTAFTWLGQQYCWTRLPQGFLNSPALFTADVVDLLKEVPNVQVYVDDIYISHDDPREHLEQLEKVFSLLLNAGYVVSLKKSEIAQHEVEFLGFNITKEGRGLTETFKQKLLNITPPRDLKQLQSILGLLNFARNFIPNFSELVKPLYNIIATANGKYITWTTDNSQQLQNIISMLNSAENLEERNPEVRLIMKVNTSPSAGYIRFYNEFAKRPIMYLNYVYTKAEVKFTNTEKLLTTIHKGLIKALDLGMGQEILVYSPIVSMTKIQKTPLPERKALPIRWITWMSYLEDPRIQFHYDKTLPELQQVPTVTDDIIAKIKHPSEFSMVFYTDGSAIKHPNVNKSHNAGMGIAQVQFKPEFTVINTWSIPLGDHTAQLAEVAAVEFACKKALKIDGPVLIVTDSFYVAESVNKELPYWQSNGFFNNKKKPLKHVSKWKSIADCIQLKPDIIIIHEKGHQPTASTFHTEGNNLADKLATQGSYVVNAGKRTADGSEFEKRTADGSEFESPKKKAKVE

SEQ ID NO: 515 - protein, 2174 aa, synthetic construct
MPAAKRVKLDGGDKKYSIGLDIGTNSVGWAVITDEYKVPSKKFKVLGNTDRHSIKKNLIGALLFDSGETAEATRLKRTARRRYTRRKNRICYLQEIFSNEMAKVDDSFFHRLEESFLVEEDKKHERHPIFGNIVDEVAYHEKYPTIYHLRKKLVDSTDKADLRLIYLALAHMIKFRGHFLIEGDLNPDNSDVDKLFIQLVQTYNQLFEENPINASGVDAKAILSARLSKSRRLENLIAQLPGEKKNGLFGNLIALSLGLTPNFKSNFDLAEDAKLQLSKDTYDDDLDNLLAQIGDQYADLFLAAKNLSDAILLSDILRVNTEITKAPLSASMIKRYDEHHQDLTLLKALVRQQLPEKYKEIFFDQSKNGYAGYIDGGASQEEFYKFIKPILEKMDGTEELLVKLNREDLLRKQRTFDNGSIPHQIHLGELHAILRRQEDFYPFLKDNREKIEKILTFRIPYYVGPLARGNSRFAWMTRKSEETITPWNFEEVVDKGASAQSFIERMTNFDKNLPNEKVLPKHSLLYEYFTVYNELTKVKYVTEGMRKPAFLSGEQKKAIVDLLFKTNRKVTVKQLKEDYFKKIECFDSVEISGVEDRFNASLGTYHDLLKIIKDKDFLDNEENEDILEDIVLTLTLFEDREMIEERLKTYAHLFDDKVMKQLKRRRYTGWGRLSRKLINGIRDKQSGKTILDFLKSDGFANRNFMQLIHDDSLTFKEDIQKAQVSGQGDSLHEHIANLAGSPAIKKGILQTVKVVDELVKVMGRHKPENIVIEMARENQTTQKGQKNSRERMKRIEEGIKELGSQILKEHPVENTQLQNEKLYLYYLQNGRDMYVDQELDINRLSDYDVDHIVPQSFLKDDSIDNKVLTRSDKARGKSDNVPSEEVVKKMKNYWRQLLNAKLITQRKFDNLTKAERGGLSELDKAGFIKRQLVETRQITKHVAQILDSRMNTKYDENDKLIREVKVITLKSKLVSDFRKDFQFYKVREINNYHHAHDAYLNAVVGTALIKKYPKLESEFVYGDYKVYDVRKMIAKSEQEIGKATAKYFFYSNIMNFFKTEITLANGEIRKRPLIETNGETGEIVWDKGRDFATVRKVLSMPQVNIVKKTEVQTGGFSKESILPKRNSDKLIARKKDWDPKKYGGFDSPTVAYSVLVVAKVEKGKSKKLKSVKELLGITIMERSSFEKNPIDFLEAKGYKEVKKDLIIKLPKYSLFELENGRKRMLASAGELQKGNELALPSKYVNFLYLASHYEKLKGSPEDNEQKQLFVEQHKHYLDEIIEQISEFSKRVILADANLDKVLSAYNKHRDKPIREQAENIIHLFTLTNLGAPAAFKYFDTTIDRKRYTSTKEVLDATLIHQSITGLYETRIDLSQLGGDGGGSSGSSGSSGGMDPLQLLQPLEAEIKGTKLKAHWNSGATITCVPQAFLEEEVPIKNIWIKTIHGEKEQPVYYLTFKIQGRKVEAEVISSPYDYILVSPSDIPWLMKKPLQLTTLVPLQEYEERLLKQTMLTGSYKEKLQSLFLKYDALWQHWENQVGHRRIKPHHIATGTVNPRPQKQYPINPKAKASIQTVINDLLKQGVLIQQNSIMNTPVYPVPKPDGKWRMVLDYREVNKTIPLIAAQNQHSAGILSSIFRGKYKTTLDLSNGFWAHSITPESYWLTAFTWLGQQYCWTRLPQGFLNSPALFTADVVDLLKEVPNVQVYVDDIYISHDDPREHLEQLEKVFSLLLNAGYVVSLKKSEIAQHEVEFLGFNITKEGRGLTETFKQKLLNITPPRDLKQLQSILGLLNFARNFIPNFSELVKPLYNIIATANGKYITWTTDNSQQLQNIISMLNSAENLEERNPEVRLIMKVNTSPSAGYIRFYNEFAKRPIMYLNYVYTKAEVKFTNTEKLLTTIHKGLIKALDLGMGQEILVYSPIVSMTKIQKTPLPERKALPIRWITWMSYLEDPRIQFHYDKTLPELQQVPTVTDDIIAKIKHPSEFSMVFYTDGSAIKHPNVNKSHNAGMGIAQVQFKPEFTVINTWSIPLGDHTAQLAEVAAVEFACKKALKIDGPVLIVTDSFYVAESVNKELPYWQSNGFFNNKKKPLKHVSKWKSIADCIQLKPDIIIIHEKGHQPTASTFHTEGNNLADKLATQGSYVVNAGKRTADGSEFEKRTADGSEFESPKKKAKVE

SEQ ID NO: 516 - protein, 2171 aa, synthetic construct
MPAAKRVKLDGGDKKYSIGLDIGTNSVGWAVITDEYKVPSKKFKVLGNTDRHSIKKNLIGALLFDSGETAEATRLKRTARRRYTRRKNRICYLQEIFSNEMAKVDDSFFHRLEESFLVEEDKKHERHPIFGNIVDEVAYHEKYPTIYHLRKKLVDSTDKADLRLIYLALAHMIKFRGHFLIEGDLNPDNSDVDKLFIQLVQTYNQLFEENPINASGVDAKAILSARLSKSRRLENLIAQLPGEKKNGLFGNLIALSLGLTPNFKSNFDLAEDAKLQLSKDTYDDDLDNLLAQIGDQYADLFLAAKNLSDAILLSDILRVNTEITKAPLSASMIKRYDEHHQDLTLLKALVRQQLPEKYKEIFFDQSKNGYAGYIDGGASQEEFYKFIKPILEKMDGTEELLVKLNREDLLRKQRTFDNGSIPHQIHLGELHAILRRQEDFYPFLKDNREKIEKILTFRIPYYVGPLARGNSRFAWMTRKSEETITPWNFEEVVDKGASAQSFIERMTNFDKNLPNEKVLPKHSLLYEYFTVYNELTKVKYVTEGMRKPAFLSGEQKKAIVDLLFKTNRKVTVKQLKEDYFKKIECFDSVEISGVEDRFNASLGTYHDLLKIIKDKDFLDNEENEDILEDIVLTLTLFEDREMIEERLKTYAHLFDDKVMKQLKRRRYTGWGRLSRKLINGIRDKQSGKTILDFLKSDGFANRNFMQLIHDDSLTFKEDIQKAQVSGQGDSLHEHIANLAGSPAIKKGILQTVKVVDELVKVMGRHKPENIVIEMARENQTTQKGQKNSRERMKRIEEGIKELGSQILKEHPVENTQLQNEKLYLYYLQNGRDMYVDQELDINRLSDYDVDHIVPQSFLKDDSIDNKVLTRSDKARGKSDNVPSEEVVKKMKNYWRQLLNAKLITQRKFDNLTKAERGGLSELDKAGFIKRQLVETRQITKHVAQILDSRMNTKYDENDKLIREVKVITLKSKLVSDFRKDFQFYKVREINNYHHAHDAYLNAVVGTALIKKYPKLESEFVYGDYKVYDVRKMIAKSEQEIGKATAKYFFYSNIMNFFKTEITLANGEIRKRPLIETNGETGEIVWDKGRDFATVRKVLSMPQVNIVKKTEVQTGGFSKESILPKRNSDKLIARKKDWDPKKYGGFDSPTVAYSVLVVAKVEKGKSKKLKSVKELLGITIMERSSFEKNPIDFLEAKGYKEVKKDLIIKLPKYSLFELENGRKRMLASAGELQKGNELALPSKYVNFLYLASHYEKLKGSPEDNEQKQLFVEQHKHYLDEIIEQISEFSKRVILADANLDKVLSAYNKHRDKPIREQAENIIHLFTLTNLGAPAAFKYFDTTIDRKRYTSTKEVLDATLIHQSITGLYETRIDLSQLGGDGGPAPGGGGGMDPLQLLQPLEAEIKGTKLKAHWNSGATITCVPQAFLEEEVPIKNIWIKTIHGEKEQPVYYLTFKIQGRKVEAEVISSPYDYILVSPSDIPWLMKKPLQLTTLVPLQEYEERLLKQTMLTGSYKEKLQSLFLKYDALWQHWENQVGHRRIKPHHIATGTVNPRPQKQYPINPKAKASIQTVINDLLKQGVLIQQNSIMNTPVYPVPKPDGKWRMVLDYREVNKTIPLIAAQNQHSAGILSSIFRGKYKTTLDLSNGFWAHSITPESYWLTAFTWLGQQYCWTRLPQGFLNSPALFTADVVDLLKEVPNVQVYVDDIYISHDDPREHLEQLEKVFSLLLNAGYVVSLKKSEIAQHEVEFLGFNITKEGRGLTETFKQKLLNITPPRDLKQLQSILGLLNFARNFIPNFSELVKPLYNIIATANGKYITWTTDNSQQLQNIISMLNSAENLEERNPEVRLIMKVNTSPSAGYIRFYNEFAKRPIMYLNYVYTKAEVKFTNTEKLLTTIHKGLIKALDLGMGQEILVYSPIVSMTKIQKTPLPERKALPIRWITWMSYLEDPRIQFHYDKTLPELQQVPTVTDDIIAKIKHPSEFSMVFYTDGSAIKHPNVNKSHNAGMGIAQVQFKPEFTVINTWSIPLGDHTAQLAEVAAVEFACKKALKIDGPVLIVTDSFYVAESVNKELPYWQSNGFFNNKKKPLKHVSKWKSIADCIQLKPDIIIIHEKGHQPTASTFHTEGNNLADKLATQGSYVVNAGKRTADGSEFEKRTADGSEFESPKKKAKVE

SEQ ID NO: 517 - protein, 2176 aa, synthetic construct
MPAAKRVKLDGGDKKYSIGLDIGTNSVGWAVITDEYKVPSKKFKVLGNTDRHSIKKNLIGALLFDSGETAEATRLKRTARRRYTRRKNRICYLQEIFSNEMAKVDDSFFHRLEESFLVEEDKKHERHPIFGNIVDEVAYHEKYPTIYHLRKKLVDSTDKADLRLIYLALAHMIKFRGHFLIEGDLNPDNSDVDKLFIQLVQTYNQLFEENPINASGVDAKAILSARLSKSRRLENLIAQLPGEKKNGLFGNLIALSLGLTPNFKSNFDLAEDAKLQLSKDTYDDDLDNLLAQIGDQYADLFLAAKNLSDAILLSDILRVNTEITKAPLSASMIKRYDEHHQDLTLLKALVRQQLPEKYKEIFFDQSKNGYAGYIDGGASQEEFYKFIKPILEKMDGTEELLVKLNREDLLRKQRTFDNGSIPHQIHLGELHAILRRQEDFYPFLKDNREKIEKILTFRIPYYVGPLARGNSRFAWMTRKSEETITPWNFEEVVDKGASAQSFIERMTNFDKNLPNEKVLPKHSLLYEYFTVYNELTKVKYVTEGMRKPAFLSGEQKKAIVDLLFKTNRKVTVKQLKEDYFKKIECFDSVEISGVEDRFNASLGTYHDLLKIIKDKDFLDNEENEDILEDIVLTLTLFEDREMIEERLKTYAHLFDDKVMKQLKRRRYTGWGRLSRKLINGIRDKQSGKTILDFLKSDGFANRNFMQLIHDDSLTFKEDIQKAQVSGQGDSLHEHIANLAGSPAIKKGILQTVKVVDELVKVMGRHKPENIVIEMARENQTTQKGQKNSRERMKRIEEGIKELGSQILKEHPVENTQLQNEKLYLYYLQNGRDMYVDQELDINRLSDYDVDHIVPQSFLKDDSIDNKVLTRSDKARGKSDNVPSEEVVKKMKNYWRQLLNAKLITQRKFDNLTKAERGGLSELDKAGFIKRQLVETRQITKHVAQILDSRMNTKYDENDKLIREVKVITLKSKLVSDFRKDFQFYKVREINNYHHAHDAYLNAVVGTALIKKYPKLESEFVYGDYKVYDVRKMIAKSEQEIGKATAKYFFYSNIMNFFKTEITLANGEIRKRPLIETNGETGEIVWDKGRDFATVRKVLSMPQVNIVKKTEVQTGGFSKESILPKRNSDKLIARKKDWDPKKYGGFDSPTVAYSVLVVAKVEKGKSKKLKSVKELLGITIMERSSFEKNPIDFLEAKGYKEVKKDLIIKLPKYSLFELENGRKRMLASAGELQKGNELALPSKYVNFLYLASHYEKLKGSPEDNEQKQLFVEQHKHYLDEIIEQISEFSKRVILADANLDKVLSAYNKHRDKPIREQAENIIHLFTLTNLGAPAAFKYFDTTIDRKRYTSTKEVLDATLIHQSITGLYETRIDLSQLGGDGGEAAAKGSSGGSGGMDPLQLLQPLEAEIKGTKLKAHWNSGATITCVPQAFLEEEVPIKNIWIKTIHGEKEQPVYYLTFKIQGRKVEAEVISSPYDYILVSPSDIPWLMKKPLQLTTLVPLQEYEERLLKQTMLTGSYKEKLQSLFLKYDALWQHWENQVGHRRIKPHHIATGTVNPRPQKQYPINPKAKASIQTVINDLLKQGVLIQQNSIMNTPVYPVPKPDGKWRMVLDYREVNKTIPLIAAQNQHSAGILSSIFRGKYKTTLDLSNGFWAHSITPESYWLTAFTWLGQQYCWTRLPQGFLNSPALFTADVVDLLKEVPNVQVYVDDIYISHDDPREHLEQLEKVFSLLLNAGYVVSLKKSEIAQHEVEFLGFNITKEGRGLTETFKQKLLNITPPRDLKQLQSILGLLNFARNFIPNFSELVKPLYNIIATANGKYITWTTDNSQQLQNIISMLNSAENLEERNPEVRLIMKVNTSPSAGYIRFYNEFAKRPIMYLNYVYTKAEVKFTNTEKLLTTIHKGLIKALDLGMGQEILVYSPIVSMTKIQKTPLPERKALPIRWITWMSYLEDPRIQFHYDKTLPELQQVPTVTDDIIAKIKHPSEFSMVFYTDGSAIKHPNVNKSHNAGMGIAQVQFKPEFTVINTWSIPLGDHTAQLAEVAAVEFACKKALKIDGPVLIVTDSFYVAESVNKELPYWQSNGFFNNKKKPLKHVSKWKSIADCIQLKPDIIIIHEKGHQPTASTFHTEGNNLADKLATQGSYVVNAGKRTADGSEFEKRTADGSEFESPKKKAKVE

SEQ ID NO: 518 - protein, 2174 aa, synthetic construct
MPAAKRVKLDGGDKKYSIGLDIGTNSVGWAVITDEYKVPSKKFKVLGNTDRHSIKKNLIGALLFDSGETAEATRLKRTARRRYTRRKNRICYLQEIFSNEMAKVDDSFFHRLEESFLVEEDKKHERHPIFGNIVDEVAYHEKYPTIYHLRKKLVDSTDKADLRLIYLALAHMIKFRGHFLIEGDLNPDNSDVDKLFIQLVQTYNQLFEENPINASGVDAKAILSARLSKSRRLENLIAQLPGEKKNGLFGNLIALSLGLTPNFKSNFDLAEDAKLQLSKDTYDDDLDNLLAQIGDQYADLFLAAKNLSDAILLSDILRVNTEITKAPLSASMIKRYDEHHQDLTLLKALVRQQLPEKYKEIFFDQSKNGYAGYIDGGASQEEFYKFIKPILEKMDGTEELLVKLNREDLLRKQRTFDNGSIPHQIHLGELHAILRRQEDFYPFLKDNREKIEKILTFRIPYYVGPLARGNSRFAWMTRKSEETITPWNFEEVVDKGASAQSFIERMTNFDKNLPNEKVLPKHSLLYEYFTVYNELTKVKYVTEGMRKPAFLSGEQKKAIVDLLFKTNRKVTVKQLKEDYFKKIECFDSVEISGVEDRFNASLGTYHDLLKIIKDKDFLDNEENEDILEDIVLTLTLFEDREMIEERLKTYAHLFDDKVMKQLKRRRYTGWGRLSRKLINGIRDKQSGKTILDFLKSDGFANRNFMQLIHDDSLTFKEDIQKAQVSGQGDSLHEHIANLAGSPAIKKGILQTVKVVDELVKVMGRHKPENIVIEMARENQTTQKGQKNSRERMKRIEEGIKELGSQILKEHPVENTQLQNEKLYLYYLQNGRDMYVDQELDINRLSDYDVDHIVPQSFLKDDSIDNKVLTRSDKARGKSDNVPSEEVVKKMKNYWRQLLNAKLITQRKFDNLTKAERGGLSELDKAGFIKRQLVETRQITKHVAQILDSRMNTKYDENDKLIREVKVITLKSKLVSDFRKDFQFYKVREINNYHHAHDAYLNAVVGTALIKKYPKLESEFVYGDYKVYDVRKMIAKSEQEIGKATAKYFFYSNIMNFFKTEITLANGEIRKRPLIETNGETGEIVWDKGRDFATVRKVLSMPQVNIVKKTEVQTGGFSKESILPKRNSDKLIARKKDWDPKKYGGFDSPTVAYSVLVVAKVEKGKSKKLKSVKELLGITIMERSSFEKNPIDFLEAKGYKEVKKDLIIKLPKYSLFELENGRKRMLASAGELQKGNELALPSKYVNFLYLASHYEKLKGSPEDNEQKQLFVEQHKHYLDEIIEQISEFSKRVILADANLDKVLSAYNKHRDKPIREQAENIIHLFTLTNLGAPAAFKYFDTTIDRKRYTSTKEVLDATLIHQSITGLYETRIDLSQLGGDGGGGSPAPGSSGGMDPLQLLQPLEAEIKGTKLKAHWNSGATITCVPQAFLEEEVPIKNIWIKTIHGEKEQPVYYLTFKIQGRKVEAEVISSPYDYILVSPSDIPWLMKKPLQLTTLVPLQEYEERLLKQTMLTGSYKEKLQSLFLKYDALWQHWENQVGHRRIKPHHIATGTVNPRPQKQYPINPKAKASIQTVINDLLKQGVLIQQNSIMNTPVYPVPKPDGKWRMVLDYREVNKTIPLIAAQNQHSAGILSSIFRGKYKTTLDLSNGFWAHSITPESYWLTAFTWLGQQYCWTRLPQGFLNSPALFTADVVDLLKEVPNVQVYVDDIYISHDDPREHLEQLEKVFSLLLNAGYVVSLKKSEIAQHEVEFLGFNITKEGRGLTETFKQKLLNITPPRDLKQLQSILGLLNFARNFIPNFSELVKPLYNIIATANGKYITWTTDNSQQLQNIISMLNSAENLEERNPEVRLIMKVNTSPSAGYIRFYNEFAKRPIMYLNYVYTKAEVKFTNTEKLLTTIHKGLIKALDLGMGQEILVYSPIVSMTKIQKTPLPERKALPIRWITWMSYLEDPRIQFHYDKTLPELQQVPTVTDDIIAKIKHPSEFSMVFYTDGSAIKHPNVNKSHNAGMGIAQVQFKPEFTVINTWSIPLGDHTAQLAEVAAVEFACKKALKIDGPVLIVTDSFYVAESVNKELPYWQSNGFFNNKKKPLKHVSKWKSIADCIQLKPDIIIIHEKGHQPTASTFHTEGNNLADKLATQGSYVVNAGKRTADGSEFEKRTADGSEFESPKKKAKVE

SEQ ID NO: 519 - protein, 2175 aa, synthetic construct
MPAAKRVKLDGGDKKYSIGLDIGTNSVGWAVITDEYKVPSKKFKVLGNTDRHSIKKNLIGALLFDSGETAEATRLKRTARRRYTRRKNRICYLQEIFSNEMAKVDDSFFHRLEESFLVEEDKKHERHPIFGNIVDEVAYHEKYPTIYHLRKKLVDSTDKADLRLIYLALAHMIKFRGHFLIEGDLNPDNSDVDKLFIQLVQTYNQLFEENPINASGVDAKAILSARLSKSRRLENLIAQLPGEKKNGLFGNLIALSLGLTPNFKSNFDLAEDAKLQLSKDTYDDDLDNLLAQIGDQYADLFLAAKNLSDAILLSDILRVNTEITKAPLSASMIKRYDEHHQDLTLLKALVRQQLPEKYKEIFFDQSKNGYAGYIDGGASQEEFYKFIKPILEKMDGTEELLVKLNREDLLRKQRTFDNGSIPHQIHLGELHAILRRQEDFYPFLKDNREKIEKILTFRIPYYVGPLARGNSRFAWMTRKSEETITPWNFEEVVDKGASAQSFIERMTNFDKNLPNEKVLPKHSLLYEYFTVYNELTKVKYVTEGMRKPAFLSGEQKKAIVDLLFKTNRKVTVKQLKEDYFKKIECFDSVEISGVEDRFNASLGTYHDLLKIIKDKDFLDNEENEDILEDIVLTLTLFEDREMIEERLKTYAHLFDDKVMKQLKRRRYTGWGRLSRKLINGIRDKQSGKTILDFLKSDGFANRNFMQLIHDDSLTFKEDIQKAQVSGQGDSLHEHIANLAGSPAIKKGILQTVKVVDELVKVMGRHKPENIVIEMARENQTTQKGQKNSRERMKRIEEGIKELGSQILKEHPVENTQLQNEKLYLYYLQNGRDMYVDQELDINRLSDYDVDHIVPQSFLKDDSIDNKVLTRSDKARGKSDNVPSEEVVKKMKNYWRQLLNAKLITQRKFDNLTKAERGGLSELDKAGFIKRQLVETRQITKHVAQILDSRMNTKYDENDKLIREVKVITLKSKLVSDFRKDFQFYKVREINNYHHAHDAYLNAVVGTALIKKYPKLESEFVYGDYKVYDVRKMIAKSEQEIGKATAKYFFYSNIMNFFKTEITLANGEIRKRPLIETNGETGEIVWDKGRDFATVRKVLSMPQVNIVKKTEVQTGGFSKESILPKRNSDKLIARKKDWDPKKYGGFDSPTVAYSVLVVAKVEKGKSKKLKSVKELLGITIMERSSFEKNPIDFLEAKGYKEVKKDLIIKLPKYSLFELENGRKRMLASAGELQKGNELALPSKYVNFLYLASHYEKLKGSPEDNEQKQLFVEQHKHYLDEIIEQISEFSKRVILADANLDKVLSAYNKHRDKPIREQAENIIHLFTLTNLGAPAAFKYFDTTIDRKRYTSTKEVLDATLIHQSITGLYETRIDLSQLGGDGGGGGGSGGGGSGGMDPLQLLQPLEAEIKGTKLKAHWNSGATITCVPQAFLEEEVPIKNIWIKTIHGEKEQPVYYLTFKIQGRKVEAEVISSPYDYILVSPSDIPWLMKKPLQLTTLVPLQEYEERLLKQTMLTGSYKEKLQSLFLKYDALWQHWENQVGHRRIKPHHIATGTVNPRPQKQYPINPKAKASIQTVINDLLKQGVLIQQNSIMNTPVYPVPKPDGKWRMVLDYREVNKTIPLIAAQNQHSAGILSSIFRGKYKTTLDLSNGFWAHSITPESYWLTAFTWLGQQYCWTRLPQGFLNSPALFTADVVDLLKEVPNVQVYVDDIYISHDDPREHLEQLEKVFSLLLNAGYVVSLKKSEIAQHEVEFLGFNITKEGRGLTETFKQKLLNITPPRDLKQLQSILGLLNFARNFIPNFSELVKPLYNIIATANGKYITWTTDNSQQLQNIISMLNSAENLEERNPEVRLIMKVNTSPSAGYIRFYNEFAKRPIMYLNYVYTKAEVKFTNTEKLLTTIHKGLIKALDLGMGQEILVYSPIVSMTKIQKTPLPERKALPIRWITWMSYLEDPRIQFHYDKTLPELQQVPTVTDDIIAKIKHPSEFSMVFYTDGSAIKHPNVNKSHNAGMGIAQVQFKPEFTVINTWSIPLGDHTAQLAEVAAVEFACKKALKIDGPVLIVTDSFYVAESVNKELPYWQSNGFFNNKKKPLKHVSKWKSIADCIQLKPDIIIIHEKGHQPTASTFHTEGNNLADKLATQGSYVVNAGKRTADGSEFEKRTADGSEFESPKKKAKVE

SEQ ID NO: 520 - protein, 2172 aa, synthetic construct
MPAAKRVKLDGGDKKYSIGLDIGTNSVGWAVITDEYKVPSKKFKVLGNTDRHSIKKNLIGALLFDSGETAEATRLKRTARRRYTRRKNRICYLQEIFSNEMAKVDDSFFHRLEESFLVEEDKKHERHPIFGNIVDEVAYHEKYPTIYHLRKKLVDSTDKADLRLIYLALAHMIKFRGHFLIEGDLNPDNSDVDKLFIQLVQTYNQLFEENPINASGVDAKAILSARLSKSRRLENLIAQLPGEKKNGLFGNLIALSLGLTPNFKSNFDLAEDAKLQLSKDTYDDDLDNLLAQIGDQYADLFLAAKNLSDAILLSDILRVNTEITKAPLSASMIKRYDEHHQDLTLLKALVRQQLPEKYKEIFFDQSKNGYAGYIDGGASQEEFYKFIKPILEKMDGTEELLVKLNREDLLRKQRTFDNGSIPHQIHLGELHAILRRQEDFYPFLKDNREKIEKILTFRIPYYVGPLARGNSRFAWMTRKSEETITPWNFEEVVDKGASAQSFIERMTNFDKNLPNEKVLPKHSLLYEYFTVYNELTKVKYVTEGMRKPAFLSGEQKKAIVDLLFKTNRKVTVKQLKEDYFKKIECFDSVEISGVEDRFNASLGTYHDLLKIIKDKDFLDNEENEDILEDIVLTLTLFEDREMIEERLKTYAHLFDDKVMKQLKRRRYTGWGRLSRKLINGIRDKQSGKTILDFLKSDGFANRNFMQLIHDDSLTFKEDIQKAQVSGQGDSLHEHIANLAGSPAIKKGILQTVKVVDELVKVMGRHKPENIVIEMARENQTTQKGQKNSRERMKRIEEGIKELGSQILKEHPVENTQLQNEKLYLYYLQNGRDMYVDQELDINRLSDYDVDHIVPQSFLKDDSIDNKVLTRSDKARGKSDNVPSEEVVKKMKNYWRQLLNAKLITQRKFDNLTKAERGGLSELDKAGFIKRQLVETRQITKHVAQILDSRMNTKYDENDKLIREVKVITLKSKLVSDFRKDFQFYKVREINNYHHAHDAYLNAVVGTALIKKYPKLESEFVYGDYKVYDVRKMIAKSEQEIGKATAKYFFYSNIMNFFKTEITLANGEIRKRPLIETNGETGEIVWDKGRDFATVRKVLSMPQVNIVKKTEVQTGGFSKESILPKRNSDKLIARKKDWDPKKYGGFDSPTVAYSVLVVAKVEKGKSKKLKSVKELLGITIMERSSFEKNPIDFLEAKGYKEVKKDLIIKLPKYSLFELENGRKRMLASAGELQKGNELALPSKYVNFLYLASHYEKLKGSPEDNEQKQLFVEQHKHYLDEIIEQISEFSKRVILADANLDKVLSAYNKHRDKPIREQAENIIHLFTLTNLGAPAAFKYFDTTIDRKRYTSTKEVLDATLIHQSITGLYETRIDLSQLGGDGGPAPAPAPGGMDPLQLLQPLEAEIKGTKLKAHWNSGATITCVPQAFLEEEVPIKNIWIKTIHGEKEQPVYYLTFKIQGRKVEAEVISSPYDYILVSPSDIPWLMKKPLQLTTLVPLQEYEERLLKQTMLTGSYKEKLQSLFLKYDALWQHWENQVGHRRIKPHHIATGTVNPRPQKQYPINPKAKASIQTVINDLLKQGVLIQQNSIMNTPVYPVPKPDGKWRMVLDYREVNKTIPLIAAQNQHSAGILSSIFRGKYKTTLDLSNGFWAHSITPESYWLTAFTWLGQQYCWTRLPQGFLNSPALFTADVVDLLKEVPNVQVYVDDIYISHDDPREHLEQLEKVFSLLLNAGYVVSLKKSEIAQHEVEFLGFNITKEGRGLTETFKQKLLNITPPRDLKQLQSILGLLNFARNFIPNFSELVKPLYNIIATANGKYITWTTDNSQQLQNIISMLNSAENLEERNPEVRLIMKVNTSPSAGYIRFYNEFAKRPIMYLNYVYTKAEVKFTNTEKLLTTIHKGLIKALDLGMGQEILVYSPIVSMTKIQKTPLPERKALPIRWITWMSYLEDPRIQFHYDKTLPELQQVPTVTDDIIAKIKHPSEFSMVFYTDGSAIKHPNVNKSHNAGMGIAQVQFKPEFTVINTWSIPLGDHTAQLAEVAAVEFACKKALKIDGPVLIVTDSFYVAESVNKELPYWQSNGFFNNKKKPLKHVSKWKSIADCIQLKPDIIIIHEKGHQPTASTFHTEGNNLADKLATQGSYVVNAGKRTADGSEFEKRTADGSEFESPKKKAKVE

SEQ ID NO: 521 - protein, 2174 aa, synthetic construct
MPAAKRVKLDGGDKKYSIGLDIGTNSVGWAVITDEYKVPSKKFKVLGNTDRHSIKKNLIGALLFDSGETAEATRLKRTARRRYTRRKNRICYLQEIFSNEMAKVDDSFFHRLEESFLVEEDKKHERHPIFGNIVDEVAYHEKYPTIYHLRKKLVDSTDKADLRLIYLALAHMIKFRGHFLIEGDLNPDNSDVDKLFIQLVQTYNQLFEENPINASGVDAKAILSARLSKSRRLENLIAQLPGEKKNGLFGNLIALSLGLTPNFKSNFDLAEDAKLQLSKDTYDDDLDNLLAQIGDQYADLFLAAKNLSDAILLSDILRVNTEITKAPLSASMIKRYDEHHQDLTLLKALVRQQLPEKYKEIFFDQSKNGYAGYIDGGASQEEFYKFIKPILEKMDGTEELLVKLNREDLLRKQRTFDNGSIPHQIHLGELHAILRRQEDFYPFLKDNREKIEKILTFRIPYYVGPLARGNSRFAWMTRKSEETITPWNFEEVVDKGASAQSFIERMTNFDKNLPNEKVLPKHSLLYEYFTVYNELTKVKYVTEGMRKPAFLSGEQKKAIVDLLFKTNRKVTVKQLKEDYFKKIECFDSVEISGVEDRFNASLGTYHDLLKIIKDKDFLDNEENEDILEDIVLTLTLFEDREMIEERLKTYAHLFDDKVMKQLKRRRYTGWGRLSRKLINGIRDKQSGKTILDFLKSDGFANRNFMQLIHDDSLTFKEDIQKAQVSGQGDSLHEHIANLAGSPAIKKGILQTVKVVDELVKVMGRHKPENIVIEMARENQTTQKGQKNSRERMKRIEEGIKELGSQILKEHPVENTQLQNEKLYLYYLQNGRDMYVDQELDINRLSDYDVDHIVPQSFLKDDSIDNKVLTRSDKARGKSDNVPSEEVVKKMKNYWRQLLNAKLITQRKFDNLTKAERGGLSELDKAGFIKRQLVETRQITKHVAQILDSRMNTKYDENDKLIREVKVITLKSKLVSDFRKDFQFYKVREINNYHHAHDAYLNAVVGTALIKKYPKLESEFVYGDYKVYDVRKMIAKSEQEIGKATAKYFFYSNIMNFFKTEITLANGEIRKRPLIETNGETGEIVWDKGRDFATVRKVLSMPQVNIVKKTEVQTGGFSKESILPKRNSDKLIARKKDWDPKKYGGFDSPTVAYSVLVVAKVEKGKSKKLKSVKELLGITIMERSSFEKNPIDFLEAKGYKEVKKDLIIKLPKYSLFELENGRKRMLASAGELQKGNELALPSKYVNFLYLASHYEKLKGSPEDNEQKQLFVEQHKHYLDEIIEQISEFSKRVILADANLDKVLSAYNKHRDKPIREQAENIIHLFTLTNLGAPAAFKYFDTTIDRKRYTSTKEVLDATLIHQSITGLYETRIDLSQLGGDGGGSSGGSGGGGGMDPLQLLQPLEAEIKGTKLKAHWNSGATITCVPQAFLEEEVPIKNIWIKTIHGEKEQPVYYLTFKIQGRKVEAEVISSPYDYILVSPSDIPWLMKKPLQLTTLVPLQEYEERLLKQTMLTGSYKEKLQSLFLKYDALWQHWENQVGHRRIKPHHIATGTVNPRPQKQYPINPKAKASIQTVINDLLKQGVLIQQNSIMNTPVYPVPKPDGKWRMVLDYREVNKTIPLIAAQNQHSAGILSSIFRGKYKTTLDLSNGFWAHSITPESYWLTAFTWLGQQYCWTRLPQGFLNSPALFTADVVDLLKEVPNVQVYVDDIYISHDDPREHLEQLEKVFSLLLNAGYVVSLKKSEIAQHEVEFLGFNITKEGRGLTETFKQKLLNITPPRDLKQLQSILGLLNFARNFIPNFSELVKPLYNIIATANGKYITWTTDNSQQLQNIISMLNSAENLEERNPEVRLIMKVNTSPSAGYIRFYNEFAKRPIMYLNYVYTKAEVKFTNTEKLLTTIHKGLIKALDLGMGQEILVYSPIVSMTKIQKTPLPERKALPIRWITWMSYLEDPRIQFHYDKTLPELQQVPTVTDDIIAKIKHPSEFSMVFYTDGSAIKHPNVNKSHNAGMGIAQVQFKPEFTVINTWSIPLGDHTAQLAEVAAVEFACKKALKIDGPVLIVTDSFYVAESVNKELPYWQSNGFFNNKKKPLKHVSKWKSIADCIQLKPDIIIIHEKGHQPTASTFHTEGNNLADKLATQGSYVVNAGKRTADGSEFEKRTADGSEFESPKKKAKVE

SEQ ID NO: 522 - protein, 2010 aa, synthetic construct
MPAAKRVKLDGGDKKYSIGLDIGTNSVGWAVITDEYKVPSKKFKVLGNTDRHSIKKNLIGALLFDSGETAEATRLKRTARRRYTRRKNRICYLQEIFSNEMAKVDDSFFHRLEESFLVEEDKKHERHPIFGNIVDEVAYHEKYPTIYHLRKKLVDSTDKADLRLIYLALAHMIKFRGHFLIEGDLNPDNSDVDKLFIQLVQTYNQLFEENPINASGVDAKAILSARLSKSRRLENLIAQLPGEKKNGLFGNLIALSLGLTPNFKSNFDLAEDAKLQLSKDTYDDDLDNLLAQIGDQYADLFLAAKNLSDAILLSDILRVNTEITKAPLSASMIKRYDEHHQDLTLLKALVRQQLPEKYKEIFFDQSKNGYAGYIDGGASQEEFYKFIKPILEKMDGTEELLVKLNREDLLRKQRTFDNGSIPHQIHLGELHAILRRQEDFYPFLKDNREKIEKILTFRIPYYVGPLARGNSRFAWMTRKSEETITPWNFEEVVDKGASAQSFIERMTNFDKNLPNEKVLPKHSLLYEYFTVYNELTKVKYVTEGMRKPAFLSGEQKKAIVDLLFKTNRKVTVKQLKEDYFKKIECFDSVEISGVEDRFNASLGTYHDLLKIIKDKDFLDNEENEDILEDIVLTLTLFEDREMIEERLKTYAHLFDDKVMKQLKRRRYTGWGRLSRKLINGIRDKQSGKTILDFLKSDGFANRNFMQLIHDDSLTFKEDIQKAQVSGQGDSLHEHIANLAGSPAIKKGILQTVKVVDELVKVMGRHKPENIVIEMARENQTTQKGQKNSRERMKRIEEGIKELGSQILKEHPVENTQLQNEKLYLYYLQNGRDMYVDQELDINRLSDYDVDHIVPQSFLKDDSIDNKVLTRSDKARGKSDNVPSEEVVKKMKNYWRQLLNAKLITQRKFDNLTKAERGGLSELDKAGFIKRQLVETRQITKHVAQILDSRMNTKYDENDKLIREVKVITLKSKLVSDFRKDFQFYKVREINNYHHAHDAYLNAVVGTALIKKYPKLESEFVYGDYKVYDVRKMIAKSEQEIGKATAKYFFYSNIMNFFKTEITLANGEIRKRPLIETNGETGEIVWDKGRDFATVRKVLSMPQVNIVKKTEVQTGGFSKESILPKRNSDKLIARKKDWDPKKYGGFDSPTVAYSVLVVAKVEKGKSKKLKSVKELLGITIMERSSFEKNPIDFLEAKGYKEVKKDLIIKLPKYSLFELENGRKRMLASAGELQKGNELALPSKYVNFLYLASHYEKLKGSPEDNEQKQLFVEQHKHYLDEIIEQISEFSKRVILADANLDKVLSAYNKHRDKPIREQAENIIHLFTLTNLGAPAAFKYFDTTIDRKRYTSTKEVLDATLIHQSITGLYETRIDLSQLGGDGGGGGGSGGGGSGGGGSGGGGSGGGVLDTPPSHIGLEHLPPPPEVPQFPLNLERLQALQDLVHRSLEAGYISPWDGPGNNPVFPVRKPNGAWRFVHDLRATNALTKPIPALSPGPPDLTAPPTHPPHIICLDLKDAFFQIPVEDRFRFYLSFTLPSPGGLQPHRRFAWRVLPQGFINSPALFQRALQEPLRQVSAAFSQSLLVSYMDDILYASPTEEQRSQCYQALAARLRDLGFQVASEKTSQTPSPVPFLGQMVHEQIVTYQSLPTLQISSPISLHQLQAVLGDLQWVSRGTPTTRRPLQLLYSSLKRHHDPRAIIQLSPEQLQGIAELRQALSHNARSRYNEQEPLLAYVHLTRAGSTLVLFQKGAQFPLAYFQTPLTDNQASPWGLLLLLGCQYLQTQALSSYAKPILKYYHNLPKTSLDNWIQSSEDPRVQELLQLWPQISSQGIQPPGPWKTLITRAEVFLTPQFSPDPIPAALCLFSDGATGRGAYCLWKDHLLDFQAVPAPESAQKGELAGLLAGLAAAPPEPVNIWVDSKYLYSLLRTWVLGAWLQPDPVPSYALLYKSLLRHPAIVVGHVRSHSSASHPIASLNNYVDQLAGKRTADGSEFEKRTADGSEFESPKKKAKVE

SEQ ID NO: 523 - protein, 1995 aa, synthetic construct
MPAAKRVKLDGGDKKYSIGLDIGTNSVGWAVITDEYKVPSKKFKVLGNTDRHSIKKNLIGALLFDSGETAEATRLKRTARRRYTRRKNRICYLQEIFSNEMAKVDDSFFHRLEESFLVEEDKKHERHPIFGNIVDEVAYHEKYPTIYHLRKKLVDSTDKADLRLIYLALAHMIKFRGHFLIEGDLNPDNSDVDKLFIQLVQTYNQLFEENPINASGVDAKAILSARLSKSRRLENLIAQLPGEKKNGLFGNLIALSLGLTPNFKSNFDLAEDAKLQLSKDTYDDDLDNLLAQIGDQYADLFLAAKNLSDAILLSDILRVNTEITKAPLSASMIKRYDEHHQDLTLLKALVRQQLPEKYKEIFFDQSKNGYAGYIDGGASQEEFYKFIKPILEKMDGTEELLVKLNREDLLRKQRTFDNGSIPHQIHLGELHAILRRQEDFYPFLKDNREKIEKILTFRIPYYVGPLARGNSRFAWMTRKSEETITPWNFEEVVDKGASAQSFIERMTNFDKNLPNEKVLPKHSLLYEYFTVYNELTKVKYVTEGMRKPAFLSGEQKKAIVDLLFKTNRKVTVKQLKEDYFKKIECFDSVEISGVEDRFNASLGTYHDLLKIIKDKDFLDNEENEDILEDIVLTLTLFEDREMIEERLKTYAHLFDDKVMKQLKRRRYTGWGRLSRKLINGIRDKQSGKTILDFLKSDGFANRNFMQLIHDDSLTFKEDIQKAQVSGQGDSLHEHIANLAGSPAIKKGILQTVKVVDELVKVMGRHKPENIVIEMARENQTTQKGQKNSRERMKRIEEGIKELGSQILKEHPVENTQLQNEKLYLYYLQNGRDMYVDQELDINRLSDYDVDHIVPQSFLKDDSIDNKVLTRSDKARGKSDNVPSEEVVKKMKNYWRQLLNAKLITQRKFDNLTKAERGGLSELDKAGFIKRQLVETRQITKHVAQILDSRMNTKYDENDKLIREVKVITLKSKLVSDFRKDFQFYKVREINNYHHAHDAYLNAVVGTALIKKYPKLESEFVYGDYKVYDVRKMIAKSEQEIGKATAKYFFYSNIMNFFKTEITLANGEIRKRPLIETNGETGEIVWDKGRDFATVRKVLSMPQVNIVKKTEVQTGGFSKESILPKRNSDKLIARKKDWDPKKYGGFDSPTVAYSVLVVAKVEKGKSKKLKSVKELLGITIMERSSFEKNPIDFLEAKGYKEVKKDLIIKLPKYSLFELENGRKRMLASAGELQKGNELALPSKYVNFLYLASHYEKLKGSPEDNEQKQLFVEQHKHYLDEIIEQISEFSKRVILADANLDKVLSAYNKHRDKPIREQAENIIHLFTLTNLGAPAAFKYFDTTIDRKRYTSTKEVLDATLIHQSITGLYETRIDLSQLGGDGGGGGGGGGGVLDTPPSHIGLEHLPPPPEVPQFPLNLERLQALQDLVHRSLEAGYISPWDGPGNNPVFPVRKPNGAWRFVHDLRATNALTKPIPALSPGPPDLTAPPTHPPHIICLDLKDAFFQIPVEDRFRFYLSFTLPSPGGLQPHRRFAWRVLPQGFINSPALFQRALQEPLRQVSAAFSQSLLVSYMDDILYASPTEEQRSQCYQALAARLRDLGFQVASEKTSQTPSPVPFLGQMVHEQIVTYQSLPTLQISSPISLHQLQAVLGDLQWVSRGTPTTRRPLQLLYSSLKRHHDPRAIIQLSPEQLQGIAELRQALSHNARSRYNEQEPLLAYVHLTRAGSTLVLFQKGAQFPLAYFQTPLTDNQASPWGLLLLLGCQYLQTQALSSYAKPILKYYHNLPKTSLDNWIQSSEDPRVQELLQLWPQISSQGIQPPGPWKTLITRAEVFLTPQFSPDPIPAALCLFSDGATGRGAYCLWKDHLLDFQAVPAPESAQKGELAGLLAGLAAAPPEPVNIWVDSKYLYSLLRTWVLGAWLQPDPVPSYALLYKSLLRHPAIVVGHVRSHSSASHPIASLNNYVDQLAGKRTADGSEFEKRTADGSEFESPKKKAKVE

SEQ ID NO: 524 - protein, 2122 aa, synthetic construct
MPAAKRVKLDGGDKKYSIGLDIGTNSVGWAVITDEYKVPSKKFKVLGNTDRHSIKKNLIGALLFDSGETAEATRLKRTARRRYTRRKNRICYLQEIFSNEMAKVDDSFFHRLEESFLVEEDKKHERHPIFGNIVDEVAYHEKYPTIYHLRKKLVDSTDKADLRLIYLALAHMIKFRGHFLIEGDLNPDNSDVDKLFIQLVQTYNQLFEENPINASGVDAKAILSARLSKSRRLENLIAQLPGEKKNGLFGNLIALSLGLTPNFKSNFDLAEDAKLQLSKDTYDDDLDNLLAQIGDQYADLFLAAKNLSDAILLSDILRVNTEITKAPLSASMIKRYDEHHQDLTLLKALVRQQLPEKYKEIFFDQSKNGYAGYIDGGASQEEFYKFIKPILEKMDGTEELLVKLNREDLLRKQRTFDNGSIPHQIHLGELHAILRRQEDFYPFLKDNREKIEKILTFRIPYYVGPLARGNSRFAWMTRKSEETITPWNFEEVVDKGASAQSFIERMTNFDKNLPNEKVLPKHSLLYEYFTVYNELTKVKYVTEGMRKPAFLSGEQKKAIVDLLFKTNRKVTVKQLKEDYFKKIECFDSVEISGVEDRFNASLGTYHDLLKIIKDKDFLDNEENEDILEDIVLTLTLFEDREMIEERLKTYAHLFDDKVMKQLKRRRYTGWGRLSRKLINGIRDKQSGKTILDFLKSDGFANRNFMQLIHDDSLTFKEDIQKAQVSGQGDSLHEHIANLAGSPAIKKGILQTVKVVDELVKVMGRHKPENIVIEMARENQTTQKGQKNSRERMKRIEEGIKELGSQILKEHPVENTQLQNEKLYLYYLQNGRDMYVDQELDINRLSDYDVDHIVPQSFLKDDSIDNKVLTRSDKARGKSDNVPSEEVVKKMKNYWRQLLNAKLITQRKFDNLTKAERGGLSELDKAGFIKRQLVETRQITKHVAQILDSRMNTKYDENDKLIREVKVITLKSKLVSDFRKDFQFYKVREINNYHHAHDAYLNAVVGTALIKKYPKLESEFVYGDYKVYDVRKMIAKSEQEIGKATAKYFFYSNIMNFFKTEITLANGEIRKRPLIETNGETGEIVWDKGRDFATVRKVLSMPQVNIVKKTEVQTGGFSKESILPKRNSDKLIARKKDWDPKKYGGFDSPTVAYSVLVVAKVEKGKSKKLKSVKELLGITIMERSSFEKNPIDFLEAKGYKEVKKDLIIKLPKYSLFELENGRKRMLASAGELQKGNELALPSKYVNFLYLASHYEKLKGSPEDNEQKQLFVEQHKHYLDEIIEQISEFSKRVILADANLDKVLSAYNKHRDKPIREQAENIIHLFTLTNLGAPAAFKYFDTTIDRKRYTSTKEVLDATLIHQSITGLYETRIDLSQLGGDGGAEAAAKEAAAKEAAAKEAAAKALEAEAAAKEAAAKEAAAKEAAAKAGGIPWLMKKPLQLTTLVPLQEYEERLLKQTMLTGSYKEKLQSLFLKYDALWQHWENQVGHRRIKPHHIATGTVNPRPQKQYPINPKAKASIQTVINDLLKQGVLIQQNSIMNTPVYPVPKPDGKWRMVLDYREVNKTIPLIAAQNQHSAGILSSIFRGKYKTTLDLSNGFWAHSITPESYWLTAFTWLGQQYCWTRLPQGFLNSPALFTADVVDLLKEVPNVQVYVDDIYISHDDPREHLEQLEKVFSLLLNAGYVVSLKKSEIAQHEVEFLGFNITKEGRGLTETFKQKLLNITPPRDLKQLQSILGLLNFARNFIPNFSELVKPLYNIIATANGKYITWTTDNSQQLQNIISMLNSAENLEERNPEVRLIMKVNTSPSAGYIRFYNEFAKRPIMYLNYVYTKAEVKFTNTEKLLTTIHKGLIKALDLGMGQEILVYSPIVSMTKIQKTPLPERKALPIRWITWMSYLEDPRIQFHYDKTLPELQQVPTVTDDIIAKIKHPSEFSMVFYTDGSAIKHPNVNKSHNAGMGIAQVQFKPEFTVINTWSIPLGDHTAQLAEVAAVEFACKKALKIDGPVLIVTDSFYVAESVNKELPYWQSNGFFNNKKKPLKHVSKWKSIADCIQLKPDIIIIHEKGHQPTASTFHTEGNNLADKLATQGSYVVNAGKRTADGSEFEKRTADGSEFESPKKKAKVE

SEQ ID NO: 525 - protein, 2096 aa, synthetic construct
MPAAKRVKLDGGDKKYSIGLDIGTNSVGWAVITDEYKVPSKKFKVLGNTDRHSIKKNLIGALLFDSGETAEATRLKRTARRRYTRRKNRICYLQEIFSNEMAKVDDSFFHRLEESFLVEEDKKHERHPIFGNIVDEVAYHEKYPTIYHLRKKLVDSTDKADLRLIYLALAHMIKFRGHFLIEGDLNPDNSDVDKLFIQLVQTYNQLFEENPINASGVDAKAILSARLSKSRRLENLIAQLPGEKKNGLFGNLIALSLGLTPNFKSNFDLAEDAKLQLSKDTYDDDLDNLLAQIGDQYADLFLAAKNLSDAILLSDILRVNTEITKAPLSASMIKRYDEHHQDLTLLKALVRQQLPEKYKEIFFDQSKNGYAGYIDGGASQEEFYKFIKPILEKMDGTEELLVKLNREDLLRKQRTFDNGSIPHQIHLGELHAILRRQEDFYPFLKDNREKIEKILTFRIPYYVGPLARGNSRFAWMTRKSEETITPWNFEEVVDKGASAQSFIERMTNFDKNLPNEKVLPKHSLLYEYFTVYNELTKVKYVTEGMRKPAFLSGEQKKAIVDLLFKTNRKVTVKQLKEDYFKKIECFDSVEISGVEDRFNASLGTYHDLLKIIKDKDFLDNEENEDILEDIVLTLTLFEDREMIEERLKTYAHLFDDKVMKQLKRRRYTGWGRLSRKLINGIRDKQSGKTILDFLKSDGFANRNFMQLIHDDSLTFKEDIQKAQVSGQGDSLHEHIANLAGSPAIKKGILQTVKVVDELVKVMGRHKPENIVIEMARENQTTQKGQKNSRERMKRIEEGIKELGSQILKEHPVENTQLQNEKLYLYYLQNGRDMYVDQELDINRLSDYDVDHIVPQSFLKDDSIDNKVLTRSDKARGKSDNVPSEEVVKKMKNYWRQLLNAKLITQRKFDNLTKAERGGLSELDKAGFIKRQLVETRQITKHVAQILDSRMNTKYDENDKLIREVKVITLKSKLVSDFRKDFQFYKVREINNYHHAHDAYLNAVVGTALIKKYPKLESEFVYGDYKVYDVRKMIAKSEQEIGKATAKYFFYSNIMNFFKTEITLANGEIRKRPLIETNGETGEIVWDKGRDFATVRKVLSMPQVNIVKKTEVQTGGFSKESILPKRNSDKLIARKKDWDPKKYGGFDSPTVAYSVLVVAKVEKGKSKKLKSVKELLGITIMERSSFEKNPIDFLEAKGYKEVKKDLIIKLPKYSLFELENGRKRMLASAGELQKGNELALPSKYVNFLYLASHYEKLKGSPEDNEQKQLFVEQHKHYLDEIIEQISEFSKRVILADANLDKVLSAYNKHRDKPIREQAENIIHLFTLTNLGAPAAFKYFDTTIDRKRYTSTKEVLDATLIHQSITGLYETRIDLSQLGGDGGEAAAKEAAAKEAAAKEAAAKGGIPWLMKKPLQLTTLVPLQEYEERLLKQTMLTGSYKEKLQSLFLKYDALWQHWENQVGHRRIKPHHIATGTVNPRPQKQYPINPKAKASIQTVINDLLKQGVLIQQNSIMNTPVYPVPKPDGKWRMVLDYREVNKTIPLIAAQNQHSAGILSSIFRGKYKTTLDLSNGFWAHSITPESYWLTAFTWLGQQYCWTRLPQGFLNSPALFTADVVDLLKEVPNVQVYVDDIYISHDDPREHLEQLEKVFSLLLNAGYVVSLKKSEIAQHEVEFLGFNITKEGRGLTETFKQKLLNITPPRDLKQLQSILGLLNFARNFIPNFSELVKPLYNIIATANGKYITWTTDNSQQLQNIISMLNSAENLEERNPEVRLIMKVNTSPSAGYIRFYNEFAKRPIMYLNYVYTKAEVKFTNTEKLLTTIHKGLIKALDLGMGQEILVYSPIVSMTKIQKTPLPERKALPIRWITWMSYLEDPRIQFHYDKTLPELQQVPTVTDDIIAKIKHPSEFSMVFYTDGSAIKHPNVNKSHNAGMGIAQVQFKPEFTVINTWSIPLGDHTAQLAEVAAVEFACKKALKIDGPVLIVTDSFYVAESVNKELPYWQSNGFFNNKKKPLKHVSKWKSIADCIQLKPDIIIIHEKGHQPTASTFHTEGNNLADKLATQGSYVVNAGKRTADGSEFEKRTADGSEFESPKKKAKVE

SEQ ID NO: 526 - protein, 2087 aa, synthetic construct
MPAAKRVKLDGGDKKYSIGLDIGTNSVGWAVITDEYKVPSKKFKVLGNTDRHSIKKNLIGALLFDSGETAEATRLKRTARRRYTRRKNRICYLQEIFSNEMAKVDDSFFHRLEESFLVEEDKKHERHPIFGNIVDEVAYHEKYPTIYHLRKKLVDSTDKADLRLIYLALAHMIKFRGHFLIEGDLNPDNSDVDKLFIQLVQTYNQLFEENPINASGVDAKAILSARLSKSRRLENLIAQLPGEKKNGLFGNLIALSLGLTPNFKSNFDLAEDAKLQLSKDTYDDDLDNLLAQIGDQYADLFLAAKNLSDAILLSDILRVNTEITKAPLSASMIKRYDEHHQDLTLLKALVRQQLPEKYKEIFFDQSKNGYAGYIDGGASQEEFYKFIKPILEKMDGTEELLVKLNREDLLRKQRTFDNGSIPHQIHLGELHAILRRQEDFYPFLKDNREKIEKILTFRIPYYVGPLARGNSRFAWMTRKSEETITPWNFEEVVDKGASAQSFIERMTNFDKNLPNEKVLPKHSLLYEYFTVYNELTKVKYVTEGMRKPAFLSGEQKKAIVDLLFKTNRKVTVKQLKEDYFKKIECFDSVEISGVEDRFNASLGTYHDLLKIIKDKDFLDNEENEDILEDIVLTLTLFEDREMIEERLKTYAHLFDDKVMKQLKRRRYTGWGRLSRKLINGIRDKQSGKTILDFLKSDGFANRNFMQLIHDDSLTFKEDIQKAQVSGQGDSLHEHIANLAGSPAIKKGILQTVKVVDELVKVMGRHKPENIVIEMARENQTTQKGQKNSRERMKRIEEGIKELGSQILKEHPVENTQLQNEKLYLYYLQNGRDMYVDQELDINRLSDYDVDHIVPQSFLKDDSIDNKVLTRSDKARGKSDNVPSEEVVKKMKNYWRQLLNAKLITQRKFDNLTKAERGGLSELDKAGFIKRQLVETRQITKHVAQILDSRMNTKYDENDKLIREVKVITLKSKLVSDFRKDFQFYKVREINNYHHAHDAYLNAVVGTALIKKYPKLESEFVYGDYKVYDVRKMIAKSEQEIGKATAKYFFYSNIMNFFKTEITLANGEIRKRPLIETNGETGEIVWDKGRDFATVRKVLSMPQVNIVKKTEVQTGGFSKESILPKRNSDKLIARKKDWDPKKYGGFDSPTVAYSVLVVAKVEKGKSKKLKSVKELLGITIMERSSFEKNPIDFLEAKGYKEVKKDLIIKLPKYSLFELENGRKRMLASAGELQKGNELALPSKYVNFLYLASHYEKLKGSPEDNEQKQLFVEQHKHYLDEIIEQISEFSKRVILADANLDKVLSAYNKHRDKPIREQAENIIHLFTLTNLGAPAAFKYFDTTIDRKRYTSTKEVLDATLIHQSITGLYETRIDLSQLGGDGGGGSEAAAKPAPGGIPWLMKKPLQLTTLVPLQEYEERLLKQTMLTGSYKEKLQSLFLKYDALWQHWENQVGHRRIKPHHIATGTVNPRPQKQYPINPKAKASIQTVINDLLKQGVLIQQNSIMNTPVYPVPKPDGKWRMVLDYREVNKTIPLIAAQNQHSAGILSSIFRGKYKTTLDLSNGFWAHSITPESYWLTAFTWLGQQYCWTRLPQGFLNSPALFTADVVDLLKEVPNVQVYVDDIYISHDDPREHLEQLEKVFSLLLNAGYVVSLKKSEIAQHEVEFLGFNITKEGRGLTETFKQKLLNITPPRDLKQLQSILGLLNFARNFIPNFSELVKPLYNIIATANGKYITWTTDNSQQLQNIISMLNSAENLEERNPEVRLIMKVNTSPSAGYIRFYNEFAKRPIMYLNYVYTKAEVKFTNTEKLLTTIHKGLIKALDLGMGQEILVYSPIVSMTKIQKTPLPERKALPIRWITWMSYLEDPRIQFHYDKTLPELQQVPTVTDDIIAKIKHPSEFSMVFYTDGSAIKHPNVNKSHNAGMGIAQVQFKPEFTVINTWSIPLGDHTAQLAEVAAVEFACKKALKIDGPVLIVTDSFYVAESVNKELPYWQSNGFFNNKKKPLKHVSKWKSIADCIQLKPDIIIIHEKGHQPTASTFHTEGNNLADKLATQGSYVVNAGKRTADGSEFEKRTADGSEFESPKKKAKVE

SEQ ID NO: 527 - protein, 2109 aa, synthetic construct
MPAAKRVKLDGGDKKYSIGLDIGTNSVGWAVITDEYKVPSKKFKVLGNTDRHSIKKNLIGALLFDSGETAEATRLKRTARRRYTRRKNRICYLQEIFSNEMAKVDDSFFHRLEESFLVEEDKKHERHPIFGNIVDEVAYHEKYPTIYHLRKKLVDSTDKADLRLIYLALAHMIKFRGHFLIEGDLNPDNSDVDKLFIQLVQTYNQLFEENPINASGVDAKAILSARLSKSRRLENLIAQLPGEKKNGLFGNLIALSLGLTPNFKSNFDLAEDAKLQLSKDTYDDDLDNLLAQIGDQYADLFLAAKNLSDAILLSDILRVNTEITKAPLSASMIKRYDEHHQDLTLLKALVRQQLPEKYKEIFFDQSKNGYAGYIDGGASQEEFYKFIKPILEKMDGTEELLVKLNREDLLRKQRTFDNGSIPHQIHLGELHAILRRQEDFYPFLKDNREKIEKILTFRIPYYVGPLARGNSRFAWMTRKSEETITPWNFEEVVDKGASAQSFIERMTNFDKNLPNEKVLPKHSLLYEYFTVYNELTKVKYVTEGMRKPAFLSGEQKKAIVDLLFKTNRKVTVKQLKEDYFKKIECFDSVEISGVEDRFNASLGTYHDLLKIIKDKDFLDNEENEDILEDIVLTLTLFEDREMIEERLKTYAHLFDDKVMKQLKRRRYTGWGRLSRKLINGIRDKQSGKTILDFLKSDGFANRNFMQLIHDDSLTFKEDIQKAQVSGQGDSLHEHIANLAGSPAIKKGILQTVKVVDELVKVMGRHKPENIVIEMARENQTTQKGQKNSRERMKRIEEGIKELGSQILKEHPVENTQLQNEKLYLYYLQNGRDMYVDQELDINRLSDYDVDHIVPQSFLKDDSIDNKVLTRSDKARGKSDNVPSEEVVKKMKNYWRQLLNAKLITQRKFDNLTKAERGGLSELDKAGFIKRQLVETRQITKHVAQILDSRMNTKYDENDKLIREVKVITLKSKLVSDFRKDFQFYKVREINNYHHAHDAYLNAVVGTALIKKYPKLESEFVYGDYKVYDVRKMIAKSEQEIGKATAKYFFYSNIMNFFKTEITLANGEIRKRPLIETNGETGEIVWDKGRDFATVRKVLSMPQVNIVKKTEVQTGGFSKESILPKRNSDKLIARKKDWDPKKYGGFDSPTVAYSVLVVAKVEKGKSKKLKSVKELLGITIMERSSFEKNPIDFLEAKGYKEVKKDLIIKLPKYSLFELENGRKRMLASAGELQKGNELALPSKYVNFLYLASHYEKLKGSPEDNEQKQLFVEQHKHYLDEIIEQISEFSKRVILADANLDKVLSAYNKHRDKPIREQAENIIHLFTLTNLGAPAAFKYFDTTIDRKRYTSTKEVLDATLIHQSITGLYETRIDLSQLGGDGGSGGSSGGSSGSETPGTSESATPESSGGSSGGSSGGIPWLMKKPLQLTTLVPLQEYEERLLKQTMLTGSYKEKLQSLFLKYDALWQHWENQVGHRRIKPHHIATGTVNPRPQKQYPINPKAKASIQTVINDLLKQGVLIQQNSIMNTPVYPVPKPDGKWRMVLDYREVNKTIPLIAAQNQHSAGILSSIFRGKYKTTLDLSNGFWAHSITPESYWLTAFTWLGQQYCWTRLPQGFLNSPALFTADVVDLLKEVPNVQVYVDDIYISHDDPREHLEQLEKVFSLLLNAGYVVSLKKSEIAQHEVEFLGFNITKEGRGLTETFKQKLLNITPPRDLKQLQSILGLLNFARNFIPNFSELVKPLYNIIATANGKYITWTTDNSQQLQNIISMLNSAENLEERNPEVRLIMKVNTSPSAGYIRFYNEFAKRPIMYLNYVYTKAEVKFTNTEKLLTTIHKGLIKALDLGMGQEILVYSPIVSMTKIQKTPLPERKALPIRWITWMSYLEDPRIQFHYDKTLPELQQVPTVTDDIIAKIKHPSEFSMVFYTDGSAIKHPNVNKSHNAGMGIAQVQFKPEFTVINTWSIPLGDHTAQLAEVAAVEFACKKALKIDGPVLIVTDSFYVAESVNKELPYWQSNGFFNNKKKPLKHVSKWKSIADCIQLKPDIIIIHEKGHQPTASTFHTEGNNLADKLATQGSYVVNAGKRTADGSEFEKRTADGSEFESPKKKAKVE

SEQ ID NO: 528 - protein, 2106 aa, synthetic construct
MPAAKRVKLDGGDKKYSIGLDIGTNSVGWAVITDEYKVPSKKFKVLGNTDRHSIKKNLIGALLFDSGETAEATRLKRTARRRYTRRKNRICYLQEIFSNEMAKVDDSFFHRLEESFLVEEDKKHERHPIFGNIVDEVAYHEKYPTIYHLRKKLVDSTDKADLRLIYLALAHMIKFRGHFLIEGDLNPDNSDVDKLFIQLVQTYNQLFEENPINASGVDAKAILSARLSKSRRLENLIAQLPGEKKNGLFGNLIALSLGLTPNFKSNFDLAEDAKLQLSKDTYDDDLDNLLAQIGDQYADLFLAAKNLSDAILLSDILRVNTEITKAPLSASMIKRYDEHHQDLTLLKALVRQQLPEKYKEIFFDQSKNGYAGYIDGGASQEEFYKFIKPILEKMDGTEELLVKLNREDLLRKQRTFDNGSIPHQIHLGELHAILRRQEDFYPFLKDNREKIEKILTFRIPYYVGPLARGNSRFAWMTRKSEETITPWNFEEVVDKGASAQSFIERMTNFDKNLPNEKVLPKHSLLYEYFTVYNELTKVKYVTEGMRKPAFLSGEQKKAIVDLLFKTNRKVTVKQLKEDYFKKIECFDSVEISGVEDRFNASLGTYHDLLKIIKDKDFLDNEENEDILEDIVLTLTLFEDREMIEERLKTYAHLFDDKVMKQLKRRRYTGWGRLSRKLINGIRDKQSGKTILDFLKSDGFANRNFMQLIHDDSLTFKEDIQKAQVSGQGDSLHEHIANLAGSPAIKKGILQTVKVVDELVKVMGRHKPENIVIEMARENQTTQKGQKNSRERMKRIEEGIKELGSQILKEHPVENTQLQNEKLYLYYLQNGRDMYVDQELDINRLSDYDVDHIVPQSFLKDDSIDNKVLTRSDKARGKSDNVPSEEVVKKMKNYWRQLLNAKLITQRKFDNLTKAERGGLSELDKAGFIKRQLVETRQITKHVAQILDSRMNTKYDENDKLIREVKVITLKSKLVSDFRKDFQFYKVREINNYHHAHDAYLNAVVGTALIKKYPKLESEFVYGDYKVYDVRKMIAKSEQEIGKATAKYFFYSNIMNFFKTEITLANGEIRKRPLIETNGETGEIVWDKGRDFATVRKVLSMPQVNIVKKTEVQTGGFSKESILPKRNSDKLIARKKDWDPKKYGGFDSPTVAYSVLVVAKVEKGKSKKLKSVKELLGITIMERSSFEKNPIDFLEAKGYKEVKKDLIIKLPKYSLFELENGRKRMLASAGELQKGNELALPSKYVNFLYLASHYEKLKGSPEDNEQKQLFVEQHKHYLDEIIEQISEFSKRVILADANLDKVLSAYNKHRDKPIREQAENIIHLFTLTNLGAPAAFKYFDTTIDRKRYTSTKEVLDATLIHQSITGLYETRIDLSQLGGDGGGGGGSGGGGSGGGGSGGGGSGGGGSGGGGSGGIPWLMKKPLQLTTLVPLQEYEERLLKQTMLTGSYKEKLQSLFLKYDALWQHWENQVGHRRIKPHHIATGTVNPRPQKQYPINPKAKASIQTVINDLLKQGVLIQQNSIMNTPVYPVPKPDGKWRMVLDYREVNKTIPLIAAQNQHSAGILSSIFRGKYKTTLDLSNGFWAHSITPESYWLTAFTWLGQQYCWTRLPQGFLNSPALFTADVVDLLKEVPNVQVYVDDIYISHDDPREHLEQLEKVFSLLLNAGYVVSLKKSEIAQHEVEFLGFNITKEGRGLTETFKQKLLNITPPRDLKQLQSILGLLNFARNFIPNFSELVKPLYNIIATANGKYITWTTDNSQQLQNIISMLNSAENLEERNPEVRLIMKVNTSPSAGYIRFYNEFAKRPIMYLNYVYTKAEVKFTNTEKLLTTIHKGLIKALDLGMGQEILVYSPIVSMTKIQKTPLPERKALPIRWITWMSYLEDPRIQFHYDKTLPELQQVPTVTDDIIAKIKHPSEFSMVFYTDGSAIKHPNVNKSHNAGMGIAQVQFKPEFTVINTWSIPLGDHTAQLAEVAAVEFACKKALKIDGPVLIVTDSFYVAESVNKELPYWQSNGFFNNKKKPLKHVSKWKSIADCIQLKPDIIIIHEKGHQPTASTFHTEGNNLADKLATQGSYVVNAGKRTADGSEFEKRTADGSEFESPKKKAKVE

SEQ ID NO: 529 - protein, 2082 aa, synthetic construct
MPAAKRVKLDGGDKKYSIGLDIGTNSVGWAVITDEYKVPSKKFKVLGNTDRHSIKKNLIGALLFDSGETAEATRLKRTARRRYTRRKNRICYLQEIFSNEMAKVDDSFFHRLEESFLVEEDKKHERHPIFGNIVDEVAYHEKYPTIYHLRKKLVDSTDKADLRLIYLALAHMIKFRGHFLIEGDLNPDNSDVDKLFIQLVQTYNQLFEENPINASGVDAKAILSARLSKSRRLENLIAQLPGEKKNGLFGNLIALSLGLTPNFKSNFDLAEDAKLQLSKDTYDDDLDNLLAQIGDQYADLFLAAKNLSDAILLSDILRVNTEITKAPLSASMIKRYDEHHQDLTLLKALVRQQLPEKYKEIFFDQSKNGYAGYIDGGASQEEFYKFIKPILEKMDGTEELLVKLNREDLLRKQRTFDNGSIPHQIHLGELHAILRRQEDFYPFLKDNREKIEKILTFRIPYYVGPLARGNSRFAWMTRKSEETITPWNFEEVVDKGASAQSFIERMTNFDKNLPNEKVLPKHSLLYEYFTVYNELTKVKYVTEGMRKPAFLSGEQKKAIVDLLFKTNRKVTVKQLKEDYFKKIECFDSVEISGVEDRFNASLGTYHDLLKIIKDKDFLDNEENEDILEDIVLTLTLFEDREMIEERLKTYAHLFDDKVMKQLKRRRYTGWGRLSRKLINGIRDKQSGKTILDFLKSDGFANRNFMQLIHDDSLTFKEDIQKAQVSGQGDSLHEHIANLAGSPAIKKGILQTVKVVDELVKVMGRHKPENIVIEMARENQTTQKGQKNSRERMKRIEEGIKELGSQILKEHPVENTQLQNEKLYLYYLQNGRDMYVDQELDINRLSDYDVDHIVPQSFLKDDSIDNKVLTRSDKARGKSDNVPSEEVVKKMKNYWRQLLNAKLITQRKFDNLTKAERGGLSELDKAGFIKRQLVETRQITKHVAQILDSRMNTKYDENDKLIREVKVITLKSKLVSDFRKDFQFYKVREINNYHHAHDAYLNAVVGTALIKKYPKLESEFVYGDYKVYDVRKMIAKSEQEIGKATAKYFFYSNIMNFFKTEITLANGEIRKRPLIETNGETGEIVWDKGRDFATVRKVLSMPQVNIVKKTEVQTGGFSKESILPKRNSDKLIARKKDWDPKKYGGFDSPTVAYSVLVVAKVEKGKSKKLKSVKELLGITIMERSSFEKNPIDFLEAKGYKEVKKDLIIKLPKYSLFELENGRKRMLASAGELQKGNELALPSKYVNFLYLASHYEKLKGSPEDNEQKQLFVEQHKHYLDEIIEQISEFSKRVILADANLDKVLSAYNKHRDKPIREQAENIIHLFTLTNLGAPAAFKYFDTTIDRKRYTSTKEVLDATLIHQSITGLYETRIDLSQLGGDGGGGGGGGGGIPWLMKKPLQLTTLVPLQEYEERLLKQTMLTGSYKEKLQSLFLKYDALWQHWENQVGHRRIKPHHIATGTVNPRPQKQYPINPKAKASIQTVINDLLKQGVLIQQNSIMNTPVYPVPKPDGKWRMVLDYREVNKTIPLIAAQNQHSAGILSSIFRGKYKTTLDLSNGFWAHSITPESYWLTAFTWLGQQYCWTRLPQGFLNSPALFTADVVDLLKEVPNVQVYVDDIYISHDDPREHLEQLEKVFSLLLNAGYVVSLKKSEIAQHEVEFLGFNITKEGRGLTETFKQKLLNITPPRDLKQLQSILGLLNFARNFIPNFSELVKPLYNIIATANGKYITWTTDNSQQLQNIISMLNSAENLEERNPEVRLIMKVNTSPSAGYIRFYNEFAKRPIMYLNYVYTKAEVKFTNTEKLLTTIHKGLIKALDLGMGQEILVYSPIVSMTKIQKTPLPERKALPIRWITWMSYLEDPRIQFHYDKTLPELQQVPTVTDDIIAKIKHPSEFSMVFYTDGSAIKHPNVNKSHNAGMGIAQVQFKPEFTVINTWSIPLGDHTAQLAEVAAVEFACKKALKIDGPVLIVTDSFYVAESVNKELPYWQSNGFFNNKKKPLKHVSKWKSIADCIQLKPDIIIIHEKGHQPTASTFHTEGNNLADKLATQGSYVVNAGKRTADGSEFEKRTADGSEFESPKKKAKVE

SEQ ID NO: 530 - protein, 2087 aa, synthetic construct
MPAAKRVKLDGGDKKYSIGLDIGTNSVGWAVITDEYKVPSKKFKVLGNTDRHSIKKNLIGALLFDSGETAEATRLKRTARRRYTRRKNRICYLQEIFSNEMAKVDDSFFHRLEESFLVEEDKKHERHPIFGNIVDEVAYHEKYPTIYHLRKKLVDSTDKADLRLIYLALAHMIKFRGHFLIEGDLNPDNSDVDKLFIQLVQTYNQLFEENPINASGVDAKAILSARLSKSRRLENLIAQLPGEKKNGLFGNLIALSLGLTPNFKSNFDLAEDAKLQLSKDTYDDDLDNLLAQIGDQYADLFLAAKNLSDAILLSDILRVNTEITKAPLSASMIKRYDEHHQDLTLLKALVRQQLPEKYKEIFFDQSKNGYAGYIDGGASQEEFYKFIKPILEKMDGTEELLVKLNREDLLRKQRTFDNGSIPHQIHLGELHAILRRQEDFYPFLKDNREKIEKILTFRIPYYVGPLARGNSRFAWMTRKSEETITPWNFEEVVDKGASAQSFIERMTNFDKNLPNEKVLPKHSLLYEYFTVYNELTKVKYVTEGMRKPAFLSGEQKKAIVDLLFKTNRKVTVKQLKEDYFKKIECFDSVEISGVEDRFNASLGTYHDLLKIIKDKDFLDNEENEDILEDIVLTLTLFEDREMIEERLKTYAHLFDDKVMKQLKRRRYTGWGRLSRKLINGIRDKQSGKTILDFLKSDGFANRNFMQLIHDDSLTFKEDIQKAQVSGQGDSLHEHIANLAGSPAIKKGILQTVKVVDELVKVMGRHKPENIVIEMARENQTTQKGQKNSRERMKRIEEGIKELGSQILKEHPVENTQLQNEKLYLYYLQNGRDMYVDQELDINRLSDYDVDHIVPQSFLKDDSIDNKVLTRSDKARGKSDNVPSEEVVKKMKNYWRQLLNAKLITQRKFDNLTKAERGGLSELDKAGFIKRQLVETRQITKHVAQILDSRMNTKYDENDKLIREVKVITLKSKLVSDFRKDFQFYKVREINNYHHAHDAYLNAVVGTALIKKYPKLESEFVYGDYKVYDVRKMIAKSEQEIGKATAKYFFYSNIMNFFKTEITLANGEIRKRPLIETNGETGEIVWDKGRDFATVRKVLSMPQVNIVKKTEVQTGGFSKESILPKRNSDKLIARKKDWDPKKYGGFDSPTVAYSVLVVAKVEKGKSKKLKSVKELLGITIMERSSFEKNPIDFLEAKGYKEVKKDLIIKLPKYSLFELENGRKRMLASAGELQKGNELALPSKYVNFLYLASHYEKLKGSPEDNEQKQLFVEQHKHYLDEIIEQISEFSKRVILADANLDKVLSAYNKHRDKPIREQAENIIHLFTLTNLGAPAAFKYFDTTIDRKRYTSTKEVLDATLIHQSITGLYETRIDLSQLGGDGGGSSGGGEAAAKGGIPWLMKKPLQLTTLVPLQEYEERLLKQTMLTGSYKEKLQSLFLKYDALWQHWENQVGHRRIKPHHIATGTVNPRPQKQYPINPKAKASIQTVINDLLKQGVLIQQNSIMNTPVYPVPKPDGKWRMVLDYREVNKTIPLIAAQNQHSAGILSSIFRGKYKTTLDLSNGFWAHSITPESYWLTAFTWLGQQYCWTRLPQGFLNSPALFTADVVDLLKEVPNVQVYVDDIYISHDDPREHLEQLEKVFSLLLNAGYVVSLKKSEIAQHEVEFLGFNITKEGRGLTETFKQKLLNITPPRDLKQLQSILGLLNFARNFIPNFSELVKPLYNIIATANGKYITWTTDNSQQLQNIISMLNSAENLEERNPEVRLIMKVNTSPSAGYIRFYNEFAKRPIMYLNYVYTKAEVKFTNTEKLLTTIHKGLIKALDLGMGQEILVYSPIVSMTKIQKTPLPERKALPIRWITWMSYLEDPRIQFHYDKTLPELQQVPTVTDDIIAKIKHPSEFSMVFYTDGSAIKHPNVNKSHNAGMGIAQVQFKPEFTVINTWSIPLGDHTAQLAEVAAVEFACKKALKIDGPVLIVTDSFYVAESVNKELPYWQSNGFFNNKKKPLKHVSKWKSIADCIQLKPDIIIIHEKGHQPTASTFHTEGNNLADKLATQGSYVVNAGKRTADGSEFEKRTADGSEFESPKKKAKVE

SEQ ID NO: 531 - protein, 2082 aa, synthetic construct
MPAAKRVKLDGGDKKYSIGLDIGTNSVGWAVITDEYKVPSKKFKVLGNTDRHSIKKNLIGALLFDSGETAEATRLKRTARRRYTRRKNRICYLQEIFSNEMAKVDDSFFHRLEESFLVEEDKKHERHPIFGNIVDEVAYHEKYPTIYHLRKKLVDSTDKADLRLIYLALAHMIKFRGHFLIEGDLNPDNSDVDKLFIQLVQTYNQLFEENPINASGVDAKAILSARLSKSRRLENLIAQLPGEKKNGLFGNLIALSLGLTPNFKSNFDLAEDAKLQLSKDTYDDDLDNLLAQIGDQYADLFLAAKNLSDAILLSDILRVNTEITKAPLSASMIKRYDEHHQDLTLLKALVRQQLPEKYKEIFFDQSKNGYAGYIDGGASQEEFYKFIKPILEKMDGTEELLVKLNREDLLRKQRTFDNGSIPHQIHLGELHAILRRQEDFYPFLKDNREKIEKILTFRIPYYVGPLARGNSRFAWMTRKSEETITPWNFEEVVDKGASAQSFIERMTNFDKNLPNEKVLPKHSLLYEYFTVYNELTKVKYVTEGMRKPAFLSGEQKKAIVDLLFKTNRKVTVKQLKEDYFKKIECFDSVEISGVEDRFNASLGTYHDLLKIIKDKDFLDNEENEDILEDIVLTLTLFEDREMIEERLKTYAHLFDDKVMKQLKRRRYTGWGRLSRKLINGIRDKQSGKTILDFLKSDGFANRNFMQLIHDDSLTFKEDIQKAQVSGQGDSLHEHIANLAGSPAIKKGILQTVKVVDELVKVMGRHKPENIVIEMARENQTTQKGQKNSRERMKRIEEGIKELGSQILKEHPVENTQLQNEKLYLYYLQNGRDMYVDQELDINRLSDYDVDHIVPQSFLKDDSIDNKVLTRSDKARGKSDNVPSEEVVKKMKNYWRQLLNAKLITQRKFDNLTKAERGGLSELDKAGFIKRQLVETRQITKHVAQILDSRMNTKYDENDKLIREVKVITLKSKLVSDFRKDFQFYKVREINNYHHAHDAYLNAVVGTALIKKYPKLESEFVYGDYKVYDVRKMIAKSEQEIGKATAKYFFYSNIMNFFKTEITLANGEIRKRPLIETNGETGEIVWDKGRDFATVRKVLSMPQVNIVKKTEVQTGGFSKESILPKRNSDKLIARKKDWDPKKYGGFDSPTVAYSVLVVAKVEKGKSKKLKSVKELLGITIMERSSFEKNPIDFLEAKGYKEVKKDLIIKLPKYSLFELENGRKRMLASAGELQKGNELALPSKYVNFLYLASHYEKLKGSPEDNEQKQLFVEQHKHYLDEIIEQISEFSKRVILADANLDKVLSAYNKHRDKPIREQAENIIHLFTLTNLGAPAAFKYFDTTIDRKRYTSTKEVLDATLIHQSITGLYETRIDLSQLGGDGGGGSGGSGGIPWLMKKPLQLTTLVPLQEYEERLLKQTMLTGSYKEKLQSLFLKYDALWQHWENQVGHRRIKPHHIATGTVNPRPQKQYPINPKAKASIQTVINDLLKQGVLIQQNSIMNTPVYPVPKPDGKWRMVLDYREVNKTIPLIAAQNQHSAGILSSIFRGKYKTTLDLSNGFWAHSITPESYWLTAFTWLGQQYCWTRLPQGFLNSPALFTADVVDLLKEVPNVQVYVDDIYISHDDPREHLEQLEKVFSLLLNAGYVVSLKKSEIAQHEVEFLGFNITKEGRGLTETFKQKLLNITPPRDLKQLQSILGLLNFARNFIPNFSELVKPLYNIIATANGKYITWTTDNSQQLQNIISMLNSAENLEERNPEVRLIMKVNTSPSAGYIRFYNEFAKRPIMYLNYVYTKAEVKFTNTEKLLTTIHKGLIKALDLGMGQEILVYSPIVSMTKIQKTPLPERKALPIRWITWMSYLEDPRIQFHYDKTLPELQQVPTVTDDIIAKIKHPSEFSMVFYTDGSAIKHPNVNKSHNAGMGIAQVQFKPEFTVINTWSIPLGDHTAQLAEVAAVEFACKKALKIDGPVLIVTDSFYVAESVNKELPYWQSNGFFNNKKKPLKHVSKWKSIADCIQLKPDIIIIHEKGHQPTASTFHTEGNNLADKLATQGSYVVNAGKRTADGSEFEKRTADGSEFESPKKKAKVE

SEQ ID NO: 532 - protein, 2085 aa, synthetic construct
MPAAKRVKLDGGDKKYSIGLDIGTNSVGWAVITDEYKVPSKKFKVLGNTDRHSIKKNLIGALLFDSGETAEATRLKRTARRRYTRRKNRICYLQEIFSNEMAKVDDSFFHRLEESFLVEEDKKHERHPIFGNIVDEVAYHEKYPTIYHLRKKLVDSTDKADLRLIYLALAHMIKFRGHFLIEGDLNPDNSDVDKLFIQLVQTYNQLFEENPINASGVDAKAILSARLSKSRRLENLIAQLPGEKKNGLFGNLIALSLGLTPNFKSNFDLAEDAKLQLSKDTYDDDLDNLLAQIGDQYADLFLAAKNLSDAILLSDILRVNTEITKAPLSASMIKRYDEHHQDLTLLKALVRQQLPEKYKEIFFDQSKNGYAGYIDGGASQEEFYKFIKPILEKMDGTEELLVKLNREDLLRKQRTFDNGSIPHQIHLGELHAILRRQEDFYPFLKDNREKIEKILTFRIPYYVGPLARGNSRFAWMTRKSEETITPWNFEEVVDKGASAQSFIERMTNFDKNLPNEKVLPKHSLLYEYFTVYNELTKVKYVTEGMRKPAFLSGEQKKAIVDLLFKTNRKVTVKQLKEDYFKKIECFDSVEISGVEDRFNASLGTYHDLLKIIKDKDFLDNEENEDILEDIVLTLTLFEDREMIEERLKTYAHLFDDKVMKQLKRRRYTGWGRLSRKLINGIRDKQSGKTILDFLKSDGFANRNFMQLIHDDSLTFKEDIQKAQVSGQGDSLHEHIANLAGSPAIKKGILQTVKVVDELVKVMGRHKPENIVIEMARENQTTQKGQKNSRERMKRIEEGIKELGSQILKEHPVENTQLQNEKLYLYYLQNGRDMYVDQELDINRLSDYDVDHIVPQSFLKDDSIDNKVLTRSDKARGKSDNVPSEEVVKKMKNYWRQLLNAKLITQRKFDNLTKAERGGLSELDKAGFIKRQLVETRQITKHVAQILDSRMNTKYDENDKLIREVKVITLKSKLVSDFRKDFQFYKVREINNYHHAHDAYLNAVVGTALIKKYPKLESEFVYGDYKVYDVRKMIAKSEQEIGKATAKYFFYSNIMNFFKTEITLANGEIRKRPLIETNGETGEIVWDKGRDFATVRKVLSMPQVNIVKKTEVQTGGFSKESILPKRNSDKLIARKKDWDPKKYGGFDSPTVAYSVLVVAKVEKGKSKKLKSVKELLGITIMERSSFEKNPIDFLEAKGYKEVKKDLIIKLPKYSLFELENGRKRMLASAGELQKGNELALPSKYVNFLYLASHYEKLKGSPEDNEQKQLFVEQHKHYLDEIIEQISEFSKRVILADANLDKVLSAYNKHRDKPIREQAENIIHLFTLTNLGAPAAFKYFDTTIDRKRYTSTKEVLDATLIHQSITGLYETRIDLSQLGGDGGPAPGGGGGSGGIPWLMKKPLQLTTLVPLQEYEERLLKQTMLTGSYKEKLQSLFLKYDALWQHWENQVGHRRIKPHHIATGTVNPRPQKQYPINPKAKASIQTVINDLLKQGVLIQQNSIMNTPVYPVPKPDGKWRMVLDYREVNKTIPLIAAQNQHSAGILSSIFRGKYKTTLDLSNGFWAHSITPESYWLTAFTWLGQQYCWTRLPQGFLNSPALFTADVVDLLKEVPNVQVYVDDIYISHDDPREHLEQLEKVFSLLLNAGYVVSLKKSEIAQHEVEFLGFNITKEGRGLTETFKQKLLNITPPRDLKQLQSILGLLNFARNFIPNFSELVKPLYNIIATANGKYITWTTDNSQQLQNIISMLNSAENLEERNPEVRLIMKVNTSPSAGYIRFYNEFAKRPIMYLNYVYTKAEVKFTNTEKLLTTIHKGLIKALDLGMGQEILVYSPIVSMTKIQKTPLPERKALPIRWITWMSYLEDPRIQFHYDKTLPELQQVPTVTDDIIAKIKHPSEFSMVFYTDGSAIKHPNVNKSHNAGMGIAQVQFKPEFTVINTWSIPLGDHTAQLAEVAAVEFACKKALKIDGPVLIVTDSFYVAESVNKELPYWQSNGFFNNKKKPLKHVSKWKSIADCIQLKPDIIIIHEKGHQPTASTFHTEGNNLADKLATQGSYVVNAGKRTADGSEFEKRTADGSEFESPKKKAKVE

SEQ ID NO: 533 - protein, 2087 aa, synthetic construct
MPAAKRVKLDGGDKKYSIGLDIGTNSVGWAVITDEYKVPSKKFKVLGNTDRHSIKKNLIGALLFDSGETAEATRLKRTARRRYTRRKNRICYLQEIFSNEMAKVDDSFFHRLEESFLVEEDKKHERHPIFGNIVDEVAYHEKYPTIYHLRKKLVDSTDKADLRLIYLALAHMIKFRGHFLIEGDLNPDNSDVDKLFIQLVQTYNQLFEENPINASGVDAKAILSARLSKSRRLENLIAQLPGEKKNGLFGNLIALSLGLTPNFKSNFDLAEDAKLQLSKDTYDDDLDNLLAQIGDQYADLFLAAKNLSDAILLSDILRVNTEITKAPLSASMIKRYDEHHQDLTLLKALVRQQLPEKYKEIFFDQSKNGYAGYIDGGASQEEFYKFIKPILEKMDGTEELLVKLNREDLLRKQRTFDNGSIPHQIHLGELHAILRRQEDFYPFLKDNREKIEKILTFRIPYYVGPLARGNSRFAWMTRKSEETITPWNFEEVVDKGASAQSFIERMTNFDKNLPNEKVLPKHSLLYEYFTVYNELTKVKYVTEGMRKPAFLSGEQKKAIVDLLFKTNRKVTVKQLKEDYFKKIECFDSVEISGVEDRFNASLGTYHDLLKIIKDKDFLDNEENEDILEDIVLTLTLFEDREMIEERLKTYAHLFDDKVMKQLKRRRYTGWGRLSRKLINGIRDKQSGKTILDFLKSDGFANRNFMQLIHDDSLTFKEDIQKAQVSGQGDSLHEHIANLAGSPAIKKGILQTVKVVDELVKVMGRHKPENIVIEMARENQTTQKGQKNSRERMKRIEEGIKELGSQILKEHPVENTQLQNEKLYLYYLQNGRDMYVDQELDINRLSDYDVDHIVPQSFLKDDSIDNKVLTRSDKARGKSDNVPSEEVVKKMKNYWRQLLNAKLITQRKFDNLTKAERGGLSELDKAGFIKRQLVETRQITKHVAQILDSRMNTKYDENDKLIREVKVITLKSKLVSDFRKDFQFYKVREINNYHHAHDAYLNAVVGTALIKKYPKLESEFVYGDYKVYDVRKMIAKSEQEIGKATAKYFFYSNIMNFFKTEITLANGEIRKRPLIETNGETGEIVWDKGRDFATVRKVLSMPQVNIVKKTEVQTGGFSKESILPKRNSDKLIARKKDWDPKKYGGFDSPTVAYSVLVVAKVEKGKSKKLKSVKELLGITIMERSSFEKNPIDFLEAKGYKEVKKDLIIKLPKYSLFELENGRKRMLASAGELQKGNELALPSKYVNFLYLASHYEKLKGSPEDNEQKQLFVEQHKHYLDEIIEQISEFSKRVILADANLDKVLSAYNKHRDKPIREQAENIIHLFTLTNLGAPAAFKYFDTTIDRKRYTSTKEVLDATLIHQSITGLYETRIDLSQLGGDGGGGSGGGEAAAKGGIPWLMKKPLQLTTLVPLQEYEERLLKQTMLTGSYKEKLQSLFLKYDALWQHWENQVGHRRIKPHHIATGTVNPRPQKQYPINPKAKASIQTVINDLLKQGVLIQQNSIMNTPVYPVPKPDGKWRMVLDYREVNKTIPLIAAQNQHSAGILSSIFRGKYKTTLDLSNGFWAHSITPESYWLTAFTWLGQQYCWTRLPQGFLNSPALFTADVVDLLKEVPNVQVYVDDIYISHDDPREHLEQLEKVFSLLLNAGYVVSLKKSEIAQHEVEFLGFNITKEGRGLTETFKQKLLNITPPRDLKQLQSILGLLNFARNFIPNFSELVKPLYNIIATANGKYITWTTDNSQQLQNIISMLNSAENLEERNPEVRLIMKVNTSPSAGYIRFYNEFAKRPIMYLNYVYTKAEVKFTNTEKLLTTIHKGLIKALDLGMGQEILVYSPIVSMTKIQKTPLPERKALPIRWITWMSYLEDPRIQFHYDKTLPELQQVPTVTDDIIAKIKHPSEFSMVFYTDGSAIKHPNVNKSHNAGMGIAQVQFKPEFTVINTWSIPLGDHTAQLAEVAAVEFACKKALKIDGPVLIVTDSFYVAESVNKELPYWQSNGFFNNKKKPLKHVSKWKSIADCIQLKPDIIIIHEKGHQPTASTFHTEGNNLADKLATQGSYVVNAGKRTADGSEFEKRTADGSEFESPKKKAKVE

SEQ ID NO: 534 - protein, 2079 aa, synthetic construct
MPAAKRVKLDGGDKKYSIGLDIGTNSVGWAVITDEYKVPSKKFKVLGNTDRHSIKKNLIGALLFDSGETAEATRLKRTARRRYTRRKNRICYLQEIFSNEMAKVDDSFFHRLEESFLVEEDKKHERHPIFGNIVDEVAYHEKYPTIYHLRKKLVDSTDKADLRLIYLALAHMIKFRGHFLIEGDLNPDNSDVDKLFIQLVQTYNQLFEENPINASGVDAKAILSARLSKSRRLENLIAQLPGEKKNGLFGNLIALSLGLTPNFKSNFDLAEDAKLQLSKDTYDDDLDNLLAQIGDQYADLFLAAKNLSDAILLSDILRVNTEITKAPLSASMIKRYDEHHQDLTLLKALVRQQLPEKYKEIFFDQSKNGYAGYIDGGASQEEFYKFIKPILEKMDGTEELLVKLNREDLLRKQRTFDNGSIPHQIHLGELHAILRRQEDFYPFLKDNREKIEKILTFRIPYYVGPLARGNSRFAWMTRKSEETITPWNFEEVVDKGASAQSFIERMTNFDKNLPNEKVLPKHSLLYEYFTVYNELTKVKYVTEGMRKPAFLSGEQKKAIVDLLFKTNRKVTVKQLKEDYFKKIECFDSVEISGVEDRFNASLGTYHDLLKIIKDKDFLDNEENEDILEDIVLTLTLFEDREMIEERLKTYAHLFDDKVMKQLKRRRYTGWGRLSRKLINGIRDKQSGKTILDFLKSDGFANRNFMQLIHDDSLTFKEDIQKAQVSGQGDSLHEHIANLAGSPAIKKGILQTVKVVDELVKVMGRHKPENIVIEMARENQTTQKGQKNSRERMKRIEEGIKELGSQILKEHPVENTQLQNEKLYLYYLQNGRDMYVDQELDINRLSDYDVDHIVPQSFLKDDSIDNKVLTRSDKARGKSDNVPSEEVVKKMKNYWRQLLNAKLITQRKFDNLTKAERGGLSELDKAGFIKRQLVETRQITKHVAQILDSRMNTKYDENDKLIREVKVITLKSKLVSDFRKDFQFYKVREINNYHHAHDAYLNAVVGTALIKKYPKLESEFVYGDYKVYDVRKMIAKSEQEIGKATAKYFFYSNIMNFFKTEITLANGEIRKRPLIETNGETGEIVWDKGRDFATVRKVLSMPQVNIVKKTEVQTGGFSKESILPKRNSDKLIARKKDWDPKKYGGFDSPTVAYSVLVVAKVEKGKSKKLKSVKELLGITIMERSSFEKNPIDFLEAKGYKEVKKDLIIKLPKYSLFELENGRKRMLASAGELQKGNELALPSKYVNFLYLASHYEKLKGSPEDNEQKQLFVEQHKHYLDEIIEQISEFSKRVILADANLDKVLSAYNKHRDKPIREQAENIIHLFTLTNLGAPAAFKYFDTTIDRKRYTSTKEVLDATLIHQSITGLYETRIDLSQLGGDGGGSSGGIPWLMKKPLQLTTLVPLQEYEERLLKQTMLTGSYKEKLQSLFLKYDALWQHWENQVGHRRIKPHHIATGTVNPRPQKQYPINPKAKASIQTVINDLLKQGVLIQQNSIMNTPVYPVPKPDGKWRMVLDYREVNKTIPLIAAQNQHSAGILSSIFRGKYKTTLDLSNGFWAHSITPESYWLTAFTWLGQQYCWTRLPQGFLNSPALFNADVVDLLKEVPNVQVYVDDIYISHDDPREHLEQLEKVFSLLLNAGYVVSLKKSEIAQHEVEFLGFNITKEGRGLTETFKQKLLNITPPRDLKQLQSILGLLNFARNFIPNFSELVKPLYNIIATAPGKYITWTTDNSQQLQNIISMLNSAENLEERNPEVRLIMKVNTSPSAGYIRFYNEFAKRPIMYLNYVYTKAEVKFTNTEKLLTTIHKGLIKALDLGMGQEILVYSPIVSMTKIQKTPLPERKALPIRWITWMSYLEDPRIQFHYDKTLPELQQVPTVTDDIIAKIKHPSEFSMVFYTDGSAIKHPNVNKSHNAGMGIAQVQFKPEFTVINTWSIPLGDHTAQLAEVAAVEFACKKALKIDGPVLIVTDSFYVAESVNKELPYWQSNGFFNNKKKPLKHVSKWKSIADCIQLKPDIIIIHEKGHQPTASTFHTEGNNLADKLATQGSYVVNAGKRTADGSEFEKRTADGSEFESPKKKAKVE

SEQ ID NO: 535 - protein, 2082 aa, synthetic construct
MPAAKRVKLDGGDKKYSIGLDIGTNSVGWAVITDEYKVPSKKFKVLGNTDRHSIKKNLIGALLFDSGETAEATRLKRTARRRYTRRKNRICYLQEIFSNEMAKVDDSFFHRLEESFLVEEDKKHERHPIFGNIVDEVAYHEKYPTIYHLRKKLVDSTDKADLRLIYLALAHMIKFRGHFLIEGDLNPDNSDVDKLFIQLVQTYNQLFEENPINASGVDAKAILSARLSKSRRLENLIAQLPGEKKNGLFGNLIALSLGLTPNFKSNFDLAEDAKLQLSKDTYDDDLDNLLAQIGDQYADLFLAAKNLSDAILLSDILRVNTEITKAPLSASMIKRYDEHHQDLTLLKALVRQQLPEKYKEIFFDQSKNGYAGYIDGGASQEEFYKFIKPILEKMDGTEELLVKLNREDLLRKQRTFDNGSIPHQIHLGELHAILRRQEDFYPFLKDNREKIEKILTFRIPYYVGPLARGNSRFAWMTRKSEETITPWNFEEVVDKGASAQSFIERMTNFDKNLPNEKVLPKHSLLYEYFTVYNELTKVKYVTEGMRKPAFLSGEQKKAIVDLLFKTNRKVTVKQLKEDYFKKIECFDSVEISGVEDRFNASLGTYHDLLKIIKDKDFLDNEENEDILEDIVLTLTLFEDREMIEERLKTYAHLFDDKVMKQLKRRRYTGWGRLSRKLINGIRDKQSGKTILDFLKSDGFANRNFMQLIHDDSLTFKEDIQKAQVSGQGDSLHEHIANLAGSPAIKKGILQTVKVVDELVKVMGRHKPENIVIEMARENQTTQKGQKNSRERMKRIEEGIKELGSQILKEHPVENTQLQNEKLYLYYLQNGRDMYVDQELDINRLSDYDVDHIVPQSFLKDDSIDNKVLTRSDKARGKSDNVPSEEVVKKMKNYWRQLLNAKLITQRKFDNLTKAERGGLSELDKAGFIKRQLVETRQITKHVAQILDSRMNTKYDENDKLIREVKVITLKSKLVSDFRKDFQFYKVREINNYHHAHDAYLNAVVGTALIKKYPKLESEFVYGDYKVYDVRKMIAKSEQEIGKATAKYFFYSNIMNFFKTEITLANGEIRKRPLIETNGETGEIVWDKGRDFATVRKVLSMPQVNIVKKTEVQTGGFSKESILPKRNSDKLIARKKDWDPKKYGGFDSPTVAYSVLVVAKVEKGKSKKLKSVKELLGITIMERSSFEKNPIDFLEAKGYKEVKKDLIIKLPKYSLFELENGRKRMLASAGELQKGNELALPSKYVNFLYLASHYEKLKGSPEDNEQKQLFVEQHKHYLDEIIEQISEFSKRVILADANLDKVLSAYNKHRDKPIREQAENIIHLFTLTNLGAPAAFKYFDTTIDRKRYTSTKEVLDATLIHQSITGLYETRIDLSQLGGDGGPAPGSSGGIPWLMKKPLQLTTLVPLQEYEERLLKQTMLTGSYKEKLQSLFLKYDALWQHWENQVGHRRIKPHHIATGTVNPRPQKQYPINPKAKASIQTVINDLLKQGVLIQQNSIMNTPVYPVPKPDGKWRMVLDYREVNKTIPLIAAQNQHSAGILSSIFRGKYKTTLDLSNGFWAHSITPESYWLTAFTWLGQQYCWTRLPQGFLNSPALFNADVVDLLKEVPNVQVYVDDIYISHDDPREHLEQLEKVFSLLLNAGYVVSLKKSEIAQHEVEFLGFNITKEGRGLTETFKQKLLNITPPRDLKQLQSILGLLNFARNFIPNFSELVKPLYNIIATAPGKYITWTTDNSQQLQNIISMLNSAENLEERNPEVRLIMKVNTSPSAGYIRFYNEFAKRPIMYLNYVYTKAEVKFTNTEKLLTTIHKGLIKALDLGMGQEILVYSPIVSMTKIQKTPLPERKALPIRWITWMSYLEDPRIQFHYDKTLPELQQVPTVTDDIIAKIKHPSEFSMVFYTDGSAIKHPNVNKSHNAGMGIAQVQFKPEFTVINTWSIPLGDHTAQLAEVAAVEFACKKALKIDGPVLIVTDSFYVAESVNKELPYWQSNGFFNNKKKPLKHVSKWKSIADCIQLKPDIIIIHEKGHQPTASTFHTEGNNLADKLATQGSYVVNAGKRTADGSEFEKRTADGSEFESPKKKAKVE

SEQ ID NO: 536 - protein, 2087 aa, synthetic construct
MPAAKRVKLDGGDKKYSIGLDIGTNSVGWAVITDEYKVPSKKFKVLGNTDRHSIKKNLIGALLFDSGETAEATRLKRTARRRYTRRKNRICYLQEIFSNEMAKVDDSFFHRLEESFLVEEDKKHERHPIFGNIVDEVAYHEKYPTIYHLRKKLVDSTDKADLRLIYLALAHMIKFRGHFLIEGDLNPDNSDVDKLFIQLVQTYNQLFEENPINASGVDAKAILSARLSKSRRLENLIAQLPGEKKNGLFGNLIALSLGLTPNFKSNFDLAEDAKLQLSKDTYDDDLDNLLAQIGDQYADLFLAAKNLSDAILLSDILRVNTEITKAPLSASMIKRYDEHHQDLTLLKALVRQQLPEKYKEIFFDQSKNGYAGYIDGGASQEEFYKFIKPILEKMDGTEELLVKLNREDLLRKQRTFDNGSIPHQIHLGELHAILRRQEDFYPFLKDNREKIEKILTFRIPYYVGPLARGNSRFAWMTRKSEETITPWNFEEVVDKGASAQSFIERMTNFDKNLPNEKVLPKHSLLYEYFTVYNELTKVKYVTEGMRKPAFLSGEQKKAIVDLLFKTNRKVTVKQLKEDYFKKIECFDSVEISGVEDRFNASLGTYHDLLKIIKDKDFLDNEENEDILEDIVLTLTLFEDREMIEERLKTYAHLFDDKVMKQLKRRRYTGWGRLSRKLINGIRDKQSGKTILDFLKSDGFANRNFMQLIHDDSLTFKEDIQKAQVSGQGDSLHEHIANLAGSPAIKKGILQTVKVVDELVKVMGRHKPENIVIEMARENQTTQKGQKNSRERMKRIEEGIKELGSQILKEHPVENTQLQNEKLYLYYLQNGRDMYVDQELDINRLSDYDVDHIVPQSFLKDDSIDNKVLTRSDKARGKSDNVPSEEVVKKMKNYWRQLLNAKLITQRKFDNLTKAERGGLSELDKAGFIKRQLVETRQITKHVAQILDSRMNTKYDENDKLIREVKVITLKSKLVSDFRKDFQFYKVREINNYHHAHDAYLNAVVGTALIKKYPKLESEFVYGDYKVYDVRKMIAKSEQEIGKATAKYFFYSNIMNFFKTEITLANGEIRKRPLIETNGETGEIVWDKGRDFATVRKVLSMPQVNIVKKTEVQTGGFSKESILPKRNSDKLIARKKDWDPKKYGGFDSPTVAYSVLVVAKVEKGKSKKLKSVKELLGITIMERSSFEKNPIDFLEAKGYKEVKKDLIIKLPKYSLFELENGRKRMLASAGELQKGNELALPSKYVNFLYLASHYEKLKGSPEDNEQKQLFVEQHKHYLDEIIEQISEFSKRVILADANLDKVLSAYNKHRDKPIREQAENIIHLFTLTNLGAPAAFKYFDTTIDRKRYTSTKEVLDATLIHQSITGLYETRIDLSQLGGDGGGSSGGSEAAAKGGIPWLMKKPLQLTTLVPLQEYEERLLKQTMLTGSYKEKLQSLFLKYDALWQHWENQVGHRRIKPHHIATGTVNPRPQKQYPINPKAKASIQTVINDLLKQGVLIQQNSIMNTPVYPVPKPDGKWRMVLDYREVNKTIPLIAAQNQHSAGILSSIFRGKYKTTLDLSNGFWAHSITPESYWLTAFTWLGQQYCWTRLPQGFLNSPALFNADVVDLLKEVPNVQVYVDDIYISHDDPREHLEQLEKVFSLLLNAGYVVSLKKSEIAQHEVEFLGFNITKEGRGLTETFKQKLLNITPPRDLKQLQSILGLLNFARNFIPNFSELVKPLYNIIATAPGKYITWTTDNSQQLQNIISMLNSAENLEERNPEVRLIMKVNTSPSAGYIRFYNEFAKRPIMYLNYVYTKAEVKFTNTEKLLTTIHKGLIKALDLGMGQEILVYSPIVSMTKIQKTPLPERKALPIRWITWMSYLEDPRIQFHYDKTLPELQQVPTVTDDIIAKIKHPSEFSMVFYTDGSAIKHPNVNKSHNAGMGIAQVQFKPEFTVINTWSIPLGDHTAQLAEVAAVEFACKKALKIDGPVLIVTDSFYVAESVNKELPYWQSNGFFNNKKKPLKHVSKWKSIADCIQLKPDIIIIHEKGHQPTASTFHTEGNNLADKLATQGSYVVNAGKRTADGSEFEKRTADGSEFESPKKKAKVE

SEQ ID NO: 537 - protein, 2087 aa, synthetic construct
MPAAKRVKLDGGDKKYSIGLDIGTNSVGWAVITDEYKVPSKKFKVLGNTDRHSIKKNLIGALLFDSGETAEATRLKRTARRRYTRRKNRICYLQEIFSNEMAKVDDSFFHRLEESFLVEEDKKHERHPIFGNIVDEVAYHEKYPTIYHLRKKLVDSTDKADLRLIYLALAHMIKFRGHFLIEGDLNPDNSDVDKLFIQLVQTYNQLFEENPINASGVDAKAILSARLSKSRRLENLIAQLPGEKKNGLFGNLIALSLGLTPNFKSNFDLAEDAKLQLSKDTYDDDLDNLLAQIGDQYADLFLAAKNLSDAILLSDILRVNTEITKAPLSASMIKRYDEHHQDLTLLKALVRQQLPEKYKEIFFDQSKNGYAGYIDGGASQEEFYKFIKPILEKMDGTEELLVKLNREDLLRKQRTFDNGSIPHQIHLGELHAILRRQEDFYPFLKDNREKIEKILTFRIPYYVGPLARGNSRFAWMTRKSEETITPWNFEEVVDKGASAQSFIERMTNFDKNLPNEKVLPKHSLLYEYFTVYNELTKVKYVTEGMRKPAFLSGEQKKAIVDLLFKTNRKVTVKQLKEDYFKKIECFDSVEISGVEDRFNASLGTYHDLLKIIKDKDFLDNEENEDILEDIVLTLTLFEDREMIEERLKTYAHLFDDKVMKQLKRRRYTGWGRLSRKLINGIRDKQSGKTILDFLKSDGFANRNFMQLIHDDSLTFKEDIQKAQVSGQGDSLHEHIANLAGSPAIKKGILQTVKVVDELVKVMGRHKPENIVIEMARENQTTQKGQKNSRERMKRIEEGIKELGSQILKEHPVENTQLQNEKLYLYYLQNGRDMYVDQELDINRLSDYDVDHIVPQSFLKDDSIDNKVLTRSDKARGKSDNVPSEEVVKKMKNYWRQLLNAKLITQRKFDNLTKAERGGLSELDKAGFIKRQLVETRQITKHVAQILDSRMNTKYDENDKLIREVKVITLKSKLVSDFRKDFQFYKVREINNYHHAHDAYLNAVVGTALIKKYPKLESEFVYGDYKVYDVRKMIAKSEQEIGKATAKYFFYSNIMNFFKTEITLANGEIRKRPLIETNGETGEIVWDKGRDFATVRKVLSMPQVNIVKKTEVQTGGFSKESILPKRNSDKLIARKKDWDPKKYGGFDSPTVAYSVLVVAKVEKGKSKKLKSVKELLGITIMERSSFEKNPIDFLEAKGYKEVKKDLIIKLPKYSLFELENGRKRMLASAGELQKGNELALPSKYVNFLYLASHYEKLKGSPEDNEQKQLFVEQHKHYLDEIIEQISEFSKRVILADANLDKVLSAYNKHRDKPIREQAENIIHLFTLTNLGAPAAFKYFDTTIDRKRYTSTKEVLDATLIHQSITGLYETRIDLSQLGGDGGGSSPAPEAAAKGGIPWLMKKPLQLTTLVPLQEYEERLLKQTMLTGSYKEKLQSLFLKYDALWQHWENQVGHRRIKPHHIATGTVNPRPQKQYPINPKAKASIQTVINDLLKQGVLIQQNSIMNTPVYPVPKPDGKWRMVLDYREVNKTIPLIAAQNQHSAGILSSIFRGKYKTTLDLSNGFWAHSITPESYWLTAFTWLGQQYCWTRLPQGFLNSPALFNADVVDLLKEVPNVQVYVDDIYISHDDPREHLEQLEKVFSLLLNAGYVVSLKKSEIAQHEVEFLGFNITKEGRGLTETFKQKLLNITPPRDLKQLQSILGLLNFARNFIPNFSELVKPLYNIIATAPGKYITWTTDNSQQLQNIISMLNSAENLEERNPEVRLIMKVNTSPSAGYIRFYNEFAKRPIMYLNYVYTKAEVKFTNTEKLLTTIHKGLIKALDLGMGQEILVYSPIVSMTKIQKTPLPERKALPIRWITWMSYLEDPRIQFHYDKTLPELQQVPTVTDDIIAKIKHPSEFSMVFYTDGSAIKHPNVNKSHNAGMGIAQVQFKPEFTVINTWSIPLGDHTAQLAEVAAVEFACKKALKIDGPVLIVTDSFYVAESVNKELPYWQSNGFFNNKKKPLKHVSKWKSIADCIQLKPDIIIIHEKGHQPTASTFHTEGNNLADKLATQGSYVVNAGKRTADGSEFEKRTADGSEFESPKKKAKVE

SEQ ID NO: 538 - protein, 2087 aa, synthetic construct
MPAAKRVKLDGGDKKYSIGLDIGTNSVGWAVITDEYKVPSKKFKVLGNTDRHSIKKNLIGALLFDSGETAEATRLKRTARRRYTRRKNRICYLQEIFSNEMAKVDDSFFHRLEESFLVEEDKKHERHPIFGNIVDEVAYHEKYPTIYHLRKKLVDSTDKADLRLIYLALAHMIKFRGHFLIEGDLNPDNSDVDKLFIQLVQTYNQLFEENPINASGVDAKAILSARLSKSRRLENLIAQLPGEKKNGLFGNLIALSLGLTPNFKSNFDLAEDAKLQLSKDTYDDDLDNLLAQIGDQYADLFLAAKNLSDAILLSDILRVNTEITKAPLSASMIKRYDEHHQDLTLLKALVRQQLPEKYKEIFFDQSKNGYAGYIDGGASQEEFYKFIKPILEKMDGTEELLVKLNREDLLRKQRTFDNGSIPHQIHLGELHAILRRQEDFYPFLKDNREKIEKILTFRIPYYVGPLARGNSRFAWMTRKSEETITPWNFEEVVDKGASAQSFIERMTNFDKNLPNEKVLPKHSLLYEYFTVYNELTKVKYVTEGMRKPAFLSGEQKKAIVDLLFKTNRKVTVKQLKEDYFKKIECFDSVEISGVEDRFNASLGTYHDLLKIIKDKDFLDNEENEDILEDIVLTLTLFEDREMIEERLKTYAHLFDDKVMKQLKRRRYTGWGRLSRKLINGIRDKQSGKTILDFLKSDGFANRNFMQLIHDDSLTFKEDIQKAQVSGQGDSLHEHIANLAGSPAIKKGILQTVKVVDELVKVMGRHKPENIVIEMARENQTTQKGQKNSRERMKRIEEGIKELGSQILKEHPVENTQLQNEKLYLYYLQNGRDMYVDQELDINRLSDYDVDHIVPQSFLKDDSIDNKVLTRSDKARGKSDNVPSEEVVKKMKNYWRQLLNAKLITQRKFDNLTKAERGGLSELDKAGFIKRQLVETRQITKHVAQILDSRMNTKYDENDKLIREVKVITLKSKLVSDFRKDFQFYKVREINNYHHAHDAYLNAVVGTALIKKYPKLESEFVYGDYKVYDVRKMIAKSEQEIGKATAKYFFYSNIMNFFKTEITLANGEIRKRPLIETNGETGEIVWDKGRDFATVRKVLSMPQVNIVKKTEVQTGGFSKESILPKRNSDKLIARKKDWDPKKYGGFDSPTVAYSVLVVAKVEKGKSKKLKSVKELLGITIMERSSFEKNPIDFLEAKGYKEVKKDLIIKLPKYSLFELENGRKRMLASAGELQKGNELALPSKYVNFLYLASHYEKLKGSPEDNEQKQLFVEQHKHYLDEIIEQISEFSKRVILADANLDKVLSAYNKHRDKPIREQAENIIHLFTLTNLGAPAAFKYFDTTIDRKRYTSTKEVLDATLIHQSITGLYETRIDLSQLGGDGGPAPEAAAKGGSGGIPWLMKKPLQLTTLVPLQEYEERLLKQTMLTGSYKEKLQSLFLKYDALWQHWENQVGHRRIKPHHIATGTVNPRPQKQYPINPKAKASIQTVINDLLKQGVLIQQNSIMNTPVYPVPKPDGKWRMVLDYREVNKTIPLIAAQNQHSAGILSSIFRGKYKTTLDLSNGFWAHSITPESYWLTAFTWLGQQYCWTRLPQGFLNSPALFNADVVDLLKEVPNVQVYVDDIYISHDDPREHLEQLEKVFSLLLNAGYVVSLKKSEIAQHEVEFLGFNITKEGRGLTETFKQKLLNITPPRDLKQLQSILGLLNFARNFIPNFSELVKPLYNIIATAPGKYITWTTDNSQQLQNIISMLNSAENLEERNPEVRLIMKVNTSPSAGYIRFYNEFAKRPIMYLNYVYTKAEVKFTNTEKLLTTIHKGLIKALDLGMGQEILVYSPIVSMTKIQKTPLPERKALPIRWITWMSYLEDPRIQFHYDKTLPELQQVPTVTDDIIAKIKHPSEFSMVFYTDGSAIKHPNVNKSHNAGMGIAQVQFKPEFTVINTWSIPLGDHTAQLAEVAAVEFACKKALKIDGPVLIVTDSFYVAESVNKELPYWQSNGFFNNKKKPLKHVSKWKSIADCIQLKPDIIIIHEKGHQPTASTFHTEGNNLADKLATQGSYVVNAGKRTADGSEFEKRTADGSEFESPKKKAKVE

SEQ ID NO: 539 - protein, 2096 aa, synthetic construct
MPAAKRVKLDGGDKKYSIGLDIGTNSVGWAVITDEYKVPSKKFKVLGNTDRHSIKKNLIGALLFDSGETAEATRLKRTARRRYTRRKNRICYLQEIFSNEMAKVDDSFFHRLEESFLVEEDKKHERHPIFGNIVDEVAYHEKYPTIYHLRKKLVDSTDKADLRLIYLALAHMIKFRGHFLIEGDLNPDNSDVDKLFIQLVQTYNQLFEENPINASGVDAKAILSARLSKSRRLENLIAQLPGEKKNGLFGNLIALSLGLTPNFKSNFDLAEDAKLQLSKDTYDDDLDNLLAQIGDQYADLFLAAKNLSDAILLSDILRVNTEITKAPLSASMIKRYDEHHQDLTLLKALVRQQLPEKYKEIFFDQSKNGYAGYIDGGASQEEFYKFIKPILEKMDGTEELLVKLNREDLLRKQRTFDNGSIPHQIHLGELHAILRRQEDFYPFLKDNREKIEKILTFRIPYYVGPLARGNSRFAWMTRKSEETITPWNFEEVVDKGASAQSFIERMTNFDKNLPNEKVLPKHSLLYEYFTVYNELTKVKYVTEGMRKPAFLSGEQKKAIVDLLFKTNRKVTVKQLKEDYFKKIECFDSVEISGVEDRFNASLGTYHDLLKIIKDKDFLDNEENEDILEDIVLTLTLFEDREMIEERLKTYAHLFDDKVMKQLKRRRYTGWGRLSRKLINGIRDKQSGKTILDFLKSDGFANRNFMQLIHDDSLTFKEDIQKAQVSGQGDSLHEHIANLAGSPAIKKGILQTVKVVDELVKVMGRHKPENIVIEMARENQTTQKGQKNSRERMKRIEEGIKELGSQILKEHPVENTQLQNEKLYLYYLQNGRDMYVDQELDINRLSDYDVDHIVPQSFLKDDSIDNKVLTRSDKARGKSDNVPSEEVVKKMKNYWRQLLNAKLITQRKFDNLTKAERGGLSELDKAGFIKRQLVETRQITKHVAQILDSRMNTKYDENDKLIREVKVITLKSKLVSDFRKDFQFYKVREINNYHHAHDAYLNAVVGTALIKKYPKLESEFVYGDYKVYDVRKMIAKSEQEIGKATAKYFFYSNIMNFFKTEITLANGEIRKRPLIETNGETGEIVWDKGRDFATVRKVLSMPQVNIVKKTEVQTGGFSKESILPKRNSDKLIARKKDWDPKKYGGFDSPTVAYSVLVVAKVEKGKSKKLKSVKELLGITIMERSSFEKNPIDFLEAKGYKEVKKDLIIKLPKYSLFELENGRKRMLASAGELQKGNELALPSKYVNFLYLASHYEKLKGSPEDNEQKQLFVEQHKHYLDEIIEQISEFSKRVILADANLDKVLSAYNKHRDKPIREQAENIIHLFTLTNLGAPAAFKYFDTTIDRKRYTSTKEVLDATLIHQSITGLYETRIDLSQLGGDGGEAAAKEAAAKEAAAKEAAAKGGIPWLMKKPLQLTTLVPLQEYEERLLKQTMLTGSYKEKLQSLFLKYDALWQHWENQVGHRRIKPHHIATGTVNPRPQKQYPINPKAKASIQTVINDLLKQGVLIQQNSIMNTPVYPVPKPDGKWRMVLDYREVNKTIPLIAAQNQHSAGILSSIFRGKYKTTLDLSNGFWAHSITPESYWLTAFTWLGQQYCWTRLPQGFLNSPALFNADVVDLLKEVPNVQVYVDDIYISHDDPREHLEQLEKVFSLLLNAGYVVSLKKSEIAQHEVEFLGFNITKEGRGLTETFKQKLLNITPPRDLKQLQSILGLLNFARNFIPNFSELVKPLYNIIATAPGKYITWTTDNSQQLQNIISMLNSAENLEERNPEVRLIMKVNTSPSAGYIRFYNEFAKRPIMYLNYVYTKAEVKFTNTEKLLTTIHKGLIKALDLGMGQEILVYSPIVSMTKIQKTPLPERKALPIRWITWMSYLEDPRIQFHYDKTLPELQQVPTVTDDIIAKIKHPSEFSMVFYTDGSAIKHPNVNKSHNAGMGIAQVQFKPEFTVINTWSIPLGDHTAQLAEVAAVEFACKKALKIDGPVLIVTDSFYVAESVNKELPYWQSNGFFNNKKKPLKHVSKWKSIADCIQLKPDIIIIHEKGHQPTASTFHTEGNNLADKLATQGSYVVNAGKRTADGSEFEKRTADGSEFESPKKKAKVE

SEQ ID NO: 540 - protein, 2085 aa, synthetic construct
MPAAKRVKLDGGDKKYSIGLDIGTNSVGWAVITDEYKVPSKKFKVLGNTDRHSIKKNLIGALLFDSGETAEATRLKRTARRRYTRRKNRICYLQEIFSNEMAKVDDSFFHRLEESFLVEEDKKHERHPIFGNIVDEVAYHEKYPTIYHLRKKLVDSTDKADLRLIYLALAHMIKFRGHFLIEGDLNPDNSDVDKLFIQLVQTYNQLFEENPINASGVDAKAILSARLSKSRRLENLIAQLPGEKKNGLFGNLIALSLGLTPNFKSNFDLAEDAKLQLSKDTYDDDLDNLLAQIGDQYADLFLAAKNLSDAILLSDILRVNTEITKAPLSASMIKRYDEHHQDLTLLKALVRQQLPEKYKEIFFDQSKNGYAGYIDGGASQEEFYKFIKPILEKMDGTEELLVKLNREDLLRKQRTFDNGSIPHQIHLGELHAILRRQEDFYPFLKDNREKIEKILTFRIPYYVGPLARGNSRFAWMTRKSEETITPWNFEEVVDKGASAQSFIERMTNFDKNLPNEKVLPKHSLLYEYFTVYNELTKVKYVTEGMRKPAFLSGEQKKAIVDLLFKTNRKVTVKQLKEDYFKKIECFDSVEISGVEDRFNASLGTYHDLLKIIKDKDFLDNEENEDILEDIVLTLTLFEDREMIEERLKTYAHLFDDKVMKQLKRRRYTGWGRLSRKLINGIRDKQSGKTILDFLKSDGFANRNFMQLIHDDSLTFKEDIQKAQVSGQGDSLHEHIANLAGSPAIKKGILQTVKVVDELVKVMGRHKPENIVIEMARENQTTQKGQKNSRERMKRIEEGIKELGSQILKEHPVENTQLQNEKLYLYYLQNGRDMYVDQELDINRLSDYDVDHIVPQSFLKDDSIDNKVLTRSDKARGKSDNVPSEEVVKKMKNYWRQLLNAKLITQRKFDNLTKAERGGLSELDKAGFIKRQLVETRQITKHVAQILDSRMNTKYDENDKLIREVKVITLKSKLVSDFRKDFQFYKVREINNYHHAHDAYLNAVVGTALIKKYPKLESEFVYGDYKVYDVRKMIAKSEQEIGKATAKYFFYSNIMNFFKTEITLANGEIRKRPLIETNGETGEIVWDKGRDFATVRKVLSMPQVNIVKKTEVQTGGFSKESILPKRNSDKLIARKKDWDPKKYGGFDSPTVAYSVLVVAKVEKGKSKKLKSVKELLGITIMERSSFEKNPIDFLEAKGYKEVKKDLIIKLPKYSLFELENGRKRMLASAGELQKGNELALPSKYVNFLYLASHYEKLKGSPEDNEQKQLFVEQHKHYLDEIIEQISEFSKRVILADANLDKVLSAYNKHRDKPIREQAENIIHLFTLTNLGAPAAFKYFDTTIDRKRYTSTKEVLDATLIHQSITGLYETRIDLSQLGGDGGGGSPAPGSSGGIPWLMKKPLQLTTLVPLQEYEERLLKQTMLTGSYKEKLQSLFLKYDALWQHWENQVGHRRIKPHHIATGTVNPRPQKQYPINPKAKASIQTVINDLLKQGVLIQQNSIMNTPVYPVPKPDGKWRMVLDYREVNKTIPLIAAQNQHSAGILSSIFRGKYKTTLDLSNGFWAHSITPESYWLTAFTWLGQQYCWTRLPQGFLNSPALFNADVVDLLKEVPNVQVYVDDIYISHDDPREHLEQLEKVFSLLLNAGYVVSLKKSEIAQHEVEFLGFNITKEGRGLTETFKQKLLNITPPRDLKQLQSILGLLNFARNFIPNFSELVKPLYNIIATAPGKYITWTTDNSQQLQNIISMLNSAENLEERNPEVRLIMKVNTSPSAGYIRFYNEFAKRPIMYLNYVYTKAEVKFTNTEKLLTTIHKGLIKALDLGMGQEILVYSPIVSMTKIQKTPLPERKALPIRWITWMSYLEDPRIQFHYDKTLPELQQVPTVTDDIIAKIKHPSEFSMVFYTDGSAIKHPNVNKSHNAGMGIAQVQFKPEFTVINTWSIPLGDHTAQLAEVAAVEFACKKALKIDGPVLIVTDSFYVAESVNKELPYWQSNGFFNNKKKPLKHVSKWKSIADCIQLKPDIIIIHEKGHQPTASTFHTEGNNLADKLATQGSYVVNAGKRTADGSEFEKRTADGSEFESPKKKAKVE

SEQ ID NO: 541 - protein, 2091 aa, synthetic construct
MPAAKRVKLDGGDKKYSIGLDIGTNSVGWAVITDEYKVPSKKFKVLGNTDRHSIKKNLIGALLFDSGETAEATRLKRTARRRYTRRKNRICYLQEIFSNEMAKVDDSFFHRLEESFLVEEDKKHERHPIFGNIVDEVAYHEKYPTIYHLRKKLVDSTDKADLRLIYLALAHMIKFRGHFLIEGDLNPDNSDVDKLFIQLVQTYNQLFEENPINASGVDAKAILSARLSKSRRLENLIAQLPGEKKNGLFGNLIALSLGLTPNFKSNFDLAEDAKLQLSKDTYDDDLDNLLAQIGDQYADLFLAAKNLSDAILLSDILRVNTEITKAPLSASMIKRYDEHHQDLTLLKALVRQQLPEKYKEIFFDQSKNGYAGYIDGGASQEEFYKFIKPILEKMDGTEELLVKLNREDLLRKQRTFDNGSIPHQIHLGELHAILRRQEDFYPFLKDNREKIEKILTFRIPYYVGPLARGNSRFAWMTRKSEETITPWNFEEVVDKGASAQSFIERMTNFDKNLPNEKVLPKHSLLYEYFTVYNELTKVKYVTEGMRKPAFLSGEQKKAIVDLLFKTNRKVTVKQLKEDYFKKIECFDSVEISGVEDRFNASLGTYHDLLKIIKDKDFLDNEENEDILEDIVLTLTLFEDREMIEERLKTYAHLFDDKVMKQLKRRRYTGWGRLSRKLINGIRDKQSGKTILDFLKSDGFANRNFMQLIHDDSLTFKEDIQKAQVSGQGDSLHEHIANLAGSPAIKKGILQTVKVVDELVKVMGRHKPENIVIEMARENQTTQKGQKNSRERMKRIEEGIKELGSQILKEHPVENTQLQNEKLYLYYLQNGRDMYVDQELDINRLSDYDVDHIVPQSFLKDDSIDNKVLTRSDKARGKSDNVPSEEVVKKMKNYWRQLLNAKLITQRKFDNLTKAERGGLSELDKAGFIKRQLVETRQITKHVAQILDSRMNTKYDENDKLIREVKVITLKSKLVSDFRKDFQFYKVREINNYHHAHDAYLNAVVGTALIKKYPKLESEFVYGDYKVYDVRKMIAKSEQEIGKATAKYFFYSNIMNFFKTEITLANGEIRKRPLIETNGETGEIVWDKGRDFATVRKVLSMPQVNIVKKTEVQTGGFSKESILPKRNSDKLIARKKDWDPKKYGGFDSPTVAYSVLVVAKVEKGKSKKLKSVKELLGITIMERSSFEKNPIDFLEAKGYKEVKKDLIIKLPKYSLFELENGRKRMLASAGELQKGNELALPSKYVNFLYLASHYEKLKGSPEDNEQKQLFVEQHKHYLDEIIEQISEFSKRVILADANLDKVLSAYNKHRDKPIREQAENIIHLFTLTNLGAPAAFKYFDTTIDRKRYTSTKEVLDATLIHQSITGLYETRIDLSQLGGDGGEAAAKGGGGSEAAAKGGIPWLMKKPLQLTTLVPLQEYEERLLKQTMLTGSYKEKLQSLFLKYDALWQHWENQVGHRRIKPHHIATGTVNPRPQKQYPINPKAKASIQTVINDLLKQGVLIQQNSIMNTPVYPVPKPDGKWRMVLDYREVNKTIPLIAAQNQHSAGILSSIFRGKYKTTLDLSNGFWAHSITPESYWLTAFTWLGQQYCWTRLPQGFLNSPALFNADVVDLLKEVPNVQVYVDDIYISHDDPREHLEQLEKVFSLLLNAGYVVSLKKSEIAQHEVEFLGFNITKEGRGLTETFKQKLLNITPPRDLKQLQSILGLLNFARNFIPNFSELVKPLYNIIATAPGKYITWTTDNSQQLQNIISMLNSAENLEERNPEVRLIMKVNTSPSAGYIRFYNEFAKRPIMYLNYVYTKAEVKFTNTEKLLTTIHKGLIKALDLGMGQEILVYSPIVSMTKIQKTPLPERKALPIRWITWMSYLEDPRIQFHYDKTLPELQQVPTVTDDIIAKIKHPSEFSMVFYTDGSAIKHPNVNKSHNAGMGIAQVQFKPEFTVINTWSIPLGDHTAQLAEVAAVEFACKKALKIDGPVLIVTDSFYVAESVNKELPYWQSNGFFNNKKKPLKHVSKWKSIADCIQLKPDIIIIHEKGHQPTASTFHTEGNNLADKLATQGSYVVNAGKRTADGSEFEKRTADGSEFESPKKKAKVE

SEQ ID NO: 542 - protein, 2085 aa, synthetic construct
MPAAKRVKLDGGDKKYSIGLDIGTNSVGWAVITDEYKVPSKKFKVLGNTDRHSIKKNLIGALLFDSGETAEATRLKRTARRRYTRRKNRICYLQEIFSNEMAKVDDSFFHRLEESFLVEEDKKHERHPIFGNIVDEVAYHEKYPTIYHLRKKLVDSTDKADLRLIYLALAHMIKFRGHFLIEGDLNPDNSDVDKLFIQLVQTYNQLFEENPINASGVDAKAILSARLSKSRRLENLIAQLPGEKKNGLFGNLIALSLGLTPNFKSNFDLAEDAKLQLSKDTYDDDLDNLLAQIGDQYADLFLAAKNLSDAILLSDILRVNTEITKAPLSASMIKRYDEHHQDLTLLKALVRQQLPEKYKEIFFDQSKNGYAGYIDGGASQEEFYKFIKPILEKMDGTEELLVKLNREDLLRKQRTFDNGSIPHQIHLGELHAILRRQEDFYPFLKDNREKIEKILTFRIPYYVGPLARGNSRFAWMTRKSEETITPWNFEEVVDKGASAQSFIERMTNFDKNLPNEKVLPKHSLLYEYFTVYNELTKVKYVTEGMRKPAFLSGEQKKAIVDLLFKTNRKVTVKQLKEDYFKKIECFDSVEISGVEDRFNASLGTYHDLLKIIKDKDFLDNEENEDILEDIVLTLTLFEDREMIEERLKTYAHLFDDKVMKQLKRRRYTGWGRLSRKLINGIRDKQSGKTILDFLKSDGFANRNFMQLIHDDSLTFKEDIQKAQVSGQGDSLHEHIANLAGSPAIKKGILQTVKVVDELVKVMGRHKPENIVIEMARENQTTQKGQKNSRERMKRIEEGIKELGSQILKEHPVENTQLQNEKLYLYYLQNGRDMYVDQELDINRLSDYDVDHIVPQSFLKDDSIDNKVLTRSDKARGKSDNVPSEEVVKKMKNYWRQLLNAKLITQRKFDNLTKAERGGLSELDKAGFIKRQLVETRQITKHVAQILDSRMNTKYDENDKLIREVKVITLKSKLVSDFRKDFQFYKVREINNYHHAHDAYLNAVVGTALIKKYPKLESEFVYGDYKVYDVRKMIAKSEQEIGKATAKYFFYSNIMNFFKTEITLANGEIRKRPLIETNGETGEIVWDKGRDFATVRKVLSMPQVNIVKKTEVQTGGFSKESILPKRNSDKLIARKKDWDPKKYGGFDSPTVAYSVLVVAKVEKGKSKKLKSVKELLGITIMERSSFEKNPIDFLEAKGYKEVKKDLIIKLPKYSLFELENGRKRMLASAGELQKGNELALPSKYVNFLYLASHYEKLKGSPEDNEQKQLFVEQHKHYLDEIIEQISEFSKRVILADANLDKVLSAYNKHRDKPIREQAENIIHLFTLTNLGAPAAFKYFDTTIDRKRYTSTKEVLDATLIHQSITGLYETRIDLSQLGGDGGPAPGGGGGSGGIPWLMKKPLQLTTLVPLQEYEERLLKQTMLTGSYKEKLQSLFLKYDALWQHWENQVGHRRIKPHHIATGTVNPRPQKQYPINPKAKASIQTVINDLLKQGVLIQQNSIMNTPVYPVPKPDGKWRMVLDYREVNKTIPLIAAQNQHSAGILSSIFRGKYKTTLDLSNGFWAHSITPESYWLTAFTWLGQQYCWTRLPQGFLNSPALFNADVVDLLKEVPNVQVYVDDIYISHDDPREHLEQLEKVFSLLLNAGYVVSLKKSEIAQHEVEFLGFNITKEGRGLTETFKQKLLNITPPRDLKQLQSILGLLNFARNFIPNFSELVKPLYNIIATAPGKYITWTTDNSQQLQNIISMLNSAENLEERNPEVRLIMKVNTSPSAGYIRFYNEFAKRPIMYLNYVYTKAEVKFTNTEKLLTTIHKGLIKALDLGMGQEILVYSPIVSMTKIQKTPLPERKALPIRWITWMSYLEDPRIQFHYDKTLPELQQVPTVTDDIIAKIKHPSEFSMVFYTDGSAIKHPNVNKSHNAGMGIAQVQFKPEFTVINTWSIPLGDHTAQLAEVAAVEFACKKALKIDGPVLIVTDSFYVAESVNKELPYWQSNGFFNNKKKPLKHVSKWKSIADCIQLKPDIIIIHEKGHQPTASTFHTEGNNLADKLATQGSYVVNAGKRTADGSEFEKRTADGSEFESPKKKAKVE

SEQ ID NO: 543 - protein, 2087 aa, synthetic construct
MPAAKRVKLDGGDKKYSIGLDIGTNSVGWAVITDEYKVPSKKFKVLGNTDRHSIKKNLIGALLFDSGETAEATRLKRTARRRYTRRKNRICYLQEIFSNEMAKVDDSFFHRLEESFLVEEDKKHERHPIFGNIVDEVAYHEKYPTIYHLRKKLVDSTDKADLRLIYLALAHMIKFRGHFLIEGDLNPDNSDVDKLFIQLVQTYNQLFEENPINASGVDAKAILSARLSKSRRLENLIAQLPGEKKNGLFGNLIALSLGLTPNFKSNFDLAEDAKLQLSKDTYDDDLDNLLAQIGDQYADLFLAAKNLSDAILLSDILRVNTEITKAPLSASMIKRYDEHHQDLTLLKALVRQQLPEKYKEIFFDQSKNGYAGYIDGGASQEEFYKFIKPILEKMDGTEELLVKLNREDLLRKQRTFDNGSIPHQIHLGELHAILRRQEDFYPFLKDNREKIEKILTFRIPYYVGPLARGNSRFAWMTRKSEETITPWNFEEVVDKGASAQSFIERMTNFDKNLPNEKVLPKHSLLYEYFTVYNELTKVKYVTEGMRKPAFLSGEQKKAIVDLLFKTNRKVTVKQLKEDYFKKIECFDSVEISGVEDRFNASLGTYHDLLKIIKDKDFLDNEENEDILEDIVLTLTLFEDREMIEERLKTYAHLFDDKVMKQLKRRRYTGWGRLSRKLINGIRDKQSGKTILDFLKSDGFANRNFMQLIHDDSLTFKEDIQKAQVSGQGDSLHEHIANLAGSPAIKKGILQTVKVVDELVKVMGRHKPENIVIEMARENQTTQKGQKNSRERMKRIEEGIKELGSQILKEHPVENTQLQNEKLYLYYLQNGRDMYVDQELDINRLSDYDVDHIVPQSFLKDDSIDNKVLTRSDKARGKSDNVPSEEVVKKMKNYWRQLLNAKLITQRKFDNLTKAERGGLSELDKAGFIKRQLVETRQITKHVAQILDSRMNTKYDENDKLIREVKVITLKSKLVSDFRKDFQFYKVREINNYHHAHDAYLNAVVGTALIKKYPKLESEFVYGDYKVYDVRKMIAKSEQEIGKATAKYFFYSNIMNFFKTEITLANGEIRKRPLIETNGETGEIVWDKGRDFATVRKVLSMPQVNIVKKTEVQTGGFSKESILPKRNSDKLIARKKDWDPKKYGGFDSPTVAYSVLVVAKVEKGKSKKLKSVKELLGITIMERSSFEKNPIDFLEAKGYKEVKKDLIIKLPKYSLFELENGRKRMLASAGELQKGNELALPSKYVNFLYLASHYEKLKGSPEDNEQKQLFVEQHKHYLDEIIEQISEFSKRVILADANLDKVLSAYNKHRDKPIREQAENIIHLFTLTNLGAPAAFKYFDTTIDRKRYTSTKEVLDATLIHQSITGLYETRIDLSQLGGDGGGGSEAAAKGGGGGIPWLMKKPLQLTTLVPLQEYEERLLKQTMLTGSYKEKLQSLFLKYDALWQHWENQVGHRRIKPHHIATGTVNPRPQKQYPINPKAKASIQTVINDLLKQGVLIQQNSIMNTPVYPVPKPDGKWRMVLDYREVNKTIPLIAAQNQHSAGILSSIFRGKYKTTLDLSNGFWAHSITPESYWLTAFTWLGQQYCWTRLPQGFLNSPALFNADVVDLLKEVPNVQVYVDDIYISHDDPREHLEQLEKVFSLLLNAGYVVSLKKSEIAQHEVEFLGFNITKEGRGLTETFKQKLLNITPPRDLKQLQSILGLLNFARNFIPNFSELVKPLYNIIATAPGKYITWTTDNSQQLQNIISMLNSAENLEERNPEVRLIMKVNTSPSAGYIRFYNEFAKRPIMYLNYVYTKAEVKFTNTEKLLTTIHKGLIKALDLGMGQEILVYSPIVSMTKIQKTPLPERKALPIRWITWMSYLEDPRIQFHYDKTLPELQQVPTVTDDIIAKIKHPSEFSMVFYTDGSAIKHPNVNKSHNAGMGIAQVQFKPEFTVINTWSIPLGDHTAQLAEVAAVEFACKKALKIDGPVLIVTDSFYVAESVNKELPYWQSNGFFNNKKKPLKHVSKWKSIADCIQLKPDIIIIHEKGHQPTASTFHTEGNNLADKLATQGSYVVNAGKRTADGSEFEKRTADGSEFESPKKKAKVE

SEQ ID NO: 544 - protein, 2082 aa, synthetic construct
MPAAKRVKLDGGDKKYSIGLDIGTNSVGWAVITDEYKVPSKKFKVLGNTDRHSIKKNLIGALLFDSGETAEATRLKRTARRRYTRRKNRICYLQEIFSNEMAKVDDSFFHRLEESFLVEEDKKHERHPIFGNIVDEVAYHEKYPTIYHLRKKLVDSTDKADLRLIYLALAHMIKFRGHFLIEGDLNPDNSDVDKLFIQLVQTYNQLFEENPINASGVDAKAILSARLSKSRRLENLIAQLPGEKKNGLFGNLIALSLGLTPNFKSNFDLAEDAKLQLSKDTYDDDLDNLLAQIGDQYADLFLAAKNLSDAILLSDILRVNTEITKAPLSASMIKRYDEHHQDLTLLKALVRQQLPEKYKEIFFDQSKNGYAGYIDGGASQEEFYKFIKPILEKMDGTEELLVKLNREDLLRKQRTFDNGSIPHQIHLGELHAILRRQEDFYPFLKDNREKIEKILTFRIPYYVGPLARGNSRFAWMTRKSEETITPWNFEEVVDKGASAQSFIERMTNFDKNLPNEKVLPKHSLLYEYFTVYNELTKVKYVTEGMRKPAFLSGEQKKAIVDLLFKTNRKVTVKQLKEDYFKKIECFDSVEISGVEDRFNASLGTYHDLLKIIKDKDFLDNEENEDILEDIVLTLTLFEDREMIEERLKTYAHLFDDKVMKQLKRRRYTGWGRLSRKLINGIRDKQSGKTILDFLKSDGFANRNFMQLIHDDSLTFKEDIQKAQVSGQGDSLHEHIANLAGSPAIKKGILQTVKVVDELVKVMGRHKPENIVIEMARENQTTQKGQKNSRERMKRIEEGIKELGSQILKEHPVENTQLQNEKLYLYYLQNGRDMYVDQELDINRLSDYDVDHIVPQSFLKDDSIDNKVLTRSDKARGKSDNVPSEEVVKKMKNYWRQLLNAKLITQRKFDNLTKAERGGLSELDKAGFIKRQLVETRQITKHVAQILDSRMNTKYDENDKLIREVKVITLKSKLVSDFRKDFQFYKVREINNYHHAHDAYLNAVVGTALIKKYPKLESEFVYGDYKVYDVRKMIAKSEQEIGKATAKYFFYSNIMNFFKTEITLANGEIRKRPLIETNGETGEIVWDKGRDFATVRKVLSMPQVNIVKKTEVQTGGFSKESILPKRNSDKLIARKKDWDPKKYGGFDSPTVAYSVLVVAKVEKGKSKKLKSVKELLGITIMERSSFEKNPIDFLEAKGYKEVKKDLIIKLPKYSLFELENGRKRMLASAGELQKGNELALPSKYVNFLYLASHYEKLKGSPEDNEQKQLFVEQHKHYLDEIIEQISEFSKRVILADANLDKVLSAYNKHRDKPIREQAENIIHLFTLTNLGAPAAFKYFDTTIDRKRYTSTKEVLDATLIHQSITGLYETRIDLSQLGGDGGGSSGGGGGIPWLMKKPLQLTTLVPLQEYEERLLKQTMLTGSYKEKLQSLFLKYDALWQHWENQVGHRRIKPHHIATGTVNPRPQKQYPINPKAKASIQTVINDLLKQGVLIQQNSIMNTPVYPVPKPDGKWRMVLDYREVNKTIPLIAAQNQHSAGILSSIFRGKYKTTLDLSNGFWAHSITPESYWLTAFTWLGQQYCWTRLPQGFLNSPALFNADVVDLLKEVPNVQVYVDDIYISHDDPREHLEQLEKVFSLLLNAGYVVSLKKSEIAQHEVEFLGFNITKEGRGLTETFKQKLLNITPPRDLKQLQSILGLLNFARNFIPNFSELVKPLYNIIATAPGKYITWTTDNSQQLQNIISMLNSAENLEERNPEVRLIMKVNTSPSAGYIRFYNEFAKRPIMYLNYVYTKAEVKFTNTEKLLTTIHKGLIKALDLGMGQEILVYSPIVSMTKIQKTPLPERKALPIRWITWMSYLEDPRIQFHYDKTLPELQQVPTVTDDIIAKIKHPSEFSMVFYTDGSAIKHPNVNKSHNAGMGIAQVQFKPEFTVINTWSIPLGDHTAQLAEVAAVEFACKKALKIDGPVLIVTDSFYVAESVNKELPYWQSNGFFNNKKKPLKHVSKWKSIADCIQLKPDIIIIHEKGHQPTASTFHTEGNNLADKLATQGSYVVNAGKRTADGSEFEKRTADGSEFESPKKKAKVE

SEQ ID NO: 545 - protein, 2085 aa, synthetic construct
MPAAKRVKLDGGDKKYSIGLDIGTNSVGWAVITDEYKVPSKKFKVLGNTDRHSIKKNLIGALLFDSGETAEATRLKRTARRRYTRRKNRICYLQEIFSNEMAKVDDSFFHRLEESFLVEEDKKHERHPIFGNIVDEVAYHEKYPTIYHLRKKLVDSTDKADLRLIYLALAHMIKFRGHFLIEGDLNPDNSDVDKLFIQLVQTYNQLFEENPINASGVDAKAILSARLSKSRRLENLIAQLPGEKKNGLFGNLIALSLGLTPNFKSNFDLAEDAKLQLSKDTYDDDLDNLLAQIGDQYADLFLAAKNLSDAILLSDILRVNTEITKAPLSASMIKRYDEHHQDLTLLKALVRQQLPEKYKEIFFDQSKNGYAGYIDGGASQEEFYKFIKPILEKMDGTEELLVKLNREDLLRKQRTFDNGSIPHQIHLGELHAILRRQEDFYPFLKDNREKIEKILTFRIPYYVGPLARGNSRFAWMTRKSEETITPWNFEEVVDKGASAQSFIERMTNFDKNLPNEKVLPKHSLLYEYFTVYNELTKVKYVTEGMRKPAFLSGEQKKAIVDLLFKTNRKVTVKQLKEDYFKKIECFDSVEISGVEDRFNASLGTYHDLLKIIKDKDFLDNEENEDILEDIVLTLTLFEDREMIEERLKTYAHLFDDKVMKQLKRRRYTGWGRLSRKLINGIRDKQSGKTILDFLKSDGFANRNFMQLIHDDSLTFKEDIQKAQVSGQGDSLHEHIANLAGSPAIKKGILQTVKVVDELVKVMGRHKPENIVIEMARENQTTQKGQKNSRERMKRIEEGIKELGSQILKEHPVENTQLQNEKLYLYYLQNGRDMYVDQELDINRLSDYDVDHIVPQSFLKDDSIDNKVLTRSDKARGKSDNVPSEEVVKKMKNYWRQLLNAKLITQRKFDNLTKAERGGLSELDKAGFIKRQLVETRQITKHVAQILDSRMNTKYDENDKLIREVKVITLKSKLVSDFRKDFQFYKVREINNYHHAHDAYLNAVVGTALIKKYPKLESEFVYGDYKVYDVRKMIAKSEQEIGKATAKYFFYSNIMNFFKTEITLANGEIRKRPLIETNGETGEIVWDKGRDFATVRKVLSMPQVNIVKKTEVQTGGFSKESILPKRNSDKLIARKKDWDPKKYGGFDSPTVAYSVLVVAKVEKGKSKKLKSVKELLGITIMERSSFEKNPIDFLEAKGYKEVKKDLIIKLPKYSLFELENGRKRMLASAGELQKGNELALPSKYVNFLYLASHYEKLKGSPEDNEQKQLFVEQHKHYLDEIIEQISEFSKRVILADANLDKVLSAYNKHRDKPIREQAENIIHLFTLTNLGAPAAFKYFDTTIDRKRYTSTKEVLDATLIHQSITGLYETRIDLSQLGGDGGGSSGGSPAPGGIPWLMKKPLQLTTLVPLQEYEERLLKQTMLTGSYKEKLQSLFLKYDALWQHWENQVGHRRIKPHHIATGTVNPRPQKQYPINPKAKASIQTVINDLLKQGVLIQQNSIMNTPVYPVPKPDGKWRMVLDYREVNKTIPLIAAQNQHSAGILSSIFRGKYKTTLDLSNGFWAHSITPESYWLTAFTWLGQQYCWTRLPQGFLNSPALFNADVVDLLKEVPNVQVYVDDIYISHDDPREHLEQLEKVFSLLLNAGYVVSLKKSEIAQHEVEFLGFNITKEGRGLTETFKQKLLNITPPRDLKQLQSILGLLNFARNFIPNFSELVKPLYNIIATAPGKYITWTTDNSQQLQNIISMLNSAENLEERNPEVRLIMKVNTSPSAGYIRFYNEFAKRPIMYLNYVYTKAEVKFTNTEKLLTTIHKGLIKALDLGMGQEILVYSPIVSMTKIQKTPLPERKALPIRWITWMSYLEDPRIQFHYDKTLPELQQVPTVTDDIIAKIKHPSEFSMVFYTDGSAIKHPNVNKSHNAGMGIAQVQFKPEFTVINTWSIPLGDHTAQLAEVAAVEFACKKALKIDGPVLIVTDSFYVAESVNKELPYWQSNGFFNNKKKPLKHVSKWKSIADCIQLKPDIIIIHEKGHQPTASTFHTEGNNLADKLATQGSYVVNAGKRTADGSEFEKRTADGSEFESPKKKAKVE

SEQ ID NO: 546 - protein, 2085 aa, synthetic construct
MPAAKRVKLDGGDKKYSIGLDIGTNSVGWAVITDEYKVPSKKFKVLGNTDRHSIKKNLIGALLFDSGETAEATRLKRTARRRYTRRKNRICYLQEIFSNEMAKVDDSFFHRLEESFLVEEDKKHERHPIFGNIVDEVAYHEKYPTIYHLRKKLVDSTDKADLRLIYLALAHMIKFRGHFLIEGDLNPDNSDVDKLFIQLVQTYNQLFEENPINASGVDAKAILSARLSKSRRLENLIAQLPGEKKNGLFGNLIALSLGLTPNFKSNFDLAEDAKLQLSKDTYDDDLDNLLAQIGDQYADLFLAAKNLSDAILLSDILRVNTEITKAPLSASMIKRYDEHHQDLTLLKALVRQQLPEKYKEIFFDQSKNGYAGYIDGGASQEEFYKFIKPILEKMDGTEELLVKLNREDLLRKQRTFDNGSIPHQIHLGELHAILRRQEDFYPFLKDNREKIEKILTFRIPYYVGPLARGNSRFAWMTRKSEETITPWNFEEVVDKGASAQSFIERMTNFDKNLPNEKVLPKHSLLYEYFTVYNELTKVKYVTEGMRKPAFLSGEQKKAIVDLLFKTNRKVTVKQLKEDYFKKIECFDSVEISGVEDRFNASLGTYHDLLKIIKDKDFLDNEENEDILEDIVLTLTLFEDREMIEERLKTYAHLFDDKVMKQLKRRRYTGWGRLSRKLINGIRDKQSGKTILDFLKSDGFANRNFMQLIHDDSLTFKEDIQKAQVSGQGDSLHEHIANLAGSPAIKKGILQTVKVVDELVKVMGRHKPENIVIEMARENQTTQKGQKNSRERMKRIEEGIKELGSQILKEHPVENTQLQNEKLYLYYLQNGRDMYVDQELDINRLSDYDVDHIVPQSFLKDDSIDNKVLTRSDKARGKSDNVPSEEVVKKMKNYWRQLLNAKLITQRKFDNLTKAERGGLSELDKAGFIKRQLVETRQITKHVAQILDSRMNTKYDENDKLIREVKVITLKSKLVSDFRKDFQFYKVREINNYHHAHDAYLNAVVGTALIKKYPKLESEFVYGDYKVYDVRKMIAKSEQEIGKATAKYFFYSNIMNFFKTEITLANGEIRKRPLIETNGETGEIVWDKGRDFATVRKVLSMPQVNIVKKTEVQTGGFSKESILPKRNSDKLIARKKDWDPKKYGGFDSPTVAYSVLVVAKVEKGKSKKLKSVKELLGITIMERSSFEKNPIDFLEAKGYKEVKKDLIIKLPKYSLFELENGRKRMLASAGELQKGNELALPSKYVNFLYLASHYEKLKGSPEDNEQKQLFVEQHKHYLDEIIEQISEFSKRVILADANLDKVLSAYNKHRDKPIREQAENIIHLFTLTNLGAPAAFKYFDTTIDRKRYTSTKEVLDATLIHQSITGLYETRIDLSQLGGDGGPAPGSSGGGGGIPWLMKKPLQLTTLVPLQEYEERLLKQTMLTGSYKEKLQSLFLKYDALWQHWENQVGHRRIKPHHIATGTVNPRPQKQYPINPKAKASIQTVINDLLKQGVLIQQNSIMNTPVYPVPKPDGKWRMVLDYREVNKTIPLIAAQNQHSAGILSSIFRGKYKTTLDLSNGFWAHSITPESYWLTAFTWLGQQYCWTRLPQGFLNSPALFNADVVDLLKEVPNVQVYVDDIYISHDDPREHLEQLEKVFSLLLNAGYVVSLKKSEIAQHEVEFLGFNITKEGRGLTETFKQKLLNITPPRDLKQLQSILGLLNFARNFIPNFSELVKPLYNIIATAPGKYITWTTDNSQQLQNIISMLNSAENLEERNPEVRLIMKVNTSPSAGYIRFYNEFAKRPIMYLNYVYTKAEVKFTNTEKLLTTIHKGLIKALDLGMGQEILVYSPIVSMTKIQKTPLPERKALPIRWITWMSYLEDPRIQFHYDKTLPELQQVPTVTDDIIAKIKHPSEFSMVFYTDGSAIKHPNVNKSHNAGMGIAQVQFKPEFTVINTWSIPLGDHTAQLAEVAAVEFACKKALKIDGPVLIVTDSFYVAESVNKELPYWQSNGFFNNKKKPLKHVSKWKSIADCIQLKPDIIIIHEKGHQPTASTFHTEGNNLADKLATQGSYVVNAGKRTADGSEFEKRTADGSEFESPKKKAKVE

SEQ ID NO: 547 - protein, 2085 aa, synthetic construct
MPAAKRVKLDGGDKKYSIGLDIGTNSVGWAVITDEYKVPSKKFKVLGNTDRHSIKKNLIGALLFDSGETAEATRLKRTARRRYTRRKNRICYLQEIFSNEMAKVDDSFFHRLEESFLVEEDKKHERHPIFGNIVDEVAYHEKYPTIYHLRKKLVDSTDKADLRLIYLALAHMIKFRGHFLIEGDLNPDNSDVDKLFIQLVQTYNQLFEENPINASGVDAKAILSARLSKSRRLENLIAQLPGEKKNGLFGNLIALSLGLTPNFKSNFDLAEDAKLQLSKDTYDDDLDNLLAQIGDQYADLFLAAKNLSDAILLSDILRVNTEITKAPLSASMIKRYDEHHQDLTLLKALVRQQLPEKYKEIFFDQSKNGYAGYIDGGASQEEFYKFIKPILEKMDGTEELLVKLNREDLLRKQRTFDNGSIPHQIHLGELHAILRRQEDFYPFLKDNREKIEKILTFRIPYYVGPLARGNSRFAWMTRKSEETITPWNFEEVVDKGASAQSFIERMTNFDKNLPNEKVLPKHSLLYEYFTVYNELTKVKYVTEGMRKPAFLSGEQKKAIVDLLFKTNRKVTVKQLKEDYFKKIECFDSVEISGVEDRFNASLGTYHDLLKIIKDKDFLDNEENEDILEDIVLTLTLFEDREMIEERLKTYAHLFDDKVMKQLKRRRYTGWGRLSRKLINGIRDKQSGKTILDFLKSDGFANRNFMQLIHDDSLTFKEDIQKAQVSGQGDSLHEHIANLAGSPAIKKGILQTVKVVDELVKVMGRHKPENIVIEMARENQTTQKGQKNSRERMKRIEEGIKELGSQILKEHPVENTQLQNEKLYLYYLQNGRDMYVDQELDINRLSDYDVDHIVPQSFLKDDSIDNKVLTRSDKARGKSDNVPSEEVVKKMKNYWRQLLNAKLITQRKFDNLTKAERGGLSELDKAGFIKRQLVETRQITKHVAQILDSRMNTKYDENDKLIREVKVITLKSKLVSDFRKDFQFYKVREINNYHHAHDAYLNAVVGTALIKKYPKLESEFVYGDYKVYDVRKMIAKSEQEIGKATAKYFFYSNIMNFFKTEITLANGEIRKRPLIETNGETGEIVWDKGRDFATVRKVLSMPQVNIVKKTEVQTGGFSKESILPKRNSDKLIARKKDWDPKKYGGFDSPTVAYSVLVVAKVEKGKSKKLKSVKELLGITIMERSSFEKNPIDFLEAKGYKEVKKDLIIKLPKYSLFELENGRKRMLASAGELQKGNELALPSKYVNFLYLASHYEKLKGSPEDNEQKQLFVEQHKHYLDEIIEQISEFSKRVILADANLDKVLSAYNKHRDKPIREQAENIIHLFTLTNLGAPAAFKYFDTTIDRKRYTSTKEVLDATLIHQSITGLYETRIDLSQLGGDGGGSSGGGPAPGGIPWLMKKPLQLTTLVPLQEYEERLLKQTMLTGSYKEKLQSLFLKYDALWQHWENQVGHRRIKPHHIATGTVNPRPQKQYPINPKAKASIQTVINDLLKQGVLIQQNSIMNTPVYPVPKPDGKWRMVLDYREVNKTIPLIAAQNQHSAGILSSIFRGKYKTTLDLSNGFWAHSITPESYWLTAFTWLGQQYCWTRLPQGFLNSPALFNADVVDLLKEVPNVQVYVDDIYISHDDPREHLEQLEKVFSLLLNAGYVVSLKKSEIAQHEVEFLGFNITKEGRGLTETFKQKLLNITPPRDLKQLQSILGLLNFARNFIPNFSELVKPLYNIIATAPGKYITWTTDNSQQLQNIISMLNSAENLEERNPEVRLIMKVNTSPSAGYIRFYNEFAKRPIMYLNYVYTKAEVKFTNTEKLLTTIHKGLIKALDLGMGQEILVYSPIVSMTKIQKTPLPERKALPIRWITWMSYLEDPRIQFHYDKTLPELQQVPTVTDDIIAKIKHPSEFSMVFYTDGSAIKHPNVNKSHNAGMGIAQVQFKPEFTVINTWSIPLGDHTAQLAEVAAVEFACKKALKIDGPVLIVTDSFYVAESVNKELPYWQSNGFFNNKKKPLKHVSKWKSIADCIQLKPDIIIIHEKGHQPTASTFHTEGNNLADKLATQGSYVVNAGKRTADGSEFEKRTADGSEFESPKKKAKVE

SEQ ID NO: 548 - protein, 2087 aa, synthetic construct
MPAAKRVKLDGGDKKYSIGLDIGTNSVGWAVITDEYKVPSKKFKVLGNTDRHSIKKNLIGALLFDSGETAEATRLKRTARRRYTRRKNRICYLQEIFSNEMAKVDDSFFHRLEESFLVEEDKKHERHPIFGNIVDEVAYHEKYPTIYHLRKKLVDSTDKADLRLIYLALAHMIKFRGHFLIEGDLNPDNSDVDKLFIQLVQTYNQLFEENPINASGVDAKAILSARLSKSRRLENLIAQLPGEKKNGLFGNLIALSLGLTPNFKSNFDLAEDAKLQLSKDTYDDDLDNLLAQIGDQYADLFLAAKNLSDAILLSDILRVNTEITKAPLSASMIKRYDEHHQDLTLLKALVRQQLPEKYKEIFFDQSKNGYAGYIDGGASQEEFYKFIKPILEKMDGTEELLVKLNREDLLRKQRTFDNGSIPHQIHLGELHAILRRQEDFYPFLKDNREKIEKILTFRIPYYVGPLARGNSRFAWMTRKSEETITPWNFEEVVDKGASAQSFIERMTNFDKNLPNEKVLPKHSLLYEYFTVYNELTKVKYVTEGMRKPAFLSGEQKKAIVDLLFKTNRKVTVKQLKEDYFKKIECFDSVEISGVEDRFNASLGTYHDLLKIIKDKDFLDNEENEDILEDIVLTLTLFEDREMIEERLKTYAHLFDDKVMKQLKRRRYTGWGRLSRKLINGIRDKQSGKTILDFLKSDGFANRNFMQLIHDDSLTFKEDIQKAQVSGQGDSLHEHIANLAGSPAIKKGILQTVKVVDELVKVMGRHKPENIVIEMARENQTTQKGQKNSRERMKRIEEGIKELGSQILKEHPVENTQLQNEKLYLYYLQNGRDMYVDQELDINRLSDYDVDHIVPQSFLKDDSIDNKVLTRSDKARGKSDNVPSEEVVKKMKNYWRQLLNAKLITQRKFDNLTKAERGGLSELDKAGFIKRQLVETRQITKHVAQILDSRMNTKYDENDKLIREVKVITLKSKLVSDFRKDFQFYKVREINNYHHAHDAYLNAVVGTALIKKYPKLESEFVYGDYKVYDVRKMIAKSEQEIGKATAKYFFYSNIMNFFKTEITLANGEIRKRPLIETNGETGEIVWDKGRDFATVRKVLSMPQVNIVKKTEVQTGGFSKESILPKRNSDKLIARKKDWDPKKYGGFDSPTVAYSVLVVAKVEKGKSKKLKSVKELLGITIMERSSFEKNPIDFLEAKGYKEVKKDLIIKLPKYSLFELENGRKRMLASAGELQKGNELALPSKYVNFLYLASHYEKLKGSPEDNEQKQLFVEQHKHYLDEIIEQISEFSKRVILADANLDKVLSAYNKHRDKPIREQAENIIHLFTLTNLGAPAAFKYFDTTIDRKRYTSTKEVLDATLIHQSITGLYETRIDLSQLGGDGGGGSEAAAKPAPGGIPWLMKKPLQLTTLVPLQEYEERLLKQTMLTGSYKEKLQSLFLKYDALWQHWENQVGHRRIKPHHIATGTVNPRPQKQYPINPKAKASIQTVINDLLKQGVLIQQNSIMNTPVYPVPKPDGKWRMVLDYREVNKTIPLIAAQNQHSAGILSSIFRGKYKTTLDLSNGFWAHSITPESYWLTAFTWLGQQYCWTRLPQGFLNSPALFNADVVDLLKEVPNVQVYVDDIYISHDDPREHLEQLEKVFSLLLNAGYVVSLKKSEIAQHEVEFLGFNITKEGRGLTETFKQKLLNITPPRDLKQLQSILGLLNFARNFIPNFSELVKPLYNIIATAPGKYITWTTDNSQQLQNIISMLNSAENLEERNPEVRLIMKVNTSPSAGYIRFYNEFAKRPIMYLNYVYTKAEVKFTNTEKLLTTIHKGLIKALDLGMGQEILVYSPIVSMTKIQKTPLPERKALPIRWITWMSYLEDPRIQFHYDKTLPELQQVPTVTDDIIAKIKHPSEFSMVFYTDGSAIKHPNVNKSHNAGMGIAQVQFKPEFTVINTWSIPLGDHTAQLAEVAAVEFACKKALKIDGPVLIVTDSFYVAESVNKELPYWQSNGFFNNKKKPLKHVSKWKSIADCIQLKPDIIIIHEKGHQPTASTFHTEGNNLADKLATQGSYVVNAGKRTADGSEFEKRTADGSEFESPKKKAKVE

SEQ ID NO: 549 - protein, 2087 aa, synthetic construct
MPAAKRVKLDGGDKKYSIGLDIGTNSVGWAVITDEYKVPSKKFKVLGNTDRHSIKKNLIGALLFDSGETAEATRLKRTARRRYTRRKNRICYLQEIFSNEMAKVDDSFFHRLEESFLVEEDKKHERHPIFGNIVDEVAYHEKYPTIYHLRKKLVDSTDKADLRLIYLALAHMIKFRGHFLIEGDLNPDNSDVDKLFIQLVQTYNQLFEENPINASGVDAKAILSARLSKSRRLENLIAQLPGEKKNGLFGNLIALSLGLTPNFKSNFDLAEDAKLQLSKDTYDDDLDNLLAQIGDQYADLFLAAKNLSDAILLSDILRVNTEITKAPLSASMIKRYDEHHQDLTLLKALVRQQLPEKYKEIFFDQSKNGYAGYIDGGASQEEFYKFIKPILEKMDGTEELLVKLNREDLLRKQRTFDNGSIPHQIHLGELHAILRRQEDFYPFLKDNREKIEKILTFRIPYYVGPLARGNSRFAWMTRKSEETITPWNFEEVVDKGASAQSFIERMTNFDKNLPNEKVLPKHSLLYEYFTVYNELTKVKYVTEGMRKPAFLSGEQKKAIVDLLFKTNRKVTVKQLKEDYFKKIECFDSVEISGVEDRFNASLGTYHDLLKIIKDKDFLDNEENEDILEDIVLTLTLFEDREMIEERLKTYAHLFDDKVMKQLKRRRYTGWGRLSRKLINGIRDKQSGKTILDFLKSDGFANRNFMQLIHDDSLTFKEDIQKAQVSGQGDSLHEHIANLAGSPAIKKGILQTVKVVDELVKVMGRHKPENIVIEMARENQTTQKGQKNSRERMKRIEEGIKELGSQILKEHPVENTQLQNEKLYLYYLQNGRDMYVDQELDINRLSDYDVDHIVPQSFLKDDSIDNKVLTRSDKARGKSDNVPSEEVVKKMKNYWRQLLNAKLITQRKFDNLTKAERGGLSELDKAGFIKRQLVETRQITKHVAQILDSRMNTKYDENDKLIREVKVITLKSKLVSDFRKDFQFYKVREINNYHHAHDAYLNAVVGTALIKKYPKLESEFVYGDYKVYDVRKMIAKSEQEIGKATAKYFFYSNIMNFFKTEITLANGEIRKRPLIETNGETGEIVWDKGRDFATVRKVLSMPQVNIVKKTEVQTGGFSKESILPKRNSDKLIARKKDWDPKKYGGFDSPTVAYSVLVVAKVEKGKSKKLKSVKELLGITIMERSSFEKNPIDFLEAKGYKEVKKDLIIKLPKYSLFELENGRKRMLASAGELQKGNELALPSKYVNFLYLASHYEKLKGSPEDNEQKQLFVEQHKHYLDEIIEQISEFSKRVILADANLDKVLSAYNKHRDKPIREQAENIIHLFTLTNLGAPAAFKYFDTTIDRKRYTSTKEVLDATLIHQSITGLYETRIDLSQLGGDGGGGGPAPEAAAKGGIPWLMKKPLQLTTLVPLQEYEERLLKQTMLTGSYKEKLQSLFLKYDALWQHWENQVGHRRIKPHHIATGTVNPRPQKQYPINPKAKASIQTVINDLLKQGVLIQQNSIMNTPVYPVPKPDGKWRMVLDYREVNKTIPLIAAQNQHSAGILSSIFRGKYKTTLDLSNGFWAHSITPESYWLTAFTWLGQQYCWTRLPQGFLNSPALFNADVVDLLKEVPNVQVYVDDIYISHDDPREHLEQLEKVFSLLLNAGYVVSLKKSEIAQHEVEFLGFNITKEGRGLTETFKQKLLNITPPRDLKQLQSILGLLNFARNFIPNFSELVKPLYNIIATAPGKYITWTTDNSQQLQNIISMLNSAENLEERNPEVRLIMKVNTSPSAGYIRFYNEFAKRPIMYLNYVYTKAEVKFTNTEKLLTTIHKGLIKALDLGMGQEILVYSPIVSMTKIQKTPLPERKALPIRWITWMSYLEDPRIQFHYDKTLPELQQVPTVTDDIIAKIKHPSEFSMVFYTDGSAIKHPNVNKSHNAGMGIAQVQFKPEFTVINTWSIPLGDHTAQLAEVAAVEFACKKALKIDGPVLIVTDSFYVAESVNKELPYWQSNGFFNNKKKPLKHVSKWKSIADCIQLKPDIIIIHEKGHQPTASTFHTEGNNLADKLATQGSYVVNAGKRTADGSEFEKRTADGSEFESPKKKAKVE

SEQ ID NO: 550 - protein, 2106 aa, synthetic construct
MPAAKRVKLDGGDKKYSIGLDIGTNSVGWAVITDEYKVPSKKFKVLGNTDRHSIKKNLIGALLFDSGETAEATRLKRTARRRYTRRKNRICYLQEIFSNEMAKVDDSFFHRLEESFLVEEDKKHERHPIFGNIVDEVAYHEKYPTIYHLRKKLVDSTDKADLRLIYLALAHMIKFRGHFLIEGDLNPDNSDVDKLFIQLVQTYNQLFEENPINASGVDAKAILSARLSKSRRLENLIAQLPGEKKNGLFGNLIALSLGLTPNFKSNFDLAEDAKLQLSKDTYDDDLDNLLAQIGDQYADLFLAAKNLSDAILLSDILRVNTEITKAPLSASMIKRYDEHHQDLTLLKALVRQQLPEKYKEIFFDQSKNGYAGYIDGGASQEEFYKFIKPILEKMDGTEELLVKLNREDLLRKQRTFDNGSIPHQIHLGELHAILRRQEDFYPFLKDNREKIEKILTFRIPYYVGPLARGNSRFAWMTRKSEETITPWNFEEVVDKGASAQSFIERMTNFDKNLPNEKVLPKHSLLYEYFTVYNELTKVKYVTEGMRKPAFLSGEQKKAIVDLLFKTNRKVTVKQLKEDYFKKIECFDSVEISGVEDRFNASLGTYHDLLKIIKDKDFLDNEENEDILEDIVLTLTLFEDREMIEERLKTYAHLFDDKVMKQLKRRRYTGWGRLSRKLINGIRDKQSGKTILDFLKSDGFANRNFMQLIHDDSLTFKEDIQKAQVSGQGDSLHEHIANLAGSPAIKKGILQTVKVVDELVKVMGRHKPENIVIEMARENQTTQKGQKNSRERMKRIEEGIKELGSQILKEHPVENTQLQNEKLYLYYLQNGRDMYVDQELDINRLSDYDVDHIVPQSFLKDDSIDNKVLTRSDKARGKSDNVPSEEVVKKMKNYWRQLLNAKLITQRKFDNLTKAERGGLSELDKAGFIKRQLVETRQITKHVAQILDSRMNTKYDENDKLIREVKVITLKSKLVSDFRKDFQFYKVREINNYHHAHDAYLNAVVGTALIKKYPKLESEFVYGDYKVYDVRKMIAKSEQEIGKATAKYFFYSNIMNFFKTEITLANGEIRKRPLIETNGETGEIVWDKGRDFATVRKVLSMPQVNIVKKTEVQTGGFSKESILPKRNSDKLIARKKDWDPKKYGGFDSPTVAYSVLVVAKVEKGKSKKLKSVKELLGITIMERSSFEKNPIDFLEAKGYKEVKKDLIIKLPKYSLFELENGRKRMLASAGELQKGNELALPSKYVNFLYLASHYEKLKGSPEDNEQKQLFVEQHKHYLDEIIEQISEFSKRVILADANLDKVLSAYNKHRDKPIREQAENIIHLFTLTNLGAPAAFKYFDTTIDRKRYTSTKEVLDATLIHQSITGLYETRIDLSQLGGDGGEAAAKEAAAKEAAAKEAAAKEAAAKEAAAKGGIPWLMKKPLQLTTLVPLQEYEERLLKQTMLTGSYKEKLQSLFLKYDALWQHWENQVGHRRIKPHHIATGTVNPRPQKQYPINPKAKASIQTVINDLLKQGVLIQQNSIMNTPVYPVPKPDGKWRMVLDYREVNKTIPLIAAQNQHSAGILSSIFRGKYKTTLDLSNGFWAHSITPESYWLTAFTWLGQQYCWTRLPQGFLNSPALFNADVVDLLKEVPNVQVYVDDIYISHDDPREHLEQLEKVFSLLLNAGYVVSLKKSEIAQHEVEFLGFNITKEGRGLTETFKQKLLNITPPRDLKQLQSILGKLNFARNFIPNFSELVKPLYNIIATAPGKYITWTTDNSQQLQNIISMLNSAENLEERNPEVRLIMKVNTSPSAGYIRFYNEFAKRPIMYLNYVYTKAEVKFTNTEKLLTTIHKGLIKALDLGMGQEILVYSPIVSMTKIQKTPLPERKALPIRWITWMSYLEDPRIQFHYDKTLPELQQVPTVTDDIIAKIKHPSEFSMVFYTDGSAIKHPNVNKSHNAGMGIAQVQFKPEFTVINTWSIPLGDHTAQLAEVAAVEFACKKALKIDGPVLIVTDSFYVAESVNKELPYWQSNGFFNNKKKPLKHVSKWKSIADCIQLKPDIIIIHEKGHQPTASTFHTEGNNLADKLATQGSYVVNAGKRTADGSEFEKRTADGSEFESPKKKAKVE

SEQ ID NO: 551 - protein, 2079 aa, synthetic construct
MPAAKRVKLDGGDKKYSIGLDIGTNSVGWAVITDEYKVPSKKFKVLGNTDRHSIKKNLIGALLFDSGETAEATRLKRTARRRYTRRKNRICYLQEIFSNEMAKVDDSFFHRLEESFLVEEDKKHERHPIFGNIVDEVAYHEKYPTIYHLRKKLVDSTDKADLRLIYLALAHMIKFRGHFLIEGDLNPDNSDVDKLFIQLVQTYNQLFEENPINASGVDAKAILSARLSKSRRLENLIAQLPGEKKNGLFGNLIALSLGLTPNFKSNFDLAEDAKLQLSKDTYDDDLDNLLAQIGDQYADLFLAAKNLSDAILLSDILRVNTEITKAPLSASMIKRYDEHHQDLTLLKALVRQQLPEKYKEIFFDQSKNGYAGYIDGGASQEEFYKFIKPILEKMDGTEELLVKLNREDLLRKQRTFDNGSIPHQIHLGELHAILRRQEDFYPFLKDNREKIEKILTFRIPYYVGPLARGNSRFAWMTRKSEETITPWNFEEVVDKGASAQSFIERMTNFDKNLPNEKVLPKHSLLYEYFTVYNELTKVKYVTEGMRKPAFLSGEQKKAIVDLLFKTNRKVTVKQLKEDYFKKIECFDSVEISGVEDRFNASLGTYHDLLKIIKDKDFLDNEENEDILEDIVLTLTLFEDREMIEERLKTYAHLFDDKVMKQLKRRRYTGWGRLSRKLINGIRDKQSGKTILDFLKSDGFANRNFMQLIHDDSLTFKEDIQKAQVSGQGDSLHEHIANLAGSPAIKKGILQTVKVVDELVKVMGRHKPENIVIEMARENQTTQKGQKNSRERMKRIEEGIKELGSQILKEHPVENTQLQNEKLYLYYLQNGRDMYVDQELDINRLSDYDVDHIVPQSFLKDDSIDNKVLTRSDKARGKSDNVPSEEVVKKMKNYWRQLLNAKLITQRKFDNLTKAERGGLSELDKAGFIKRQLVETRQITKHVAQILDSRMNTKYDENDKLIREVKVITLKSKLVSDFRKDFQFYKVREINNYHHAHDAYLNAVVGTALIKKYPKLESEFVYGDYKVYDVRKMIAKSEQEIGKATAKYFFYSNIMNFFKTEITLANGEIRKRPLIETNGETGEIVWDKGRDFATVRKVLSMPQVNIVKKTEVQTGGFSKESILPKRNSDKLIARKKDWDPKKYGGFDSPTVAYSVLVVAKVEKGKSKKLKSVKELLGITIMERSSFEKNPIDFLEAKGYKEVKKDLIIKLPKYSLFELENGRKRMLASAGELQKGNELALPSKYVNFLYLASHYEKLKGSPEDNEQKQLFVEQHKHYLDEIIEQISEFSKRVILADANLDKVLSAYNKHRDKPIREQAENIIHLFTLTNLGAPAAFKYFDTTIDRKRYTSTKEVLDATLIHQSITGLYETRIDLSQLGGDGGGSSGGIPWLMKKPLQLTTLVPLQEYEERLLKQTMLTGSYKEKLQSLFLKYDALWQHWENQVGHRRIKPHHIATGTVNPRPQKQYPINPKAKASIQTVINDLLKQGVLIQQNSIMNTPVYPVPKPDGKWRMVLDYREVNKTIPLIAAQNQHSAGILSSIFRGKYKTTLDLSNGFWAHSITPESYWLTAFTWLGQQYCWTRLPQGFLNSPALFNADVVDLLKEVPNVQVYVDDIYISHDDPREHLEQLEKVFSLLLNAGYVVSLKKSEIAQHEVEFLGFNITKEGRGLTETFKQKLLNITPPRDLKQLQSILGKLNFARNFIPNFSELVKPLYNIIATAPGKYITWTTDNSQQLQNIISMLNSAENLEERNPEVRLIMKVNTSPSAGYIRFYNEFAKRPIMYLNYVYTKAEVKFTNTEKLLTTIHKGLIKALDLGMGQEILVYSPIVSMTKIQKTPLPERKALPIRWITWMSYLEDPRIQFHYDKTLPELQQVPTVTDDIIAKIKHPSEFSMVFYTDGSAIKHPNVNKSHNAGMGIAQVQFKPEFTVINTWSIPLGDHTAQLAEVAAVEFACKKALKIDGPVLIVTDSFYVAESVNKELPYWQSNGFFNNKKKPLKHVSKWKSIADCIQLKPDIIIIHEKGHQPTASTFHTEGNNLADKLATQGSYVVNAGKRTADGSEFEKRTADGSEFESPKKKAKVE

SEQ ID NO: 552 - protein, 2079 aa, synthetic construct
MPAAKRVKLDGGDKKYSIGLDIGTNSVGWAVITDEYKVPSKKFKVLGNTDRHSIKKNLIGALLFDSGETAEATRLKRTARRRYTRRKNRICYLQEIFSNEMAKVDDSFFHRLEESFLVEEDKKHERHPIFGNIVDEVAYHEKYPTIYHLRKKLVDSTDKADLRLIYLALAHMIKFRGHFLIEGDLNPDNSDVDKLFIQLVQTYNQLFEENPINASGVDAKAILSARLSKSRRLENLIAQLPGEKKNGLFGNLIALSLGLTPNFKSNFDLAEDAKLQLSKDTYDDDLDNLLAQIGDQYADLFLAAKNLSDAILLSDILRVNTEITKAPLSASMIKRYDEHHQDLTLLKALVRQQLPEKYKEIFFDQSKNGYAGYIDGGASQEEFYKFIKPILEKMDGTEELLVKLNREDLLRKQRTFDNGSIPHQIHLGELHAILRRQEDFYPFLKDNREKIEKILTFRIPYYVGPLARGNSRFAWMTRKSEETITPWNFEEVVDKGASAQSFIERMTNFDKNLPNEKVLPKHSLLYEYFTVYNELTKVKYVTEGMRKPAFLSGEQKKAIVDLLFKTNRKVTVKQLKEDYFKKIECFDSVEISGVEDRFNASLGTYHDLLKIIKDKDFLDNEENEDILEDIVLTLTLFEDREMIEERLKTYAHLFDDKVMKQLKRRRYTGWGRLSRKLINGIRDKQSGKTILDFLKSDGFANRNFMQLIHDDSLTFKEDIQKAQVSGQGDSLHEHIANLAGSPAIKKGILQTVKVVDELVKVMGRHKPENIVIEMARENQTTQKGQKNSRERMKRIEEGIKELGSQILKEHPVENTQLQNEKLYLYYLQNGRDMYVDQELDINRLSDYDVDHIVPQSFLKDDSIDNKVLTRSDKARGKSDNVPSEEVVKKMKNYWRQLLNAKLITQRKFDNLTKAERGGLSELDKAGFIKRQLVETRQITKHVAQILDSRMNTKYDENDKLIREVKVITLKSKLVSDFRKDFQFYKVREINNYHHAHDAYLNAVVGTALIKKYPKLESEFVYGDYKVYDVRKMIAKSEQEIGKATAKYFFYSNIMNFFKTEITLANGEIRKRPLIETNGETGEIVWDKGRDFATVRKVLSMPQVNIVKKTEVQTGGFSKESILPKRNSDKLIARKKDWDPKKYGGFDSPTVAYSVLVVAKVEKGKSKKLKSVKELLGITIMERSSFEKNPIDFLEAKGYKEVKKDLIIKLPKYSLFELENGRKRMLASAGELQKGNELALPSKYVNFLYLASHYEKLKGSPEDNEQKQLFVEQHKHYLDEIIEQISEFSKRVILADANLDKVLSAYNKHRDKPIREQAENIIHLFTLTNLGAPAAFKYFDTTIDRKRYTSTKEVLDATLIHQSITGLYETRIDLSQLGGDGGGGSGGIPWLMKKPLQLTTLVPLQEYEERLLKQTMLTGSYKEKLQSLFLKYDALWQHWENQVGHRRIKPHHIATGTVNPRPQKQYPINPKAKASIQTVINDLLKQGVLIQQNSIMNTPVYPVPKPDGKWRMVLDYREVNKTIPLIAAQNQHSAGILSSIFRGKYKTTLDLSNGFWAHSITPESYWLTAFTWLGQQYCWTRLPQGFLNSPALFNADVVDLLKEVPNVQVYVDDIYISHDDPREHLEQLEKVFSLLLNAGYVVSLKKSEIAQHEVEFLGFNITKEGRGLTETFKQKLLNITPPRDLKQLQSILGKLNFARNFIPNFSELVKPLYNIIATAPGKYITWTTDNSQQLQNIISMLNSAENLEERNPEVRLIMKVNTSPSAGYIRFYNEFAKRPIMYLNYVYTKAEVKFTNTEKLLTTIHKGLIKALDLGMGQEILVYSPIVSMTKIQKTPLPERKALPIRWITWMSYLEDPRIQFHYDKTLPELQQVPTVTDDIIAKIKHPSEFSMVFYTDGSAIKHPNVNKSHNAGMGIAQVQFKPEFTVINTWSIPLGDHTAQLAEVAAVEFACKKALKIDGPVLIVTDSFYVAESVNKELPYWQSNGFFNNKKKPLKHVSKWKSIADCIQLKPDIIIIHEKGHQPTASTFHTEGNNLADKLATQGSYVVNAGKRTADGSEFEKRTADGSEFESPKKKAKVE

SEQ ID NO: 553 - protein, 2087 aa, synthetic construct
MPAAKRVKLDGGDKKYSIGLDIGTNSVGWAVITDEYKVPSKKFKVLGNTDRHSIKKNLIGALLFDSGETAEATRLKRTARRRYTRRKNRICYLQEIFSNEMAKVDDSFFHRLEESFLVEEDKKHERHPIFGNIVDEVAYHEKYPTIYHLRKKLVDSTDKADLRLIYLALAHMIKFRGHFLIEGDLNPDNSDVDKLFIQLVQTYNQLFEENPINASGVDAKAILSARLSKSRRLENLIAQLPGEKKNGLFGNLIALSLGLTPNFKSNFDLAEDAKLQLSKDTYDDDLDNLLAQIGDQYADLFLAAKNLSDAILLSDILRVNTEITKAPLSASMIKRYDEHHQDLTLLKALVRQQLPEKYKEIFFDQSKNGYAGYIDGGASQEEFYKFIKPILEKMDGTEELLVKLNREDLLRKQRTFDNGSIPHQIHLGELHAILRRQEDFYPFLKDNREKIEKILTFRIPYYVGPLARGNSRFAWMTRKSEETITPWNFEEVVDKGASAQSFIERMTNFDKNLPNEKVLPKHSLLYEYFTVYNELTKVKYVTEGMRKPAFLSGEQKKAIVDLLFKTNRKVTVKQLKEDYFKKIECFDSVEISGVEDRFNASLGTYHDLLKIIKDKDFLDNEENEDILEDIVLTLTLFEDREMIEERLKTYAHLFDDKVMKQLKRRRYTGWGRLSRKLINGIRDKQSGKTILDFLKSDGFANRNFMQLIHDDSLTFKEDIQKAQVSGQGDSLHEHIANLAGSPAIKKGILQTVKVVDELVKVMGRHKPENIVIEMARENQTTQKGQKNSRERMKRIEEGIKELGSQILKEHPVENTQLQNEKLYLYYLQNGRDMYVDQELDINRLSDYDVDHIVPQSFLKDDSIDNKVLTRSDKARGKSDNVPSEEVVKKMKNYWRQLLNAKLITQRKFDNLTKAERGGLSELDKAGFIKRQLVETRQITKHVAQILDSRMNTKYDENDKLIREVKVITLKSKLVSDFRKDFQFYKVREINNYHHAHDAYLNAVVGTALIKKYPKLESEFVYGDYKVYDVRKMIAKSEQEIGKATAKYFFYSNIMNFFKTEITLANGEIRKRPLIETNGETGEIVWDKGRDFATVRKVLSMPQVNIVKKTEVQTGGFSKESILPKRNSDKLIARKKDWDPKKYGGFDSPTVAYSVLVVAKVEKGKSKKLKSVKELLGITIMERSSFEKNPIDFLEAKGYKEVKKDLIIKLPKYSLFELENGRKRMLASAGELQKGNELALPSKYVNFLYLASHYEKLKGSPEDNEQKQLFVEQHKHYLDEIIEQISEFSKRVILADANLDKVLSAYNKHRDKPIREQAENIIHLFTLTNLGAPAAFKYFDTTIDRKRYTSTKEVLDATLIHQSITGLYETRIDLSQLGGDGGGSSEAAAKPAPGGIPWLMKKPLQLTTLVPLQEYEERLLKQTMLTGSYKEKLQSLFLKYDALWQHWENQVGHRRIKPHHIATGTVNPRPQKQYPINPKAKASIQTVINDLLKQGVLIQQNSIMNTPVYPVPKPDGKWRMVLDYREVNKTIPLIAAQNQHSAGILSSIFRGKYKTTLDLSNGFWAHSITPESYWLTAFTWLGQQYCWTRLPQGFLNSPALFNADVVDLLKEVPNVQVYVDDIYISHDDPREHLEQLEKVFSLLLNAGYVVSLKKSEIAQHEVEFLGFNITKEGRGLTETFKQKLLNITPPRDLKQLQSILGKLNFARNFIPNFSELVKPLYNIIATAPGKYITWTTDNSQQLQNIISMLNSAENLEERNPEVRLIMKVNTSPSAGYIRFYNEFAKRPIMYLNYVYTKAEVKFTNTEKLLTTIHKGLIKALDLGMGQEILVYSPIVSMTKIQKTPLPERKALPIRWITWMSYLEDPRIQFHYDKTLPELQQVPTVTDDIIAKIKHPSEFSMVFYTDGSAIKHPNVNKSHNAGMGIAQVQFKPEFTVINTWSIPLGDHTAQLAEVAAVEFACKKALKIDGPVLIVTDSFYVAESVNKELPYWQSNGFFNNKKKPLKHVSKWKSIADCIQLKPDIIIIHEKGHQPTASTFHTEGNNLADKLATQGSYVVNAGKRTADGSEFEKRTADGSEFESPKKKAKVE

SEQ ID NO: 554 - protein, 2081 aa, synthetic construct
MPAAKRVKLDGGDKKYSIGLDIGTNSVGWAVITDEYKVPSKKFKVLGNTDRHSIKKNLIGALLFDSGETAEATRLKRTARRRYTRRKNRICYLQEIFSNEMAKVDDSFFHRLEESFLVEEDKKHERHPIFGNIVDEVAYHEKYPTIYHLRKKLVDSTDKADLRLIYLALAHMIKFRGHFLIEGDLNPDNSDVDKLFIQLVQTYNQLFEENPINASGVDAKAILSARLSKSRRLENLIAQLPGEKKNGLFGNLIALSLGLTPNFKSNFDLAEDAKLQLSKDTYDDDLDNLLAQIGDQYADLFLAAKNLSDAILLSDILRVNTEITKAPLSASMIKRYDEHHQDLTLLKALVRQQLPEKYKEIFFDQSKNGYAGYIDGGASQEEFYKFIKPILEKMDGTEELLVKLNREDLLRKQRTFDNGSIPHQIHLGELHAILRRQEDFYPFLKDNREKIEKILTFRIPYYVGPLARGNSRFAWMTRKSEETITPWNFEEVVDKGASAQSFIERMTNFDKNLPNEKVLPKHSLLYEYFTVYNELTKVKYVTEGMRKPAFLSGEQKKAIVDLLFKTNRKVTVKQLKEDYFKKIECFDSVEISGVEDRFNASLGTYHDLLKIIKDKDFLDNEENEDILEDIVLTLTLFEDREMIEERLKTYAHLFDDKVMKQLKRRRYTGWGRLSRKLINGIRDKQSGKTILDFLKSDGFANRNFMQLIHDDSLTFKEDIQKAQVSGQGDSLHEHIANLAGSPAIKKGILQTVKVVDELVKVMGRHKPENIVIEMARENQTTQKGQKNSRERMKRIEEGIKELGSQILKEHPVENTQLQNEKLYLYYLQNGRDMYVDQELDINRLSDYDVDHIVPQSFLKDDSIDNKVLTRSDKARGKSDNVPSEEVVKKMKNYWRQLLNAKLITQRKFDNLTKAERGGLSELDKAGFIKRQLVETRQITKHVAQILDSRMNTKYDENDKLIREVKVITLKSKLVSDFRKDFQFYKVREINNYHHAHDAYLNAVVGTALIKKYPKLESEFVYGDYKVYDVRKMIAKSEQEIGKATAKYFFYSNIMNFFKTEITLANGEIRKRPLIETNGETGEIVWDKGRDFATVRKVLSMPQVNIVKKTEVQTGGFSKESILPKRNSDKLIARKKDWDPKKYGGFDSPTVAYSVLVVAKVEKGKSKKLKSVKELLGITIMERSSFEKNPIDFLEAKGYKEVKKDLIIKLPKYSLFELENGRKRMLASAGELQKGNELALPSKYVNFLYLASHYEKLKGSPEDNEQKQLFVEQHKHYLDEIIEQISEFSKRVILADANLDKVLSAYNKHRDKPIREQAENIIHLFTLTNLGAPAAFKYFDTTIDRKRYTSTKEVLDATLIHQSITGLYETRIDLSQLGGDGGEAAAKGGIPWLMKKPLQLTTLVPLQEYEERLLKQTMLTGSYKEKLQSLFLKYDALWQHWENQVGHRRIKPHHIATGTVNPRPQKQYPINPKAKASIQTVINDLLKQGVLIQQNSIMNTPVYPVPKPDGKWRMVLDYREVNKTIPLIAAQNQHSAGILSSIFRGKYKTTLDLSNGFWAHSITPESYWLTAFTWLGQQYCWTRLPQGFLNSPALFNADVVDLLKEVPNVQVYVDDIYISHDDPREHLEQLEKVFSLLLNAGYVVSLKKSEIAQHEVEFLGFNITKEGRGLTETFKQKLLNITPPRDLKQLQSILGKLNFARNFIPNFSELVKPLYNIIATAPGKYITWTTDNSQQLQNIISMLNSAENLEERNPEVRLIMKVNTSPSAGYIRFYNEFAKRPIMYLNYVYTKAEVKFTNTEKLLTTIHKGLIKALDLGMGQEILVYSPIVSMTKIQKTPLPERKALPIRWITWMSYLEDPRIQFHYDKTLPELQQVPTVTDDIIAKIKHPSEFSMVFYTDGSAIKHPNVNKSHNAGMGIAQVQFKPEFTVINTWSIPLGDHTAQLAEVAAVEFACKKALKIDGPVLIVTDSFYVAESVNKELPYWQSNGFFNNKKKPLKHVSKWKSIADCIQLKPDIIIIHEKGHQPTASTFHTEGNNLADKLATQGSYVVNAGKRTADGSEFEKRTADGSEFESPKKKAKVE

SEQ ID NO: 555 - protein, 2087 aa, synthetic construct
MPAAKRVKLDGGDKKYSIGLDIGTNSVGWAVITDEYKVPSKKFKVLGNTDRHSIKKNLIGALLFDSGETAEATRLKRTARRRYTRRKNRICYLQEIFSNEMAKVDDSFFHRLEESFLVEEDKKHERHPIFGNIVDEVAYHEKYPTIYHLRKKLVDSTDKADLRLIYLALAHMIKFRGHFLIEGDLNPDNSDVDKLFIQLVQTYNQLFEENPINASGVDAKAILSARLSKSRRLENLIAQLPGEKKNGLFGNLIALSLGLTPNFKSNFDLAEDAKLQLSKDTYDDDLDNLLAQIGDQYADLFLAAKNLSDAILLSDILRVNTEITKAPLSASMIKRYDEHHQDLTLLKALVRQQLPEKYKEIFFDQSKNGYAGYIDGGASQEEFYKFIKPILEKMDGTEELLVKLNREDLLRKQRTFDNGSIPHQIHLGELHAILRRQEDFYPFLKDNREKIEKILTFRIPYYVGPLARGNSRFAWMTRKSEETITPWNFEEVVDKGASAQSFIERMTNFDKNLPNEKVLPKHSLLYEYFTVYNELTKVKYVTEGMRKPAFLSGEQKKAIVDLLFKTNRKVTVKQLKEDYFKKIECFDSVEISGVEDRFNASLGTYHDLLKIIKDKDFLDNEENEDILEDIVLTLTLFEDREMIEERLKTYAHLFDDKVMKQLKRRRYTGWGRLSRKLINGIRDKQSGKTILDFLKSDGFANRNFMQLIHDDSLTFKEDIQKAQVSGQGDSLHEHIANLAGSPAIKKGILQTVKVVDELVKVMGRHKPENIVIEMARENQTTQKGQKNSRERMKRIEEGIKELGSQILKEHPVENTQLQNEKLYLYYLQNGRDMYVDQELDINRLSDYDVDHIVPQSFLKDDSIDNKVLTRSDKARGKSDNVPSEEVVKKMKNYWRQLLNAKLITQRKFDNLTKAERGGLSELDKAGFIKRQLVETRQITKHVAQILDSRMNTKYDENDKLIREVKVITLKSKLVSDFRKDFQFYKVREINNYHHAHDAYLNAVVGTALIKKYPKLESEFVYGDYKVYDVRKMIAKSEQEIGKATAKYFFYSNIMNFFKTEITLANGEIRKRPLIETNGETGEIVWDKGRDFATVRKVLSMPQVNIVKKTEVQTGGFSKESILPKRNSDKLIARKKDWDPKKYGGFDSPTVAYSVLVVAKVEKGKSKKLKSVKELLGITIMERSSFEKNPIDFLEAKGYKEVKKDLIIKLPKYSLFELENGRKRMLASAGELQKGNELALPSKYVNFLYLASHYEKLKGSPEDNEQKQLFVEQHKHYLDEIIEQISEFSKRVILADANLDKVLSAYNKHRDKPIREQAENIIHLFTLTNLGAPAAFKYFDTTIDRKRYTSTKEVLDATLIHQSITGLYETRIDLSQLGGDGGEAAAKGGSGGGGGIPWLMKKPLQLTTLVPLQEYEERLLKQTMLTGSYKEKLQSLFLKYDALWQHWENQVGHRRIKPHHIATGTVNPRPQKQYPINPKAKASIQTVINDLLKQGVLIQQNSIMNTPVYPVPKPDGKWRMVLDYREVNKTIPLIAAQNQHSAGILSSIFRGKYKTTLDLSNGFWAHSITPESYWLTAFTWLGQQYCWTRLPQGFLNSPALFNADVVDLLKEVPNVQVYVDDIYISHDDPREHLEQLEKVFSLLLNAGYVVSLKKSEIAQHEVEFLGFNITKEGRGLTETFKQKLLNITPPRDLKQLQSILGKLNFARNFIPNFSELVKPLYNIIATAPGKYITWTTDNSQQLQNIISMLNSAENLEERNPEVRLIMKVNTSPSAGYIRFYNEFAKRPIMYLNYVYTKAEVKFTNTEKLLTTIHKGLIKALDLGMGQEILVYSPIVSMTKIQKTPLPERKALPIRWITWMSYLEDPRIQFHYDKTLPELQQVPTVTDDIIAKIKHPSEFSMVFYTDGSAIKHPNVNKSHNAGMGIAQVQFKPEFTVINTWSIPLGDHTAQLAEVAAVEFACKKALKIDGPVLIVTDSFYVAESVNKELPYWQSNGFFNNKKKPLKHVSKWKSIADCIQLKPDIIIIHEKGHQPTASTFHTEGNNLADKLATQGSYVVNAGKRTADGSEFEKRTADGSEFESPKKKAKVE

SEQ ID NO: 556 - protein, 2096 aa, synthetic construct
MPAAKRVKLDGGDKKYSIGLDIGTNSVGWAVITDEYKVPSKKFKVLGNTDRHSIKKNLIGALLFDSGETAEATRLKRTARRRYTRRKNRICYLQEIFSNEMAKVDDSFFHRLEESFLVEEDKKHERHPIFGNIVDEVAYHEKYPTIYHLRKKLVDSTDKADLRLIYLALAHMIKFRGHFLIEGDLNPDNSDVDKLFIQLVQTYNQLFEENPINASGVDAKAILSARLSKSRRLENLIAQLPGEKKNGLFGNLIALSLGLTPNFKSNFDLAEDAKLQLSKDTYDDDLDNLLAQIGDQYADLFLAAKNLSDAILLSDILRVNTEITKAPLSASMIKRYDEHHQDLTLLKALVRQQLPEKYKEIFFDQSKNGYAGYIDGGASQEEFYKFIKPILEKMDGTEELLVKLNREDLLRKQRTFDNGSIPHQIHLGELHAILRRQEDFYPFLKDNREKIEKILTFRIPYYVGPLARGNSRFAWMTRKSEETITPWNFEEVVDKGASAQSFIERMTNFDKNLPNEKVLPKHSLLYEYFTVYNELTKVKYVTEGMRKPAFLSGEQKKAIVDLLFKTNRKVTVKQLKEDYFKKIECFDSVEISGVEDRFNASLGTYHDLLKIIKDKDFLDNEENEDILEDIVLTLTLFEDREMIEERLKTYAHLFDDKVMKQLKRRRYTGWGRLSRKLINGIRDKQSGKTILDFLKSDGFANRNFMQLIHDDSLTFKEDIQKAQVSGQGDSLHEHIANLAGSPAIKKGILQTVKVVDELVKVMGRHKPENIVIEMARENQTTQKGQKNSRERMKRIEEGIKELGSQILKEHPVENTQLQNEKLYLYYLQNGRDMYVDQELDINRLSDYDVDHIVPQSFLKDDSIDNKVLTRSDKARGKSDNVPSEEVVKKMKNYWRQLLNAKLITQRKFDNLTKAERGGLSELDKAGFIKRQLVETRQITKHVAQILDSRMNTKYDENDKLIREVKVITLKSKLVSDFRKDFQFYKVREINNYHHAHDAYLNAVVGTALIKKYPKLESEFVYGDYKVYDVRKMIAKSEQEIGKATAKYFFYSNIMNFFKTEITLANGEIRKRPLIETNGETGEIVWDKGRDFATVRKVLSMPQVNIVKKTEVQTGGFSKESILPKRNSDKLIARKKDWDPKKYGGFDSPTVAYSVLVVAKVEKGKSKKLKSVKELLGITIMERSSFEKNPIDFLEAKGYKEVKKDLIIKLPKYSLFELENGRKRMLASAGELQKGNELALPSKYVNFLYLASHYEKLKGSPEDNEQKQLFVEQHKHYLDEIIEQISEFSKRVILADANLDKVLSAYNKHRDKPIREQAENIIHLFTLTNLGAPAAFKYFDTTIDRKRYTSTKEVLDATLIHQSITGLYETRIDLSQLGGDGGEAAAKEAAAKEAAAKEAAAKGGIPWLMKKPLQLTTLVPLQEYEERLLKQTMLTGSYKEKLQSLFLKYDALWQHWENQVGHRRIKPHHIATGTVNPRPQKQYPINPKAKASIQTVINDLLKQGVLIQQNSIMNTPVYPVPKPDGKWRMVLDYREVNKTIPLIAAQNQHSAGILSSIFRGKYKTTLDLSNGFWAHSITPESYWLTAFTWLGQQYCWTRLPQGFLNSPALFNADVVDLLKEVPNVQVYVDDIYISHDDPREHLEQLEKVFSLLLNAGYVVSLKKSEIAQHEVEFLGFNITKEGRGLTETFKQKLLNITPPRDLKQLQSILGKLNFARNFIPNFSELVKPLYNIIATAPGKYITWTTDNSQQLQNIISMLNSAENLEERNPEVRLIMKVNTSPSAGYIRFYNEFAKRPIMYLNYVYTKAEVKFTNTEKLLTTIHKGLIKALDLGMGQEILVYSPIVSMTKIQKTPLPERKALPIRWITWMSYLEDPRIQFHYDKTLPELQQVPTVTDDIIAKIKHPSEFSMVFYTDGSAIKHPNVNKSHNAGMGIAQVQFKPEFTVINTWSIPLGDHTAQLAEVAAVEFACKKALKIDGPVLIVTDSFYVAESVNKELPYWQSNGFFNNKKKPLKHVSKWKSIADCIQLKPDIIIIHEKGHQPTASTFHTEGNNLADKLATQGSYVVNAGKRTADGSEFEKRTADGSEFESPKKKAKVE

SEQ ID NO: 557 - protein, 2086 aa, synthetic construct
MPAAKRVKLDGGDKKYSIGLDIGTNSVGWAVITDEYKVPSKKFKVLGNTDRHSIKKNLIGALLFDSGETAEATRLKRTARRRYTRRKNRICYLQEIFSNEMAKVDDSFFHRLEESFLVEEDKKHERHPIFGNIVDEVAYHEKYPTIYHLRKKLVDSTDKADLRLIYLALAHMIKFRGHFLIEGDLNPDNSDVDKLFIQLVQTYNQLFEENPINASGVDAKAILSARLSKSRRLENLIAQLPGEKKNGLFGNLIALSLGLTPNFKSNFDLAEDAKLQLSKDTYDDDLDNLLAQIGDQYADLFLAAKNLSDAILLSDILRVNTEITKAPLSASMIKRYDEHHQDLTLLKALVRQQLPEKYKEIFFDQSKNGYAGYIDGGASQEEFYKFIKPILEKMDGTEELLVKLNREDLLRKQRTFDNGSIPHQIHLGELHAILRRQEDFYPFLKDNREKIEKILTFRIPYYVGPLARGNSRFAWMTRKSEETITPWNFEEVVDKGASAQSFIERMTNFDKNLPNEKVLPKHSLLYEYFTVYNELTKVKYVTEGMRKPAFLSGEQKKAIVDLLFKTNRKVTVKQLKEDYFKKIECFDSVEISGVEDRFNASLGTYHDLLKIIKDKDFLDNEENEDILEDIVLTLTLFEDREMIEERLKTYAHLFDDKVMKQLKRRRYTGWGRLSRKLINGIRDKQSGKTILDFLKSDGFANRNFMQLIHDDSLTFKEDIQKAQVSGQGDSLHEHIANLAGSPAIKKGILQTVKVVDELVKVMGRHKPENIVIEMARENQTTQKGQKNSRERMKRIEEGIKELGSQILKEHPVENTQLQNEKLYLYYLQNGRDMYVDQELDINRLSDYDVDHIVPQSFLKDDSIDNKVLTRSDKARGKSDNVPSEEVVKKMKNYWRQLLNAKLITQRKFDNLTKAERGGLSELDKAGFIKRQLVETRQITKHVAQILDSRMNTKYDENDKLIREVKVITLKSKLVSDFRKDFQFYKVREINNYHHAHDAYLNAVVGTALIKKYPKLESEFVYGDYKVYDVRKMIAKSEQEIGKATAKYFFYSNIMNFFKTEITLANGEIRKRPLIETNGETGEIVWDKGRDFATVRKVLSMPQVNIVKKTEVQTGGFSKESILPKRNSDKLIARKKDWDPKKYGGFDSPTVAYSVLVVAKVEKGKSKKLKSVKELLGITIMERSSFEKNPIDFLEAKGYKEVKKDLIIKLPKYSLFELENGRKRMLASAGELQKGNELALPSKYVNFLYLASHYEKLKGSPEDNEQKQLFVEQHKHYLDEIIEQISEFSKRVILADANLDKVLSAYNKHRDKPIREQAENIIHLFTLTNLGAPAAFKYFDTTIDRKRYTSTKEVLDATLIHQSITGLYETRIDLSQLGGDGGGGGGSGGGGSGGIPWLMKKPLQLTTLVPLQEYEERLLKQTMLTGSYKEKLQSLFLKYDALWQHWENQVGHRRIKPHHIATGTVNPRPQKQYPINPKAKASIQTVINDLLKQGVLIQQNSIMNTPVYPVPKPDGKWRMVLDYREVNKTIPLIAAQNQHSAGILSSIFRGKYKTTLDLSNGFWAHSITPESYWLTAFTWLGQQYCWTRLPQGFLNSPALFNADVVDLLKEVPNVQVYVDDIYISHDDPREHLEQLEKVFSLLLNAGYVVSLKKSEIAQHEVEFLGFNITKEGRGLTETFKQKLLNITPPRDLKQLQSILGKLNFARNFIPNFSELVKPLYNIIATAPGKYITWTTDNSQQLQNIISMLNSAENLEERNPEVRLIMKVNTSPSAGYIRFYNEFAKRPIMYLNYVYTKAEVKFTNTEKLLTTIHKGLIKALDLGMGQEILVYSPIVSMTKIQKTPLPERKALPIRWITWMSYLEDPRIQFHYDKTLPELQQVPTVTDDIIAKIKHPSEFSMVFYTDGSAIKHPNVNKSHNAGMGIAQVQFKPEFTVINTWSIPLGDHTAQLAEVAAVEFACKKALKIDGPVLIVTDSFYVAESVNKELPYWQSNGFFNNKKKPLKHVSKWKSIADCIQLKPDIIIIHEKGHQPTASTFHTEGNNLADKLATQGSYVVNAGKRTADGSEFEKRTADGSEFESPKKKAKVE

SEQ ID NO: 558 - protein, 2087 aa, synthetic construct
MPAAKRVKLDGGDKKYSIGLDIGTNSVGWAVITDEYKVPSKKFKVLGNTDRHSIKKNLIGALLFDSGETAEATRLKRTARRRYTRRKNRICYLQEIFSNEMAKVDDSFFHRLEESFLVEEDKKHERHPIFGNIVDEVAYHEKYPTIYHLRKKLVDSTDKADLRLIYLALAHMIKFRGHFLIEGDLNPDNSDVDKLFIQLVQTYNQLFEENPINASGVDAKAILSARLSKSRRLENLIAQLPGEKKNGLFGNLIALSLGLTPNFKSNFDLAEDAKLQLSKDTYDDDLDNLLAQIGDQYADLFLAAKNLSDAILLSDILRVNTEITKAPLSASMIKRYDEHHQDLTLLKALVRQQLPEKYKEIFFDQSKNGYAGYIDGGASQEEFYKFIKPILEKMDGTEELLVKLNREDLLRKQRTFDNGSIPHQIHLGELHAILRRQEDFYPFLKDNREKIEKILTFRIPYYVGPLARGNSRFAWMTRKSEETITPWNFEEVVDKGASAQSFIERMTNFDKNLPNEKVLPKHSLLYEYFTVYNELTKVKYVTEGMRKPAFLSGEQKKAIVDLLFKTNRKVTVKQLKEDYFKKIECFDSVEISGVEDRFNASLGTYHDLLKIIKDKDFLDNEENEDILEDIVLTLTLFEDREMIEERLKTYAHLFDDKVMKQLKRRRYTGWGRLSRKLINGIRDKQSGKTILDFLKSDGFANRNFMQLIHDDSLTFKEDIQKAQVSGQGDSLHEHIANLAGSPAIKKGILQTVKVVDELVKVMGRHKPENIVIEMARENQTTQKGQKNSRERMKRIEEGIKELGSQILKEHPVENTQLQNEKLYLYYLQNGRDMYVDQELDINRLSDYDVDHIVPQSFLKDDSIDNKVLTRSDKARGKSDNVPSEEVVKKMKNYWRQLLNAKLITQRKFDNLTKAERGGLSELDKAGFIKRQLVETRQITKHVAQILDSRMNTKYDENDKLIREVKVITLKSKLVSDFRKDFQFYKVREINNYHHAHDAYLNAVVGTALIKKYPKLESEFVYGDYKVYDVRKMIAKSEQEIGKATAKYFFYSNIMNFFKTEITLANGEIRKRPLIETNGETGEIVWDKGRDFATVRKVLSMPQVNIVKKTEVQTGGFSKESILPKRNSDKLIARKKDWDPKKYGGFDSPTVAYSVLVVAKVEKGKSKKLKSVKELLGITIMERSSFEKNPIDFLEAKGYKEVKKDLIIKLPKYSLFELENGRKRMLASAGELQKGNELALPSKYVNFLYLASHYEKLKGSPEDNEQKQLFVEQHKHYLDEIIEQISEFSKRVILADANLDKVLSAYNKHRDKPIREQAENIIHLFTLTNLGAPAAFKYFDTTIDRKRYTSTKEVLDATLIHQSITGLYETRIDLSQLGGDGGEAAAKPAPGSSGGIPWLMKKPLQLTTLVPLQEYEERLLKQTMLTGSYKEKLQSLFLKYDALWQHWENQVGHRRIKPHHIATGTVNPRPQKQYPINPKAKASIQTVINDLLKQGVLIQQNSIMNTPVYPVPKPDGKWRMVLDYREVNKTIPLIAAQNQHSAGILSSIFRGKYKTTLDLSNGFWAHSITPESYWLTAFTWLGQQYCWTRLPQGFLNSPALFNADVVDLLKEVPNVQVYVDDIYISHDDPREHLEQLEKVFSLLLNAGYVVSLKKSEIAQHEVEFLGFNITKEGRGLTETFKQKLLNITPPRDLKQLQSILGKLNFARNFIPNFSELVKPLYNIIATAPGKYITWTTDNSQQLQNIISMLNSAENLEERNPEVRLIMKVNTSPSAGYIRFYNEFAKRPIMYLNYVYTKAEVKFTNTEKLLTTIHKGLIKALDLGMGQEILVYSPIVSMTKIQKTPLPERKALPIRWITWMSYLEDPRIQFHYDKTLPELQQVPTVTDDIIAKIKHPSEFSMVFYTDGSAIKHPNVNKSHNAGMGIAQVQFKPEFTVINTWSIPLGDHTAQLAEVAAVEFACKKALKIDGPVLIVTDSFYVAESVNKELPYWQSNGFFNNKKKPLKHVSKWKSIADCIQLKPDIIIIHEKGHQPTASTFHTEGNNLADKLATQGSYVVNAGKRTADGSEFEKRTADGSEFESPKKKAKVE

SEQ ID NO: 559 - protein, 2087 aa, synthetic construct
MPAAKRVKLDGGDKKYSIGLDIGTNSVGWAVITDEYKVPSKKFKVLGNTDRHSIKKNLIGALLFDSGETAEATRLKRTARRRYTRRKNRICYLQEIFSNEMAKVDDSFFHRLEESFLVEEDKKHERHPIFGNIVDEVAYHEKYPTIYHLRKKLVDSTDKADLRLIYLALAHMIKFRGHFLIEGDLNPDNSDVDKLFIQLVQTYNQLFEENPINASGVDAKAILSARLSKSRRLENLIAQLPGEKKNGLFGNLIALSLGLTPNFKSNFDLAEDAKLQLSKDTYDDDLDNLLAQIGDQYADLFLAAKNLSDAILLSDILRVNTEITKAPLSASMIKRYDEHHQDLTLLKALVRQQLPEKYKEIFFDQSKNGYAGYIDGGASQEEFYKFIKPILEKMDGTEELLVKLNREDLLRKQRTFDNGSIPHQIHLGELHAILRRQEDFYPFLKDNREKIEKILTFRIPYYVGPLARGNSRFAWMTRKSEETITPWNFEEVVDKGASAQSFIERMTNFDKNLPNEKVLPKHSLLYEYFTVYNELTKVKYVTEGMRKPAFLSGEQKKAIVDLLFKTNRKVTVKQLKEDYFKKIECFDSVEISGVEDRFNASLGTYHDLLKIIKDKDFLDNEENEDILEDIVLTLTLFEDREMIEERLKTYAHLFDDKVMKQLKRRRYTGWGRLSRKLINGIRDKQSGKTILDFLKSDGFANRNFMQLIHDDSLTFKEDIQKAQVSGQGDSLHEHIANLAGSPAIKKGILQTVKVVDELVKVMGRHKPENIVIEMARENQTTQKGQKNSRERMKRIEEGIKELGSQILKEHPVENTQLQNEKLYLYYLQNGRDMYVDQELDINRLSDYDVDHIVPQSFLKDDSIDNKVLTRSDKARGKSDNVPSEEVVKKMKNYWRQLLNAKLITQRKFDNLTKAERGGLSELDKAGFIKRQLVETRQITKHVAQILDSRMNTKYDENDKLIREVKVITLKSKLVSDFRKDFQFYKVREINNYHHAHDAYLNAVVGTALIKKYPKLESEFVYGDYKVYDVRKMIAKSEQEIGKATAKYFFYSNIMNFFKTEITLANGEIRKRPLIETNGETGEIVWDKGRDFATVRKVLSMPQVNIVKKTEVQTGGFSKESILPKRNSDKLIARKKDWDPKKYGGFDSPTVAYSVLVVAKVEKGKSKKLKSVKELLGITIMERSSFEKNPIDFLEAKGYKEVKKDLIIKLPKYSLFELENGRKRMLASAGELQKGNELALPSKYVNFLYLASHYEKLKGSPEDNEQKQLFVEQHKHYLDEIIEQISEFSKRVILADANLDKVLSAYNKHRDKPIREQAENIIHLFTLTNLGAPAAFKYFDTTIDRKRYTSTKEVLDATLIHQSITGLYETRIDLSQLGGDGGPAPEAAAKGGGGGIPWLMKKPLQLTTLVPLQEYEERLLKQTMLTGSYKEKLQSLFLKYDALWQHWENQVGHRRIKPHHIATGTVNPRPQKQYPINPKAKASIQTVINDLLKQGVLIQQNSIMNTPVYPVPKPDGKWRMVLDYREVNKTIPLIAAQNQHSAGILSSIFRGKYKTTLDLSNGFWAHSITPESYWLTAFTWLGQQYCWTRLPQGFLNSPALFNADVVDLLKEVPNVQVYVDDIYISHDDPREHLEQLEKVFSLLLNAGYVVSLKKSEIAQHEVEFLGFNITKEGRGLTETFKQKLLNITPPRDLKQLQSILGKLNFARNFIPNFSELVKPLYNIIATAPGKYITWTTDNSQQLQNIISMLNSAENLEERNPEVRLIMKVNTSPSAGYIRFYNEFAKRPIMYLNYVYTKAEVKFTNTEKLLTTIHKGLIKALDLGMGQEILVYSPIVSMTKIQKTPLPERKALPIRWITWMSYLEDPRIQFHYDKTLPELQQVPTVTDDIIAKIKHPSEFSMVFYTDGSAIKHPNVNKSHNAGMGIAQVQFKPEFTVINTWSIPLGDHTAQLAEVAAVEFACKKALKIDGPVLIVTDSFYVAESVNKELPYWQSNGFFNNKKKPLKHVSKWKSIADCIQLKPDIIIIHEKGHQPTASTFHTEGNNLADKLATQGSYVVNAGKRTADGSEFEKRTADGSEFESPKKKAKVE

SEQ ID NO: 560 - protein, 2083 aa, synthetic construct
MPAAKRVKLDGGDKKYSIGLDIGTNSVGWAVITDEYKVPSKKFKVLGNTDRHSIKKNLIGALLFDSGETAEATRLKRTARRRYTRRKNRICYLQEIFSNEMAKVDDSFFHRLEESFLVEEDKKHERHPIFGNIVDEVAYHEKYPTIYHLRKKLVDSTDKADLRLIYLALAHMIKFRGHFLIEGDLNPDNSDVDKLFIQLVQTYNQLFEENPINASGVDAKAILSARLSKSRRLENLIAQLPGEKKNGLFGNLIALSLGLTPNFKSNFDLAEDAKLQLSKDTYDDDLDNLLAQIGDQYADLFLAAKNLSDAILLSDILRVNTEITKAPLSASMIKRYDEHHQDLTLLKALVRQQLPEKYKEIFFDQSKNGYAGYIDGGASQEEFYKFIKPILEKMDGTEELLVKLNREDLLRKQRTFDNGSIPHQIHLGELHAILRRQEDFYPFLKDNREKIEKILTFRIPYYVGPLARGNSRFAWMTRKSEETITPWNFEEVVDKGASAQSFIERMTNFDKNLPNEKVLPKHSLLYEYFTVYNELTKVKYVTEGMRKPAFLSGEQKKAIVDLLFKTNRKVTVKQLKEDYFKKIECFDSVEISGVEDRFNASLGTYHDLLKIIKDKDFLDNEENEDILEDIVLTLTLFEDREMIEERLKTYAHLFDDKVMKQLKRRRYTGWGRLSRKLINGIRDKQSGKTILDFLKSDGFANRNFMQLIHDDSLTFKEDIQKAQVSGQGDSLHEHIANLAGSPAIKKGILQTVKVVDELVKVMGRHKPENIVIEMARENQTTQKGQKNSRERMKRIEEGIKELGSQILKEHPVENTQLQNEKLYLYYLQNGRDMYVDQELDINRLSDYDVDHIVPQSFLKDDSIDNKVLTRSDKARGKSDNVPSEEVVKKMKNYWRQLLNAKLITQRKFDNLTKAERGGLSELDKAGFIKRQLVETRQITKHVAQILDSRMNTKYDENDKLIREVKVITLKSKLVSDFRKDFQFYKVREINNYHHAHDAYLNAVVGTALIKKYPKLESEFVYGDYKVYDVRKMIAKSEQEIGKATAKYFFYSNIMNFFKTEITLANGEIRKRPLIETNGETGEIVWDKGRDFATVRKVLSMPQVNIVKKTEVQTGGFSKESILPKRNSDKLIARKKDWDPKKYGGFDSPTVAYSVLVVAKVEKGKSKKLKSVKELLGITIMERSSFEKNPIDFLEAKGYKEVKKDLIIKLPKYSLFELENGRKRMLASAGELQKGNELALPSKYVNFLYLASHYEKLKGSPEDNEQKQLFVEQHKHYLDEIIEQISEFSKRVILADANLDKVLSAYNKHRDKPIREQAENIIHLFTLTNLGAPAAFKYFDTTIDRKRYTSTKEVLDATLIHQSITGLYETRIDLSQLGGDGGPAPAPAPGGIPWLMKKPLQLTTLVPLQEYEERLLKQTMLTGSYKEKLQSLFLKYDALWQHWENQVGHRRIKPHHIATGTVNPRPQKQYPINPKAKASIQTVINDLLKQGVLIQQNSIMNTPVYPVPKPDGKWRMVLDYREVNKTIPLIAAQNQHSAGILSSIFRGKYKTTLDLSNGFWAHSITPESYWLTAFTWLGQQYCWTRLPQGFLNSPALFNADVVDLLKEVPNVQVYVDDIYISHDDPREHLEQLEKVFSLLLNAGYVVSLKKSEIAQHEVEFLGFNITKEGRGLTETFKQKLLNITPPRDLKQLQSILGKLNFARNFIPNFSELVKPLYNIIATAPGKYITWTTDNSQQLQNIISMLNSAENLEERNPEVRLIMKVNTSPSAGYIRFYNEFAKRPIMYLNYVYTKAEVKFTNTEKLLTTIHKGLIKALDLGMGQEILVYSPIVSMTKIQKTPLPERKALPIRWITWMSYLEDPRIQFHYDKTLPELQQVPTVTDDIIAKIKHPSEFSMVFYTDGSAIKHPNVNKSHNAGMGIAQVQFKPEFTVINTWSIPLGDHTAQLAEVAAVEFACKKALKIDGPVLIVTDSFYVAESVNKELPYWQSNGFFNNKKKPLKHVSKWKSIADCIQLKPDIIIIHEKGHQPTASTFHTEGNNLADKLATQGSYVVNAGKRTADGSEFEKRTADGSEFESPKKKAKVE

SEQ ID NO: 561 - protein, 2087 aa, synthetic construct
MPAAKRVKLDGGDKKYSIGLDIGTNSVGWAVITDEYKVPSKKFKVLGNTDRHSIKKNLIGALLFDSGETAEATRLKRTARRRYTRRKNRICYLQEIFSNEMAKVDDSFFHRLEESFLVEEDKKHERHPIFGNIVDEVAYHEKYPTIYHLRKKLVDSTDKADLRLIYLALAHMIKFRGHFLIEGDLNPDNSDVDKLFIQLVQTYNQLFEENPINASGVDAKAILSARLSKSRRLENLIAQLPGEKKNGLFGNLIALSLGLTPNFKSNFDLAEDAKLQLSKDTYDDDLDNLLAQIGDQYADLFLAAKNLSDAILLSDILRVNTEITKAPLSASMIKRYDEHHQDLTLLKALVRQQLPEKYKEIFFDQSKNGYAGYIDGGASQEEFYKFIKPILEKMDGTEELLVKLNREDLLRKQRTFDNGSIPHQIHLGELHAILRRQEDFYPFLKDNREKIEKILTFRIPYYVGPLARGNSRFAWMTRKSEETITPWNFEEVVDKGASAQSFIERMTNFDKNLPNEKVLPKHSLLYEYFTVYNELTKVKYVTEGMRKPAFLSGEQKKAIVDLLFKTNRKVTVKQLKEDYFKKIECFDSVEISGVEDRFNASLGTYHDLLKIIKDKDFLDNEENEDILEDIVLTLTLFEDREMIEERLKTYAHLFDDKVMKQLKRRRYTGWGRLSRKLINGIRDKQSGKTILDFLKSDGFANRNFMQLIHDDSLTFKEDIQKAQVSGQGDSLHEHIANLAGSPAIKKGILQTVKVVDELVKVMGRHKPENIVIEMARENQTTQKGQKNSRERMKRIEEGIKELGSQILKEHPVENTQLQNEKLYLYYLQNGRDMYVDQELDINRLSDYDVDHIVPQSFLKDDSIDNKVLTRSDKARGKSDNVPSEEVVKKMKNYWRQLLNAKLITQRKFDNLTKAERGGLSELDKAGFIKRQLVETRQITKHVAQILDSRMNTKYDENDKLIREVKVITLKSKLVSDFRKDFQFYKVREINNYHHAHDAYLNAVVGTALIKKYPKLESEFVYGDYKVYDVRKMIAKSEQEIGKATAKYFFYSNIMNFFKTEITLANGEIRKRPLIETNGETGEIVWDKGRDFATVRKVLSMPQVNIVKKTEVQTGGFSKESILPKRNSDKLIARKKDWDPKKYGGFDSPTVAYSVLVVAKVEKGKSKKLKSVKELLGITIMERSSFEKNPIDFLEAKGYKEVKKDLIIKLPKYSLFELENGRKRMLASAGELQKGNELALPSKYVNFLYLASHYEKLKGSPEDNEQKQLFVEQHKHYLDEIIEQISEFSKRVILADANLDKVLSAYNKHRDKPIREQAENIIHLFTLTNLGAPAAFKYFDTTIDRKRYTSTKEVLDATLIHQSITGLYETRIDLSQLGGDGGGGSEAAAKGSSGGIPWLMKKPLQLTTLVPLQEYEERLLKQTMLTGSYKEKLQSLFLKYDALWQHWENQVGHRRIKPHHIATGTVNPRPQKQYPINPKAKASIQTVINDLLKQGVLIQQNSIMNTPVYPVPKPDGKWRMVLDYREVNKTIPLIAAQNQHSAGILSSIFRGKYKTTLDLSNGFWAHSITPESYWLTAFTWLGQQYCWTRLPQGFLNSPALFNADVVDLLKEVPNVQVYVDDIYISHDDPREHLEQLEKVFSLLLNAGYVVSLKKSEIAQHEVEFLGFNITKEGRGLTETFKQKLLNITPPRDLKQLQSILGKLNFARNFIPNFSELVKPLYNIIATAPGKYITWTTDNSQQLQNIISMLNSAENLEERNPEVRLIMKVNTSPSAGYIRFYNEFAKRPIMYLNYVYTKAEVKFTNTEKLLTTIHKGLIKALDLGMGQEILVYSPIVSMTKIQKTPLPERKALPIRWITWMSYLEDPRIQFHYDKTLPELQQVPTVTDDIIAKIKHPSEFSMVFYTDGSAIKHPNVNKSHNAGMGIAQVQFKPEFTVINTWSIPLGDHTAQLAEVAAVEFACKKALKIDGPVLIVTDSFYVAESVNKELPYWQSNGFFNNKKKPLKHVSKWKSIADCIQLKPDIIIIHEKGHQPTASTFHTEGNNLADKLATQGSYVVNAGKRTADGSEFEKRTADGSEFESPKKKAKVE

SEQ ID NO: 562 - protein, 2085 aa, synthetic construct
MPAAKRVKLDGGDKKYSIGLDIGTNSVGWAVITDEYKVPSKKFKVLGNTDRHSIKKNLIGALLFDSGETAEATRLKRTARRRYTRRKNRICYLQEIFSNEMAKVDDSFFHRLEESFLVEEDKKHERHPIFGNIVDEVAYHEKYPTIYHLRKKLVDSTDKADLRLIYLALAHMIKFRGHFLIEGDLNPDNSDVDKLFIQLVQTYNQLFEENPINASGVDAKAILSARLSKSRRLENLIAQLPGEKKNGLFGNLIALSLGLTPNFKSNFDLAEDAKLQLSKDTYDDDLDNLLAQIGDQYADLFLAAKNLSDAILLSDILRVNTEITKAPLSASMIKRYDEHHQDLTLLKALVRQQLPEKYKEIFFDQSKNGYAGYIDGGASQEEFYKFIKPILEKMDGTEELLVKLNREDLLRKQRTFDNGSIPHQIHLGELHAILRRQEDFYPFLKDNREKIEKILTFRIPYYVGPLARGNSRFAWMTRKSEETITPWNFEEVVDKGASAQSFIERMTNFDKNLPNEKVLPKHSLLYEYFTVYNELTKVKYVTEGMRKPAFLSGEQKKAIVDLLFKTNRKVTVKQLKEDYFKKIECFDSVEISGVEDRFNASLGTYHDLLKIIKDKDFLDNEENEDILEDIVLTLTLFEDREMIEERLKTYAHLFDDKVMKQLKRRRYTGWGRLSRKLINGIRDKQSGKTILDFLKSDGFANRNFMQLIHDDSLTFKEDIQKAQVSGQGDSLHEHIANLAGSPAIKKGILQTVKVVDELVKVMGRHKPENIVIEMARENQTTQKGQKNSRERMKRIEEGIKELGSQILKEHPVENTQLQNEKLYLYYLQNGRDMYVDQELDINRLSDYDVDHIVPQSFLKDDSIDNKVLTRSDKARGKSDNVPSEEVVKKMKNYWRQLLNAKLITQRKFDNLTKAERGGLSELDKAGFIKRQLVETRQITKHVAQILDSRMNTKYDENDKLIREVKVITLKSKLVSDFRKDFQFYKVREINNYHHAHDAYLNAVVGTALIKKYPKLESEFVYGDYKVYDVRKMIAKSEQEIGKATAKYFFYSNIMNFFKTEITLANGEIRKRPLIETNGETGEIVWDKGRDFATVRKVLSMPQVNIVKKTEVQTGGFSKESILPKRNSDKLIARKKDWDPKKYGGFDSPTVAYSVLVVAKVEKGKSKKLKSVKELLGITIMERSSFEKNPIDFLEAKGYKEVKKDLIIKLPKYSLFELENGRKRMLASAGELQKGNELALPSKYVNFLYLASHYEKLKGSPEDNEQKQLFVEQHKHYLDEIIEQISEFSKRVILADANLDKVLSAYNKHRDKPIREQAENIIHLFTLTNLGAPAAFKYFDTTIDRKRYTSTKEVLDATLIHQSITGLYETRIDLSQLGGDGGGSSPAPGGGGGIPWLMKKPLQLTTLVPLQEYEERLLKQTMLTGSYKEKLQSLFLKYDALWQHWENQVGHRRIKPHHIATGTVNPRPQKQYPINPKAKASIQTVINDLLKQGVLIQQNSIMNTPVYPVPKPDGKWRMVLDYREVNKTIPLIAAQNQHSAGILSSIFRGKYKTTLDLSNGFWAHSITPESYWLTAFTWLGQQYCWTRLPQGFLNSPALFNADVVDLLKEVPNVQVYVDDIYISHDDPREHLEQLEKVFSLLLNAGYVVSLKKSEIAQHEVEFLGFNITKEGRGLTETFKQKLLNITPPRDLKQLQSILGKLNFARNFIPNFSELVKPLYNIIATAPGKYITWTTDNSQQLQNIISMLNSAENLEERNPEVRLIMKVNTSPSAGYIRFYNEFAKRPIMYLNYVYTKAEVKFTNTEKLLTTIHKGLIKALDLGMGQEILVYSPIVSMTKIQKTPLPERKALPIRWITWMSYLEDPRIQFHYDKTLPELQQVPTVTDDIIAKIKHPSEFSMVFYTDGSAIKHPNVNKSHNAGMGIAQVQFKPEFTVINTWSIPLGDHTAQLAEVAAVEFACKKALKIDGPVLIVTDSFYVAESVNKELPYWQSNGFFNNKKKPLKHVSKWKSIADCIQLKPDIIIIHEKGHQPTASTFHTEGNNLADKLATQGSYVVNAGKRTADGSEFEKRTADGSEFESPKKKAKVE

SEQ ID NO: 563 - protein, 2087 aa, synthetic construct
MPAAKRVKLDGGDKKYSIGLDIGTNSVGWAVITDEYKVPSKKFKVLGNTDRHSIKKNLIGALLFDSGETAEATRLKRTARRRYTRRKNRICYLQEIFSNEMAKVDDSFFHRLEESFLVEEDKKHERHPIFGNIVDEVAYHEKYPTIYHLRKKLVDSTDKADLRLIYLALAHMIKFRGHFLIEGDLNPDNSDVDKLFIQLVQTYNQLFEENPINASGVDAKAILSARLSKSRRLENLIAQLPGEKKNGLFGNLIALSLGLTPNFKSNFDLAEDAKLQLSKDTYDDDLDNLLAQIGDQYADLFLAAKNLSDAILLSDILRVNTEITKAPLSASMIKRYDEHHQDLTLLKALVRQQLPEKYKEIFFDQSKNGYAGYIDGGASQEEFYKFIKPILEKMDGTEELLVKLNREDLLRKQRTFDNGSIPHQIHLGELHAILRRQEDFYPFLKDNREKIEKILTFRIPYYVGPLARGNSRFAWMTRKSEETITPWNFEEVVDKGASAQSFIERMTNFDKNLPNEKVLPKHSLLYEYFTVYNELTKVKYVTEGMRKPAFLSGEQKKAIVDLLFKTNRKVTVKQLKEDYFKKIECFDSVEISGVEDRFNASLGTYHDLLKIIKDKDFLDNEENEDILEDIVLTLTLFEDREMIEERLKTYAHLFDDKVMKQLKRRRYTGWGRLSRKLINGIRDKQSGKTILDFLKSDGFANRNFMQLIHDDSLTFKEDIQKAQVSGQGDSLHEHIANLAGSPAIKKGILQTVKVVDELVKVMGRHKPENIVIEMARENQTTQKGQKNSRERMKRIEEGIKELGSQILKEHPVENTQLQNEKLYLYYLQNGRDMYVDQELDINRLSDYDVDHIVPQSFLKDDSIDNKVLTRSDKARGKSDNVPSEEVVKKMKNYWRQLLNAKLITQRKFDNLTKAERGGLSELDKAGFIKRQLVETRQITKHVAQILDSRMNTKYDENDKLIREVKVITLKSKLVSDFRKDFQFYKVREINNYHHAHDAYLNAVVGTALIKKYPKLESEFVYGDYKVYDVRKMIAKSEQEIGKATAKYFFYSNIMNFFKTEITLANGEIRKRPLIETNGETGEIVWDKGRDFATVRKVLSMPQVNIVKKTEVQTGGFSKESILPKRNSDKLIARKKDWDPKKYGGFDSPTVAYSVLVVAKVEKGKSKKLKSVKELLGITIMERSSFEKNPIDFLEAKGYKEVKKDLIIKLPKYSLFELENGRKRMLASAGELQKGNELALPSKYVNFLYLASHYEKLKGSPEDNEQKQLFVEQHKHYLDEIIEQISEFSKRVILADANLDKVLSAYNKHRDKPIREQAENIIHLFTLTNLGAPAAFKYFDTTIDRKRYTSTKEVLDATLIHQSITGLYETRIDLSQLGGDGGGGSEAAAKGGGGGIPWLMKKPLQLTTLVPLQEYEERLLKQTMLTGSYKEKLQSLFLKYDALWQHWENQVGHRRIKPHHIATGTVNPRPQKQYPINPKAKASIQTVINDLLKQGVLIQQNSIMNTPVYPVPKPDGKWRMVLDYREVNKTIPLIAAQNQHSAGILSSIFRGKYKTTLDLSNGFWAHSITPESYWLTAFTWLGQQYCWTRLPQGFLNSPALFNADVVDLLKEVPNVQVYVDDIYISHDDPREHLEQLEKVFSLLLNAGYVVSLKKSEIAQHEVEFLGFNITKEGRGLTETFKQKLLNITPPRDLKQLQSILGKLNFARNFIPNFSELVKPLYNIIATAPGKYITWTTDNSQQLQNIISMLNSAENLEERNPEVRLIMKVNTSPSAGYIRFYNEFAKRPIMYLNYVYTKAEVKFTNTEKLLTTIHKGLIKALDLGMGQEILVYSPIVSMTKIQKTPLPERKALPIRWITWMSYLEDPRIQFHYDKTLPELQQVPTVTDDIIAKIKHPSEFSMVFYTDGSAIKHPNVNKSHNAGMGIAQVQFKPEFTVINTWSIPLGDHTAQLAEVAAVEFACKKALKIDGPVLIVTDSFYVAESVNKELPYWQSNGFFNNKKKPLKHVSKWKSIADCIQLKPDIIIIHEKGHQPTASTFHTEGNNLADKLATQGSYVVNAGKRTADGSEFEKRTADGSEFESPKKKAKVE

SEQ ID NO: 564 - protein, 2082 aa, synthetic construct
MPAAKRVKLDGGDKKYSIGLDIGTNSVGWAVITDEYKVPSKKFKVLGNTDRHSIKKNLIGALLFDSGETAEATRLKRTARRRYTRRKNRICYLQEIFSNEMAKVDDSFFHRLEESFLVEEDKKHERHPIFGNIVDEVAYHEKYPTIYHLRKKLVDSTDKADLRLIYLALAHMIKFRGHFLIEGDLNPDNSDVDKLFIQLVQTYNQLFEENPINASGVDAKAILSARLSKSRRLENLIAQLPGEKKNGLFGNLIALSLGLTPNFKSNFDLAEDAKLQLSKDTYDDDLDNLLAQIGDQYADLFLAAKNLSDAILLSDILRVNTEITKAPLSASMIKRYDEHHQDLTLLKALVRQQLPEKYKEIFFDQSKNGYAGYIDGGASQEEFYKFIKPILEKMDGTEELLVKLNREDLLRKQRTFDNGSIPHQIHLGELHAILRRQEDFYPFLKDNREKIEKILTFRIPYYVGPLARGNSRFAWMTRKSEETITPWNFEEVVDKGASAQSFIERMTNFDKNLPNEKVLPKHSLLYEYFTVYNELTKVKYVTEGMRKPAFLSGEQKKAIVDLLFKTNRKVTVKQLKEDYFKKIECFDSVEISGVEDRFNASLGTYHDLLKIIKDKDFLDNEENEDILEDIVLTLTLFEDREMIEERLKTYAHLFDDKVMKQLKRRRYTGWGRLSRKLINGIRDKQSGKTILDFLKSDGFANRNFMQLIHDDSLTFKEDIQKAQVSGQGDSLHEHIANLAGSPAIKKGILQTVKVVDELVKVMGRHKPENIVIEMARENQTTQKGQKNSRERMKRIEEGIKELGSQILKEHPVENTQLQNEKLYLYYLQNGRDMYVDQELDINRLSDYDVDHIVPQSFLKDDSIDNKVLTRSDKARGKSDNVPSEEVVKKMKNYWRQLLNAKLITQRKFDNLTKAERGGLSELDKAGFIKRQLVETRQITKHVAQILDSRMNTKYDENDKLIREVKVITLKSKLVSDFRKDFQFYKVREINNYHHAHDAYLNAVVGTALIKKYPKLESEFVYGDYKVYDVRKMIAKSEQEIGKATAKYFFYSNIMNFFKTEITLANGEIRKRPLIETNGETGEIVWDKGRDFATVRKVLSMPQVNIVKKTEVQTGGFSKESILPKRNSDKLIARKKDWDPKKYGGFDSPTVAYSVLVVAKVEKGKSKKLKSVKELLGITIMERSSFEKNPIDFLEAKGYKEVKKDLIIKLPKYSLFELENGRKRMLASAGELQKGNELALPSKYVNFLYLASHYEKLKGSPEDNEQKQLFVEQHKHYLDEIIEQISEFSKRVILADANLDKVLSAYNKHRDKPIREQAENIIHLFTLTNLGAPAAFKYFDTTIDRKRYTSTKEVLDATLIHQSITGLYETRIDLSQLGGDGGGGGGSSGGIPWLMKKPLQLTTLVPLQEYEERLLKQTMLTGSYKEKLQSLFLKYDALWQHWENQVGHRRIKPHHIATGTVNPRPQKQYPINPKAKASIQTVINDLLKQGVLIQQNSIMNTPVYPVPKPDGKWRMVLDYREVNKTIPLIAAQNQHSAGILSSIFRGKYKTTLDLSNGFWAHSITPESYWLTAFTWLGQQYCWTRLPQGFLNSPALFNADVVDLLKEVPNVQVYVDDIYISHDDPREHLEQLEKVFSLLLNAGYVVSLKKSEIAQHEVEFLGFNITKEGRGLTETFKQKLLNITPPRDLKQLQSILGKLNFARNFIPNFSELVKPLYNIIATAPGKYITWTTDNSQQLQNIISMLNSAENLEERNPEVRLIMKVNTSPSAGYIRFYNEFAKRPIMYLNYVYTKAEVKFTNTEKLLTTIHKGLIKALDLGMGQEILVYSPIVSMTKIQKTPLPERKALPIRWITWMSYLEDPRIQFHYDKTLPELQQVPTVTDDIIAKIKHPSEFSMVFYTDGSAIKHPNVNKSHNAGMGIAQVQFKPEFTVINTWSIPLGDHTAQLAEVAAVEFACKKALKIDGPVLIVTDSFYVAESVNKELPYWQSNGFFNNKKKPLKHVSKWKSIADCIQLKPDIIIIHEKGHQPTASTFHTEGNNLADKLATQGSYVVNAGKRTADGSEFEKRTADGSEFESPKKKAKVE

SEQ ID NO: 565 - protein, 2085 aa, synthetic construct
MPAAKRVKLDGGDKKYSIGLDIGTNSVGWAVITDEYKVPSKKFKVLGNTDRHSIKKNLIGALLFDSGETAEATRLKRTARRRYTRRKNRICYLQEIFSNEMAKVDDSFFHRLEESFLVEEDKKHERHPIFGNIVDEVAYHEKYPTIYHLRKKLVDSTDKADLRLIYLALAHMIKFRGHFLIEGDLNPDNSDVDKLFIQLVQTYNQLFEENPINASGVDAKAILSARLSKSRRLENLIAQLPGEKKNGLFGNLIALSLGLTPNFKSNFDLAEDAKLQLSKDTYDDDLDNLLAQIGDQYADLFLAAKNLSDAILLSDILRVNTEITKAPLSASMIKRYDEHHQDLTLLKALVRQQLPEKYKEIFFDQSKNGYAGYIDGGASQEEFYKFIKPILEKMDGTEELLVKLNREDLLRKQRTFDNGSIPHQIHLGELHAILRRQEDFYPFLKDNREKIEKILTFRIPYYVGPLARGNSRFAWMTRKSEETITPWNFEEVVDKGASAQSFIERMTNFDKNLPNEKVLPKHSLLYEYFTVYNELTKVKYVTEGMRKPAFLSGEQKKAIVDLLFKTNRKVTVKQLKEDYFKKIECFDSVEISGVEDRFNASLGTYHDLLKIIKDKDFLDNEENEDILEDIVLTLTLFEDREMIEERLKTYAHLFDDKVMKQLKRRRYTGWGRLSRKLINGIRDKQSGKTILDFLKSDGFANRNFMQLIHDDSLTFKEDIQKAQVSGQGDSLHEHIANLAGSPAIKKGILQTVKVVDELVKVMGRHKPENIVIEMARENQTTQKGQKNSRERMKRIEEGIKELGSQILKEHPVENTQLQNEKLYLYYLQNGRDMYVDQELDINRLSDYDVDHIVPQSFLKDDSIDNKVLTRSDKARGKSDNVPSEEVVKKMKNYWRQLLNAKLITQRKFDNLTKAERGGLSELDKAGFIKRQLVETRQITKHVAQILDSRMNTKYDENDKLIREVKVITLKSKLVSDFRKDFQFYKVREINNYHHAHDAYLNAVVGTALIKKYPKLESEFVYGDYKVYDVRKMIAKSEQEIGKATAKYFFYSNIMNFFKTEITLANGEIRKRPLIETNGETGEIVWDKGRDFATVRKVLSMPQVNIVKKTEVQTGGFSKESILPKRNSDKLIARKKDWDPKKYGGFDSPTVAYSVLVVAKVEKGKSKKLKSVKELLGITIMERSSFEKNPIDFLEAKGYKEVKKDLIIKLPKYSLFELENGRKRMLASAGELQKGNELALPSKYVNFLYLASHYEKLKGSPEDNEQKQLFVEQHKHYLDEIIEQISEFSKRVILADANLDKVLSAYNKHRDKPIREQAENIIHLFTLTNLGAPAAFKYFDTTIDRKRYTSTKEVLDATLIHQSITGLYETRIDLSQLGGDGGGGSGSSGGGGGIPWLMKKPLQLTTLVPLQEYEERLLKQTMLTGSYKEKLQSLFLKYDALWQHWENQVGHRRIKPHHIATGTVNPRPQKQYPINPKAKASIQTVINDLLKQGVLIQQNSIMNTPVYPVPKPDGKWRMVLDYREVNKTIPLIAAQNQHSAGILSSIFRGKYKTTLDLSNGFWAHSITPESYWLTAFTWLGQQYCWTRLPQGFLNSPALFNADVVDLLKEVPNVQVYVDDIYISHDDPREHLEQLEKVFSLLLNAGYVVSLKKSEIAQHEVEFLGFNITKEGRGLTETFKQKLLNITPPRDLKQLQSILGKLNFARNFIPNFSELVKPLYNIIATAPGKYITWTTDNSQQLQNIISMLNSAENLEERNPEVRLIMKVNTSPSAGYIRFYNEFAKRPIMYLNYVYTKAEVKFTNTEKLLTTIHKGLIKALDLGMGQEILVYSPIVSMTKIQKTPLPERKALPIRWITWMSYLEDPRIQFHYDKTLPELQQVPTVTDDIIAKIKHPSEFSMVFYTDGSAIKHPNVNKSHNAGMGIAQVQFKPEFTVINTWSIPLGDHTAQLAEVAAVEFACKKALKIDGPVLIVTDSFYVAESVNKELPYWQSNGFFNNKKKPLKHVSKWKSIADCIQLKPDIIIIHEKGHQPTASTFHTEGNNLADKLATQGSYVVNAGKRTADGSEFEKRTADGSEFESPKKKAKVE

SEQ ID NO: 566 - protein, 2091 aa, synthetic construct
MPAAKRVKLDGGDKKYSIGLDIGTNSVGWAVITDEYKVPSKKFKVLGNTDRHSIKKNLIGALLFDSGETAEATRLKRTARRRYTRRKNRICYLQEIFSNEMAKVDDSFFHRLEESFLVEEDKKHERHPIFGNIVDEVAYHEKYPTIYHLRKKLVDSTDKADLRLIYLALAHMIKFRGHFLIEGDLNPDNSDVDKLFIQLVQTYNQLFEENPINASGVDAKAILSARLSKSRRLENLIAQLPGEKKNGLFGNLIALSLGLTPNFKSNFDLAEDAKLQLSKDTYDDDLDNLLAQIGDQYADLFLAAKNLSDAILLSDILRVNTEITKAPLSASMIKRYDEHHQDLTLLKALVRQQLPEKYKEIFFDQSKNGYAGYIDGGASQEEFYKFIKPILEKMDGTEELLVKLNREDLLRKQRTFDNGSIPHQIHLGELHAILRRQEDFYPFLKDNREKIEKILTFRIPYYVGPLARGNSRFAWMTRKSEETITPWNFEEVVDKGASAQSFIERMTNFDKNLPNEKVLPKHSLLYEYFTVYNELTKVKYVTEGMRKPAFLSGEQKKAIVDLLFKTNRKVTVKQLKEDYFKKIECFDSVEISGVEDRFNASLGTYHDLLKIIKDKDFLDNEENEDILEDIVLTLTLFEDREMIEERLKTYAHLFDDKVMKQLKRRRYTGWGRLSRKLINGIRDKQSGKTILDFLKSDGFANRNFMQLIHDDSLTFKEDIQKAQVSGQGDSLHEHIANLAGSPAIKKGILQTVKVVDELVKVMGRHKPENIVIEMARENQTTQKGQKNSRERMKRIEEGIKELGSQILKEHPVENTQLQNEKLYLYYLQNGRDMYVDQELDINRLSDYDVDHIVPQSFLKDDSIDNKVLTRSDKARGKSDNVPSEEVVKKMKNYWRQLLNAKLITQRKFDNLTKAERGGLSELDKAGFIKRQLVETRQITKHVAQILDSRMNTKYDENDKLIREVKVITLKSKLVSDFRKDFQFYKVREINNYHHAHDAYLNAVVGTALIKKYPKLESEFVYGDYKVYDVRKMIAKSEQEIGKATAKYFFYSNIMNFFKTEITLANGEIRKRPLIETNGETGEIVWDKGRDFATVRKVLSMPQVNIVKKTEVQTGGFSKESILPKRNSDKLIARKKDWDPKKYGGFDSPTVAYSVLVVAKVEKGKSKKLKSVKELLGITIMERSSFEKNPIDFLEAKGYKEVKKDLIIKLPKYSLFELENGRKRMLASAGELQKGNELALPSKYVNFLYLASHYEKLKGSPEDNEQKQLFVEQHKHYLDEIIEQISEFSKRVILADANLDKVLSAYNKHRDKPIREQAENIIHLFTLTNLGAPAAFKYFDTTIDRKRYTSTKEVLDATLIHQSITGLYETRIDLSQLGGDGGGGSGGSGGSGGSGGSGGIPWLMKKPLQLTTLVPLQEYEERLLKQTMLTGSYKEKLQSLFLKYDALWQHWENQVGHRRIKPHHIATGTVNPRPQKQYPINPKAKASIQTVINDLLKQGVLIQQNSIMNTPVYPVPKPDGKWRMVLDYREVNKTIPLIAAQNQHSAGILSSIFRGKYKTTLDLSNGFWAHSITPESYWLTAFTWLGQQYCWTRLPQGFLNSPALFNADVVDLLKEVPNVQVYVDDIYISHDDPREHLEQLEKVFSLLLNAGYVVSLKKSEIAQHEVEFLGFNITKEGRGLTETFKQKLLNITPPRDLKQLQSILGKLNFARNFIPNFSELVKPLYNIIATAPGKYITWTTDNSQQLQNIISMLNSAENLEERNPEVRLIMKVNTSPSAGYIRFYNEFAKRPIMYLNYVYTKAEVKFTNTEKLLTTIHKGLIKALDLGMGQEILVYSPIVSMTKIQKTPLPERKALPIRWITWMSYLEDPRIQFHYDKTLPELQQVPTVTDDIIAKIKHPSEFSMVFYTDGSAIKHPNVNKSHNAGMGIAQVQFKPEFTVINTWSIPLGDHTAQLAEVAAVEFACKKALKIDGPVLIVTDSFYVAESVNKELPYWQSNGFFNNKKKPLKHVSKWKSIADCIQLKPDIIIIHEKGHQPTASTFHTEGNNLADKLATQGSYVVNAGKRTADGSEFEKRTADGSEFESPKKKAKVE

SEQ ID NO: 567 - protein, 2087 aa, synthetic construct
MPAAKRVKLDGGDKKYSIGLDIGTNSVGWAVITDEYKVPSKKFKVLGNTDRHSIKKNLIGALLFDSGETAEATRLKRTARRRYTRRKNRICYLQEIFSNEMAKVDDSFFHRLEESFLVEEDKKHERHPIFGNIVDEVAYHEKYPTIYHLRKKLVDSTDKADLRLIYLALAHMIKFRGHFLIEGDLNPDNSDVDKLFIQLVQTYNQLFEENPINASGVDAKAILSARLSKSRRLENLIAQLPGEKKNGLFGNLIALSLGLTPNFKSNFDLAEDAKLQLSKDTYDDDLDNLLAQIGDQYADLFLAAKNLSDAILLSDILRVNTEITKAPLSASMIKRYDEHHQDLTLLKALVRQQLPEKYKEIFFDQSKNGYAGYIDGGASQEEFYKFIKPILEKMDGTEELLVKLNREDLLRKQRTFDNGSIPHQIHLGELHAILRRQEDFYPFLKDNREKIEKILTFRIPYYVGPLARGNSRFAWMTRKSEETITPWNFEEVVDKGASAQSFIERMTNFDKNLPNEKVLPKHSLLYEYFTVYNELTKVKYVTEGMRKPAFLSGEQKKAIVDLLFKTNRKVTVKQLKEDYFKKIECFDSVEISGVEDRFNASLGTYHDLLKIIKDKDFLDNEENEDILEDIVLTLTLFEDREMIEERLKTYAHLFDDKVMKQLKRRRYTGWGRLSRKLINGIRDKQSGKTILDFLKSDGFANRNFMQLIHDDSLTFKEDIQKAQVSGQGDSLHEHIANLAGSPAIKKGILQTVKVVDELVKVMGRHKPENIVIEMARENQTTQKGQKNSRERMKRIEEGIKELGSQILKEHPVENTQLQNEKLYLYYLQNGRDMYVDQELDINRLSDYDVDHIVPQSFLKDDSIDNKVLTRSDKARGKSDNVPSEEVVKKMKNYWRQLLNAKLITQRKFDNLTKAERGGLSELDKAGFIKRQLVETRQITKHVAQILDSRMNTKYDENDKLIREVKVITLKSKLVSDFRKDFQFYKVREINNYHHAHDAYLNAVVGTALIKKYPKLESEFVYGDYKVYDVRKMIAKSEQEIGKATAKYFFYSNIMNFFKTEITLANGEIRKRPLIETNGETGEIVWDKGRDFATVRKVLSMPQVNIVKKTEVQTGGFSKESILPKRNSDKLIARKKDWDPKKYGGFDSPTVAYSVLVVAKVEKGKSKKLKSVKELLGITIMERSSFEKNPIDFLEAKGYKEVKKDLIIKLPKYSLFELENGRKRMLASAGELQKGNELALPSKYVNFLYLASHYEKLKGSPEDNEQKQLFVEQHKHYLDEIIEQISEFSKRVILADANLDKVLSAYNKHRDKPIREQAENIIHLFTLTNLGAPAAFKYFDTTIDRKRYTSTKEVLDATLIHQSITGLYETRIDLSQLGGDGGGSSEAAAKGGGGGIPWLMKKPLQLTTLVPLQEYEERLLKQTMLTGSYKEKLQSLFLKYDALWQHWENQVGHRRIKPHHIATGTVNPRPQKQYPINPKAKASIQTVINDLLKQGVLIQQNSIMNTPVYPVPKPDGKWRMVLDYREVNKTIPLIAAQNQHSAGILSSIFRGKYKTTLDLSNGFWAHSITPESYWLTAFTWLGQQYCWTRLPQGFLNSPALFNADVVDLLKEVPNVQVYVDDIYISHDDPREHLEQLEKVFSLLLNAGYVVSLKKSEIAQHEVEFLGFNITKEGRGLTETFKQKLLNITPPRDLKQLQSILGKLNFARNFIPNFSELVKPLYNIIATAPGKYITWTTDNSQQLQNIISMLNSAENLEERNPEVRLIMKVNTSPSAGYIRFYNEFAKRPIMYLNYVYTKAEVKFTNTEKLLTTIHKGLIKALDLGMGQEILVYSPIVSMTKIQKTPLPERKALPIRWITWMSYLEDPRIQFHYDKTLPELQQVPTVTDDIIAKIKHPSEFSMVFYTDGSAIKHPNVNKSHNAGMGIAQVQFKPEFTVINTWSIPLGDHTAQLAEVAAVEFACKKALKIDGPVLIVTDSFYVAESVNKELPYWQSNGFFNNKKKPLKHVSKWKSIADCIQLKPDIIIIHEKGHQPTASTFHTEGNNLADKLATQGSYVVNAGKRTADGSEFEKRTADGSEFESPKKKAKVE

SEQ ID NO: 568 - protein, 2085 aa, synthetic construct
MPAAKRVKLDGGDKKYSIGLDIGTNSVGWAVITDEYKVPSKKFKVLGNTDRHSIKKNLIGALLFDSGETAEATRLKRTARRRYTRRKNRICYLQEIFSNEMAKVDDSFFHRLEESFLVEEDKKHERHPIFGNIVDEVAYHEKYPTIYHLRKKLVDSTDKADLRLIYLALAHMIKFRGHFLIEGDLNPDNSDVDKLFIQLVQTYNQLFEENPINASGVDAKAILSARLSKSRRLENLIAQLPGEKKNGLFGNLIALSLGLTPNFKSNFDLAEDAKLQLSKDTYDDDLDNLLAQIGDQYADLFLAAKNLSDAILLSDILRVNTEITKAPLSASMIKRYDEHHQDLTLLKALVRQQLPEKYKEIFFDQSKNGYAGYIDGGASQEEFYKFIKPILEKMDGTEELLVKLNREDLLRKQRTFDNGSIPHQIHLGELHAILRRQEDFYPFLKDNREKIEKILTFRIPYYVGPLARGNSRFAWMTRKSEETITPWNFEEVVDKGASAQSFIERMTNFDKNLPNEKVLPKHSLLYEYFTVYNELTKVKYVTEGMRKPAFLSGEQKKAIVDLLFKTNRKVTVKQLKEDYFKKIECFDSVEISGVEDRFNASLGTYHDLLKIIKDKDFLDNEENEDILEDIVLTLTLFEDREMIEERLKTYAHLFDDKVMKQLKRRRYTGWGRLSRKLINGIRDKQSGKTILDFLKSDGFANRNFMQLIHDDSLTFKEDIQKAQVSGQGDSLHEHIANLAGSPAIKKGILQTVKVVDELVKVMGRHKPENIVIEMARENQTTQKGQKNSRERMKRIEEGIKELGSQILKEHPVENTQLQNEKLYLYYLQNGRDMYVDQELDINRLSDYDVDHIVPQSFLKDDSIDNKVLTRSDKARGKSDNVPSEEVVKKMKNYWRQLLNAKLITQRKFDNLTKAERGGLSELDKAGFIKRQLVETRQITKHVAQILDSRMNTKYDENDKLIREVKVITLKSKLVSDFRKDFQFYKVREINNYHHAHDAYLNAVVGTALIKKYPKLESEFVYGDYKVYDVRKMIAKSEQEIGKATAKYFFYSNIMNFFKTEITLANGEIRKRPLIETNGETGEIVWDKGRDFATVRKVLSMPQVNIVKKTEVQTGGFSKESILPKRNSDKLIARKKDWDPKKYGGFDSPTVAYSVLVVAKVEKGKSKKLKSVKELLGITIMERSSFEKNPIDFLEAKGYKEVKKDLIIKLPKYSLFELENGRKRMLASAGELQKGNELALPSKYVNFLYLASHYEKLKGSPEDNEQKQLFVEQHKHYLDEIIEQISEFSKRVILADANLDKVLSAYNKHRDKPIREQAENIIHLFTLTNLGAPAAFKYFDTTIDRKRYTSTKEVLDATLIHQSITGLYETRIDLSQLGGDGGGGGPAPGSSGGIPWLMKKPLQLTTLVPLQEYEERLLKQTMLTGSYKEKLQSLFLKYDALWQHWENQVGHRRIKPHHIATGTVNPRPQKQYPINPKAKASIQTVINDLLKQGVLIQQNSIMNTPVYPVPKPDGKWRMVLDYREVNKTIPLIAAQNQHSAGILSSIFRGKYKTTLDLSNGFWAHSITPESYWLTAFTWLGQQYCWTRLPQGFLNSPALFNADVVDLLKEVPNVQVYVDDIYISHDDPREHLEQLEKVFSLLLNAGYVVSLKKSEIAQHEVEFLGFNITKEGRGLTETFKQKLLNITPPRDLKQLQSILGKLNFARNFIPNFSELVKPLYNIIATAPGKYITWTTDNSQQLQNIISMLNSAENLEERNPEVRLIMKVNTSPSAGYIRFYNEFAKRPIMYLNYVYTKAEVKFTNTEKLLTTIHKGLIKALDLGMGQEILVYSPIVSMTKIQKTPLPERKALPIRWITWMSYLEDPRIQFHYDKTLPELQQVPTVTDDIIAKIKHPSEFSMVFYTDGSAIKHPNVNKSHNAGMGIAQVQFKPEFTVINTWSIPLGDHTAQLAEVAAVEFACKKALKIDGPVLIVTDSFYVAESVNKELPYWQSNGFFNNKKKPLKHVSKWKSIADCIQLKPDIIIIHEKGHQPTASTFHTEGNNLADKLATQGSYVVNAGKRTADGSEFEKRTADGSEFESPKKKAKVE

SEQ ID NO: 569 - protein, 2087 aa, synthetic construct
MPAAKRVKLDGGDKKYSIGLDIGTNSVGWAVITDEYKVPSKKFKVLGNTDRHSIKKNLIGALLFDSGETAEATRLKRTARRRYTRRKNRICYLQEIFSNEMAKVDDSFFHRLEESFLVEEDKKHERHPIFGNIVDEVAYHEKYPTIYHLRKKLVDSTDKADLRLIYLALAHMIKFRGHFLIEGDLNPDNSDVDKLFIQLVQTYNQLFEENPINASGVDAKAILSARLSKSRRLENLIAQLPGEKKNGLFGNLIALSLGLTPNFKSNFDLAEDAKLQLSKDTYDDDLDNLLAQIGDQYADLFLAAKNLSDAILLSDILRVNTEITKAPLSASMIKRYDEHHQDLTLLKALVRQQLPEKYKEIFFDQSKNGYAGYIDGGASQEEFYKFIKPILEKMDGTEELLVKLNREDLLRKQRTFDNGSIPHQIHLGELHAILRRQEDFYPFLKDNREKIEKILTFRIPYYVGPLARGNSRFAWMTRKSEETITPWNFEEVVDKGASAQSFIERMTNFDKNLPNEKVLPKHSLLYEYFTVYNELTKVKYVTEGMRKPAFLSGEQKKAIVDLLFKTNRKVTVKQLKEDYFKKIECFDSVEISGVEDRFNASLGTYHDLLKIIKDKDFLDNEENEDILEDIVLTLTLFEDREMIEERLKTYAHLFDDKVMKQLKRRRYTGWGRLSRKLINGIRDKQSGKTILDFLKSDGFANRNFMQLIHDDSLTFKEDIQKAQVSGQGDSLHEHIANLAGSPAIKKGILQTVKVVDELVKVMGRHKPENIVIEMARENQTTQKGQKNSRERMKRIEEGIKELGSQILKEHPVENTQLQNEKLYLYYLQNGRDMYVDQELDINRLSDYDVDHIVPQSFLKDDSIDNKVLTRSDKARGKSDNVPSEEVVKKMKNYWRQLLNAKLITQRKFDNLTKAERGGLSELDKAGFIKRQLVETRQITKHVAQILDSRMNTKYDENDKLIREVKVITLKSKLVSDFRKDFQFYKVREINNYHHAHDAYLNAVVGTALIKKYPKLESEFVYGDYKVYDVRKMIAKSEQEIGKATAKYFFYSNIMNFFKTEITLANGEIRKRPLIETNGETGEIVWDKGRDFATVRKVLSMPQVNIVKKTEVQTGGFSKESILPKRNSDKLIARKKDWDPKKYGGFDSPTVAYSVLVVAKVEKGKSKKLKSVKELLGITIMERSSFEKNPIDFLEAKGYKEVKKDLIIKLPKYSLFELENGRKRMLASAGELQKGNELALPSKYVNFLYLASHYEKLKGSPEDNEQKQLFVEQHKHYLDEIIEQISEFSKRVILADANLDKVLSAYNKHRDKPIREQAENIIHLFTLTNLGAPAAFKYFDTTIDRKRYTSTKEVLDATLIHQSITGLYETRIDLSQLGGDGGPAPAPAPAPAPGGIPWLMKKPLQLTTLVPLQEYEERLLKQTMLTGSYKEKLQSLFLKYDALWQHWENQVGHRRIKPHHIATGTVNPRPQKQYPINPKAKASIQTVINDLLKQGVLIQQNSIMNTPVYPVPKPDGKWRMVLDYREVNKTIPLIAAQNQHSAGILSSIFRGKYKTTLDLSNGFWAHSITPESYWLTAFTWLGQQYCWTRLPQGFLNSPALFNADVVDLLKEVPNVQVYVDDIYISHDDPREHLEQLEKVFSLLLNAGYVVSLKKSEIAQHEVEFLGFNITKEGRGLTETFKQKLLNITPPRDLKQLQSILGKLNFARNFIPNFSELVKPLYNIIATAPGKYITWTTDNSQQLQNIISMLNSAENLEERNPEVRLIMKVNTSPSAGYIRFYNEFAKRPIMYLNYVYTKAEVKFTNTEKLLTTIHKGLIKALDLGMGQEILVYSPIVSMTKIQKTPLPERKALPIRWITWMSYLEDPRIQFHYDKTLPELQQVPTVTDDIIAKIKHPSEFSMVFYTDGSAIKHPNVNKSHNAGMGIAQVQFKPEFTVINTWSIPLGDHTAQLAEVAAVEFACKKALKIDGPVLIVTDSFYVAESVNKELPYWQSNGFFNNKKKPLKHVSKWKSIADCIQLKPDIIIIHEKGHQPTASTFHTEGNNLADKLATQGSYVVNAGKRTADGSEFEKRTADGSEFESPKKKAKVE

SEQ ID NO: 570 - protein, 2101 aa, synthetic construct
MPAAKRVKLDGGDKKYSIGLDIGTNSVGWAVITDEYKVPSKKFKVLGNTDRHSIKKNLIGALLFDSGETAEATRLKRTARRRYTRRKNRICYLQEIFSNEMAKVDDSFFHRLEESFLVEEDKKHERHPIFGNIVDEVAYHEKYPTIYHLRKKLVDSTDKADLRLIYLALAHMIKFRGHFLIEGDLNPDNSDVDKLFIQLVQTYNQLFEENPINASGVDAKAILSARLSKSRRLENLIAQLPGEKKNGLFGNLIALSLGLTPNFKSNFDLAEDAKLQLSKDTYDDDLDNLLAQIGDQYADLFLAAKNLSDAILLSDILRVNTEITKAPLSASMIKRYDEHHQDLTLLKALVRQQLPEKYKEIFFDQSKNGYAGYIDGGASQEEFYKFIKPILEKMDGTEELLVKLNREDLLRKQRTFDNGSIPHQIHLGELHAILRRQEDFYPFLKDNREKIEKILTFRIPYYVGPLARGNSRFAWMTRKSEETITPWNFEEVVDKGASAQSFIERMTNFDKNLPNEKVLPKHSLLYEYFTVYNELTKVKYVTEGMRKPAFLSGEQKKAIVDLLFKTNRKVTVKQLKEDYFKKIECFDSVEISGVEDRFNASLGTYHDLLKIIKDKDFLDNEENEDILEDIVLTLTLFEDREMIEERLKTYAHLFDDKVMKQLKRRRYTGWGRLSRKLINGIRDKQSGKTILDFLKSDGFANRNFMQLIHDDSLTFKEDIQKAQVSGQGDSLHEHIANLAGSPAIKKGILQTVKVVDELVKVMGRHKPENIVIEMARENQTTQKGQKNSRERMKRIEEGIKELGSQILKEHPVENTQLQNEKLYLYYLQNGRDMYVDQELDINRLSDYDVDHIVPQSFLKDDSIDNKVLTRSDKARGKSDNVPSEEVVKKMKNYWRQLLNAKLITQRKFDNLTKAERGGLSELDKAGFIKRQLVETRQITKHVAQILDSRMNTKYDENDKLIREVKVITLKSKLVSDFRKDFQFYKVREINNYHHAHDAYLNAVVGTALIKKYPKLESEFVYGDYKVYDVRKMIAKSEQEIGKATAKYFFYSNIMNFFKTEITLANGEIRKRPLIETNGETGEIVWDKGRDFATVRKVLSMPQVNIVKKTEVQTGGFSKESILPKRNSDKLIARKKDWDPKKYGGFDSPTVAYSVLVVAKVEKGKSKKLKSVKELLGITIMERSSFEKNPIDFLEAKGYKEVKKDLIIKLPKYSLFELENGRKRMLASAGELQKGNELALPSKYVNFLYLASHYEKLKGSPEDNEQKQLFVEQHKHYLDEIIEQISEFSKRVILADANLDKVLSAYNKHRDKPIREQAENIIHLFTLTNLGAPAAFKYFDTTIDRKRYTSTKEVLDATLIHQSITGLYETRIDLSQLGGDGGEAAAKEAAAKEAAAKEAAAKEAAAKGGIPWLMKKPLQLTTLVPLQEYEERLLKQTMLTGSYKEKLQSLFLKYDALWQHWENQVGHRRIKPHHIATGTVNPRPQKQYPINPKAKASIQTVINDLLKQGVLIQQNSIMNTPVYPVPKPDGKWRMVLDYREVNKTIPLIAAQNQHSAGILSSIFRGKYKTTLDLSNGFWAHSITPESYWLTAFTWLGQQYCWTRLPQGFLNSPALFNADVVDLLKEVPNVQVYVDDIYISHDDPREHLEQLEKVFSLLLNAGYVVSLKKSEIAQHEVEFLGFNITKEGRGLTETFKQKLLNITPPRDLKQLQSILGKLNFARNFIPNFSELVKPLYNIIATAPGKYITWTTDNSQQLQNIISMLNSAENLEERNPEVRLIMKVNTSPSAGYIRFYNEFAKRPIMYLNYVYTKAEVKFTNTEKLLTTIHKGLIKALDLGMGQEILVYSPIVSMTKIQKTPLPERKALPIRWITWMSYLEDPRIQFHYDKTLPELQQVPTVTDDIIAKIKHPSEFSMVFYTDGSAIKHPNVNKSHNAGMGIAQVQFKPEFTVINTWSIPLGDHTAQLAEVAAVEFACKKALKIDGPVLIVTDSFYVAESVNKELPYWQSNGFFNNKKKPLKHVSKWKSIADCIQLKPDIIIIHEKGHQPTASTFHTEGNNLADKLATQGSYVVNAGKRTADGSEFEKRTADGSEFESPKKKAKVE

SEQ ID NO: 571 - protein, 2087 aa, synthetic construct
MPAAKRVKLDGGDKKYSIGLDIGTNSVGWAVITDEYKVPSKKFKVLGNTDRHSIKKNLIGALLFDSGETAEATRLKRTARRRYTRRKNRICYLQEIFSNEMAKVDDSFFHRLEESFLVEEDKKHERHPIFGNIVDEVAYHEKYPTIYHLRKKLVDSTDKADLRLIYLALAHMIKFRGHFLIEGDLNPDNSDVDKLFIQLVQTYNQLFEENPINASGVDAKAILSARLSKSRRLENLIAQLPGEKKNGLFGNLIALSLGLTPNFKSNFDLAEDAKLQLSKDTYDDDLDNLLAQIGDQYADLFLAAKNLSDAILLSDILRVNTEITKAPLSASMIKRYDEHHQDLTLLKALVRQQLPEKYKEIFFDQSKNGYAGYIDGGASQEEFYKFIKPILEKMDGTEELLVKLNREDLLRKQRTFDNGSIPHQIHLGELHAILRRQEDFYPFLKDNREKIEKILTFRIPYYVGPLARGNSRFAWMTRKSEETITPWNFEEVVDKGASAQSFIERMTNFDKNLPNEKVLPKHSLLYEYFTVYNELTKVKYVTEGMRKPAFLSGEQKKAIVDLLFKTNRKVTVKQLKEDYFKKIECFDSVEISGVEDRFNASLGTYHDLLKIIKDKDFLDNEENEDILEDIVLTLTLFEDREMIEERLKTYAHLFDDKVMKQLKRRRYTGWGRLSRKLINGIRDKQSGKTILDFLKSDGFANRNFMQLIHDDSLTFKEDIQKAQVSGQGDSLHEHIANLAGSPAIKKGILQTVKVVDELVKVMGRHKPENIVIEMARENQTTQKGQKNSRERMKRIEEGIKELGSQILKEHPVENTQLQNEKLYLYYLQNGRDMYVDQELDINRLSDYDVDHIVPQSFLKDDSIDNKVLTRSDKARGKSDNVPSEEVVKKMKNYWRQLLNAKLITQRKFDNLTKAERGGLSELDKAGFIKRQLVETRQITKHVAQILDSRMNTKYDENDKLIREVKVITLKSKLVSDFRKDFQFYKVREINNYHHAHDAYLNAVVGTALIKKYPKLESEFVYGDYKVYDVRKMIAKSEQEIGKATAKYFFYSNIMNFFKTEITLANGEIRKRPLIETNGETGEIVWDKGRDFATVRKVLSMPQVNIVKKTEVQTGGFSKESILPKRNSDKLIARKKDWDPKKYGGFDSPTVAYSVLVVAKVEKGKSKKLKSVKELLGITIMERSSFEKNPIDFLEAKGYKEVKKDLIIKLPKYSLFELENGRKRMLASAGELQKGNELALPSKYVNFLYLASHYEKLKGSPEDNEQKQLFVEQHKHYLDEIIEQISEFSKRVILADANLDKVLSAYNKHRDKPIREQAENIIHLFTLTNLGAPAAFKYFDTTIDRKRYTSTKEVLDATLIHQSITGLYETRIDLSQLGGDGGGGSGSSEAAAKGGIPWLMKKPLQLTTLVPLQEYEERLLKQTMLTGSYKEKLQSLFLKYDALWQHWENQVGHRRIKPHHIATGTVNPRPQKQYPINPKAKASIQTVINDLLKQGVLIQQNSIMNTPVYPVPKPDGKWRMVLDYREVNKTIPLIAAQNQHSAGILSSIFRGKYKTTLDLSNGFWAHSITPESYWLTAFTWLGQQYCWTRLPQGFLNSPALFNADVVDLLKEVPNVQVYVDDIYISHDDPREHLEQLEKVFSLLLNAGYVVSLKKSEIAQHEVEFLGFNITKEGRGLTETFKQKLLNITPPRDLKQLQSILGKLNFARNFIPNFSELVKPLYNIIATAPGKYITWTTDNSQQLQNIISMLNSAENLEERNPEVRLIMKVNTSPSAGYIRFYNEFAKRPIMYLNYVYTKAEVKFTNTEKLLTTIHKGLIKALDLGMGQEILVYSPIVSMTKIQKTPLPERKALPIRWITWMSYLEDPRIQFHYDKTLPELQQVPTVTDDIIAKIKHPSEFSMVFYTDGSAIKHPNVNKSHNAGMGIAQVQFKPEFTVINTWSIPLGDHTAQLAEVAAVEFACKKALKIDGPVLIVTDSFYVAESVNKELPYWQSNGFFNNKKKPLKHVSKWKSIADCIQLKPDIIIIHEKGHQPTASTFHTEGNNLADKLATQGSYVVNAGKRTADGSEFEKRTADGSEFESPKKKAKVE

SEQ ID NO: 572 - protein, 2087 aa, synthetic construct
MPAAKRVKLDGGDKKYSIGLDIGTNSVGWAVITDEYKVPSKKFKVLGNTDRHSIKKNLIGALLFDSGETAEATRLKRTARRRYTRRKNRICYLQEIFSNEMAKVDDSFFHRLEESFLVEEDKKHERHPIFGNIVDEVAYHEKYPTIYHLRKKLVDSTDKADLRLIYLALAHMIKFRGHFLIEGDLNPDNSDVDKLFIQLVQTYNQLFEENPINASGVDAKAILSARLSKSRRLENLIAQLPGEKKNGLFGNLIALSLGLTPNFKSNFDLAEDAKLQLSKDTYDDDLDNLLAQIGDQYADLFLAAKNLSDAILLSDILRVNTEITKAPLSASMIKRYDEHHQDLTLLKALVRQQLPEKYKEIFFDQSKNGYAGYIDGGASQEEFYKFIKPILEKMDGTEELLVKLNREDLLRKQRTFDNGSIPHQIHLGELHAILRRQEDFYPFLKDNREKIEKILTFRIPYYVGPLARGNSRFAWMTRKSEETITPWNFEEVVDKGASAQSFIERMTNFDKNLPNEKVLPKHSLLYEYFTVYNELTKVKYVTEGMRKPAFLSGEQKKAIVDLLFKTNRKVTVKQLKEDYFKKIECFDSVEISGVEDRFNASLGTYHDLLKIIKDKDFLDNEENEDILEDIVLTLTLFEDREMIEERLKTYAHLFDDKVMKQLKRRRYTGWGRLSRKLINGIRDKQSGKTILDFLKSDGFANRNFMQLIHDDSLTFKEDIQKAQVSGQGDSLHEHIANLAGSPAIKKGILQTVKVVDELVKVMGRHKPENIVIEMARENQTTQKGQKNSRERMKRIEEGIKELGSQILKEHPVENTQLQNEKLYLYYLQNGRDMYVDQELDINRLSDYDVDHIVPQSFLKDDSIDNKVLTRSDKARGKSDNVPSEEVVKKMKNYWRQLLNAKLITQRKFDNLTKAERGGLSELDKAGFIKRQLVETRQITKHVAQILDSRMNTKYDENDKLIREVKVITLKSKLVSDFRKDFQFYKVREINNYHHAHDAYLNAVVGTALIKKYPKLESEFVYGDYKVYDVRKMIAKSEQEIGKATAKYFFYSNIMNFFKTEITLANGEIRKRPLIETNGETGEIVWDKGRDFATVRKVLSMPQVNIVKKTEVQTGGFSKESILPKRNSDKLIARKKDWDPKKYGGFDSPTVAYSVLVVAKVEKGKSKKLKSVKELLGITIMERSSFEKNPIDFLEAKGYKEVKKDLIIKLPKYSLFELENGRKRMLASAGELQKGNELALPSKYVNFLYLASHYEKLKGSPEDNEQKQLFVEQHKHYLDEIIEQISEFSKRVILADANLDKVLSAYNKHRDKPIREQAENIIHLFTLTNLGAPAAFKYFDTTIDRKRYTSTKEVLDATLIHQSITGLYETRIDLSQLGGDGGEAAAKGGSPAPGGIPWLMKKPLQLTTLVPLQEYEERLLKQTMLTGSYKEKLQSLFLKYDALWQHWENQVGHRRIKPHHIATGTVNPRPQKQYPINPKAKASIQTVINDLLKQGVLIQQNSIMNTPVYPVPKPDGKWRMVLDYREVNKTIPLIAAQNQHSAGILSSIFRGKYKTTLDLSNGFWAHSITPESYWLTAFTWLGQQYCWTRLPQGFLNSPALFNADVVDLLKEVPNVQVYVDDIYISHDDPREHLEQLEKVFSLLLNAGYVVSLKKSEIAQHEVEFLGFNITKEGRGLTETFKQKLLNITPPRDLKQLQSILGKLNFARNFIPNFSELVKPLYNIIATAPGKYITWTTDNSQQLQNIISMLNSAENLEERNPEVRLIMKVNTSPSAGYIRFYNEFAKRPIMYLNYVYTKAEVKFTNTEKLLTTIHKGLIKALDLGMGQEILVYSPIVSMTKIQKTPLPERKALPIRWITWMSYLEDPRIQFHYDKTLPELQQVPTVTDDIIAKIKHPSEFSMVFYTDGSAIKHPNVNKSHNAGMGIAQVQFKPEFTVINTWSIPLGDHTAQLAEVAAVEFACKKALKIDGPVLIVTDSFYVAESVNKELPYWQSNGFFNNKKKPLKHVSKWKSIADCIQLKPDIIIIHEKGHQPTASTFHTEGNNLADKLATQGSYVVNAGKRTADGSEFEKRTADGSEFESPKKKAKVE

SEQ ID NO: 573 - protein, 2085 aa, synthetic construct
MPAAKRVKLDGGDKKYSIGLDIGTNSVGWAVITDEYKVPSKKFKVLGNTDRHSIKKNLIGALLFDSGETAEATRLKRTARRRYTRRKNRICYLQEIFSNEMAKVDDSFFHRLEESFLVEEDKKHERHPIFGNIVDEVAYHEKYPTIYHLRKKLVDSTDKADLRLIYLALAHMIKFRGHFLIEGDLNPDNSDVDKLFIQLVQTYNQLFEENPINASGVDAKAILSARLSKSRRLENLIAQLPGEKKNGLFGNLIALSLGLTPNFKSNFDLAEDAKLQLSKDTYDDDLDNLLAQIGDQYADLFLAAKNLSDAILLSDILRVNTEITKAPLSASMIKRYDEHHQDLTLLKALVRQQLPEKYKEIFFDQSKNGYAGYIDGGASQEEFYKFIKPILEKMDGTEELLVKLNREDLLRKQRTFDNGSIPHQIHLGELHAILRRQEDFYPFLKDNREKIEKILTFRIPYYVGPLARGNSRFAWMTRKSEETITPWNFEEVVDKGASAQSFIERMTNFDKNLPNEKVLPKHSLLYEYFTVYNELTKVKYVTEGMRKPAFLSGEQKKAIVDLLFKTNRKVTVKQLKEDYFKKIECFDSVEISGVEDRFNASLGTYHDLLKIIKDKDFLDNEENEDILEDIVLTLTLFEDREMIEERLKTYAHLFDDKVMKQLKRRRYTGWGRLSRKLINGIRDKQSGKTILDFLKSDGFANRNFMQLIHDDSLTFKEDIQKAQVSGQGDSLHEHIANLAGSPAIKKGILQTVKVVDELVKVMGRHKPENIVIEMARENQTTQKGQKNSRERMKRIEEGIKELGSQILKEHPVENTQLQNEKLYLYYLQNGRDMYVDQELDINRLSDYDVDHIVPQSFLKDDSIDNKVLTRSDKARGKSDNVPSEEVVKKMKNYWRQLLNAKLITQRKFDNLTKAERGGLSELDKAGFIKRQLVETRQITKHVAQILDSRMNTKYDENDKLIREVKVITLKSKLVSDFRKDFQFYKVREINNYHHAHDAYLNAVVGTALIKKYPKLESEFVYGDYKVYDVRKMIAKSEQEIGKATAKYFFYSNIMNFFKTEITLANGEIRKRPLIETNGETGEIVWDKGRDFATVRKVLSMPQVNIVKKTEVQTGGFSKESILPKRNSDKLIARKKDWDPKKYGGFDSPTVAYSVLVVAKVEKGKSKKLKSVKELLGITIMERSSFEKNPIDFLEAKGYKEVKKDLIIKLPKYSLFELENGRKRMLASAGELQKGNELALPSKYVNFLYLASHYEKLKGSPEDNEQKQLFVEQHKHYLDEIIEQISEFSKRVILADANLDKVLSAYNKHRDKPIREQAENIIHLFTLTNLGAPAAFKYFDTTIDRKRYTSTKEVLDATLIHQSITGLYETRIDLSQLGGDGGGGSPAPGGGGGIPWLMKKPLQLTTLVPLQEYEERLLKQTMLTGSYKEKLQSLFLKYDALWQHWENQVGHRRIKPHHIATGTVNPRPQKQYPINPKAKASIQTVINDLLKQGVLIQQNSIMNTPVYPVPKPDGKWRMVLDYREVNKTIPLIAAQNQHSAGILSSIFRGKYKTTLDLSNGFWAHSITPESYWLTAFTWLGQQYCWTRLPQGFLNSPALFNADVVDLLKEVPNVQVYVDDIYISHDDPREHLEQLEKVFSLLLNAGYVVSLKKSEIAQHEVEFLGFNITKEGRGLTETFKQKLLNITPPRDLKQLQSILGKLNFARNFIPNFSELVKPLYNIIATAPGKYITWTTDNSQQLQNIISMLNSAENLEERNPEVRLIMKVNTSPSAGYIRFYNEFAKRPIMYLNYVYTKAEVKFTNTEKLLTTIHKGLIKALDLGMGQEILVYSPIVSMTKIQKTPLPERKALPIRWITWMSYLEDPRIQFHYDKTLPELQQVPTVTDDIIAKIKHPSEFSMVFYTDGSAIKHPNVNKSHNAGMGIAQVQFKPEFTVINTWSIPLGDHTAQLAEVAAVEFACKKALKIDGPVLIVTDSFYVAESVNKELPYWQSNGFFNNKKKPLKHVSKWKSIADCIQLKPDIIIIHEKGHQPTASTFHTEGNNLADKLATQGSYVVNAGKRTADGSEFEKRTADGSEFESPKKKAKVE

SEQ ID NO: 574 - protein, 2091 aa, synthetic construct
MPAAKRVKLDGGDKKYSIGLDIGTNSVGWAVITDEYKVPSKKFKVLGNTDRHSIKKNLIGALLFDSGETAEATRLKRTARRRYTRRKNRICYLQEIFSNEMAKVDDSFFHRLEESFLVEEDKKHERHPIFGNIVDEVAYHEKYPTIYHLRKKLVDSTDKADLRLIYLALAHMIKFRGHFLIEGDLNPDNSDVDKLFIQLVQTYNQLFEENPINASGVDAKAILSARLSKSRRLENLIAQLPGEKKNGLFGNLIALSLGLTPNFKSNFDLAEDAKLQLSKDTYDDDLDNLLAQIGDQYADLFLAAKNLSDAILLSDILRVNTEITKAPLSASMIKRYDEHHQDLTLLKALVRQQLPEKYKEIFFDQSKNGYAGYIDGGASQEEFYKFIKPILEKMDGTEELLVKLNREDLLRKQRTFDNGSIPHQIHLGELHAILRRQEDFYPFLKDNREKIEKILTFRIPYYVGPLARGNSRFAWMTRKSEETITPWNFEEVVDKGASAQSFIERMTNFDKNLPNEKVLPKHSLLYEYFTVYNELTKVKYVTEGMRKPAFLSGEQKKAIVDLLFKTNRKVTVKQLKEDYFKKIECFDSVEISGVEDRFNASLGTYHDLLKIIKDKDFLDNEENEDILEDIVLTLTLFEDREMIEERLKTYAHLFDDKVMKQLKRRRYTGWGRLSRKLINGIRDKQSGKTILDFLKSDGFANRNFMQLIHDDSLTFKEDIQKAQVSGQGDSLHEHIANLAGSPAIKKGILQTVKVVDELVKVMGRHKPENIVIEMARENQTTQKGQKNSRERMKRIEEGIKELGSQILKEHPVENTQLQNEKLYLYYLQNGRDMYVDQELDINRLSDYDVDHIVPQSFLKDDSIDNKVLTRSDKARGKSDNVPSEEVVKKMKNYWRQLLNAKLITQRKFDNLTKAERGGLSELDKAGFIKRQLVETRQITKHVAQILDSRMNTKYDENDKLIREVKVITLKSKLVSDFRKDFQFYKVREINNYHHAHDAYLNAVVGTALIKKYPKLESEFVYGDYKVYDVRKMIAKSEQEIGKATAKYFFYSNIMNFFKTEITLANGEIRKRPLIETNGETGEIVWDKGRDFATVRKVLSMPQVNIVKKTEVQTGGFSKESILPKRNSDKLIARKKDWDPKKYGGFDSPTVAYSVLVVAKVEKGKSKKLKSVKELLGITIMERSSFEKNPIDFLEAKGYKEVKKDLIIKLPKYSLFELENGRKRMLASAGELQKGNELALPSKYVNFLYLASHYEKLKGSPEDNEQKQLFVEQHKHYLDEIIEQISEFSKRVILADANLDKVLSAYNKHRDKPIREQAENIIHLFTLTNLGAPAAFKYFDTTIDRKRYTSTKEVLDATLIHQSITGLYETRIDLSQLGGDGGEAAAKGGGGSEAAAKGGIPWLMKKPLQLTTLVPLQEYEERLLKQTMLTGSYKEKLQSLFLKYDALWQHWENQVGHRRIKPHHIATGTVNPRPQKQYPINPKAKASIQTVINDLLKQGVLIQQNSIMNTPVYPVPKPDGKWRMVLDYREVNKTIPLIAAQNQHSAGILSSIFRGKYKTTLDLSNGFWAHSITPESYWLTAFTWLGQQYCWTRLPQGFLNSPALFNADVVDLLKEVPNVQVYVDDIYISHDDPREHLEQLEKVFSLLLNAGYVVSLKKSEIAQHEVEFLGFNITKEGRGLTETFKQKLLNITPPRDLKQLQSILGKLNFARNFIPNFSELVKPLYNIIATAPGKYITWTTDNSQQLQNIISMLNSAENLEERNPEVRLIMKVNTSPSAGYIRFYNEFAKRPIMYLNYVYTKAEVKFTNTEKLLTTIHKGLIKALDLGMGQEILVYSPIVSMTKIQKTPLPERKALPIRWITWMSYLEDPRIQFHYDKTLPELQQVPTVTDDIIAKIKHPSEFSMVFYTDGSAIKHPNVNKSHNAGMGIAQVQFKPEFTVINTWSIPLGDHTAQLAEVAAVEFACKKALKIDGPVLIVTDSFYVAESVNKELPYWQSNGFFNNKKKPLKHVSKWKSIADCIQLKPDIIIIHEKGHQPTASTFHTEGNNLADKLATQGSYVVNAGKRTADGSEFEKRTADGSEFESPKKKAKVE

SEQ ID NO: 575 - protein, 2082 aa, synthetic construct
MPAAKRVKLDGGDKKYSIGLDIGTNSVGWAVITDEYKVPSKKFKVLGNTDRHSIKKNLIGALLFDSGETAEATRLKRTARRRYTRRKNRICYLQEIFSNEMAKVDDSFFHRLEESFLVEEDKKHERHPIFGNIVDEVAYHEKYPTIYHLRKKLVDSTDKADLRLIYLALAHMIKFRGHFLIEGDLNPDNSDVDKLFIQLVQTYNQLFEENPINASGVDAKAILSARLSKSRRLENLIAQLPGEKKNGLFGNLIALSLGLTPNFKSNFDLAEDAKLQLSKDTYDDDLDNLLAQIGDQYADLFLAAKNLSDAILLSDILRVNTEITKAPLSASMIKRYDEHHQDLTLLKALVRQQLPEKYKEIFFDQSKNGYAGYIDGGASQEEFYKFIKPILEKMDGTEELLVKLNREDLLRKQRTFDNGSIPHQIHLGELHAILRRQEDFYPFLKDNREKIEKILTFRIPYYVGPLARGNSRFAWMTRKSEETITPWNFEEVVDKGASAQSFIERMTNFDKNLPNEKVLPKHSLLYEYFTVYNELTKVKYVTEGMRKPAFLSGEQKKAIVDLLFKTNRKVTVKQLKEDYFKKIECFDSVEISGVEDRFNASLGTYHDLLKIIKDKDFLDNEENEDILEDIVLTLTLFEDREMIEERLKTYAHLFDDKVMKQLKRRRYTGWGRLSRKLINGIRDKQSGKTILDFLKSDGFANRNFMQLIHDDSLTFKEDIQKAQVSGQGDSLHEHIANLAGSPAIKKGILQTVKVVDELVKVMGRHKPENIVIEMARENQTTQKGQKNSRERMKRIEEGIKELGSQILKEHPVENTQLQNEKLYLYYLQNGRDMYVDQELDINRLSDYDVDHIVPQSFLKDDSIDNKVLTRSDKARGKSDNVPSEEVVKKMKNYWRQLLNAKLITQRKFDNLTKAERGGLSELDKAGFIKRQLVETRQITKHVAQILDSRMNTKYDENDKLIREVKVITLKSKLVSDFRKDFQFYKVREINNYHHAHDAYLNAVVGTALIKKYPKLESEFVYGDYKVYDVRKMIAKSEQEIGKATAKYFFYSNIMNFFKTEITLANGEIRKRPLIETNGETGEIVWDKGRDFATVRKVLSMPQVNIVKKTEVQTGGFSKESILPKRNSDKLIARKKDWDPKKYGGFDSPTVAYSVLVVAKVEKGKSKKLKSVKELLGITIMERSSFEKNPIDFLEAKGYKEVKKDLIIKLPKYSLFELENGRKRMLASAGELQKGNELALPSKYVNFLYLASHYEKLKGSPEDNEQKQLFVEQHKHYLDEIIEQISEFSKRVILADANLDKVLSAYNKHRDKPIREQAENIIHLFTLTNLGAPAAFKYFDTTIDRKRYTSTKEVLDATLIHQSITGLYETRIDLSQLGGDGGGSSPAPGGIPWLMKKPLQLTTLVPLQEYEERLLKQTMLTGSYKEKLQSLFLKYDALWQHWENQVGHRRIKPHHIATGTVNPRPQKQYPINPKAKASIQTVINDLLKQGVLIQQNSIMNTPVYPVPKPDGKWRMVLDYREVNKTIPLIAAQNQHSAGILSSIFRGKYKTTLDLSNGFWAHSITPESYWLTAFTWLGQQYCWTRLPQGFLNSPALFNADVVDLLKEVPNVQVYVDDIYISHDDPREHLEQLEKVFSLLLNAGYVVSLKKSEIAQHEVEFLGFNITKEGRGLTETFKQKLLNITPPRDLKQLQSILGKLNFARNFIPNFSELVKPLYNIIATAPGKYITWTTDNSQQLQNIISMLNSAENLEERNPEVRLIMKVNTSPSAGYIRFYNEFAKRPIMYLNYVYTKAEVKFTNTEKLLTTIHKGLIKALDLGMGQEILVYSPIVSMTKIQKTPLPERKALPIRWITWMSYLEDPRIQFHYDKTLPELQQVPTVTDDIIAKIKHPSEFSMVFYTDGSAIKHPNVNKSHNAGMGIAQVQFKPEFTVINTWSIPLGDHTAQLAEVAAVEFACKKALKIDGPVLIVTDSFYVAESVNKELPYWQSNGFFNNKKKPLKHVSKWKSIADCIQLKPDIIIIHEKGHQPTASTFHTEGNNLADKLATQGSYVVNAGKRTADGSEFEKRTADGSEFESPKKKAKVE

SEQ ID NO: 576 - protein, 2087 aa, synthetic construct
MPAAKRVKLDGGDKKYSIGLDIGTNSVGWAVITDEYKVPSKKFKVLGNTDRHSIKKNLIGALLFDSGETAEATRLKRTARRRYTRRKNRICYLQEIFSNEMAKVDDSFFHRLEESFLVEEDKKHERHPIFGNIVDEVAYHEKYPTIYHLRKKLVDSTDKADLRLIYLALAHMIKFRGHFLIEGDLNPDNSDVDKLFIQLVQTYNQLFEENPINASGVDAKAILSARLSKSRRLENLIAQLPGEKKNGLFGNLIALSLGLTPNFKSNFDLAEDAKLQLSKDTYDDDLDNLLAQIGDQYADLFLAAKNLSDAILLSDILRVNTEITKAPLSASMIKRYDEHHQDLTLLKALVRQQLPEKYKEIFFDQSKNGYAGYIDGGASQEEFYKFIKPILEKMDGTEELLVKLNREDLLRKQRTFDNGSIPHQIHLGELHAILRRQEDFYPFLKDNREKIEKILTFRIPYYVGPLARGNSRFAWMTRKSEETITPWNFEEVVDKGASAQSFIERMTNFDKNLPNEKVLPKHSLLYEYFTVYNELTKVKYVTEGMRKPAFLSGEQKKAIVDLLFKTNRKVTVKQLKEDYFKKIECFDSVEISGVEDRFNASLGTYHDLLKIIKDKDFLDNEENEDILEDIVLTLTLFEDREMIEERLKTYAHLFDDKVMKQLKRRRYTGWGRLSRKLINGIRDKQSGKTILDFLKSDGFANRNFMQLIHDDSLTFKEDIQKAQVSGQGDSLHEHIANLAGSPAIKKGILQTVKVVDELVKVMGRHKPENIVIEMARENQTTQKGQKNSRERMKRIEEGIKELGSQILKEHPVENTQLQNEKLYLYYLQNGRDMYVDQELDINRLSDYDVDHIVPQSFLKDDSIDNKVLTRSDKARGKSDNVPSEEVVKKMKNYWRQLLNAKLITQRKFDNLTKAERGGLSELDKAGFIKRQLVETRQITKHVAQILDSRMNTKYDENDKLIREVKVITLKSKLVSDFRKDFQFYKVREINNYHHAHDAYLNAVVGTALIKKYPKLESEFVYGDYKVYDVRKMIAKSEQEIGKATAKYFFYSNIMNFFKTEITLANGEIRKRPLIETNGETGEIVWDKGRDFATVRKVLSMPQVNIVKKTEVQTGGFSKESILPKRNSDKLIARKKDWDPKKYGGFDSPTVAYSVLVVAKVEKGKSKKLKSVKELLGITIMERSSFEKNPIDFLEAKGYKEVKKDLIIKLPKYSLFELENGRKRMLASAGELQKGNELALPSKYVNFLYLASHYEKLKGSPEDNEQKQLFVEQHKHYLDEIIEQISEFSKRVILADANLDKVLSAYNKHRDKPIREQAENIIHLFTLTNLGAPAAFKYFDTTIDRKRYTSTKEVLDATLIHQSITGLYETRIDLSQLGGDGGPAPGGSEAAAKGGIPWLMKKPLQLTTLVPLQEYEERLLKQTMLTGSYKEKLQSLFLKYDALWQHWENQVGHRRIKPHHIATGTVNPRPQKQYPINPKAKASIQTVINDLLKQGVLIQQNSIMNTPVYPVPKPDGKWRMVLDYREVNKTIPLIAAQNQHSAGILSSIFRGKYKTTLDLSNGFWAHSITPESYWLTAFTWLGQQYCWTRLPQGFLNSPALFNADVVDLLKEVPNVQVYVDDIYISHDDPREHLEQLEKVFSLLLNAGYVVSLKKSEIAQHEVEFLGFNITKEGRGLTETFKQKLLNITPPRDLKQLQSILGKLNFARNFIPNFSELVKPLYNIIATAPGKYITWTTDNSQQLQNIISMLNSAENLEERNPEVRLIMKVNTSPSAGYIRFYNEFAKRPIMYLNYVYTKAEVKFTNTEKLLTTIHKGLIKALDLGMGQEILVYSPIVSMTKIQKTPLPERKALPIRWITWMSYLEDPRIQFHYDKTLPELQQVPTVTDDIIAKIKHPSEFSMVFYTDGSAIKHPNVNKSHNAGMGIAQVQFKPEFTVINTWSIPLGDHTAQLAEVAAVEFACKKALKIDGPVLIVTDSFYVAESVNKELPYWQSNGFFNNKKKPLKHVSKWKSIADCIQLKPDIIIIHEKGHQPTASTFHTEGNNLADKLATQGSYVVNAGKRTADGSEFEKRTADGSEFESPKKKAKVE

SEQ ID NO: 577 - protein, 2087 aa, synthetic construct
MPAAKRVKLDGGDKKYSIGLDIGTNSVGWAVITDEYKVPSKKFKVLGNTDRHSIKKNLIGALLFDSGETAEATRLKRTARRRYTRRKNRICYLQEIFSNEMAKVDDSFFHRLEESFLVEEDKKHERHPIFGNIVDEVAYHEKYPTIYHLRKKLVDSTDKADLRLIYLALAHMIKFRGHFLIEGDLNPDNSDVDKLFIQLVQTYNQLFEENPINASGVDAKAILSARLSKSRRLENLIAQLPGEKKNGLFGNLIALSLGLTPNFKSNFDLAEDAKLQLSKDTYDDDLDNLLAQIGDQYADLFLAAKNLSDAILLSDILRVNTEITKAPLSASMIKRYDEHHQDLTLLKALVRQQLPEKYKEIFFDQSKNGYAGYIDGGASQEEFYKFIKPILEKMDGTEELLVKLNREDLLRKQRTFDNGSIPHQIHLGELHAILRRQEDFYPFLKDNREKIEKILTFRIPYYVGPLARGNSRFAWMTRKSEETITPWNFEEVVDKGASAQSFIERMTNFDKNLPNEKVLPKHSLLYEYFTVYNELTKVKYVTEGMRKPAFLSGEQKKAIVDLLFKTNRKVTVKQLKEDYFKKIECFDSVEISGVEDRFNASLGTYHDLLKIIKDKDFLDNEENEDILEDIVLTLTLFEDREMIEERLKTYAHLFDDKVMKQLKRRRYTGWGRLSRKLINGIRDKQSGKTILDFLKSDGFANRNFMQLIHDDSLTFKEDIQKAQVSGQGDSLHEHIANLAGSPAIKKGILQTVKVVDELVKVMGRHKPENIVIEMARENQTTQKGQKNSRERMKRIEEGIKELGSQILKEHPVENTQLQNEKLYLYYLQNGRDMYVDQELDINRLSDYDVDHIVPQSFLKDDSIDNKVLTRSDKARGKSDNVPSEEVVKKMKNYWRQLLNAKLITQRKFDNLTKAERGGLSELDKAGFIKRQLVETRQITKHVAQILDSRMNTKYDENDKLIREVKVITLKSKLVSDFRKDFQFYKVREINNYHHAHDAYLNAVVGTALIKKYPKLESEFVYGDYKVYDVRKMIAKSEQEIGKATAKYFFYSNIMNFFKTEITLANGEIRKRPLIETNGETGEIVWDKGRDFATVRKVLSMPQVNIVKKTEVQTGGFSKESILPKRNSDKLIARKKDWDPKKYGGFDSPTVAYSVLVVAKVEKGKSKKLKSVKELLGITIMERSSFEKNPIDFLEAKGYKEVKKDLIIKLPKYSLFELENGRKRMLASAGELQKGNELALPSKYVNFLYLASHYEKLKGSPEDNEQKQLFVEQHKHYLDEIIEQISEFSKRVILADANLDKVLSAYNKHRDKPIREQAENIIHLFTLTNLGAPAAFKYFDTTIDRKRYTSTKEVLDATLIHQSITGLYETRIDLSQLGGDGGGGGEAAAKGGSGGIPWLMKKPLQLTTLVPLQEYEERLLKQTMLTGSYKEKLQSLFLKYDALWQHWENQVGHRRIKPHHIATGTVNPRPQKQYPINPKAKASIQTVINDLLKQGVLIQQNSIMNTPVYPVPKPDGKWRMVLDYREVNKTIPLIAAQNQHSAGILSSIFRGKYKTTLDLSNGFWAHSITPESYWLTAFTWLGQQYCWTRLPQGFLNSPALFNADVVDLLKEVPNVQVYVDDIYISHDDPREHLEQLEKVFSLLLNAGYVVSLKKSEIAQHEVEFLGFNITKEGRGLTETFKQKLLNITPPRDLKQLQSILGKLNFARNFIPNFSELVKPLYNIIATAPGKYITWTTDNSQQLQNIISMLNSAENLEERNPEVRLIMKVNTSPSAGYIRFYNEFAKRPIMYLNYVYTKAEVKFTNTEKLLTTIHKGLIKALDLGMGQEILVYSPIVSMTKIQKTPLPERKALPIRWITWMSYLEDPRIQFHYDKTLPELQQVPTVTDDIIAKIKHPSEFSMVFYTDGSAIKHPNVNKSHNAGMGIAQVQFKPEFTVINTWSIPLGDHTAQLAEVAAVEFACKKALKIDGPVLIVTDSFYVAESVNKELPYWQSNGFFNNKKKPLKHVSKWKSIADCIQLKPDIIIIHEKGHQPTASTFHTEGNNLADKLATQGSYVVNAGKRTADGSEFEKRTADGSEFESPKKKAKVE

SEQ ID NO: 578 - protein, 2084 aa, synthetic construct
MPAAKRVKLDGGDKKYSIGLDIGTNSVGWAVITDEYKVPSKKFKVLGNTDRHSIKKNLIGALLFDSGETAEATRLKRTARRRYTRRKNRICYLQEIFSNEMAKVDDSFFHRLEESFLVEEDKKHERHPIFGNIVDEVAYHEKYPTIYHLRKKLVDSTDKADLRLIYLALAHMIKFRGHFLIEGDLNPDNSDVDKLFIQLVQTYNQLFEENPINASGVDAKAILSARLSKSRRLENLIAQLPGEKKNGLFGNLIALSLGLTPNFKSNFDLAEDAKLQLSKDTYDDDLDNLLAQIGDQYADLFLAAKNLSDAILLSDILRVNTEITKAPLSASMIKRYDEHHQDLTLLKALVRQQLPEKYKEIFFDQSKNGYAGYIDGGASQEEFYKFIKPILEKMDGTEELLVKLNREDLLRKQRTFDNGSIPHQIHLGELHAILRRQEDFYPFLKDNREKIEKILTFRIPYYVGPLARGNSRFAWMTRKSEETITPWNFEEVVDKGASAQSFIERMTNFDKNLPNEKVLPKHSLLYEYFTVYNELTKVKYVTEGMRKPAFLSGEQKKAIVDLLFKTNRKVTVKQLKEDYFKKIECFDSVEISGVEDRFNASLGTYHDLLKIIKDKDFLDNEENEDILEDIVLTLTLFEDREMIEERLKTYAHLFDDKVMKQLKRRRYTGWGRLSRKLINGIRDKQSGKTILDFLKSDGFANRNFMQLIHDDSLTFKEDIQKAQVSGQGDSLHEHIANLAGSPAIKKGILQTVKVVDELVKVMGRHKPENIVIEMARENQTTQKGQKNSRERMKRIEEGIKELGSQILKEHPVENTQLQNEKLYLYYLQNGRDMYVDQELDINRLSDYDVDHIVPQSFLKDDSIDNKVLTRSDKARGKSDNVPSEEVVKKMKNYWRQLLNAKLITQRKFDNLTKAERGGLSELDKAGFIKRQLVETRQITKHVAQILDSRMNTKYDENDKLIREVKVITLKSKLVSDFRKDFQFYKVREINNYHHAHDAYLNAVVGTALIKKYPKLESEFVYGDYKVYDVRKMIAKSEQEIGKATAKYFFYSNIMNFFKTEITLANGEIRKRPLIETNGETGEIVWDKGRDFATVRKVLSMPQVNIVKKTEVQTGGFSKESILPKRNSDKLIARKKDWDPKKYGGFDSPTVAYSVLVVAKVEKGKSKKLKSVKELLGITIMERSSFEKNPIDFLEAKGYKEVKKDLIIKLPKYSLFELENGRKRMLASAGELQKGNELALPSKYVNFLYLASHYEKLKGSPEDNEQKQLFVEQHKHYLDEIIEQISEFSKRVILADANLDKVLSAYNKHRDKPIREQAENIIHLFTLTNLGAPAAFKYFDTTIDRKRYTSTKEVLDATLIHQSITGLYETRIDLSQLGGDGGGGGGGGGGGGIPWLMKKPLQLTTLVPLQEYEERLLKQTMLTGSYKEKLQSLFLKYDALWQHWENQVGHRRIKPHHIATGTVNPRPQKQYPINPKAKASIQTVINDLLKQGVLIQQNSIMNTPVYPVPKPDGKWRMVLDYREVNKTIPLIAAQNQHSAGILSSIFRGKYKTTLDLSNGFWAHSITPESYWLTAFTWLGQQYCWTRLPQGFLNSPALFNADVVDLLKEVPNVQVYVDDIYISHDDPREHLEQLEKVFSLLLNAGYVVSLKKSEIAQHEVEFLGFNITKEGRGLTETFKQKLLNITPPRDLKQLQSILGKLNFARNFIPNFSELVKPLYNIIATAPGKYITWTTDNSQQLQNIISMLNSAENLEERNPEVRLIMKVNTSPSAGYIRFYNEFAKRPIMYLNYVYTKAEVKFTNTEKLLTTIHKGLIKALDLGMGQEILVYSPIVSMTKIQKTPLPERKALPIRWITWMSYLEDPRIQFHYDKTLPELQQVPTVTDDIIAKIKHPSEFSMVFYTDGSAIKHPNVNKSHNAGMGIAQVQFKPEFTVINTWSIPLGDHTAQLAEVAAVEFACKKALKIDGPVLIVTDSFYVAESVNKELPYWQSNGFFNNKKKPLKHVSKWKSIADCIQLKPDIIIIHEKGHQPTASTFHTEGNNLADKLATQGSYVVNAGKRTADGSEFEKRTADGSEFESPKKKAKVE

SEQ ID NO: 579 - protein, 2087 aa, synthetic construct
MPAAKRVKLDGGDKKYSIGLDIGTNSVGWAVITDEYKVPSKKFKVLGNTDRHSIKKNLIGALLFDSGETAEATRLKRTARRRYTRRKNRICYLQEIFSNEMAKVDDSFFHRLEESFLVEEDKKHERHPIFGNIVDEVAYHEKYPTIYHLRKKLVDSTDKADLRLIYLALAHMIKFRGHFLIEGDLNPDNSDVDKLFIQLVQTYNQLFEENPINASGVDAKAILSARLSKSRRLENLIAQLPGEKKNGLFGNLIALSLGLTPNFKSNFDLAEDAKLQLSKDTYDDDLDNLLAQIGDQYADLFLAAKNLSDAILLSDILRVNTEITKAPLSASMIKRYDEHHQDLTLLKALVRQQLPEKYKEIFFDQSKNGYAGYIDGGASQEEFYKFIKPILEKMDGTEELLVKLNREDLLRKQRTFDNGSIPHQIHLGELHAILRRQEDFYPFLKDNREKIEKILTFRIPYYVGPLARGNSRFAWMTRKSEETITPWNFEEVVDKGASAQSFIERMTNFDKNLPNEKVLPKHSLLYEYFTVYNELTKVKYVTEGMRKPAFLSGEQKKAIVDLLFKTNRKVTVKQLKEDYFKKIECFDSVEISGVEDRFNASLGTYHDLLKIIKDKDFLDNEENEDILEDIVLTLTLFEDREMIEERLKTYAHLFDDKVMKQLKRRRYTGWGRLSRKLINGIRDKQSGKTILDFLKSDGFANRNFMQLIHDDSLTFKEDIQKAQVSGQGDSLHEHIANLAGSPAIKKGILQTVKVVDELVKVMGRHKPENIVIEMARENQTTQKGQKNSRERMKRIEEGIKELGSQILKEHPVENTQLQNEKLYLYYLQNGRDMYVDQELDINRLSDYDVDHIVPQSFLKDDSIDNKVLTRSDKARGKSDNVPSEEVVKKMKNYWRQLLNAKLITQRKFDNLTKAERGGLSELDKAGFIKRQLVETRQITKHVAQILDSRMNTKYDENDKLIREVKVITLKSKLVSDFRKDFQFYKVREINNYHHAHDAYLNAVVGTALIKKYPKLESEFVYGDYKVYDVRKMIAKSEQEIGKATAKYFFYSNIMNFFKTEITLANGEIRKRPLIETNGETGEIVWDKGRDFATVRKVLSMPQVNIVKKTEVQTGGFSKESILPKRNSDKLIARKKDWDPKKYGGFDSPTVAYSVLVVAKVEKGKSKKLKSVKELLGITIMERSSFEKNPIDFLEAKGYKEVKKDLIIKLPKYSLFELENGRKRMLASAGELQKGNELALPSKYVNFLYLASHYEKLKGSPEDNEQKQLFVEQHKHYLDEIIEQISEFSKRVILADANLDKVLSAYNKHRDKPIREQAENIIHLFTLTNLGAPAAFKYFDTTIDRKRYTSTKEVLDATLIHQSITGLYETRIDLSQLGGDGGPAPGSSEAAAKGGIPWLMKKPLQLTTLVPLQEYEERLLKQTMLTGSYKEKLQSLFLKYDALWQHWENQVGHRRIKPHHIATGTVNPRPQKQYPINPKAKASIQTVINDLLKQGVLIQQNSIMNTPVYPVPKPDGKWRMVLDYREVNKTIPLIAAQNQHSAGILSSIFRGKYKTTLDLSNGFWAHSITPESYWLTAFTWLGQQYCWTRLPQGFLNSPALFNADVVDLLKEVPNVQVYVDDIYISHDDPREHLEQLEKVFSLLLNAGYVVSLKKSEIAQHEVEFLGFNITKEGRGLTETFKQKLLNITPPRDLKQLQSILGKLNFARNFIPNFSELVKPLYNIIATAPGKYITWTTDNSQQLQNIISMLNSAENLEERNPEVRLIMKVNTSPSAGYIRFYNEFAKRPIMYLNYVYTKAEVKFTNTEKLLTTIHKGLIKALDLGMGQEILVYSPIVSMTKIQKTPLPERKALPIRWITWMSYLEDPRIQFHYDKTLPELQQVPTVTDDIIAKIKHPSEFSMVFYTDGSAIKHPNVNKSHNAGMGIAQVQFKPEFTVINTWSIPLGDHTAQLAEVAAVEFACKKALKIDGPVLIVTDSFYVAESVNKELPYWQSNGFFNNKKKPLKHVSKWKSIADCIQLKPDIIIIHEKGHQPTASTFHTEGNNLADKLATQGSYVVNAGKRTADGSEFEKRTADGSEFESPKKKAKVE

SEQ ID NO: 580 - protein, 2087 aa, synthetic construct
MPAAKRVKLDGGDKKYSIGLDIGTNSVGWAVITDEYKVPSKKFKVLGNTDRHSIKKNLIGALLFDSGETAEATRLKRTARRRYTRRKNRICYLQEIFSNEMAKVDDSFFHRLEESFLVEEDKKHERHPIFGNIVDEVAYHEKYPTIYHLRKKLVDSTDKADLRLIYLALAHMIKFRGHFLIEGDLNPDNSDVDKLFIQLVQTYNQLFEENPINASGVDAKAILSARLSKSRRLENLIAQLPGEKKNGLFGNLIALSLGLTPNFKSNFDLAEDAKLQLSKDTYDDDLDNLLAQIGDQYADLFLAAKNLSDAILLSDILRVNTEITKAPLSASMIKRYDEHHQDLTLLKALVRQQLPEKYKEIFFDQSKNGYAGYIDGGASQEEFYKFIKPILEKMDGTEELLVKLNREDLLRKQRTFDNGSIPHQIHLGELHAILRRQEDFYPFLKDNREKIEKILTFRIPYYVGPLARGNSRFAWMTRKSEETITPWNFEEVVDKGASAQSFIERMTNFDKNLPNEKVLPKHSLLYEYFTVYNELTKVKYVTEGMRKPAFLSGEQKKAIVDLLFKTNRKVTVKQLKEDYFKKIECFDSVEISGVEDRFNASLGTYHDLLKIIKDKDFLDNEENEDILEDIVLTLTLFEDREMIEERLKTYAHLFDDKVMKQLKRRRYTGWGRLSRKLINGIRDKQSGKTILDFLKSDGFANRNFMQLIHDDSLTFKEDIQKAQVSGQGDSLHEHIANLAGSPAIKKGILQTVKVVDELVKVMGRHKPENIVIEMARENQTTQKGQKNSRERMKRIEEGIKELGSQILKEHPVENTQLQNEKLYLYYLQNGRDMYVDQELDINRLSDYDVDHIVPQSFLKDDSIDNKVLTRSDKARGKSDNVPSEEVVKKMKNYWRQLLNAKLITQRKFDNLTKAERGGLSELDKAGFIKRQLVETRQITKHVAQILDSRMNTKYDENDKLIREVKVITLKSKLVSDFRKDFQFYKVREINNYHHAHDAYLNAVVGTALIKKYPKLESEFVYGDYKVYDVRKMIAKSEQEIGKATAKYFFYSNIMNFFKTEITLANGEIRKRPLIETNGETGEIVWDKGRDFATVRKVLSMPQVNIVKKTEVQTGGFSKESILPKRNSDKLIARKKDWDPKKYGGFDSPTVAYSVLVVAKVEKGKSKKLKSVKELLGITIMERSSFEKNPIDFLEAKGYKEVKKDLIIKLPKYSLFELENGRKRMLASAGELQKGNELALPSKYVNFLYLASHYEKLKGSPEDNEQKQLFVEQHKHYLDEIIEQISEFSKRVILADANLDKVLSAYNKHRDKPIREQAENIIHLFTLTNLGAPAAFKYFDTTIDRKRYTSTKEVLDATLIHQSITGLYETRIDLSQLGGDGGGGSEAAAKPAPGGIPWLMKKPLQLTTLVPLQEYEERLLKQTMLTGSYKEKLQSLFLKYDALWQHWENQVGHRRIKPHHIATGTVNPRPQKQYPINPKAKASIQTVINDLLKQGVLIQQNSIMNTPVYPVPKPDGKWRMVLDYREVNKTIPLIAAQNQHSAGILSSIFRGKYKTTLDLSNGFWAHSITPESYWLTAFTWLGQQYCWTRLPQGFLNSPALFNADVVDLLKEVPNVQVYVDDIYISHDDPREHLEQLEKVFSLLLNAGYVVSLKKSEIAQHEVEFLGFNITKEGRGLTETFKQKLLNITPPRDLKQLQSILGKLNFARNFIPNFSELVKPLYNIIATAPGKYITWTTDNSQQLQNIISMLNSAENLEERNPEVRLIMKVNTSPSAGYIRFYNEFAKRPIMYLNYVYTKAEVKFTNTEKLLTTIHKGLIKALDLGMGQEILVYSPIVSMTKIQKTPLPERKALPIRWITWMSYLEDPRIQFHYDKTLPELQQVPTVTDDIIAKIKHPSEFSMVFYTDGSAIKHPNVNKSHNAGMGIAQVQFKPEFTVINTWSIPLGDHTAQLAEVAAVEFACKKALKIDGPVLIVTDSFYVAESVNKELPYWQSNGFFNNKKKPLKHVSKWKSIADCIQLKPDIIIIHEKGHQPTASTFHTEGNNLADKLATQGSYVVNAGKRTADGSEFEKRTADGSEFESPKKKAKVE

SEQ ID NO: 581 - protein, 2085 aa, synthetic construct
MPAAKRVKLDGGDKKYSIGLDIGTNSVGWAVITDEYKVPSKKFKVLGNTDRHSIKKNLIGALLFDSGETAEATRLKRTARRRYTRRKNRICYLQEIFSNEMAKVDDSFFHRLEESFLVEEDKKHERHPIFGNIVDEVAYHEKYPTIYHLRKKLVDSTDKADLRLIYLALAHMIKFRGHFLIEGDLNPDNSDVDKLFIQLVQTYNQLFEENPINASGVDAKAILSARLSKSRRLENLIAQLPGEKKNGLFGNLIALSLGLTPNFKSNFDLAEDAKLQLSKDTYDDDLDNLLAQIGDQYADLFLAAKNLSDAILLSDILRVNTEITKAPLSASMIKRYDEHHQDLTLLKALVRQQLPEKYKEIFFDQSKNGYAGYIDGGASQEEFYKFIKPILEKMDGTEELLVKLNREDLLRKQRTFDNGSIPHQIHLGELHAILRRQEDFYPFLKDNREKIEKILTFRIPYYVGPLARGNSRFAWMTRKSEETITPWNFEEVVDKGASAQSFIERMTNFDKNLPNEKVLPKHSLLYEYFTVYNELTKVKYVTEGMRKPAFLSGEQKKAIVDLLFKTNRKVTVKQLKEDYFKKIECFDSVEISGVEDRFNASLGTYHDLLKIIKDKDFLDNEENEDILEDIVLTLTLFEDREMIEERLKTYAHLFDDKVMKQLKRRRYTGWGRLSRKLINGIRDKQSGKTILDFLKSDGFANRNFMQLIHDDSLTFKEDIQKAQVSGQGDSLHEHIANLAGSPAIKKGILQTVKVVDELVKVMGRHKPENIVIEMARENQTTQKGQKNSRERMKRIEEGIKELGSQILKEHPVENTQLQNEKLYLYYLQNGRDMYVDQELDINRLSDYDVDHIVPQSFLKDDSIDNKVLTRSDKARGKSDNVPSEEVVKKMKNYWRQLLNAKLITQRKFDNLTKAERGGLSELDKAGFIKRQLVETRQITKHVAQILDSRMNTKYDENDKLIREVKVITLKSKLVSDFRKDFQFYKVREINNYHHAHDAYLNAVVGTALIKKYPKLESEFVYGDYKVYDVRKMIAKSEQEIGKATAKYFFYSNIMNFFKTEITLANGEIRKRPLIETNGETGEIVWDKGRDFATVRKVLSMPQVNIVKKTEVQTGGFSKESILPKRNSDKLIARKKDWDPKKYGGFDSPTVAYSVLVVAKVEKGKSKKLKSVKELLGITIMERSSFEKNPIDFLEAKGYKEVKKDLIIKLPKYSLFELENGRKRMLASAGELQKGNELALPSKYVNFLYLASHYEKLKGSPEDNEQKQLFVEQHKHYLDEIIEQISEFSKRVILADANLDKVLSAYNKHRDKPIREQAENIIHLFTLTNLGAPAAFKYFDTTIDRKRYTSTKEVLDATLIHQSITGLYETRIDLSQLGGDGGPAPGSSGGGGGIPWLMKKPLQLTTLVPLQEYEERLLKQTMLTGSYKEKLQSLFLKYDALWQHWENQVGHRRIKPHHIATGTVNPRPQKQYPINPKAKASIQTVINDLLKQGVLIQQNSIMNTPVYPVPKPDGKWRMVLDYREVNKTIPLIAAQNQHSAGILSSIFRGKYKTTLDLSNGFWAHSITPESYWLTAFTWLGQQYCWTRLPQGFLNSPALFNADVVDLLKEVPNVQVYVDDIYISHDDPREHLEQLEKVFSLLLNAGYVVSLKKSEIAQHEVEFLGFNITKEGRGLTETFKQKLLNITPPRDLKQLQSILGKLNFARNFIPNFSELVKPLYNIIATAPGKYITWTTDNSQQLQNIISMLNSAENLEERNPEVRLIMKVNTSPSAGYIRFYNEFAKRPIMYLNYVYTKAEVKFTNTEKLLTTIHKGLIKALDLGMGQEILVYSPIVSMTKIQKTPLPERKALPIRWITWMSYLEDPRIQFHYDKTLPELQQVPTVTDDIIAKIKHPSEFSMVFYTDGSAIKHPNVNKSHNAGMGIAQVQFKPEFTVINTWSIPLGDHTAQLAEVAAVEFACKKALKIDGPVLIVTDSFYVAESVNKELPYWQSNGFFNNKKKPLKHVSKWKSIADCIQLKPDIIIIHEKGHQPTASTFHTEGNNLADKLATQGSYVVNAGKRTADGSEFEKRTADGSEFESPKKKAKVE

SEQ ID NO: 582 - protein, 2087 aa, synthetic construct
MPAAKRVKLDGGDKKYSIGLDIGTNSVGWAVITDEYKVPSKKFKVLGNTDRHSIKKNLIGALLFDSGETAEATRLKRTARRRYTRRKNRICYLQEIFSNEMAKVDDSFFHRLEESFLVEEDKKHERHPIFGNIVDEVAYHEKYPTIYHLRKKLVDSTDKADLRLIYLALAHMIKFRGHFLIEGDLNPDNSDVDKLFIQLVQTYNQLFEENPINASGVDAKAILSARLSKSRRLENLIAQLPGEKKNGLFGNLIALSLGLTPNFKSNFDLAEDAKLQLSKDTYDDDLDNLLAQIGDQYADLFLAAKNLSDAILLSDILRVNTEITKAPLSASMIKRYDEHHQDLTLLKALVRQQLPEKYKEIFFDQSKNGYAGYIDGGASQEEFYKFIKPILEKMDGTEELLVKLNREDLLRKQRTFDNGSIPHQIHLGELHAILRRQEDFYPFLKDNREKIEKILTFRIPYYVGPLARGNSRFAWMTRKSEETITPWNFEEVVDKGASAQSFIERMTNFDKNLPNEKVLPKHSLLYEYFTVYNELTKVKYVTEGMRKPAFLSGEQKKAIVDLLFKTNRKVTVKQLKEDYFKKIECFDSVEISGVEDRFNASLGTYHDLLKIIKDKDFLDNEENEDILEDIVLTLTLFEDREMIEERLKTYAHLFDDKVMKQLKRRRYTGWGRLSRKLINGIRDKQSGKTILDFLKSDGFANRNFMQLIHDDSLTFKEDIQKAQVSGQGDSLHEHIANLAGSPAIKKGILQTVKVVDELVKVMGRHKPENIVIEMARENQTTQKGQKNSRERMKRIEEGIKELGSQILKEHPVENTQLQNEKLYLYYLQNGRDMYVDQELDINRLSDYDVDHIVPQSFLKDDSIDNKVLTRSDKARGKSDNVPSEEVVKKMKNYWRQLLNAKLITQRKFDNLTKAERGGLSELDKAGFIKRQLVETRQITKHVAQILDSRMNTKYDENDKLIREVKVITLKSKLVSDFRKDFQFYKVREINNYHHAHDAYLNAVVGTALIKKYPKLESEFVYGDYKVYDVRKMIAKSEQEIGKATAKYFFYSNIMNFFKTEITLANGEIRKRPLIETNGETGEIVWDKGRDFATVRKVLSMPQVNIVKKTEVQTGGFSKESILPKRNSDKLIARKKDWDPKKYGGFDSPTVAYSVLVVAKVEKGKSKKLKSVKELLGITIMERSSFEKNPIDFLEAKGYKEVKKDLIIKLPKYSLFELENGRKRMLASAGELQKGNELALPSKYVNFLYLASHYEKLKGSPEDNEQKQLFVEQHKHYLDEIIEQISEFSKRVILADANLDKVLSAYNKHRDKPIREQAENIIHLFTLTNLGAPAAFKYFDTTIDRKRYTSTKEVLDATLIHQSITGLYETRIDLSQLGGDGGGGGGSSEAAAKGGIPWLMKKPLQLTTLVPLQEYEERLLKQTMLTGSYKEKLQSLFLKYDALWQHWENQVGHRRIKPHHIATGTVNPRPQKQYPINPKAKASIQTVINDLLKQGVLIQQNSIMNTPVYPVPKPDGKWRMVLDYREVNKTIPLIAAQNQHSAGILSSIFRGKYKTTLDLSNGFWAHSITPESYWLTAFTWLGQQYCWTRLPQGFLNSPALFNADVVDLLKEVPNVQVYVDDIYISHDDPREHLEQLEKVFSLLLNAGYVVSLKKSEIAQHEVEFLGFNITKEGRGLTETFKQKLLNITPPRDLKQLQSILGKLNFARNFIPNFSELVKPLYNIIATAPGKYITWTTDNSQQLQNIISMLNSAENLEERNPEVRLIMKVNTSPSAGYIRFYNEFAKRPIMYLNYVYTKAEVKFTNTEKLLTTIHKGLIKALDLGMGQEILVYSPIVSMTKIQKTPLPERKALPIRWITWMSYLEDPRIQFHYDKTLPELQQVPTVTDDIIAKIKHPSEFSMVFYTDGSAIKHPNVNKSHNAGMGIAQVQFKPEFTVINTWSIPLGDHTAQLAEVAAVEFACKKALKIDGPVLIVTDSFYVAESVNKELPYWQSNGFFNNKKKPLKHVSKWKSIADCIQLKPDIIIIHEKGHQPTASTFHTEGNNLADKLATQGSYVVNAGKRTADGSEFEKRTADGSEFESPKKKAKVE

SEQ ID NO: 583 - protein, 2087 aa, synthetic construct
MPAAKRVKLDGGDKKYSIGLDIGTNSVGWAVITDEYKVPSKKFKVLGNTDRHSIKKNLIGALLFDSGETAEATRLKRTARRRYTRRKNRICYLQEIFSNEMAKVDDSFFHRLEESFLVEEDKKHERHPIFGNIVDEVAYHEKYPTIYHLRKKLVDSTDKADLRLIYLALAHMIKFRGHFLIEGDLNPDNSDVDKLFIQLVQTYNQLFEENPINASGVDAKAILSARLSKSRRLENLIAQLPGEKKNGLFGNLIALSLGLTPNFKSNFDLAEDAKLQLSKDTYDDDLDNLLAQIGDQYADLFLAAKNLSDAILLSDILRVNTEITKAPLSASMIKRYDEHHQDLTLLKALVRQQLPEKYKEIFFDQSKNGYAGYIDGGASQEEFYKFIKPILEKMDGTEELLVKLNREDLLRKQRTFDNGSIPHQIHLGELHAILRRQEDFYPFLKDNREKIEKILTFRIPYYVGPLARGNSRFAWMTRKSEETITPWNFEEVVDKGASAQSFIERMTNFDKNLPNEKVLPKHSLLYEYFTVYNELTKVKYVTEGMRKPAFLSGEQKKAIVDLLFKTNRKVTVKQLKEDYFKKIECFDSVEISGVEDRFNASLGTYHDLLKIIKDKDFLDNEENEDILEDIVLTLTLFEDREMIEERLKTYAHLFDDKVMKQLKRRRYTGWGRLSRKLINGIRDKQSGKTILDFLKSDGFANRNFMQLIHDDSLTFKEDIQKAQVSGQGDSLHEHIANLAGSPAIKKGILQTVKVVDELVKVMGRHKPENIVIEMARENQTTQKGQKNSRERMKRIEEGIKELGSQILKEHPVENTQLQNEKLYLYYLQNGRDMYVDQELDINRLSDYDVDHIVPQSFLKDDSIDNKVLTRSDKARGKSDNVPSEEVVKKMKNYWRQLLNAKLITQRKFDNLTKAERGGLSELDKAGFIKRQLVETRQITKHVAQILDSRMNTKYDENDKLIREVKVITLKSKLVSDFRKDFQFYKVREINNYHHAHDAYLNAVVGTALIKKYPKLESEFVYGDYKVYDVRKMIAKSEQEIGKATAKYFFYSNIMNFFKTEITLANGEIRKRPLIETNGETGEIVWDKGRDFATVRKVLSMPQVNIVKKTEVQTGGFSKESILPKRNSDKLIARKKDWDPKKYGGFDSPTVAYSVLVVAKVEKGKSKKLKSVKELLGITIMERSSFEKNPIDFLEAKGYKEVKKDLIIKLPKYSLFELENGRKRMLASAGELQKGNELALPSKYVNFLYLASHYEKLKGSPEDNEQKQLFVEQHKHYLDEIIEQISEFSKRVILADANLDKVLSAYNKHRDKPIREQAENIIHLFTLTNLGAPAAFKYFDTTIDRKRYTSTKEVLDATLIHQSITGLYETRIDLSQLGGDGGGGSGGGEAAAKGGIPWLMKKPLQLTTLVPLQEYEERLLKQTMLTGSYKEKLQSLFLKYDALWQHWENQVGHRRIKPHHIATGTVNPRPQKQYPINPKAKASIQTVINDLLKQGVLIQQNSIMNTPVYPVPKPDGKWRMVLDYREVNKTIPLIAAQNQHSAGILSSIFRGKYKTTLDLSNGFWAHSITPESYWLTAFTWLGQQYCWTRLPQGFLNSPALFNADVVDLLKEVPNVQVYVDDIYISHDDPREHLEQLEKVFSLLLNAGYVVSLKKSEIAQHEVEFLGFNITKEGRGLTETFKQKLLNITPPRDLKQLQSILGKLNFARNFIPNFSELVKPLYNIIATAPGKYITWTTDNSQQLQNIISMLNSAENLEERNPEVRLIMKVNTSPSAGYIRFYNEFAKRPIMYLNYVYTKAEVKFTNTEKLLTTIHKGLIKALDLGMGQEILVYSPIVSMTKIQKTPLPERKALPIRWITWMSYLEDPRIQFHYDKTLPELQQVPTVTDDIIAKIKHPSEFSMVFYTDGSAIKHPNVNKSHNAGMGIAQVQFKPEFTVINTWSIPLGDHTAQLAEVAAVEFACKKALKIDGPVLIVTDSFYVAESVNKELPYWQSNGFFNNKKKPLKHVSKWKSIADCIQLKPDIIIIHEKGHQPTASTFHTEGNNLADKLATQGSYVVNAGKRTADGSEFEKRTADGSEFESPKKKAKVE

SEQ ID NO: 584 - protein, 2085 aa, synthetic construct
MPAAKRVKLDGGDKKYSIGLDIGTNSVGWAVITDEYKVPSKKFKVLGNTDRHSIKKNLIGALLFDSGETAEATRLKRTARRRYTRRKNRICYLQEIFSNEMAKVDDSFFHRLEESFLVEEDKKHERHPIFGNIVDEVAYHEKYPTIYHLRKKLVDSTDKADLRLIYLALAHMIKFRGHFLIEGDLNPDNSDVDKLFIQLVQTYNQLFEENPINASGVDAKAILSARLSKSRRLENLIAQLPGEKKNGLFGNLIALSLGLTPNFKSNFDLAEDAKLQLSKDTYDDDLDNLLAQIGDQYADLFLAAKNLSDAILLSDILRVNTEITKAPLSASMIKRYDEHHQDLTLLKALVRQQLPEKYKEIFFDQSKNGYAGYIDGGASQEEFYKFIKPILEKMDGTEELLVKLNREDLLRKQRTFDNGSIPHQIHLGELHAILRRQEDFYPFLKDNREKIEKILTFRIPYYVGPLARGNSRFAWMTRKSEETITPWNFEEVVDKGASAQSFIERMTNFDKNLPNEKVLPKHSLLYEYFTVYNELTKVKYVTEGMRKPAFLSGEQKKAIVDLLFKTNRKVTVKQLKEDYFKKIECFDSVEISGVEDRFNASLGTYHDLLKIIKDKDFLDNEENEDILEDIVLTLTLFEDREMIEERLKTYAHLFDDKVMKQLKRRRYTGWGRLSRKLINGIRDKQSGKTILDFLKSDGFANRNFMQLIHDDSLTFKEDIQKAQVSGQGDSLHEHIANLAGSPAIKKGILQTVKVVDELVKVMGRHKPENIVIEMARENQTTQKGQKNSRERMKRIEEGIKELGSQILKEHPVENTQLQNEKLYLYYLQNGRDMYVDQELDINRLSDYDVDHIVPQSFLKDDSIDNKVLTRSDKARGKSDNVPSEEVVKKMKNYWRQLLNAKLITQRKFDNLTKAERGGLSELDKAGFIKRQLVETRQITKHVAQILDSRMNTKYDENDKLIREVKVITLKSKLVSDFRKDFQFYKVREINNYHHAHDAYLNAVVGTALIKKYPKLESEFVYGDYKVYDVRKMIAKSEQEIGKATAKYFFYSNIMNFFKTEITLANGEIRKRPLIETNGETGEIVWDKGRDFATVRKVLSMPQVNIVKKTEVQTGGFSKESILPKRNSDKLIARKKDWDPKKYGGFDSPTVAYSVLVVAKVEKGKSKKLKSVKELLGITIMERSSFEKNPIDFLEAKGYKEVKKDLIIKLPKYSLFELENGRKRMLASAGELQKGNELALPSKYVNFLYLASHYEKLKGSPEDNEQKQLFVEQHKHYLDEIIEQISEFSKRVILADANLDKVLSAYNKHRDKPIREQAENIIHLFTLTNLGAPAAFKYFDTTIDRKRYTSTKEVLDATLIHQSITGLYETRIDLSQLGGDGGGSSGGSPAPGGIPWLMKKPLQLTTLVPLQEYEERLLKQTMLTGSYKEKLQSLFLKYDALWQHWENQVGHRRIKPHHIATGTVNPRPQKQYPINPKAKASIQTVINDLLKQGVLIQQNSIMNTPVYPVPKPDGKWRMVLDYREVNKTIPLIAAQNQHSAGILSSIFRGKYKTTLDLSNGFWAHSITPESYWLTAFTWLGQQYCWTRLPQGFLNSPALFNADVVDLLKEVPNVQVYVDDIYISHDDPREHLEQLEKVFSLLLNAGYVVSLKKSEIAQHEVEFLGFNITKEGRGLTETFKQKLLNITPPRDLKQLQSILGKLNFARNFIPNFSELVKPLYNIIATAPGKYITWTTDNSQQLQNIISMLNSAENLEERNPEVRLIMKVNTSPSAGYIRFYNEFAKRPIMYLNYVYTKAEVKFTNTEKLLTTIHKGLIKALDLGMGQEILVYSPIVSMTKIQKTPLPERKALPIRWITWMSYLEDPRIQFHYDKTLPELQQVPTVTDDIIAKIKHPSEFSMVFYTDGSAIKHPNVNKSHNAGMGIAQVQFKPEFTVINTWSIPLGDHTAQLAEVAAVEFACKKALKIDGPVLIVTDSFYVAESVNKELPYWQSNGFFNNKKKPLKHVSKWKSIADCIQLKPDIIIIHEKGHQPTASTFHTEGNNLADKLATQGSYVVNAGKRTADGSEFEKRTADGSEFESPKKKAKVE

SEQ ID NO: 585 - protein, 2109 aa, synthetic construct
MPAAKRVKLDGGDKKYSIGLDIGTNSVGWAVITDEYKVPSKKFKVLGNTDRHSIKKNLIGALLFDSGETAEATRLKRTARRRYTRRKNRICYLQEIFSNEMAKVDDSFFHRLEESFLVEEDKKHERHPIFGNIVDEVAYHEKYPTIYHLRKKLVDSTDKADLRLIYLALAHMIKFRGHFLIEGDLNPDNSDVDKLFIQLVQTYNQLFEENPINASGVDAKAILSARLSKSRRLENLIAQLPGEKKNGLFGNLIALSLGLTPNFKSNFDLAEDAKLQLSKDTYDDDLDNLLAQIGDQYADLFLAAKNLSDAILLSDILRVNTEITKAPLSASMIKRYDEHHQDLTLLKALVRQQLPEKYKEIFFDQSKNGYAGYIDGGASQEEFYKFIKPILEKMDGTEELLVKLNREDLLRKQRTFDNGSIPHQIHLGELHAILRRQEDFYPFLKDNREKIEKILTFRIPYYVGPLARGNSRFAWMTRKSEETITPWNFEEVVDKGASAQSFIERMTNFDKNLPNEKVLPKHSLLYEYFTVYNELTKVKYVTEGMRKPAFLSGEQKKAIVDLLFKTNRKVTVKQLKEDYFKKIECFDSVEISGVEDRFNASLGTYHDLLKIIKDKDFLDNEENEDILEDIVLTLTLFEDREMIEERLKTYAHLFDDKVMKQLKRRRYTGWGRLSRKLINGIRDKQSGKTILDFLKSDGFANRNFMQLIHDDSLTFKEDIQKAQVSGQGDSLHEHIANLAGSPAIKKGILQTVKVVDELVKVMGRHKPENIVIEMARENQTTQKGQKNSRERMKRIEEGIKELGSQILKEHPVENTQLQNEKLYLYYLQNGRDMYVDQELDINRLSDYDVDHIVPQSFLKDDSIDNKVLTRSDKARGKSDNVPSEEVVKKMKNYWRQLLNAKLITQRKFDNLTKAERGGLSELDKAGFIKRQLVETRQITKHVAQILDSRMNTKYDENDKLIREVKVITLKSKLVSDFRKDFQFYKVREINNYHHAHDAYLNAVVGTALIKKYPKLESEFVYGDYKVYDVRKMIAKSEQEIGKATAKYFFYSNIMNFFKTEITLANGEIRKRPLIETNGETGEIVWDKGRDFATVRKVLSMPQVNIVKKTEVQTGGFSKESILPKRNSDKLIARKKDWDPKKYGGFDSPTVAYSVLVVAKVEKGKSKKLKSVKELLGITIMERSSFEKNPIDFLEAKGYKEVKKDLIIKLPKYSLFELENGRKRMLASAGELQKGNELALPSKYVNFLYLASHYEKLKGSPEDNEQKQLFVEQHKHYLDEIIEQISEFSKRVILADANLDKVLSAYNKHRDKPIREQAENIIHLFTLTNLGAPAAFKYFDTTIDRKRYTSTKEVLDATLIHQSITGLYETRIDLSQLGGDGGSGGSSGGSSGSETPGTSESATPESSGGSSGGSSGGIPWLMKKPLQLTTLVPLQEYEERLLKQTMLTGSYKEKLQSLFLKYDALWQHWENQVGHRRIKPHHIATGTVNPRPQKQYPINPKAKASIQTVINDLLKQGVLIQQNSIMNTPVYPVPKPDGKWRMVLDYREVNKTIPLIAAQNQHSAGILSSIFRGKYKTTLDLSNGFWAHSITPESYWLTAFTWLGQQYCWTRLPQGFLNSPALFNADVVDLLKEVPNVQVYVDDIYISHDDPREHLEQLEKVFSLLLNAGYVVSLKKSEIAQHEVEFLGFNITKEGRGLTETFKQKLLNITPPRDLKQLQSILGKLNFARNFIPNFSELVKPLYNIIATAPGKYITWTTDNSQQLQNIISMLNSAENLEERNPEVRLIMKVNTSPSAGYIRFYNEFAKRPIMYLNYVYTKAEVKFTNTEKLLTTIHKGLIKALDLGMGQEILVYSPIVSMTKIQKTPLPERKALPIRWITWMSYLEDPRIQFHYDKTLPELQQVPTVTDDIIAKIKHPSEFSMVFYTDGSAIKHPNVNKSHNAGMGIAQVQFKPEFTVINTWSIPLGDHTAQLAEVAAVEFACKKALKIDGPVLIVTDSFYVAESVNKELPYWQSNGFFNNKKKPLKHVSKWKSIADCIQLKPDIIIIHEKGHQPTASTFHTEGNNLADKLATQGSYVVNAGKRTADGSEFEKRTADGSEFESPKKKAKVE

SEQ ID NO: 586 - protein, 2088 aa, synthetic construct
MPAAKRVKLDGGDKKYSIGLDIGTNSVGWAVITDEYKVPSKKFKVLGNTDRHSIKKNLIGALLFDSGETAEATRLKRTARRRYTRRKNRICYLQEIFSNEMAKVDDSFFHRLEESFLVEEDKKHERHPIFGNIVDEVAYHEKYPTIYHLRKKLVDSTDKADLRLIYLALAHMIKFRGHFLIEGDLNPDNSDVDKLFIQLVQTYNQLFEENPINASGVDAKAILSARLSKSRRLENLIAQLPGEKKNGLFGNLIALSLGLTPNFKSNFDLAEDAKLQLSKDTYDDDLDNLLAQIGDQYADLFLAAKNLSDAILLSDILRVNTEITKAPLSASMIKRYDEHHQDLTLLKALVRQQLPEKYKEIFFDQSKNGYAGYIDGGASQEEFYKFIKPILEKMDGTEELLVKLNREDLLRKQRTFDNGSIPHQIHLGELHAILRRQEDFYPFLKDNREKIEKILTFRIPYYVGPLARGNSRFAWMTRKSEETITPWNFEEVVDKGASAQSFIERMTNFDKNLPNEKVLPKHSLLYEYFTVYNELTKVKYVTEGMRKPAFLSGEQKKAIVDLLFKTNRKVTVKQLKEDYFKKIECFDSVEISGVEDRFNASLGTYHDLLKIIKDKDFLDNEENEDILEDIVLTLTLFEDREMIEERLKTYAHLFDDKVMKQLKRRRYTGWGRLSRKLINGIRDKQSGKTILDFLKSDGFANRNFMQLIHDDSLTFKEDIQKAQVSGQGDSLHEHIANLAGSPAIKKGILQTVKVVDELVKVMGRHKPENIVIEMARENQTTQKGQKNSRERMKRIEEGIKELGSQILKEHPVENTQLQNEKLYLYYLQNGRDMYVDQELDINRLSDYDVDHIVPQSFLKDDSIDNKVLTRSDKARGKSDNVPSEEVVKKMKNYWRQLLNAKLITQRKFDNLTKAERGGLSELDKAGFIKRQLVETRQITKHVAQILDSRMNTKYDENDKLIREVKVITLKSKLVSDFRKDFQFYKVREINNYHHAHDAYLNAVVGTALIKKYPKLESEFVYGDYKVYDVRKMIAKSEQEIGKATAKYFFYSNIMNFFKTEITLANGEIRKRPLIETNGETGEIVWDKGRDFATVRKVLSMPQVNIVKKTEVQTGGFSKESILPKRNSDKLIARKKDWDPKKYGGFDSPTVAYSVLVVAKVEKGKSKKLKSVKELLGITIMERSSFEKNPIDFLEAKGYKEVKKDLIIKLPKYSLFELENGRKRMLASAGELQKGNELALPSKYVNFLYLASHYEKLKGSPEDNEQKQLFVEQHKHYLDEIIEQISEFSKRVILADANLDKVLSAYNKHRDKPIREQAENIIHLFTLTNLGAPAAFKYFDTTIDRKRYTSTKEVLDATLIHQSITGLYETRIDLSQLGGDGGGSSGSSGSSGSSGGIPWLMKKPLQLTTLVPLQEYEERLLKQTMLTGSYKEKLQSLFLKYDALWQHWENQVGHRRIKPHHIATGTVNPRPQKQYPINPKAKASIQTVINDLLKQGVLIQQNSIMNTPVYPVPKPDGKWRMVLDYREVNKTIPLIAAQNQHSAGILSSIFRGKYKTTLDLSNGFWAHSITPESYWLTAFTWLGQQYCWTRLPQGFLNSPALFNADVVDLLKEVPNVQVYVDDIYISHDDPREHLEQLEKVFSLLLNAGYVVSLKKSEIAQHEVEFLGFNITKEGRGLTETFKQKLLNITPPRDLKQLQSILGKLNFARNFIPNFSELVKPLYNIIATAPGKYITWTTDNSQQLQNIISMLNSAENLEERNPEVRLIMKVNTSPSAGYIRFYNEFAKRPIMYLNYVYTKAEVKFTNTEKLLTTIHKGLIKALDLGMGQEILVYSPIVSMTKIQKTPLPERKALPIRWITWMSYLEDPRIQFHYDKTLPELQQVPTVTDDIIAKIKHPSEFSMVFYTDGSAIKHPNVNKSHNAGMGIAQVQFKPEFTVINTWSIPLGDHTAQLAEVAAVEFACKKALKIDGPVLIVTDSFYVAESVNKELPYWQSNGFFNNKKKPLKHVSKWKSIADCIQLKPDIIIIHEKGHQPTASTFHTEGNNLADKLATQGSYVVNAGKRTADGSEFEKRTADGSEFESPKKKAKVE

SEQ ID NO: 587 - protein, 2085 aa, synthetic construct
MPAAKRVKLDGGDKKYSIGLDIGTNSVGWAVITDEYKVPSKKFKVLGNTDRHSIKKNLIGALLFDSGETAEATRLKRTARRRYTRRKNRICYLQEIFSNEMAKVDDSFFHRLEESFLVEEDKKHERHPIFGNIVDEVAYHEKYPTIYHLRKKLVDSTDKADLRLIYLALAHMIKFRGHFLIEGDLNPDNSDVDKLFIQLVQTYNQLFEENPINASGVDAKAILSARLSKSRRLENLIAQLPGEKKNGLFGNLIALSLGLTPNFKSNFDLAEDAKLQLSKDTYDDDLDNLLAQIGDQYADLFLAAKNLSDAILLSDILRVNTEITKAPLSASMIKRYDEHHQDLTLLKALVRQQLPEKYKEIFFDQSKNGYAGYIDGGASQEEFYKFIKPILEKMDGTEELLVKLNREDLLRKQRTFDNGSIPHQIHLGELHAILRRQEDFYPFLKDNREKIEKILTFRIPYYVGPLARGNSRFAWMTRKSEETITPWNFEEVVDKGASAQSFIERMTNFDKNLPNEKVLPKHSLLYEYFTVYNELTKVKYVTEGMRKPAFLSGEQKKAIVDLLFKTNRKVTVKQLKEDYFKKIECFDSVEISGVEDRFNASLGTYHDLLKIIKDKDFLDNEENEDILEDIVLTLTLFEDREMIEERLKTYAHLFDDKVMKQLKRRRYTGWGRLSRKLINGIRDKQSGKTILDFLKSDGFANRNFMQLIHDDSLTFKEDIQKAQVSGQGDSLHEHIANLAGSPAIKKGILQTVKVVDELVKVMGRHKPENIVIEMARENQTTQKGQKNSRERMKRIEEGIKELGSQILKEHPVENTQLQNEKLYLYYLQNGRDMYVDQELDINRLSDYDVDHIVPQSFLKDDSIDNKVLTRSDKARGKSDNVPSEEVVKKMKNYWRQLLNAKLITQRKFDNLTKAERGGLSELDKAGFIKRQLVETRQITKHVAQILDSRMNTKYDENDKLIREVKVITLKSKLVSDFRKDFQFYKVREINNYHHAHDAYLNAVVGTALIKKYPKLESEFVYGDYKVYDVRKMIAKSEQEIGKATAKYFFYSNIMNFFKTEITLANGEIRKRPLIETNGETGEIVWDKGRDFATVRKVLSMPQVNIVKKTEVQTGGFSKESILPKRNSDKLIARKKDWDPKKYGGFDSPTVAYSVLVVAKVEKGKSKKLKSVKELLGITIMERSSFEKNPIDFLEAKGYKEVKKDLIIKLPKYSLFELENGRKRMLASAGELQKGNELALPSKYVNFLYLASHYEKLKGSPEDNEQKQLFVEQHKHYLDEIIEQISEFSKRVILADANLDKVLSAYNKHRDKPIREQAENIIHLFTLTNLGAPAAFKYFDTTIDRKRYTSTKEVLDATLIHQSITGLYETRIDLSQLGGDGGGSSGGSGGGGGIPWLMKKPLQLTTLVPLQEYEERLLKQTMLTGSYKEKLQSLFLKYDALWQHWENQVGHRRIKPHHIATGTVNPRPQKQYPINPKAKASIQTVINDLLKQGVLIQQNSIMNTPVYPVPKPDGKWRMVLDYREVNKTIPLIAAQNQHSAGILSSIFRGKYKTTLDLSNGFWAHSITPESYWLTAFTWLGQQYCWTRLPQGFLNSPALFNADVVDLLKEVPNVQVYVDDIYISHDDPREHLEQLEKVFSLLLNAGYVVSLKKSEIAQHEVEFLGFNITKEGRGLTETFKQKLLNITPPRDLKQLQSILGKLNFARNFIPNFSELVKPLYNIIATAPGKYITWTTDNSQQLQNIISMLNSAENLEERNPEVRLIMKVNTSPSAGYIRFYNEFAKRPIMYLNYVYTKAEVKFTNTEKLLTTIHKGLIKALDLGMGQEILVYSPIVSMTKIQKTPLPERKALPIRWITWMSYLEDPRIQFHYDKTLPELQQVPTVTDDIIAKIKHPSEFSMVFYTDGSAIKHPNVNKSHNAGMGIAQVQFKPEFTVINTWSIPLGDHTAQLAEVAAVEFACKKALKIDGPVLIVTDSFYVAESVNKELPYWQSNGFFNNKKKPLKHVSKWKSIADCIQLKPDIIIIHEKGHQPTASTFHTEGNNLADKLATQGSYVVNAGKRTADGSEFEKRTADGSEFESPKKKAKVE

SEQ ID NO: 588 - protein, 2084 aa, synthetic construct
MPAAKRVKLDGGDKKYSIGLDIGTNSVGWAVITDEYKVPSKKFKVLGNTDRHSIKKNLIGALLFDSGETAEATRLKRTARRRYTRRKNRICYLQEIFSNEMAKVDDSFFHRLEESFLVEEDKKHERHPIFGNIVDEVAYHEKYPTIYHLRKKLVDSTDKADLRLIYLALAHMIKFRGHFLIEGDLNPDNSDVDKLFIQLVQTYNQLFEENPINASGVDAKAILSARLSKSRRLENLIAQLPGEKKNGLFGNLIALSLGLTPNFKSNFDLAEDAKLQLSKDTYDDDLDNLLAQIGDQYADLFLAAKNLSDAILLSDILRVNTEITKAPLSASMIKRYDEHHQDLTLLKALVRQQLPEKYKEIFFDQSKNGYAGYIDGGASQEEFYKFIKPILEKMDGTEELLVKLNREDLLRKQRTFDNGSIPHQIHLGELHAILRRQEDFYPFLKDNREKIEKILTFRIPYYVGPLARGNSRFAWMTRKSEETITPWNFEEVVDKGASAQSFIERMTNFDKNLPNEKVLPKHSLLYEYFTVYNELTKVKYVTEGMRKPAFLSGEQKKAIVDLLFKTNRKVTVKQLKEDYFKKIECFDSVEISGVEDRFNASLGTYHDLLKIIKDKDFLDNEENEDILEDIVLTLTLFEDREMIEERLKTYAHLFDDKVMKQLKRRRYTGWGRLSRKLINGIRDKQSGKTILDFLKSDGFANRNFMQLIHDDSLTFKEDIQKAQVSGQGDSLHEHIANLAGSPAIKKGILQTVKVVDELVKVMGRHKPENIVIEMARENQTTQKGQKNSRERMKRIEEGIKELGSQILKEHPVENTQLQNEKLYLYYLQNGRDMYVDQELDINRLSDYDVDHIVPQSFLKDDSIDNKVLTRSDKARGKSDNVPSEEVVKKMKNYWRQLLNAKLITQRKFDNLTKAERGGLSELDKAGFIKRQLVETRQITKHVAQILDSRMNTKYDENDKLIREVKVITLKSKLVSDFRKDFQFYKVREINNYHHAHDAYLNAVVGTALIKKYPKLESEFVYGDYKVYDVRKMIAKSEQEIGKATAKYFFYSNIMNFFKTEITLANGEIRKRPLIETNGETGEIVWDKGRDFATVRKVLSMPQVNIVKKTEVQTGGFSKESILPKRNSDKLIARKKDWDPKKYGGFDSPTVAYSVLVVAKVEKGKSKKLKSVKELLGITIMERSSFEKNPIDFLEAKGYKEVKKDLIIKLPKYSLFELENGRKRMLASAGELQKGNELALPSKYVNFLYLASHYEKLKGSPEDNEQKQLFVEQHKHYLDEIIEQISEFSKRVILADANLDKVLSAYNKHRDKPIREQAENIIHLFTLTNLGAPAAFKYFDTTIDRKRYTSTKEVLDATLIHQSITGLYETRIDLSQLGGDGGGGGEAAAKGGIPWLMKKPLQLTTLVPLQEYEERLLKQTMLTGSYKEKLQSLFLKYDALWQHWENQVGHRRIKPHHIATGTVNPRPQKQYPINPKAKASIQTVINDLLKQGVLIQQNSIMNTPVYPVPKPDGKWRMVLDYREVNKTIPLIAAQNQHSAGILSSIFRGKYKTTLDLSNGFWAHSITPESYWLTAFTWLGQQYCWTRLPQGFLNSPALFNADVVDLLKEVPNVQVYVDDIYISHDDPREHLEQLEKVFSLLLNAGYVVSLKKSEIAQHEVEFLGFNITKEGRGLTETFKQKLLNITPPRDLKQLQSILGKLNFARNFIPNFSELVKPLYNIIATAPGKYITWTTDNSQQLQNIISMLNSAENLEERNPEVRLIMKVNTSPSAGYIRFYNEFAKRPIMYLNYVYTKAEVKFTNTEKLLTTIHKGLIKALDLGMGQEILVYSPIVSMTKIQKTPLPERKALPIRWITWMSYLEDPRIQFHYDKTLPELQQVPTVTDDIIAKIKHPSEFSMVFYTDGSAIKHPNVNKSHNAGMGIAQVQFKPEFTVINTWSIPLGDHTAQLAEVAAVEFACKKALKIDGPVLIVTDSFYVAESVNKELPYWQSNGFFNNKKKPLKHVSKWKSIADCIQLKPDIIIIHEKGHQPTASTFHTEGNNLADKLATQGSYVVNAGKRTADGSEFEKRTADGSEFESPKKKAKVE

SEQ ID NO: 589 - protein, 2085 aa, synthetic construct
MPAAKRVKLDGGDKKYSIGLDIGTNSVGWAVITDEYKVPSKKFKVLGNTDRHSIKKNLIGALLFDSGETAEATRLKRTARRRYTRRKNRICYLQEIFSNEMAKVDDSFFHRLEESFLVEEDKKHERHPIFGNIVDEVAYHEKYPTIYHLRKKLVDSTDKADLRLIYLALAHMIKFRGHFLIEGDLNPDNSDVDKLFIQLVQTYNQLFEENPINASGVDAKAILSARLSKSRRLENLIAQLPGEKKNGLFGNLIALSLGLTPNFKSNFDLAEDAKLQLSKDTYDDDLDNLLAQIGDQYADLFLAAKNLSDAILLSDILRVNTEITKAPLSASMIKRYDEHHQDLTLLKALVRQQLPEKYKEIFFDQSKNGYAGYIDGGASQEEFYKFIKPILEKMDGTEELLVKLNREDLLRKQRTFDNGSIPHQIHLGELHAILRRQEDFYPFLKDNREKIEKILTFRIPYYVGPLARGNSRFAWMTRKSEETITPWNFEEVVDKGASAQSFIERMTNFDKNLPNEKVLPKHSLLYEYFTVYNELTKVKYVTEGMRKPAFLSGEQKKAIVDLLFKTNRKVTVKQLKEDYFKKIECFDSVEISGVEDRFNASLGTYHDLLKIIKDKDFLDNEENEDILEDIVLTLTLFEDREMIEERLKTYAHLFDDKVMKQLKRRRYTGWGRLSRKLINGIRDKQSGKTILDFLKSDGFANRNFMQLIHDDSLTFKEDIQKAQVSGQGDSLHEHIANLAGSPAIKKGILQTVKVVDELVKVMGRHKPENIVIEMARENQTTQKGQKNSRERMKRIEEGIKELGSQILKEHPVENTQLQNEKLYLYYLQNGRDMYVDQELDINRLSDYDVDHIVPQSFLKDDSIDNKVLTRSDKARGKSDNVPSEEVVKKMKNYWRQLLNAKLITQRKFDNLTKAERGGLSELDKAGFIKRQLVETRQITKHVAQILDSRMNTKYDENDKLIREVKVITLKSKLVSDFRKDFQFYKVREINNYHHAHDAYLNAVVGTALIKKYPKLESEFVYGDYKVYDVRKMIAKSEQEIGKATAKYFFYSNIMNFFKTEITLANGEIRKRPLIETNGETGEIVWDKGRDFATVRKVLSMPQVNIVKKTEVQTGGFSKESILPKRNSDKLIARKKDWDPKKYGGFDSPTVAYSVLVVAKVEKGKSKKLKSVKELLGITIMERSSFEKNPIDFLEAKGYKEVKKDLIIKLPKYSLFELENGRKRMLASAGELQKGNELALPSKYVNFLYLASHYEKLKGSPEDNEQKQLFVEQHKHYLDEIIEQISEFSKRVILADANLDKVLSAYNKHRDKPIREQAENIIHLFTLTNLGAPAAFKYFDTTIDRKRYTSTKEVLDATLIHQSITGLYETRIDLSQLGGDGGGGSGSSPAPGGIPWLMKKPLQLTTLVPLQEYEERLLKQTMLTGSYKEKLQSLFLKYDALWQHWENQVGHRRIKPHHIATGTVNPRPQKQYPINPKAKASIQTVINDLLKQGVLIQQNSIMNTPVYPVPKPDGKWRMVLDYREVNKTIPLIAAQNQHSAGILSSIFRGKYKTTLDLSNGFWAHSITPESYWLTAFTWLGQQYCWTRLPQGFLNSPALFNADVVDLLKEVPNVQVYVDDIYISHDDPREHLEQLEKVFSLLLNAGYVVSLKKSEIAQHEVEFLGFNITKEGRGLTETFKQKLLNITPPRDLKQLQSILGKLNFARNFIPNFSELVKPLYNIIATAPGKYITWTTDNSQQLQNIISMLNSAENLEERNPEVRLIMKVNTSPSAGYIRFYNEFAKRPIMYLNYVYTKAEVKFTNTEKLLTTIHKGLIKALDLGMGQEILVYSPIVSMTKIQKTPLPERKALPIRWITWMSYLEDPRIQFHYDKTLPELQQVPTVTDDIIAKIKHPSEFSMVFYTDGSAIKHPNVNKSHNAGMGIAQVQFKPEFTVINTWSIPLGDHTAQLAEVAAVEFACKKALKIDGPVLIVTDSFYVAESVNKELPYWQSNGFFNNKKKPLKHVSKWKSIADCIQLKPDIIIIHEKGHQPTASTFHTEGNNLADKLATQGSYVVNAGKRTADGSEFEKRTADGSEFESPKKKAKVE

SEQ ID NO: 590 - protein, 2195 aa, synthetic construct
MPAAKRVKLDGGDKKYSIGLDIGTNSVGWAVITDEYKVPSKKFKVLGNTDRHSIKKNLIGALLFDSGETAEATRLKRTARRRYTRRKNRICYLQEIFSNEMAKVDDSFFHRLEESFLVEEDKKHERHPIFGNIVDEVAYHEKYPTIYHLRKKLVDSTDKADLRLIYLALAHMIKFRGHFLIEGDLNPDNSDVDKLFIQLVQTYNQLFEENPINASGVDAKAILSARLSKSRRLENLIAQLPGEKKNGLFGNLIALSLGLTPNFKSNFDLAEDAKLQLSKDTYDDDLDNLLAQIGDQYADLFLAAKNLSDAILLSDILRVNTEITKAPLSASMIKRYDEHHQDLTLLKALVRQQLPEKYKEIFFDQSKNGYAGYIDGGASQEEFYKFIKPILEKMDGTEELLVKLNREDLLRKQRTFDNGSIPHQIHLGELHAILRRQEDFYPFLKDNREKIEKILTFRIPYYVGPLARGNSRFAWMTRKSEETITPWNFEEVVDKGASAQSFIERMTNFDKNLPNEKVLPKHSLLYEYFTVYNELTKVKYVTEGMRKPAFLSGEQKKAIVDLLFKTNRKVTVKQLKEDYFKKIECFDSVEISGVEDRFNASLGTYHDLLKIIKDKDFLDNEENEDILEDIVLTLTLFEDREMIEERLKTYAHLFDDKVMKQLKRRRYTGWGRLSRKLINGIRDKQSGKTILDFLKSDGFANRNFMQLIHDDSLTFKEDIQKAQVSGQGDSLHEHIANLAGSPAIKKGILQTVKVVDELVKVMGRHKPENIVIEMARENQTTQKGQKNSRERMKRIEEGIKELGSQILKEHPVENTQLQNEKLYLYYLQNGRDMYVDQELDINRLSDYDVDHIVPQSFLKDDSIDNKVLTRSDKARGKSDNVPSEEVVKKMKNYWRQLLNAKLITQRKFDNLTKAERGGLSELDKAGFIKRQLVETRQITKHVAQILDSRMNTKYDENDKLIREVKVITLKSKLVSDFRKDFQFYKVREINNYHHAHDAYLNAVVGTALIKKYPKLESEFVYGDYKVYDVRKMIAKSEQEIGKATAKYFFYSNIMNFFKTEITLANGEIRKRPLIETNGETGEIVWDKGRDFATVRKVLSMPQVNIVKKTEVQTGGFSKESILPKRNSDKLIARKKDWDPKKYGGFDSPTVAYSVLVVAKVEKGKSKKLKSVKELLGITIMERSSFEKNPIDFLEAKGYKEVKKDLIIKLPKYSLFELENGRKRMLASAGELQKGNELALPSKYVNFLYLASHYEKLKGSPEDNEQKQLFVEQHKHYLDEIIEQISEFSKRVILADANLDKVLSAYNKHRDKPIREQAENIIHLFTLTNLGAPAAFKYFDTTIDRKRYTSTKEVLDATLIHQSITGLYETRIDLSQLGGDGGEAAAKEAAAKEAAAKEAAAKEAAAKEAAAKGGMDPLQLLQPLEAEIKGTKLKAHWNSGATITCVPQAFLEEEVPIKNIWIKTIHGEKEQPVYYLTFKIQGRKVEAEVISSPYDYILVSPSDIPWLMKKPLQLTTLVPLQEYEERLLKQTMLTGSYKEKLQSLFLKYDALWQHWENQVGHRRIKPHHIATGTVNPRPQKQYPINPKAKASIQTVINDLLKQGVLIQQNSIMNTPVYPVPKPDGKWRMVLDYREVNKTIPLIAAQNQHSAGILSSIFRGKYKTTLDLSNGFWAHSITPESYWLTAFTWLGQQYCWTRLPQGFLNSPALFNADVVDLLKEVPNVQVYVDDIYISHDDPREHLEQLEKVFSLLLNAGYVVSLKKSEIAQHEVEFLGFNITKEGRGLTETFKQKLLNITPPRDLKQLQSILGLLNFARNFIPNFSELVKPLYNIIATAPGKYITWTTDNSQQLQNIISMLNSAENLEERNPEVRLIMKVNTSPSAGYIRFYNEFAKRPIMYLNYVYTKAEVKFTNTEKLLTTIHKGLIKALDLGMGQEILVYSPIVSMTKIQKTPLPERKALPIRWITWMSYLEDPRIQFHYDKTLPELQQVPTVTDDIIAKIKHPSEFSMVFYTDGSAIKHPNVNKSHNAGMGIAQVQFKPEFTVINTWSIPLGDHTAQLAEVAAVEFACKKALKIDGPVLIVTDSFYVAESVNKELPYWQSNGFFNNKKKPLKHVSKWKSIADCIQLKPDIIIIHEKGHQPTASTFHTEGNNLADKLATQGSYVVNAGKRTADGSEFEKRTADGSEFESPKKKAKVE

SEQ ID NO: 591 - protein, 2211 aa, synthetic construct
MPAAKRVKLDGGDKKYSIGLDIGTNSVGWAVITDEYKVPSKKFKVLGNTDRHSIKKNLIGALLFDSGETAEATRLKRTARRRYTRRKNRICYLQEIFSNEMAKVDDSFFHRLEESFLVEEDKKHERHPIFGNIVDEVAYHEKYPTIYHLRKKLVDSTDKADLRLIYLALAHMIKFRGHFLIEGDLNPDNSDVDKLFIQLVQTYNQLFEENPINASGVDAKAILSARLSKSRRLENLIAQLPGEKKNGLFGNLIALSLGLTPNFKSNFDLAEDAKLQLSKDTYDDDLDNLLAQIGDQYADLFLAAKNLSDAILLSDILRVNTEITKAPLSASMIKRYDEHHQDLTLLKALVRQQLPEKYKEIFFDQSKNGYAGYIDGGASQEEFYKFIKPILEKMDGTEELLVKLNREDLLRKQRTFDNGSIPHQIHLGELHAILRRQEDFYPFLKDNREKIEKILTFRIPYYVGPLARGNSRFAWMTRKSEETITPWNFEEVVDKGASAQSFIERMTNFDKNLPNEKVLPKHSLLYEYFTVYNELTKVKYVTEGMRKPAFLSGEQKKAIVDLLFKTNRKVTVKQLKEDYFKKIECFDSVEISGVEDRFNASLGTYHDLLKIIKDKDFLDNEENEDILEDIVLTLTLFEDREMIEERLKTYAHLFDDKVMKQLKRRRYTGWGRLSRKLINGIRDKQSGKTILDFLKSDGFANRNFMQLIHDDSLTFKEDIQKAQVSGQGDSLHEHIANLAGSPAIKKGILQTVKVVDELVKVMGRHKPENIVIEMARENQTTQKGQKNSRERMKRIEEGIKELGSQILKEHPVENTQLQNEKLYLYYLQNGRDMYVDQELDINRLSDYDVDHIVPQSFLKDDSIDNKVLTRSDKARGKSDNVPSEEVVKKMKNYWRQLLNAKLITQRKFDNLTKAERGGLSELDKAGFIKRQLVETRQITKHVAQILDSRMNTKYDENDKLIREVKVITLKSKLVSDFRKDFQFYKVREINNYHHAHDAYLNAVVGTALIKKYPKLESEFVYGDYKVYDVRKMIAKSEQEIGKATAKYFFYSNIMNFFKTEITLANGEIRKRPLIETNGETGEIVWDKGRDFATVRKVLSMPQVNIVKKTEVQTGGFSKESILPKRNSDKLIARKKDWDPKKYGGFDSPTVAYSVLVVAKVEKGKSKKLKSVKELLGITIMERSSFEKNPIDFLEAKGYKEVKKDLIIKLPKYSLFELENGRKRMLASAGELQKGNELALPSKYVNFLYLASHYEKLKGSPEDNEQKQLFVEQHKHYLDEIIEQISEFSKRVILADANLDKVLSAYNKHRDKPIREQAENIIHLFTLTNLGAPAAFKYFDTTIDRKRYTSTKEVLDATLIHQSITGLYETRIDLSQLGGDGGAEAAAKEAAAKEAAAKEAAAKALEAEAAAKEAAAKEAAAKEAAAKAGGMDPLQLLQPLEAEIKGTKLKAHWNSGATITCVPQAFLEEEVPIKNIWIKTIHGEKEQPVYYLTFKIQGRKVEAEVISSPYDYILVSPSDIPWLMKKPLQLTTLVPLQEYEERLLKQTMLTGSYKEKLQSLFLKYDALWQHWENQVGHRRIKPHHIATGTVNPRPQKQYPINPKAKASIQTVINDLLKQGVLIQQNSIMNTPVYPVPKPDGKWRMVLDYREVNKTIPLIAAQNQHSAGILSSIFRGKYKTTLDLSNGFWAHSITPESYWLTAFTWLGQQYCWTRLPQGFLNSPALFNADVVDLLKEVPNVQVYVDDIYISHDDPREHLEQLEKVFSLLLNAGYVVSLKKSEIAQHEVEFLGFNITKEGRGLTETFKQKLLNITPPRDLKQLQSILGLLNFARNFIPNFSELVKPLYNIIATAPGKYITWTTDNSQQLQNIISMLNSAENLEERNPEVRLIMKVNTSPSAGYIRFYNEFAKRPIMYLNYVYTKAEVKFTNTEKLLTTIHKGLIKALDLGMGQEILVYSPIVSMTKIQKTPLPERKALPIRWITWMSYLEDPRIQFHYDKTLPELQQVPTVTDDIIAKIKHPSEFSMVFYTDGSAIKHPNVNKSHNAGMGIAQVQFKPEFTVINTWSIPLGDHTAQLAEVAAVEFACKKALKIDGPVLIVTDSFYVAESVNKELPYWQSNGFFNNKKKPLKHVSKWKSIADCIQLKPDIIIIHEKGHQPTASTFHTEGNNLADKLATQGSYVVNAGKRTADGSEFEKRTADGSEFESPKKKAKVE

SEQ ID NO: 592 - protein, 2195 aa, synthetic construct
MPAAKRVKLDGGDKKYSIGLDIGTNSVGWAVITDEYKVPSKKFKVLGNTDRHSIKKNLIGALLFDSGETAEATRLKRTARRRYTRRKNRICYLQEIFSNEMAKVDDSFFHRLEESFLVEEDKKHERHPIFGNIVDEVAYHEKYPTIYHLRKKLVDSTDKADLRLIYLALAHMIKFRGHFLIEGDLNPDNSDVDKLFIQLVQTYNQLFEENPINASGVDAKAILSARLSKSRRLENLIAQLPGEKKNGLFGNLIALSLGLTPNFKSNFDLAEDAKLQLSKDTYDDDLDNLLAQIGDQYADLFLAAKNLSDAILLSDILRVNTEITKAPLSASMIKRYDEHHQDLTLLKALVRQQLPEKYKEIFFDQSKNGYAGYIDGGASQEEFYKFIKPILEKMDGTEELLVKLNREDLLRKQRTFDNGSIPHQIHLGELHAILRRQEDFYPFLKDNREKIEKILTFRIPYYVGPLARGNSRFAWMTRKSEETITPWNFEEVVDKGASAQSFIERMTNFDKNLPNEKVLPKHSLLYEYFTVYNELTKVKYVTEGMRKPAFLSGEQKKAIVDLLFKTNRKVTVKQLKEDYFKKIECFDSVEISGVEDRFNASLGTYHDLLKIIKDKDFLDNEENEDILEDIVLTLTLFEDREMIEERLKTYAHLFDDKVMKQLKRRRYTGWGRLSRKLINGIRDKQSGKTILDFLKSDGFANRNFMQLIHDDSLTFKEDIQKAQVSGQGDSLHEHIANLAGSPAIKKGILQTVKVVDELVKVMGRHKPENIVIEMARENQTTQKGQKNSRERMKRIEEGIKELGSQILKEHPVENTQLQNEKLYLYYLQNGRDMYVDQELDINRLSDYDVDHIVPQSFLKDDSIDNKVLTRSDKARGKSDNVPSEEVVKKMKNYWRQLLNAKLITQRKFDNLTKAERGGLSELDKAGFIKRQLVETRQITKHVAQILDSRMNTKYDENDKLIREVKVITLKSKLVSDFRKDFQFYKVREINNYHHAHDAYLNAVVGTALIKKYPKLESEFVYGDYKVYDVRKMIAKSEQEIGKATAKYFFYSNIMNFFKTEITLANGEIRKRPLIETNGETGEIVWDKGRDFATVRKVLSMPQVNIVKKTEVQTGGFSKESILPKRNSDKLIARKKDWDPKKYGGFDSPTVAYSVLVVAKVEKGKSKKLKSVKELLGITIMERSSFEKNPIDFLEAKGYKEVKKDLIIKLPKYSLFELENGRKRMLASAGELQKGNELALPSKYVNFLYLASHYEKLKGSPEDNEQKQLFVEQHKHYLDEIIEQISEFSKRVILADANLDKVLSAYNKHRDKPIREQAENIIHLFTLTNLGAPAAFKYFDTTIDRKRYTSTKEVLDATLIHQSITGLYETRIDLSQLGGDGGGGGGSGGGGSGGGGSGGGGSGGGGSGGGGSGGMDPLQLLQPLEAEIKGTKLKAHWNSGATITCVPQAFLEEEVPIKNIWIKTIHGEKEQPVYYLTFKIQGRKVEAEVISSPYDYILVSPSDIPWLMKKPLQLTTLVPLQEYEERLLKQTMLTGSYKEKLQSLFLKYDALWQHWENQVGHRRIKPHHIATGTVNPRPQKQYPINPKAKASIQTVINDLLKQGVLIQQNSIMNTPVYPVPKPDGKWRMVLDYREVNKTIPLIAAQNQHSAGILSSIFRGKYKTTLDLSNGFWAHSITPESYWLTAFTWLGQQYCWTRLPQGFLNSPALFNADVVDLLKEVPNVQVYVDDIYISHDDPREHLEQLEKVFSLLLNAGYVVSLKKSEIAQHEVEFLGFNITKEGRGLTETFKQKLLNITPPRDLKQLQSILGLLNFARNFIPNFSELVKPLYNIIATAPGKYITWTTDNSQQLQNIISMLNSAENLEERNPEVRLIMKVNTSPSAGYIRFYNEFAKRPIMYLNYVYTKAEVKFTNTEKLLTTIHKGLIKALDLGMGQEILVYSPIVSMTKIQKTPLPERKALPIRWITWMSYLEDPRIQFHYDKTLPELQQVPTVTDDIIAKIKHPSEFSMVFYTDGSAIKHPNVNKSHNAGMGIAQVQFKPEFTVINTWSIPLGDHTAQLAEVAAVEFACKKALKIDGPVLIVTDSFYVAESVNKELPYWQSNGFFNNKKKPLKHVSKWKSIADCIQLKPDIIIIHEKGHQPTASTFHTEGNNLADKLATQGSYVVNAGKRTADGSEFEKRTADGSEFESPKKKAKVE

SEQ ID NO: 593 - protein, 2190 aa, synthetic construct
MPAAKRVKLDGGDKKYSIGLDIGTNSVGWAVITDEYKVPSKKFKVLGNTDRHSIKKNLIGALLFDSGETAEATRLKRTARRRYTRRKNRICYLQEIFSNEMAKVDDSFFHRLEESFLVEEDKKHERHPIFGNIVDEVAYHEKYPTIYHLRKKLVDSTDKADLRLIYLALAHMIKFRGHFLIEGDLNPDNSDVDKLFIQLVQTYNQLFEENPINASGVDAKAILSARLSKSRRLENLIAQLPGEKKNGLFGNLIALSLGLTPNFKSNFDLAEDAKLQLSKDTYDDDLDNLLAQIGDQYADLFLAAKNLSDAILLSDILRVNTEITKAPLSASMIKRYDEHHQDLTLLKALVRQQLPEKYKEIFFDQSKNGYAGYIDGGASQEEFYKFIKPILEKMDGTEELLVKLNREDLLRKQRTFDNGSIPHQIHLGELHAILRRQEDFYPFLKDNREKIEKILTFRIPYYVGPLARGNSRFAWMTRKSEETITPWNFEEVVDKGASAQSFIERMTNFDKNLPNEKVLPKHSLLYEYFTVYNELTKVKYVTEGMRKPAFLSGEQKKAIVDLLFKTNRKVTVKQLKEDYFKKIECFDSVEISGVEDRFNASLGTYHDLLKIIKDKDFLDNEENEDILEDIVLTLTLFEDREMIEERLKTYAHLFDDKVMKQLKRRRYTGWGRLSRKLINGIRDKQSGKTILDFLKSDGFANRNFMQLIHDDSLTFKEDIQKAQVSGQGDSLHEHIANLAGSPAIKKGILQTVKVVDELVKVMGRHKPENIVIEMARENQTTQKGQKNSRERMKRIEEGIKELGSQILKEHPVENTQLQNEKLYLYYLQNGRDMYVDQELDINRLSDYDVDHIVPQSFLKDDSIDNKVLTRSDKARGKSDNVPSEEVVKKMKNYWRQLLNAKLITQRKFDNLTKAERGGLSELDKAGFIKRQLVETRQITKHVAQILDSRMNTKYDENDKLIREVKVITLKSKLVSDFRKDFQFYKVREINNYHHAHDAYLNAVVGTALIKKYPKLESEFVYGDYKVYDVRKMIAKSEQEIGKATAKYFFYSNIMNFFKTEITLANGEIRKRPLIETNGETGEIVWDKGRDFATVRKVLSMPQVNIVKKTEVQTGGFSKESILPKRNSDKLIARKKDWDPKKYGGFDSPTVAYSVLVVAKVEKGKSKKLKSVKELLGITIMERSSFEKNPIDFLEAKGYKEVKKDLIIKLPKYSLFELENGRKRMLASAGELQKGNELALPSKYVNFLYLASHYEKLKGSPEDNEQKQLFVEQHKHYLDEIIEQISEFSKRVILADANLDKVLSAYNKHRDKPIREQAENIIHLFTLTNLGAPAAFKYFDTTIDRKRYTSTKEVLDATLIHQSITGLYETRIDLSQLGGDGGEAAAKEAAAKEAAAKEAAAKEAAAKGGMDPLQLLQPLEAEIKGTKLKAHWNSGATITCVPQAFLEEEVPIKNIWIKTIHGEKEQPVYYLTFKIQGRKVEAEVISSPYDYILVSPSDIPWLMKKPLQLTTLVPLQEYEERLLKQTMLTGSYKEKLQSLFLKYDALWQHWENQVGHRRIKPHHIATGTVNPRPQKQYPINPKAKASIQTVINDLLKQGVLIQQNSIMNTPVYPVPKPDGKWRMVLDYREVNKTIPLIAAQNQHSAGILSSIFRGKYKTTLDLSNGFWAHSITPESYWLTAFTWLGQQYCWTRLPQGFLNSPALFNADVVDLLKEVPNVQVYVDDIYISHDDPREHLEQLEKVFSLLLNAGYVVSLKKSEIAQHEVEFLGFNITKEGRGLTETFKQKLLNITPPRDLKQLQSILGLLNFARNFIPNFSELVKPLYNIIATAPGKYITWTTDNSQQLQNIISMLNSAENLEERNPEVRLIMKVNTSPSAGYIRFYNEFAKRPIMYLNYVYTKAEVKFTNTEKLLTTIHKGLIKALDLGMGQEILVYSPIVSMTKIQKTPLPERKALPIRWITWMSYLEDPRIQFHYDKTLPELQQVPTVTDDIIAKIKHPSEFSMVFYTDGSAIKHPNVNKSHNAGMGIAQVQFKPEFTVINTWSIPLGDHTAQLAEVAAVEFACKKALKIDGPVLIVTDSFYVAESVNKELPYWQSNGFFNNKKKPLKHVSKWKSIADCIQLKPDIIIIHEKGHQPTASTFHTEGNNLADKLATQGSYVVNAGKRTADGSEFEKRTADGSEFESPKKKAKVE

SEQ ID NO: 594 - protein, 2174 aa, synthetic construct
MPAAKRVKLDGGDKKYSIGLDIGTNSVGWAVITDEYKVPSKKFKVLGNTDRHSIKKNLIGALLFDSGETAEATRLKRTARRRYTRRKNRICYLQEIFSNEMAKVDDSFFHRLEESFLVEEDKKHERHPIFGNIVDEVAYHEKYPTIYHLRKKLVDSTDKADLRLIYLALAHMIKFRGHFLIEGDLNPDNSDVDKLFIQLVQTYNQLFEENPINASGVDAKAILSARLSKSRRLENLIAQLPGEKKNGLFGNLIALSLGLTPNFKSNFDLAEDAKLQLSKDTYDDDLDNLLAQIGDQYADLFLAAKNLSDAILLSDILRVNTEITKAPLSASMIKRYDEHHQDLTLLKALVRQQLPEKYKEIFFDQSKNGYAGYIDGGASQEEFYKFIKPILEKMDGTEELLVKLNREDLLRKQRTFDNGSIPHQIHLGELHAILRRQEDFYPFLKDNREKIEKILTFRIPYYVGPLARGNSRFAWMTRKSEETITPWNFEEVVDKGASAQSFIERMTNFDKNLPNEKVLPKHSLLYEYFTVYNELTKVKYVTEGMRKPAFLSGEQKKAIVDLLFKTNRKVTVKQLKEDYFKKIECFDSVEISGVEDRFNASLGTYHDLLKIIKDKDFLDNEENEDILEDIVLTLTLFEDREMIEERLKTYAHLFDDKVMKQLKRRRYTGWGRLSRKLINGIRDKQSGKTILDFLKSDGFANRNFMQLIHDDSLTFKEDIQKAQVSGQGDSLHEHIANLAGSPAIKKGILQTVKVVDELVKVMGRHKPENIVIEMARENQTTQKGQKNSRERMKRIEEGIKELGSQILKEHPVENTQLQNEKLYLYYLQNGRDMYVDQELDINRLSDYDVDHIVPQSFLKDDSIDNKVLTRSDKARGKSDNVPSEEVVKKMKNYWRQLLNAKLITQRKFDNLTKAERGGLSELDKAGFIKRQLVETRQITKHVAQILDSRMNTKYDENDKLIREVKVITLKSKLVSDFRKDFQFYKVREINNYHHAHDAYLNAVVGTALIKKYPKLESEFVYGDYKVYDVRKMIAKSEQEIGKATAKYFFYSNIMNFFKTEITLANGEIRKRPLIETNGETGEIVWDKGRDFATVRKVLSMPQVNIVKKTEVQTGGFSKESILPKRNSDKLIARKKDWDPKKYGGFDSPTVAYSVLVVAKVEKGKSKKLKSVKELLGITIMERSSFEKNPIDFLEAKGYKEVKKDLIIKLPKYSLFELENGRKRMLASAGELQKGNELALPSKYVNFLYLASHYEKLKGSPEDNEQKQLFVEQHKHYLDEIIEQISEFSKRVILADANLDKVLSAYNKHRDKPIREQAENIIHLFTLTNLGAPAAFKYFDTTIDRKRYTSTKEVLDATLIHQSITGLYETRIDLSQLGGDGGGGGPAPGGSGGMDPLQLLQPLEAEIKGTKLKAHWNSGATITCVPQAFLEEEVPIKNIWIKTIHGEKEQPVYYLTFKIQGRKVEAEVISSPYDYILVSPSDIPWLMKKPLQLTTLVPLQEYEERLLKQTMLTGSYKEKLQSLFLKYDALWQHWENQVGHRRIKPHHIATGTVNPRPQKQYPINPKAKASIQTVINDLLKQGVLIQQNSIMNTPVYPVPKPDGKWRMVLDYREVNKTIPLIAAQNQHSAGILSSIFRGKYKTTLDLSNGFWAHSITPESYWLTAFTWLGQQYCWTRLPQGFLNSPALFNADVVDLLKEVPNVQVYVDDIYISHDDPREHLEQLEKVFSLLLNAGYVVSLKKSEIAQHEVEFLGFNITKEGRGLTETFKQKLLNITPPRDLKQLQSILGLLNFARNFIPNFSELVKPLYNIIATAPGKYITWTTDNSQQLQNIISMLNSAENLEERNPEVRLIMKVNTSPSAGYIRFYNEFAKRPIMYLNYVYTKAEVKFTNTEKLLTTIHKGLIKALDLGMGQEILVYSPIVSMTKIQKTPLPERKALPIRWITWMSYLEDPRIQFHYDKTLPELQQVPTVTDDIIAKIKHPSEFSMVFYTDGSAIKHPNVNKSHNAGMGIAQVQFKPEFTVINTWSIPLGDHTAQLAEVAAVEFACKKALKIDGPVLIVTDSFYVAESVNKELPYWQSNGFFNNKKKPLKHVSKWKSIADCIQLKPDIIIIHEKGHQPTASTFHTEGNNLADKLATQGSYVVNAGKRTADGSEFEKRTADGSEFESPKKKAKVE

SEQ ID NO: 595 - protein, 2176 aa, synthetic construct
MPAAKRVKLDGGDKKYSIGLDIGTNSVGWAVITDEYKVPSKKFKVLGNTDRHSIKKNLIGALLFDSGETAEATRLKRTARRRYTRRKNRICYLQEIFSNEMAKVDDSFFHRLEESFLVEEDKKHERHPIFGNIVDEVAYHEKYPTIYHLRKKLVDSTDKADLRLIYLALAHMIKFRGHFLIEGDLNPDNSDVDKLFIQLVQTYNQLFEENPINASGVDAKAILSARLSKSRRLENLIAQLPGEKKNGLFGNLIALSLGLTPNFKSNFDLAEDAKLQLSKDTYDDDLDNLLAQIGDQYADLFLAAKNLSDAILLSDILRVNTEITKAPLSASMIKRYDEHHQDLTLLKALVRQQLPEKYKEIFFDQSKNGYAGYIDGGASQEEFYKFIKPILEKMDGTEELLVKLNREDLLRKQRTFDNGSIPHQIHLGELHAILRRQEDFYPFLKDNREKIEKILTFRIPYYVGPLARGNSRFAWMTRKSEETITPWNFEEVVDKGASAQSFIERMTNFDKNLPNEKVLPKHSLLYEYFTVYNELTKVKYVTEGMRKPAFLSGEQKKAIVDLLFKTNRKVTVKQLKEDYFKKIECFDSVEISGVEDRFNASLGTYHDLLKIIKDKDFLDNEENEDILEDIVLTLTLFEDREMIEERLKTYAHLFDDKVMKQLKRRRYTGWGRLSRKLINGIRDKQSGKTILDFLKSDGFANRNFMQLIHDDSLTFKEDIQKAQVSGQGDSLHEHIANLAGSPAIKKGILQTVKVVDELVKVMGRHKPENIVIEMARENQTTQKGQKNSRERMKRIEEGIKELGSQILKEHPVENTQLQNEKLYLYYLQNGRDMYVDQELDINRLSDYDVDHIVPQSFLKDDSIDNKVLTRSDKARGKSDNVPSEEVVKKMKNYWRQLLNAKLITQRKFDNLTKAERGGLSELDKAGFIKRQLVETRQITKHVAQILDSRMNTKYDENDKLIREVKVITLKSKLVSDFRKDFQFYKVREINNYHHAHDAYLNAVVGTALIKKYPKLESEFVYGDYKVYDVRKMIAKSEQEIGKATAKYFFYSNIMNFFKTEITLANGEIRKRPLIETNGETGEIVWDKGRDFATVRKVLSMPQVNIVKKTEVQTGGFSKESILPKRNSDKLIARKKDWDPKKYGGFDSPTVAYSVLVVAKVEKGKSKKLKSVKELLGITIMERSSFEKNPIDFLEAKGYKEVKKDLIIKLPKYSLFELENGRKRMLASAGELQKGNELALPSKYVNFLYLASHYEKLKGSPEDNEQKQLFVEQHKHYLDEIIEQISEFSKRVILADANLDKVLSAYNKHRDKPIREQAENIIHLFTLTNLGAPAAFKYFDTTIDRKRYTSTKEVLDATLIHQSITGLYETRIDLSQLGGDGGGGSEAAAKPAPGGMDPLQLLQPLEAEIKGTKLKAHWNSGATITCVPQAFLEEEVPIKNIWIKTIHGEKEQPVYYLTFKIQGRKVEAEVISSPYDYILVSPSDIPWLMKKPLQLTTLVPLQEYEERLLKQTMLTGSYKEKLQSLFLKYDALWQHWENQVGHRRIKPHHIATGTVNPRPQKQYPINPKAKASIQTVINDLLKQGVLIQQNSIMNTPVYPVPKPDGKWRMVLDYREVNKTIPLIAAQNQHSAGILSSIFRGKYKTTLDLSNGFWAHSITPESYWLTAFTWLGQQYCWTRLPQGFLNSPALFNADVVDLLKEVPNVQVYVDDIYISHDDPREHLEQLEKVFSLLLNAGYVVSLKKSEIAQHEVEFLGFNITKEGRGLTETFKQKLLNITPPRDLKQLQSILGLLNFARNFIPNFSELVKPLYNIIATAPGKYITWTTDNSQQLQNIISMLNSAENLEERNPEVRLIMKVNTSPSAGYIRFYNEFAKRPIMYLNYVYTKAEVKFTNTEKLLTTIHKGLIKALDLGMGQEILVYSPIVSMTKIQKTPLPERKALPIRWITWMSYLEDPRIQFHYDKTLPELQQVPTVTDDIIAKIKHPSEFSMVFYTDGSAIKHPNVNKSHNAGMGIAQVQFKPEFTVINTWSIPLGDHTAQLAEVAAVEFACKKALKIDGPVLIVTDSFYVAESVNKELPYWQSNGFFNNKKKPLKHVSKWKSIADCIQLKPDIIIIHEKGHQPTASTFHTEGNNLADKLATQGSYVVNAGKRTADGSEFEKRTADGSEFESPKKKAKVE

SEQ ID NO: 596 - protein, 2180 aa, synthetic construct
MPAAKRVKLDGGDKKYSIGLDIGTNSVGWAVITDEYKVPSKKFKVLGNTDRHSIKKNLIGALLFDSGETAEATRLKRTARRRYTRRKNRICYLQEIFSNEMAKVDDSFFHRLEESFLVEEDKKHERHPIFGNIVDEVAYHEKYPTIYHLRKKLVDSTDKADLRLIYLALAHMIKFRGHFLIEGDLNPDNSDVDKLFIQLVQTYNQLFEENPINASGVDAKAILSARLSKSRRLENLIAQLPGEKKNGLFGNLIALSLGLTPNFKSNFDLAEDAKLQLSKDTYDDDLDNLLAQIGDQYADLFLAAKNLSDAILLSDILRVNTEITKAPLSASMIKRYDEHHQDLTLLKALVRQQLPEKYKEIFFDQSKNGYAGYIDGGASQEEFYKFIKPILEKMDGTEELLVKLNREDLLRKQRTFDNGSIPHQIHLGELHAILRRQEDFYPFLKDNREKIEKILTFRIPYYVGPLARGNSRFAWMTRKSEETITPWNFEEVVDKGASAQSFIERMTNFDKNLPNEKVLPKHSLLYEYFTVYNELTKVKYVTEGMRKPAFLSGEQKKAIVDLLFKTNRKVTVKQLKEDYFKKIECFDSVEISGVEDRFNASLGTYHDLLKIIKDKDFLDNEENEDILEDIVLTLTLFEDREMIEERLKTYAHLFDDKVMKQLKRRRYTGWGRLSRKLINGIRDKQSGKTILDFLKSDGFANRNFMQLIHDDSLTFKEDIQKAQVSGQGDSLHEHIANLAGSPAIKKGILQTVKVVDELVKVMGRHKPENIVIEMARENQTTQKGQKNSRERMKRIEEGIKELGSQILKEHPVENTQLQNEKLYLYYLQNGRDMYVDQELDINRLSDYDVDHIVPQSFLKDDSIDNKVLTRSDKARGKSDNVPSEEVVKKMKNYWRQLLNAKLITQRKFDNLTKAERGGLSELDKAGFIKRQLVETRQITKHVAQILDSRMNTKYDENDKLIREVKVITLKSKLVSDFRKDFQFYKVREINNYHHAHDAYLNAVVGTALIKKYPKLESEFVYGDYKVYDVRKMIAKSEQEIGKATAKYFFYSNIMNFFKTEITLANGEIRKRPLIETNGETGEIVWDKGRDFATVRKVLSMPQVNIVKKTEVQTGGFSKESILPKRNSDKLIARKKDWDPKKYGGFDSPTVAYSVLVVAKVEKGKSKKLKSVKELLGITIMERSSFEKNPIDFLEAKGYKEVKKDLIIKLPKYSLFELENGRKRMLASAGELQKGNELALPSKYVNFLYLASHYEKLKGSPEDNEQKQLFVEQHKHYLDEIIEQISEFSKRVILADANLDKVLSAYNKHRDKPIREQAENIIHLFTLTNLGAPAAFKYFDTTIDRKRYTSTKEVLDATLIHQSITGLYETRIDLSQLGGDGGEAAAKGGGGSEAAAKGGMDPLQLLQPLEAEIKGTKLKAHWNSGATITCVPQAFLEEEVPIKNIWIKTIHGEKEQPVYYLTFKIQGRKVEAEVISSPYDYILVSPSDIPWLMKKPLQLTTLVPLQEYEERLLKQTMLTGSYKEKLQSLFLKYDALWQHWENQVGHRRIKPHHIATGTVNPRPQKQYPINPKAKASIQTVINDLLKQGVLIQQNSIMNTPVYPVPKPDGKWRMVLDYREVNKTIPLIAAQNQHSAGILSSIFRGKYKTTLDLSNGFWAHSITPESYWLTAFTWLGQQYCWTRLPQGFLNSPALFNADVVDLLKEVPNVQVYVDDIYISHDDPREHLEQLEKVFSLLLNAGYVVSLKKSEIAQHEVEFLGFNITKEGRGLTETFKQKLLNITPPRDLKQLQSILGLLNFARNFIPNFSELVKPLYNIIATAPGKYITWTTDNSQQLQNIISMLNSAENLEERNPEVRLIMKVNTSPSAGYIRFYNEFAKRPIMYLNYVYTKAEVKFTNTEKLLTTIHKGLIKALDLGMGQEILVYSPIVSMTKIQKTPLPERKALPIRWITWMSYLEDPRIQFHYDKTLPELQQVPTVTDDIIAKIKHPSEFSMVFYTDGSAIKHPNVNKSHNAGMGIAQVQFKPEFTVINTWSIPLGDHTAQLAEVAAVEFACKKALKIDGPVLIVTDSFYVAESVNKELPYWQSNGFFNNKKKPLKHVSKWKSIADCIQLKPDIIIIHEKGHQPTASTFHTEGNNLADKLATQGSYVVNAGKRTADGSEFEKRTADGSEFESPKKKAKVE

SEQ ID NO: 597 - protein, 2175 aa, synthetic construct
MPAAKRVKLDGGDKKYSIGLDIGTNSVGWAVITDEYKVPSKKFKVLGNTDRHSIKKNLIGALLFDSGETAEATRLKRTARRRYTRRKNRICYLQEIFSNEMAKVDDSFFHRLEESFLVEEDKKHERHPIFGNIVDEVAYHEKYPTIYHLRKKLVDSTDKADLRLIYLALAHMIKFRGHFLIEGDLNPDNSDVDKLFIQLVQTYNQLFEENPINASGVDAKAILSARLSKSRRLENLIAQLPGEKKNGLFGNLIALSLGLTPNFKSNFDLAEDAKLQLSKDTYDDDLDNLLAQIGDQYADLFLAAKNLSDAILLSDILRVNTEITKAPLSASMIKRYDEHHQDLTLLKALVRQQLPEKYKEIFFDQSKNGYAGYIDGGASQEEFYKFIKPILEKMDGTEELLVKLNREDLLRKQRTFDNGSIPHQIHLGELHAILRRQEDFYPFLKDNREKIEKILTFRIPYYVGPLARGNSRFAWMTRKSEETITPWNFEEVVDKGASAQSFIERMTNFDKNLPNEKVLPKHSLLYEYFTVYNELTKVKYVTEGMRKPAFLSGEQKKAIVDLLFKTNRKVTVKQLKEDYFKKIECFDSVEISGVEDRFNASLGTYHDLLKIIKDKDFLDNEENEDILEDIVLTLTLFEDREMIEERLKTYAHLFDDKVMKQLKRRRYTGWGRLSRKLINGIRDKQSGKTILDFLKSDGFANRNFMQLIHDDSLTFKEDIQKAQVSGQGDSLHEHIANLAGSPAIKKGILQTVKVVDELVKVMGRHKPENIVIEMARENQTTQKGQKNSRERMKRIEEGIKELGSQILKEHPVENTQLQNEKLYLYYLQNGRDMYVDQELDINRLSDYDVDHIVPQSFLKDDSIDNKVLTRSDKARGKSDNVPSEEVVKKMKNYWRQLLNAKLITQRKFDNLTKAERGGLSELDKAGFIKRQLVETRQITKHVAQILDSRMNTKYDENDKLIREVKVITLKSKLVSDFRKDFQFYKVREINNYHHAHDAYLNAVVGTALIKKYPKLESEFVYGDYKVYDVRKMIAKSEQEIGKATAKYFFYSNIMNFFKTEITLANGEIRKRPLIETNGETGEIVWDKGRDFATVRKVLSMPQVNIVKKTEVQTGGFSKESILPKRNSDKLIARKKDWDPKKYGGFDSPTVAYSVLVVAKVEKGKSKKLKSVKELLGITIMERSSFEKNPIDFLEAKGYKEVKKDLIIKLPKYSLFELENGRKRMLASAGELQKGNELALPSKYVNFLYLASHYEKLKGSPEDNEQKQLFVEQHKHYLDEIIEQISEFSKRVILADANLDKVLSAYNKHRDKPIREQAENIIHLFTLTNLGAPAAFKYFDTTIDRKRYTSTKEVLDATLIHQSITGLYETRIDLSQLGGDGGGGGGSGGGGSGGMDPLQLLQPLEAEIKGTKLKAHWNSGATITCVPQAFLEEEVPIKNIWIKTIHGEKEQPVYYLTFKIQGRKVEAEVISSPYDYILVSPSDIPWLMKKPLQLTTLVPLQEYEERLLKQTMLTGSYKEKLQSLFLKYDALWQHWENQVGHRRIKPHHIATGTVNPRPQKQYPINPKAKASIQTVINDLLKQGVLIQQNSIMNTPVYPVPKPDGKWRMVLDYREVNKTIPLIAAQNQHSAGILSSIFRGKYKTTLDLSNGFWAHSITPESYWLTAFTWLGQQYCWTRLPQGFLNSPALFNADVVDLLKEVPNVQVYVDDIYISHDDPREHLEQLEKVFSLLLNAGYVVSLKKSEIAQHEVEFLGFNITKEGRGLTETFKQKLLNITPPRDLKQLQSILGLLNFARNFIPNFSELVKPLYNIIATAPGKYITWTTDNSQQLQNIISMLNSAENLEERNPEVRLIMKVNTSPSAGYIRFYNEFAKRPIMYLNYVYTKAEVKFTNTEKLLTTIHKGLIKALDLGMGQEILVYSPIVSMTKIQKTPLPERKALPIRWITWMSYLEDPRIQFHYDKTLPELQQVPTVTDDIIAKIKHPSEFSMVFYTDGSAIKHPNVNKSHNAGMGIAQVQFKPEFTVINTWSIPLGDHTAQLAEVAAVEFACKKALKIDGPVLIVTDSFYVAESVNKELPYWQSNGFFNNKKKPLKHVSKWKSIADCIQLKPDIIIIHEKGHQPTASTFHTEGNNLADKLATQGSYVVNAGKRTADGSEFEKRTADGSEFESPKKKAKVE

SEQ ID NO: 598 - protein, 2175 aa, synthetic construct
MPAAKRVKLDGGDKKYSIGLDIGTNSVGWAVITDEYKVPSKKFKVLGNTDRHSIKKNLIGALLFDSGETAEATRLKRTARRRYTRRKNRICYLQEIFSNEMAKVDDSFFHRLEESFLVEEDKKHERHPIFGNIVDEVAYHEKYPTIYHLRKKLVDSTDKADLRLIYLALAHMIKFRGHFLIEGDLNPDNSDVDKLFIQLVQTYNQLFEENPINASGVDAKAILSARLSKSRRLENLIAQLPGEKKNGLFGNLIALSLGLTPNFKSNFDLAEDAKLQLSKDTYDDDLDNLLAQIGDQYADLFLAAKNLSDAILLSDILRVNTEITKAPLSASMIKRYDEHHQDLTLLKALVRQQLPEKYKEIFFDQSKNGYAGYIDGGASQEEFYKFIKPILEKMDGTEELLVKLNREDLLRKQRTFDNGSIPHQIHLGELHAILRRQEDFYPFLKDNREKIEKILTFRIPYYVGPLARGNSRFAWMTRKSEETITPWNFEEVVDKGASAQSFIERMTNFDKNLPNEKVLPKHSLLYEYFTVYNELTKVKYVTEGMRKPAFLSGEQKKAIVDLLFKTNRKVTVKQLKEDYFKKIECFDSVEISGVEDRFNASLGTYHDLLKIIKDKDFLDNEENEDILEDIVLTLTLFEDREMIEERLKTYAHLFDDKVMKQLKRRRYTGWGRLSRKLINGIRDKQSGKTILDFLKSDGFANRNFMQLIHDDSLTFKEDIQKAQVSGQGDSLHEHIANLAGSPAIKKGILQTVKVVDELVKVMGRHKPENIVIEMARENQTTQKGQKNSRERMKRIEEGIKELGSQILKEHPVENTQLQNEKLYLYYLQNGRDMYVDQELDINRLSDYDVDHIVPQSFLKDDSIDNKVLTRSDKARGKSDNVPSEEVVKKMKNYWRQLLNAKLITQRKFDNLTKAERGGLSELDKAGFIKRQLVETRQITKHVAQILDSRMNTKYDENDKLIREVKVITLKSKLVSDFRKDFQFYKVREINNYHHAHDAYLNAVVGTALIKKYPKLESEFVYGDYKVYDVRKMIAKSEQEIGKATAKYFFYSNIMNFFKTEITLANGEIRKRPLIETNGETGEIVWDKGRDFATVRKVLSMPQVNIVKKTEVQTGGFSKESILPKRNSDKLIARKKDWDPKKYGGFDSPTVAYSVLVVAKVEKGKSKKLKSVKELLGITIMERSSFEKNPIDFLEAKGYKEVKKDLIIKLPKYSLFELENGRKRMLASAGELQKGNELALPSKYVNFLYLASHYEKLKGSPEDNEQKQLFVEQHKHYLDEIIEQISEFSKRVILADANLDKVLSAYNKHRDKPIREQAENIIHLFTLTNLGAPAAFKYFDTTIDRKRYTSTKEVLDATLIHQSITGLYETRIDLSQLGGDGGEAAAKEAAAKGGMDPLQLLQPLEAEIKGTKLKAHWNSGATITCVPQAFLEEEVPIKNIWIKTIHGEKEQPVYYLTFKIQGRKVEAEVISSPYDYILVSPSDIPWLMKKPLQLTTLVPLQEYEERLLKQTMLTGSYKEKLQSLFLKYDALWQHWENQVGHRRIKPHHIATGTVNPRPQKQYPINPKAKASIQTVINDLLKQGVLIQQNSIMNTPVYPVPKPDGKWRMVLDYREVNKTIPLIAAQNQHSAGILSSIFRGKYKTTLDLSNGFWAHSITPESYWLTAFTWLGQQYCWTRLPQGFLNSPALFNADVVDLLKEVPNVQVYVDDIYISHDDPREHLEQLEKVFSLLLNAGYVVSLKKSEIAQHEVEFLGFNITKEGRGLTETFKQKLLNITPPRDLKQLQSILGLLNFARNFIPNFSELVKPLYNIIATAPGKYITWTTDNSQQLQNIISMLNSAENLEERNPEVRLIMKVNTSPSAGYIRFYNEFAKRPIMYLNYVYTKAEVKFTNTEKLLTTIHKGLIKALDLGMGQEILVYSPIVSMTKIQKTPLPERKALPIRWITWMSYLEDPRIQFHYDKTLPELQQVPTVTDDIIAKIKHPSEFSMVFYTDGSAIKHPNVNKSHNAGMGIAQVQFKPEFTVINTWSIPLGDHTAQLAEVAAVEFACKKALKIDGPVLIVTDSFYVAESVNKELPYWQSNGFFNNKKKPLKHVSKWKSIADCIQLKPDIIIIHEKGHQPTASTFHTEGNNLADKLATQGSYVVNAGKRTADGSEFEKRTADGSEFESPKKKAKVE

SEQ ID NO: 599 - protein, 2176 aa, synthetic construct
MPAAKRVKLDGGDKKYSIGLDIGTNSVGWAVITDEYKVPSKKFKVLGNTDRHSIKKNLIGALLFDSGETAEATRLKRTARRRYTRRKNRICYLQEIFSNEMAKVDDSFFHRLEESFLVEEDKKHERHPIFGNIVDEVAYHEKYPTIYHLRKKLVDSTDKADLRLIYLALAHMIKFRGHFLIEGDLNPDNSDVDKLFIQLVQTYNQLFEENPINASGVDAKAILSARLSKSRRLENLIAQLPGEKKNGLFGNLIALSLGLTPNFKSNFDLAEDAKLQLSKDTYDDDLDNLLAQIGDQYADLFLAAKNLSDAILLSDILRVNTEITKAPLSASMIKRYDEHHQDLTLLKALVRQQLPEKYKEIFFDQSKNGYAGYIDGGASQEEFYKFIKPILEKMDGTEELLVKLNREDLLRKQRTFDNGSIPHQIHLGELHAILRRQEDFYPFLKDNREKIEKILTFRIPYYVGPLARGNSRFAWMTRKSEETITPWNFEEVVDKGASAQSFIERMTNFDKNLPNEKVLPKHSLLYEYFTVYNELTKVKYVTEGMRKPAFLSGEQKKAIVDLLFKTNRKVTVKQLKEDYFKKIECFDSVEISGVEDRFNASLGTYHDLLKIIKDKDFLDNEENEDILEDIVLTLTLFEDREMIEERLKTYAHLFDDKVMKQLKRRRYTGWGRLSRKLINGIRDKQSGKTILDFLKSDGFANRNFMQLIHDDSLTFKEDIQKAQVSGQGDSLHEHIANLAGSPAIKKGILQTVKVVDELVKVMGRHKPENIVIEMARENQTTQKGQKNSRERMKRIEEGIKELGSQILKEHPVENTQLQNEKLYLYYLQNGRDMYVDQELDINRLSDYDVDHIVPQSFLKDDSIDNKVLTRSDKARGKSDNVPSEEVVKKMKNYWRQLLNAKLITQRKFDNLTKAERGGLSELDKAGFIKRQLVETRQITKHVAQILDSRMNTKYDENDKLIREVKVITLKSKLVSDFRKDFQFYKVREINNYHHAHDAYLNAVVGTALIKKYPKLESEFVYGDYKVYDVRKMIAKSEQEIGKATAKYFFYSNIMNFFKTEITLANGEIRKRPLIETNGETGEIVWDKGRDFATVRKVLSMPQVNIVKKTEVQTGGFSKESILPKRNSDKLIARKKDWDPKKYGGFDSPTVAYSVLVVAKVEKGKSKKLKSVKELLGITIMERSSFEKNPIDFLEAKGYKEVKKDLIIKLPKYSLFELENGRKRMLASAGELQKGNELALPSKYVNFLYLASHYEKLKGSPEDNEQKQLFVEQHKHYLDEIIEQISEFSKRVILADANLDKVLSAYNKHRDKPIREQAENIIHLFTLTNLGAPAAFKYFDTTIDRKRYTSTKEVLDATLIHQSITGLYETRIDLSQLGGDGGGSSEAAAKGGGGGMDPLQLLQPLEAEIKGTKLKAHWNSGATITCVPQAFLEEEVPIKNIWIKTIHGEKEQPVYYLTFKIQGRKVEAEVISSPYDYILVSPSDIPWLMKKPLQLTTLVPLQEYEERLLKQTMLTGSYKEKLQSLFLKYDALWQHWENQVGHRRIKPHHIATGTVNPRPQKQYPINPKAKASIQTVINDLLKQGVLIQQNSIMNTPVYPVPKPDGKWRMVLDYREVNKTIPLIAAQNQHSAGILSSIFRGKYKTTLDLSNGFWAHSITPESYWLTAFTWLGQQYCWTRLPQGFLNSPALFNADVVDLLKEVPNVQVYVDDIYISHDDPREHLEQLEKVFSLLLNAGYVVSLKKSEIAQHEVEFLGFNITKEGRGLTETFKQKLLNITPPRDLKQLQSILGLLNFARNFIPNFSELVKPLYNIIATAPGKYITWTTDNSQQLQNIISMLNSAENLEERNPEVRLIMKVNTSPSAGYIRFYNEFAKRPIMYLNYVYTKAEVKFTNTEKLLTTIHKGLIKALDLGMGQEILVYSPIVSMTKIQKTPLPERKALPIRWITWMSYLEDPRIQFHYDKTLPELQQVPTVTDDIIAKIKHPSEFSMVFYTDGSAIKHPNVNKSHNAGMGIAQVQFKPEFTVINTWSIPLGDHTAQLAEVAAVEFACKKALKIDGPVLIVTDSFYVAESVNKELPYWQSNGFFNNKKKPLKHVSKWKSIADCIQLKPDIIIIHEKGHQPTASTFHTEGNNLADKLATQGSYVVNAGKRTADGSEFEKRTADGSEFESPKKKAKVE

SEQ ID NO: 600 - protein, 2174 aa, synthetic construct
MPAAKRVKLDGGDKKYSIGLDIGTNSVGWAVITDEYKVPSKKFKVLGNTDRHSIKKNLIGALLFDSGETAEATRLKRTARRRYTRRKNRICYLQEIFSNEMAKVDDSFFHRLEESFLVEEDKKHERHPIFGNIVDEVAYHEKYPTIYHLRKKLVDSTDKADLRLIYLALAHMIKFRGHFLIEGDLNPDNSDVDKLFIQLVQTYNQLFEENPINASGVDAKAILSARLSKSRRLENLIAQLPGEKKNGLFGNLIALSLGLTPNFKSNFDLAEDAKLQLSKDTYDDDLDNLLAQIGDQYADLFLAAKNLSDAILLSDILRVNTEITKAPLSASMIKRYDEHHQDLTLLKALVRQQLPEKYKEIFFDQSKNGYAGYIDGGASQEEFYKFIKPILEKMDGTEELLVKLNREDLLRKQRTFDNGSIPHQIHLGELHAILRRQEDFYPFLKDNREKIEKILTFRIPYYVGPLARGNSRFAWMTRKSEETITPWNFEEVVDKGASAQSFIERMTNFDKNLPNEKVLPKHSLLYEYFTVYNELTKVKYVTEGMRKPAFLSGEQKKAIVDLLFKTNRKVTVKQLKEDYFKKIECFDSVEISGVEDRFNASLGTYHDLLKIIKDKDFLDNEENEDILEDIVLTLTLFEDREMIEERLKTYAHLFDDKVMKQLKRRRYTGWGRLSRKLINGIRDKQSGKTILDFLKSDGFANRNFMQLIHDDSLTFKEDIQKAQVSGQGDSLHEHIANLAGSPAIKKGILQTVKVVDELVKVMGRHKPENIVIEMARENQTTQKGQKNSRERMKRIEEGIKELGSQILKEHPVENTQLQNEKLYLYYLQNGRDMYVDQELDINRLSDYDVDHIVPQSFLKDDSIDNKVLTRSDKARGKSDNVPSEEVVKKMKNYWRQLLNAKLITQRKFDNLTKAERGGLSELDKAGFIKRQLVETRQITKHVAQILDSRMNTKYDENDKLIREVKVITLKSKLVSDFRKDFQFYKVREINNYHHAHDAYLNAVVGTALIKKYPKLESEFVYGDYKVYDVRKMIAKSEQEIGKATAKYFFYSNIMNFFKTEITLANGEIRKRPLIETNGETGEIVWDKGRDFATVRKVLSMPQVNIVKKTEVQTGGFSKESILPKRNSDKLIARKKDWDPKKYGGFDSPTVAYSVLVVAKVEKGKSKKLKSVKELLGITIMERSSFEKNPIDFLEAKGYKEVKKDLIIKLPKYSLFELENGRKRMLASAGELQKGNELALPSKYVNFLYLASHYEKLKGSPEDNEQKQLFVEQHKHYLDEIIEQISEFSKRVILADANLDKVLSAYNKHRDKPIREQAENIIHLFTLTNLGAPAAFKYFDTTIDRKRYTSTKEVLDATLIHQSITGLYETRIDLSQLGGDGGPAPAPAPAPGGMDPLQLLQPLEAEIKGTKLKAHWNSGATITCVPQAFLEEEVPIKNIWIKTIHGEKEQPVYYLTFKIQGRKVEAEVISSPYDYILVSPSDIPWLMKKPLQLTTLVPLQEYEERLLKQTMLTGSYKEKLQSLFLKYDALWQHWENQVGHRRIKPHHIATGTVNPRPQKQYPINPKAKASIQTVINDLLKQGVLIQQNSIMNTPVYPVPKPDGKWRMVLDYREVNKTIPLIAAQNQHSAGILSSIFRGKYKTTLDLSNGFWAHSITPESYWLTAFTWLGQQYCWTRLPQGFLNSPALFNADVVDLLKEVPNVQVYVDDIYISHDDPREHLEQLEKVFSLLLNAGYVVSLKKSEIAQHEVEFLGFNITKEGRGLTETFKQKLLNITPPRDLKQLQSILGLLNFARNFIPNFSELVKPLYNIIATAPGKYITWTTDNSQQLQNIISMLNSAENLEERNPEVRLIMKVNTSPSAGYIRFYNEFAKRPIMYLNYVYTKAEVKFTNTEKLLTTIHKGLIKALDLGMGQEILVYSPIVSMTKIQKTPLPERKALPIRWITWMSYLEDPRIQFHYDKTLPELQQVPTVTDDIIAKIKHPSEFSMVFYTDGSAIKHPNVNKSHNAGMGIAQVQFKPEFTVINTWSIPLGDHTAQLAEVAAVEFACKKALKIDGPVLIVTDSFYVAESVNKELPYWQSNGFFNNKKKPLKHVSKWKSIADCIQLKPDIIIIHEKGHQPTASTFHTEGNNLADKLATQGSYVVNAGKRTADGSEFEKRTADGSEFESPKKKAKVE

SEQ ID NO: 601 - protein, 2180 aa, synthetic construct
MPAAKRVKLDGGDKKYSIGLDIGTNSVGWAVITDEYKVPSKKFKVLGNTDRHSIKKNLIGALLFDSGETAEATRLKRTARRRYTRRKNRICYLQEIFSNEMAKVDDSFFHRLEESFLVEEDKKHERHPIFGNIVDEVAYHEKYPTIYHLRKKLVDSTDKADLRLIYLALAHMIKFRGHFLIEGDLNPDNSDVDKLFIQLVQTYNQLFEENPINASGVDAKAILSARLSKSRRLENLIAQLPGEKKNGLFGNLIALSLGLTPNFKSNFDLAEDAKLQLSKDTYDDDLDNLLAQIGDQYADLFLAAKNLSDAILLSDILRVNTEITKAPLSASMIKRYDEHHQDLTLLKALVRQQLPEKYKEIFFDQSKNGYAGYIDGGASQEEFYKFIKPILEKMDGTEELLVKLNREDLLRKQRTFDNGSIPHQIHLGELHAILRRQEDFYPFLKDNREKIEKILTFRIPYYVGPLARGNSRFAWMTRKSEETITPWNFEEVVDKGASAQSFIERMTNFDKNLPNEKVLPKHSLLYEYFTVYNELTKVKYVTEGMRKPAFLSGEQKKAIVDLLFKTNRKVTVKQLKEDYFKKIECFDSVEISGVEDRFNASLGTYHDLLKIIKDKDFLDNEENEDILEDIVLTLTLFEDREMIEERLKTYAHLFDDKVMKQLKRRRYTGWGRLSRKLINGIRDKQSGKTILDFLKSDGFANRNFMQLIHDDSLTFKEDIQKAQVSGQGDSLHEHIANLAGSPAIKKGILQTVKVVDELVKVMGRHKPENIVIEMARENQTTQKGQKNSRERMKRIEEGIKELGSQILKEHPVENTQLQNEKLYLYYLQNGRDMYVDQELDINRLSDYDVDHIVPQSFLKDDSIDNKVLTRSDKARGKSDNVPSEEVVKKMKNYWRQLLNAKLITQRKFDNLTKAERGGLSELDKAGFIKRQLVETRQITKHVAQILDSRMNTKYDENDKLIREVKVITLKSKLVSDFRKDFQFYKVREINNYHHAHDAYLNAVVGTALIKKYPKLESEFVYGDYKVYDVRKMIAKSEQEIGKATAKYFFYSNIMNFFKTEITLANGEIRKRPLIETNGETGEIVWDKGRDFATVRKVLSMPQVNIVKKTEVQTGGFSKESILPKRNSDKLIARKKDWDPKKYGGFDSPTVAYSVLVVAKVEKGKSKKLKSVKELLGITIMERSSFEKNPIDFLEAKGYKEVKKDLIIKLPKYSLFELENGRKRMLASAGELQKGNELALPSKYVNFLYLASHYEKLKGSPEDNEQKQLFVEQHKHYLDEIIEQISEFSKRVILADANLDKVLSAYNKHRDKPIREQAENIIHLFTLTNLGAPAAFKYFDTTIDRKRYTSTKEVLDATLIHQSITGLYETRIDLSQLGGDGGGGGGSGGGGSGGGGSGGMDPLQLLQPLEAEIKGTKLKAHWNSGATITCVPQAFLEEEVPIKNIWIKTIHGEKEQPVYYLTFKIQGRKVEAEVISSPYDYILVSPSDIPWLMKKPLQLTTLVPLQEYEERLLKQTMLTGSYKEKLQSLFLKYDALWQHWENQVGHRRIKPHHIATGTVNPRPQKQYPINPKAKASIQTVINDLLKQGVLIQQNSIMNTPVYPVPKPDGKWRMVLDYREVNKTIPLIAAQNQHSAGILSSIFRGKYKTTLDLSNGFWAHSITPESYWLTAFTWLGQQYCWTRLPQGFLNSPALFNADVVDLLKEVPNVQVYVDDIYISHDDPREHLEQLEKVFSLLLNAGYVVSLKKSEIAQHEVEFLGFNITKEGRGLTETFKQKLLNITPPRDLKQLQSILGLLNFARNFIPNFSELVKPLYNIIATAPGKYITWTTDNSQQLQNIISMLNSAENLEERNPEVRLIMKVNTSPSAGYIRFYNEFAKRPIMYLNYVYTKAEVKFTNTEKLLTTIHKGLIKALDLGMGQEILVYSPIVSMTKIQKTPLPERKALPIRWITWMSYLEDPRIQFHYDKTLPELQQVPTVTDDIIAKIKHPSEFSMVFYTDGSAIKHPNVNKSHNAGMGIAQVQFKPEFTVINTWSIPLGDHTAQLAEVAAVEFACKKALKIDGPVLIVTDSFYVAESVNKELPYWQSNGFFNNKKKPLKHVSKWKSIADCIQLKPDIIIIHEKGHQPTASTFHTEGNNLADKLATQGSYVVNAGKRTADGSEFEKRTADGSEFESPKKKAKVE

SEQ ID NO: 602 - protein, 2176 aa, synthetic construct
MPAAKRVKLDGGDKKYSIGLDIGTNSVGWAVITDEYKVPSKKFKVLGNTDRHSIKKNLIGALLFDSGETAEATRLKRTARRRYTRRKNRICYLQEIFSNEMAKVDDSFFHRLEESFLVEEDKKHERHPIFGNIVDEVAYHEKYPTIYHLRKKLVDSTDKADLRLIYLALAHMIKFRGHFLIEGDLNPDNSDVDKLFIQLVQTYNQLFEENPINASGVDAKAILSARLSKSRRLENLIAQLPGEKKNGLFGNLIALSLGLTPNFKSNFDLAEDAKLQLSKDTYDDDLDNLLAQIGDQYADLFLAAKNLSDAILLSDILRVNTEITKAPLSASMIKRYDEHHQDLTLLKALVRQQLPEKYKEIFFDQSKNGYAGYIDGGASQEEFYKFIKPILEKMDGTEELLVKLNREDLLRKQRTFDNGSIPHQIHLGELHAILRRQEDFYPFLKDNREKIEKILTFRIPYYVGPLARGNSRFAWMTRKSEETITPWNFEEVVDKGASAQSFIERMTNFDKNLPNEKVLPKHSLLYEYFTVYNELTKVKYVTEGMRKPAFLSGEQKKAIVDLLFKTNRKVTVKQLKEDYFKKIECFDSVEISGVEDRFNASLGTYHDLLKIIKDKDFLDNEENEDILEDIVLTLTLFEDREMIEERLKTYAHLFDDKVMKQLKRRRYTGWGRLSRKLINGIRDKQSGKTILDFLKSDGFANRNFMQLIHDDSLTFKEDIQKAQVSGQGDSLHEHIANLAGSPAIKKGILQTVKVVDELVKVMGRHKPENIVIEMARENQTTQKGQKNSRERMKRIEEGIKELGSQILKEHPVENTQLQNEKLYLYYLQNGRDMYVDQELDINRLSDYDVDHIVPQSFLKDDSIDNKVLTRSDKARGKSDNVPSEEVVKKMKNYWRQLLNAKLITQRKFDNLTKAERGGLSELDKAGFIKRQLVETRQITKHVAQILDSRMNTKYDENDKLIREVKVITLKSKLVSDFRKDFQFYKVREINNYHHAHDAYLNAVVGTALIKKYPKLESEFVYGDYKVYDVRKMIAKSEQEIGKATAKYFFYSNIMNFFKTEITLANGEIRKRPLIETNGETGEIVWDKGRDFATVRKVLSMPQVNIVKKTEVQTGGFSKESILPKRNSDKLIARKKDWDPKKYGGFDSPTVAYSVLVVAKVEKGKSKKLKSVKELLGITIMERSSFEKNPIDFLEAKGYKEVKKDLIIKLPKYSLFELENGRKRMLASAGELQKGNELALPSKYVNFLYLASHYEKLKGSPEDNEQKQLFVEQHKHYLDEIIEQISEFSKRVILADANLDKVLSAYNKHRDKPIREQAENIIHLFTLTNLGAPAAFKYFDTTIDRKRYTSTKEVLDATLIHQSITGLYETRIDLSQLGGDGGPAPEAAAKGSSGGMDPLQLLQPLEAEIKGTKLKAHWNSGATITCVPQAFLEEEVPIKNIWIKTIHGEKEQPVYYLTFKIQGRKVEAEVISSPYDYILVSPSDIPWLMKKPLQLTTLVPLQEYEERLLKQTMLTGSYKEKLQSLFLKYDALWQHWENQVGHRRIKPHHIATGTVNPRPQKQYPINPKAKASIQTVINDLLKQGVLIQQNSIMNTPVYPVPKPDGKWRMVLDYREVNKTIPLIAAQNQHSAGILSSIFRGKYKTTLDLSNGFWAHSITPESYWLTAFTWLGQQYCWTRLPQGFLNSPALFNADVVDLLKEVPNVQVYVDDIYISHDDPREHLEQLEKVFSLLLNAGYVVSLKKSEIAQHEVEFLGFNITKEGRGLTETFKQKLLNITPPRDLKQLQSILGLLNFARNFIPNFSELVKPLYNIIATAPGKYITWTTDNSQQLQNIISMLNSAENLEERNPEVRLIMKVNTSPSAGYIRFYNEFAKRPIMYLNYVYTKAEVKFTNTEKLLTTIHKGLIKALDLGMGQEILVYSPIVSMTKIQKTPLPERKALPIRWITWMSYLEDPRIQFHYDKTLPELQQVPTVTDDIIAKIKHPSEFSMVFYTDGSAIKHPNVNKSHNAGMGIAQVQFKPEFTVINTWSIPLGDHTAQLAEVAAVEFACKKALKIDGPVLIVTDSFYVAESVNKELPYWQSNGFFNNKKKPLKHVSKWKSIADCIQLKPDIIIIHEKGHQPTASTFHTEGNNLADKLATQGSYVVNAGKRTADGSEFEKRTADGSEFESPKKKAKVE

SEQ ID NO: 603 - protein, 2173 aa, synthetic construct
MPAAKRVKLDGGDKKYSIGLDIGTNSVGWAVITDEYKVPSKKFKVLGNTDRHSIKKNLIGALLFDSGETAEATRLKRTARRRYTRRKNRICYLQEIFSNEMAKVDDSFFHRLEESFLVEEDKKHERHPIFGNIVDEVAYHEKYPTIYHLRKKLVDSTDKADLRLIYLALAHMIKFRGHFLIEGDLNPDNSDVDKLFIQLVQTYNQLFEENPINASGVDAKAILSARLSKSRRLENLIAQLPGEKKNGLFGNLIALSLGLTPNFKSNFDLAEDAKLQLSKDTYDDDLDNLLAQIGDQYADLFLAAKNLSDAILLSDILRVNTEITKAPLSASMIKRYDEHHQDLTLLKALVRQQLPEKYKEIFFDQSKNGYAGYIDGGASQEEFYKFIKPILEKMDGTEELLVKLNREDLLRKQRTFDNGSIPHQIHLGELHAILRRQEDFYPFLKDNREKIEKILTFRIPYYVGPLARGNSRFAWMTRKSEETITPWNFEEVVDKGASAQSFIERMTNFDKNLPNEKVLPKHSLLYEYFTVYNELTKVKYVTEGMRKPAFLSGEQKKAIVDLLFKTNRKVTVKQLKEDYFKKIECFDSVEISGVEDRFNASLGTYHDLLKIIKDKDFLDNEENEDILEDIVLTLTLFEDREMIEERLKTYAHLFDDKVMKQLKRRRYTGWGRLSRKLINGIRDKQSGKTILDFLKSDGFANRNFMQLIHDDSLTFKEDIQKAQVSGQGDSLHEHIANLAGSPAIKKGILQTVKVVDELVKVMGRHKPENIVIEMARENQTTQKGQKNSRERMKRIEEGIKELGSQILKEHPVENTQLQNEKLYLYYLQNGRDMYVDQELDINRLSDYDVDHIVPQSFLKDDSIDNKVLTRSDKARGKSDNVPSEEVVKKMKNYWRQLLNAKLITQRKFDNLTKAERGGLSELDKAGFIKRQLVETRQITKHVAQILDSRMNTKYDENDKLIREVKVITLKSKLVSDFRKDFQFYKVREINNYHHAHDAYLNAVVGTALIKKYPKLESEFVYGDYKVYDVRKMIAKSEQEIGKATAKYFFYSNIMNFFKTEITLANGEIRKRPLIETNGETGEIVWDKGRDFATVRKVLSMPQVNIVKKTEVQTGGFSKESILPKRNSDKLIARKKDWDPKKYGGFDSPTVAYSVLVVAKVEKGKSKKLKSVKELLGITIMERSSFEKNPIDFLEAKGYKEVKKDLIIKLPKYSLFELENGRKRMLASAGELQKGNELALPSKYVNFLYLASHYEKLKGSPEDNEQKQLFVEQHKHYLDEIIEQISEFSKRVILADANLDKVLSAYNKHRDKPIREQAENIIHLFTLTNLGAPAAFKYFDTTIDRKRYTSTKEVLDATLIHQSITGLYETRIDLSQLGGDGGGSSEAAAKGGMDPLQLLQPLEAEIKGTKLKAHWNSGATITCVPQAFLEEEVPIKNIWIKTIHGEKEQPVYYLTFKIQGRKVEAEVISSPYDYILVSPSDIPWLMKKPLQLTTLVPLQEYEERLLKQTMLTGSYKEKLQSLFLKYDALWQHWENQVGHRRIKPHHIATGTVNPRPQKQYPINPKAKASIQTVINDLLKQGVLIQQNSIMNTPVYPVPKPDGKWRMVLDYREVNKTIPLIAAQNQHSAGILSSIFRGKYKTTLDLSNGFWAHSITPESYWLTAFTWLGQQYCWTRLPQGFLNSPALFNADVVDLLKEVPNVQVYVDDIYISHDDPREHLEQLEKVFSLLLNAGYVVSLKKSEIAQHEVEFLGFNITKEGRGLTETFKQKLLNITPPRDLKQLQSILGLLNFARNFIPNFSELVKPLYNIIATAPGKYITWTTDNSQQLQNIISMLNSAENLEERNPEVRLIMKVNTSPSAGYIRFYNEFAKRPIMYLNYVYTKAEVKFTNTEKLLTTIHKGLIKALDLGMGQEILVYSPIVSMTKIQKTPLPERKALPIRWITWMSYLEDPRIQFHYDKTLPELQQVPTVTDDIIAKIKHPSEFSMVFYTDGSAIKHPNVNKSHNAGMGIAQVQFKPEFTVINTWSIPLGDHTAQLAEVAAVEFACKKALKIDGPVLIVTDSFYVAESVNKELPYWQSNGFFNNKKKPLKHVSKWKSIADCIQLKPDIIIIHEKGHQPTASTFHTEGNNLADKLATQGSYVVNAGKRTADGSEFEKRTADGSEFESPKKKAKVE

SEQ ID NO: 604 - protein, 2183 aa, synthetic construct
MPAAKRVKLDGGDKKYSIGLDIGTNSVGWAVITDEYKVPSKKFKVLGNTDRHSIKKNLIGALLFDSGETAEATRLKRTARRRYTRRKNRICYLQEIFSNEMAKVDDSFFHRLEESFLVEEDKKHERHPIFGNIVDEVAYHEKYPTIYHLRKKLVDSTDKADLRLIYLALAHMIKFRGHFLIEGDLNPDNSDVDKLFIQLVQTYNQLFEENPINASGVDAKAILSARLSKSRRLENLIAQLPGEKKNGLFGNLIALSLGLTPNFKSNFDLAEDAKLQLSKDTYDDDLDNLLAQIGDQYADLFLAAKNLSDAILLSDILRVNTEITKAPLSASMIKRYDEHHQDLTLLKALVRQQLPEKYKEIFFDQSKNGYAGYIDGGASQEEFYKFIKPILEKMDGTEELLVKLNREDLLRKQRTFDNGSIPHQIHLGELHAILRRQEDFYPFLKDNREKIEKILTFRIPYYVGPLARGNSRFAWMTRKSEETITPWNFEEVVDKGASAQSFIERMTNFDKNLPNEKVLPKHSLLYEYFTVYNELTKVKYVTEGMRKPAFLSGEQKKAIVDLLFKTNRKVTVKQLKEDYFKKIECFDSVEISGVEDRFNASLGTYHDLLKIIKDKDFLDNEENEDILEDIVLTLTLFEDREMIEERLKTYAHLFDDKVMKQLKRRRYTGWGRLSRKLINGIRDKQSGKTILDFLKSDGFANRNFMQLIHDDSLTFKEDIQKAQVSGQGDSLHEHIANLAGSPAIKKGILQTVKVVDELVKVMGRHKPENIVIEMARENQTTQKGQKNSRERMKRIEEGIKELGSQILKEHPVENTQLQNEKLYLYYLQNGRDMYVDQELDINRLSDYDVDHIVPQSFLKDDSIDNKVLTRSDKARGKSDNVPSEEVVKKMKNYWRQLLNAKLITQRKFDNLTKAERGGLSELDKAGFIKRQLVETRQITKHVAQILDSRMNTKYDENDKLIREVKVITLKSKLVSDFRKDFQFYKVREINNYHHAHDAYLNAVVGTALIKKYPKLESEFVYGDYKVYDVRKMIAKSEQEIGKATAKYFFYSNIMNFFKTEITLANGEIRKRPLIETNGETGEIVWDKGRDFATVRKVLSMPQVNIVKKTEVQTGGFSKESILPKRNSDKLIARKKDWDPKKYGGFDSPTVAYSVLVVAKVEKGKSKKLKSVKELLGITIMERSSFEKNPIDFLEAKGYKEVKKDLIIKLPKYSLFELENGRKRMLASAGELQKGNELALPSKYVNFLYLASHYEKLKGSPEDNEQKQLFVEQHKHYLDEIIEQISEFSKRVILADANLDKVLSAYNKHRDKPIREQAENIIHLFTLTNLGAPAAFKYFDTTIDRKRYTSTKEVLDATLIHQSITGLYETRIDLSQLGGDGGGGSGGSGGSGGSGGSGGSGGMDPLQLLQPLEAEIKGTKLKAHWNSGATITCVPQAFLEEEVPIKNIWIKTIHGEKEQPVYYLTFKIQGRKVEAEVISSPYDYILVSPSDIPWLMKKPLQLTTLVPLQEYEERLLKQTMLTGSYKEKLQSLFLKYDALWQHWENQVGHRRIKPHHIATGTVNPRPQKQYPINPKAKASIQTVINDLLKQGVLIQQNSIMNTPVYPVPKPDGKWRMVLDYREVNKTIPLIAAQNQHSAGILSSIFRGKYKTTLDLSNGFWAHSITPESYWLTAFTWLGQQYCWTRLPQGFLNSPALFNADVVDLLKEVPNVQVYVDDIYISHDDPREHLEQLEKVFSLLLNAGYVVSLKKSEIAQHEVEFLGFNITKEGRGLTETFKQKLLNITPPRDLKQLQSILGLLNFARNFIPNFSELVKPLYNIIATAPGKYITWTTDNSQQLQNIISMLNSAENLEERNPEVRLIMKVNTSPSAGYIRFYNEFAKRPIMYLNYVYTKAEVKFTNTEKLLTTIHKGLIKALDLGMGQEILVYSPIVSMTKIQKTPLPERKALPIRWITWMSYLEDPRIQFHYDKTLPELQQVPTVTDDIIAKIKHPSEFSMVFYTDGSAIKHPNVNKSHNAGMGIAQVQFKPEFTVINTWSIPLGDHTAQLAEVAAVEFACKKALKIDGPVLIVTDSFYVAESVNKELPYWQSNGFFNNKKKPLKHVSKWKSIADCIQLKPDIIIIHEKGHQPTASTFHTEGNNLADKLATQGSYVVNAGKRTADGSEFEKRTADGSEFESPKKKAKVE

SEQ ID NO: 605 - protein, 2171 aa, synthetic construct
MPAAKRVKLDGGDKKYSIGLDIGTNSVGWAVITDEYKVPSKKFKVLGNTDRHSIKKNLIGALLFDSGETAEATRLKRTARRRYTRRKNRICYLQEIFSNEMAKVDDSFFHRLEESFLVEEDKKHERHPIFGNIVDEVAYHEKYPTIYHLRKKLVDSTDKADLRLIYLALAHMIKFRGHFLIEGDLNPDNSDVDKLFIQLVQTYNQLFEENPINASGVDAKAILSARLSKSRRLENLIAQLPGEKKNGLFGNLIALSLGLTPNFKSNFDLAEDAKLQLSKDTYDDDLDNLLAQIGDQYADLFLAAKNLSDAILLSDILRVNTEITKAPLSASMIKRYDEHHQDLTLLKALVRQQLPEKYKEIFFDQSKNGYAGYIDGGASQEEFYKFIKPILEKMDGTEELLVKLNREDLLRKQRTFDNGSIPHQIHLGELHAILRRQEDFYPFLKDNREKIEKILTFRIPYYVGPLARGNSRFAWMTRKSEETITPWNFEEVVDKGASAQSFIERMTNFDKNLPNEKVLPKHSLLYEYFTVYNELTKVKYVTEGMRKPAFLSGEQKKAIVDLLFKTNRKVTVKQLKEDYFKKIECFDSVEISGVEDRFNASLGTYHDLLKIIKDKDFLDNEENEDILEDIVLTLTLFEDREMIEERLKTYAHLFDDKVMKQLKRRRYTGWGRLSRKLINGIRDKQSGKTILDFLKSDGFANRNFMQLIHDDSLTFKEDIQKAQVSGQGDSLHEHIANLAGSPAIKKGILQTVKVVDELVKVMGRHKPENIVIEMARENQTTQKGQKNSRERMKRIEEGIKELGSQILKEHPVENTQLQNEKLYLYYLQNGRDMYVDQELDINRLSDYDVDHIVPQSFLKDDSIDNKVLTRSDKARGKSDNVPSEEVVKKMKNYWRQLLNAKLITQRKFDNLTKAERGGLSELDKAGFIKRQLVETRQITKHVAQILDSRMNTKYDENDKLIREVKVITLKSKLVSDFRKDFQFYKVREINNYHHAHDAYLNAVVGTALIKKYPKLESEFVYGDYKVYDVRKMIAKSEQEIGKATAKYFFYSNIMNFFKTEITLANGEIRKRPLIETNGETGEIVWDKGRDFATVRKVLSMPQVNIVKKTEVQTGGFSKESILPKRNSDKLIARKKDWDPKKYGGFDSPTVAYSVLVVAKVEKGKSKKLKSVKELLGITIMERSSFEKNPIDFLEAKGYKEVKKDLIIKLPKYSLFELENGRKRMLASAGELQKGNELALPSKYVNFLYLASHYEKLKGSPEDNEQKQLFVEQHKHYLDEIIEQISEFSKRVILADANLDKVLSAYNKHRDKPIREQAENIIHLFTLTNLGAPAAFKYFDTTIDRKRYTSTKEVLDATLIHQSITGLYETRIDLSQLGGDGGGGGGSSGGMDPLQLLQPLEAEIKGTKLKAHWNSGATITCVPQAFLEEEVPIKNIWIKTIHGEKEQPVYYLTFKIQGRKVEAEVISSPYDYILVSPSDIPWLMKKPLQLTTLVPLQEYEERLLKQTMLTGSYKEKLQSLFLKYDALWQHWENQVGHRRIKPHHIATGTVNPRPQKQYPINPKAKASIQTVINDLLKQGVLIQQNSIMNTPVYPVPKPDGKWRMVLDYREVNKTIPLIAAQNQHSAGILSSIFRGKYKTTLDLSNGFWAHSITPESYWLTAFTWLGQQYCWTRLPQGFLNSPALFNADVVDLLKEVPNVQVYVDDIYISHDDPREHLEQLEKVFSLLLNAGYVVSLKKSEIAQHEVEFLGFNITKEGRGLTETFKQKLLNITPPRDLKQLQSILGLLNFARNFIPNFSELVKPLYNIIATAPGKYITWTTDNSQQLQNIISMLNSAENLEERNPEVRLIMKVNTSPSAGYIRFYNEFAKRPIMYLNYVYTKAEVKFTNTEKLLTTIHKGLIKALDLGMGQEILVYSPIVSMTKIQKTPLPERKALPIRWITWMSYLEDPRIQFHYDKTLPELQQVPTVTDDIIAKIKHPSEFSMVFYTDGSAIKHPNVNKSHNAGMGIAQVQFKPEFTVINTWSIPLGDHTAQLAEVAAVEFACKKALKIDGPVLIVTDSFYVAESVNKELPYWQSNGFFNNKKKPLKHVSKWKSIADCIQLKPDIIIIHEKGHQPTASTFHTEGNNLADKLATQGSYVVNAGKRTADGSEFEKRTADGSEFESPKKKAKVE

SEQ ID NO: 606 - protein, 2174 aa, synthetic construct
MPAAKRVKLDGGDKKYSIGLDIGTNSVGWAVITDEYKVPSKKFKVLGNTDRHSIKKNLIGALLFDSGETAEATRLKRTARRRYTRRKNRICYLQEIFSNEMAKVDDSFFHRLEESFLVEEDKKHERHPIFGNIVDEVAYHEKYPTIYHLRKKLVDSTDKADLRLIYLALAHMIKFRGHFLIEGDLNPDNSDVDKLFIQLVQTYNQLFEENPINASGVDAKAILSARLSKSRRLENLIAQLPGEKKNGLFGNLIALSLGLTPNFKSNFDLAEDAKLQLSKDTYDDDLDNLLAQIGDQYADLFLAAKNLSDAILLSDILRVNTEITKAPLSASMIKRYDEHHQDLTLLKALVRQQLPEKYKEIFFDQSKNGYAGYIDGGASQEEFYKFIKPILEKMDGTEELLVKLNREDLLRKQRTFDNGSIPHQIHLGELHAILRRQEDFYPFLKDNREKIEKILTFRIPYYVGPLARGNSRFAWMTRKSEETITPWNFEEVVDKGASAQSFIERMTNFDKNLPNEKVLPKHSLLYEYFTVYNELTKVKYVTEGMRKPAFLSGEQKKAIVDLLFKTNRKVTVKQLKEDYFKKIECFDSVEISGVEDRFNASLGTYHDLLKIIKDKDFLDNEENEDILEDIVLTLTLFEDREMIEERLKTYAHLFDDKVMKQLKRRRYTGWGRLSRKLINGIRDKQSGKTILDFLKSDGFANRNFMQLIHDDSLTFKEDIQKAQVSGQGDSLHEHIANLAGSPAIKKGILQTVKVVDELVKVMGRHKPENIVIEMARENQTTQKGQKNSRERMKRIEEGIKELGSQILKEHPVENTQLQNEKLYLYYLQNGRDMYVDQELDINRLSDYDVDHIVPQSFLKDDSIDNKVLTRSDKARGKSDNVPSEEVVKKMKNYWRQLLNAKLITQRKFDNLTKAERGGLSELDKAGFIKRQLVETRQITKHVAQILDSRMNTKYDENDKLIREVKVITLKSKLVSDFRKDFQFYKVREINNYHHAHDAYLNAVVGTALIKKYPKLESEFVYGDYKVYDVRKMIAKSEQEIGKATAKYFFYSNIMNFFKTEITLANGEIRKRPLIETNGETGEIVWDKGRDFATVRKVLSMPQVNIVKKTEVQTGGFSKESILPKRNSDKLIARKKDWDPKKYGGFDSPTVAYSVLVVAKVEKGKSKKLKSVKELLGITIMERSSFEKNPIDFLEAKGYKEVKKDLIIKLPKYSLFELENGRKRMLASAGELQKGNELALPSKYVNFLYLASHYEKLKGSPEDNEQKQLFVEQHKHYLDEIIEQISEFSKRVILADANLDKVLSAYNKHRDKPIREQAENIIHLFTLTNLGAPAAFKYFDTTIDRKRYTSTKEVLDATLIHQSITGLYETRIDLSQLGGDGGGGSGGSGGSGGMDPLQLLQPLEAEIKGTKLKAHWNSGATITCVPQAFLEEEVPIKNIWIKTIHGEKEQPVYYLTFKIQGRKVEAEVISSPYDYILVSPSDIPWLMKKPLQLTTLVPLQEYEERLLKQTMLTGSYKEKLQSLFLKYDALWQHWENQVGHRRIKPHHIATGTVNPRPQKQYPINPKAKASIQTVINDLLKQGVLIQQNSIMNTPVYPVPKPDGKWRMVLDYREVNKTIPLIAAQNQHSAGILSSIFRGKYKTTLDLSNGFWAHSITPESYWLTAFTWLGQQYCWTRLPQGFLNSPALFNADVVDLLKEVPNVQVYVDDIYISHDDPREHLEQLEKVFSLLLNAGYVVSLKKSEIAQHEVEFLGFNITKEGRGLTETFKQKLLNITPPRDLKQLQSILGLLNFARNFIPNFSELVKPLYNIIATAPGKYITWTTDNSQQLQNIISMLNSAENLEERNPEVRLIMKVNTSPSAGYIRFYNEFAKRPIMYLNYVYTKAEVKFTNTEKLLTTIHKGLIKALDLGMGQEILVYSPIVSMTKIQKTPLPERKALPIRWITWMSYLEDPRIQFHYDKTLPELQQVPTVTDDIIAKIKHPSEFSMVFYTDGSAIKHPNVNKSHNAGMGIAQVQFKPEFTVINTWSIPLGDHTAQLAEVAAVEFACKKALKIDGPVLIVTDSFYVAESVNKELPYWQSNGFFNNKKKPLKHVSKWKSIADCIQLKPDIIIIHEKGHQPTASTFHTEGNNLADKLATQGSYVVNAGKRTADGSEFEKRTADGSEFESPKKKAKVE

SEQ ID NO: 607 - protein, 2173 aa, synthetic construct
MPAAKRVKLDGGDKKYSIGLDIGTNSVGWAVITDEYKVPSKKFKVLGNTDRHSIKKNLIGALLFDSGETAEATRLKRTARRRYTRRKNRICYLQEIFSNEMAKVDDSFFHRLEESFLVEEDKKHERHPIFGNIVDEVAYHEKYPTIYHLRKKLVDSTDKADLRLIYLALAHMIKFRGHFLIEGDLNPDNSDVDKLFIQLVQTYNQLFEENPINASGVDAKAILSARLSKSRRLENLIAQLPGEKKNGLFGNLIALSLGLTPNFKSNFDLAEDAKLQLSKDTYDDDLDNLLAQIGDQYADLFLAAKNLSDAILLSDILRVNTEITKAPLSASMIKRYDEHHQDLTLLKALVRQQLPEKYKEIFFDQSKNGYAGYIDGGASQEEFYKFIKPILEKMDGTEELLVKLNREDLLRKQRTFDNGSIPHQIHLGELHAILRRQEDFYPFLKDNREKIEKILTFRIPYYVGPLARGNSRFAWMTRKSEETITPWNFEEVVDKGASAQSFIERMTNFDKNLPNEKVLPKHSLLYEYFTVYNELTKVKYVTEGMRKPAFLSGEQKKAIVDLLFKTNRKVTVKQLKEDYFKKIECFDSVEISGVEDRFNASLGTYHDLLKIIKDKDFLDNEENEDILEDIVLTLTLFEDREMIEERLKTYAHLFDDKVMKQLKRRRYTGWGRLSRKLINGIRDKQSGKTILDFLKSDGFANRNFMQLIHDDSLTFKEDIQKAQVSGQGDSLHEHIANLAGSPAIKKGILQTVKVVDELVKVMGRHKPENIVIEMARENQTTQKGQKNSRERMKRIEEGIKELGSQILKEHPVENTQLQNEKLYLYYLQNGRDMYVDQELDINRLSDYDVDHIVPQSFLKDDSIDNKVLTRSDKARGKSDNVPSEEVVKKMKNYWRQLLNAKLITQRKFDNLTKAERGGLSELDKAGFIKRQLVETRQITKHVAQILDSRMNTKYDENDKLIREVKVITLKSKLVSDFRKDFQFYKVREINNYHHAHDAYLNAVVGTALIKKYPKLESEFVYGDYKVYDVRKMIAKSEQEIGKATAKYFFYSNIMNFFKTEITLANGEIRKRPLIETNGETGEIVWDKGRDFATVRKVLSMPQVNIVKKTEVQTGGFSKESILPKRNSDKLIARKKDWDPKKYGGFDSPTVAYSVLVVAKVEKGKSKKLKSVKELLGITIMERSSFEKNPIDFLEAKGYKEVKKDLIIKLPKYSLFELENGRKRMLASAGELQKGNELALPSKYVNFLYLASHYEKLKGSPEDNEQKQLFVEQHKHYLDEIIEQISEFSKRVILADANLDKVLSAYNKHRDKPIREQAENIIHLFTLTNLGAPAAFKYFDTTIDRKRYTSTKEVLDATLIHQSITGLYETRIDLSQLGGDGGGGSEAAAKGGMDPLQLLQPLEAEIKGTKLKAHWNSGATITCVPQAFLEEEVPIKNIWIKTIHGEKEQPVYYLTFKIQGRKVEAEVISSPYDYILVSPSDIPWLMKKPLQLTTLVPLQEYEERLLKQTMLTGSYKEKLQSLFLKYDALWQHWENQVGHRRIKPHHIATGTVNPRPQKQYPINPKAKASIQTVINDLLKQGVLIQQNSIMNTPVYPVPKPDGKWRMVLDYREVNKTIPLIAAQNQHSAGILSSIFRGKYKTTLDLSNGFWAHSITPESYWLTAFTWLGQQYCWTRLPQGFLNSPALFNADVVDLLKEVPNVQVYVDDIYISHDDPREHLEQLEKVFSLLLNAGYVVSLKKSEIAQHEVEFLGFNITKEGRGLTETFKQKLLNITPPRDLKQLQSILGLLNFARNFIPNFSELVKPLYNIIATAPGKYITWTTDNSQQLQNIISMLNSAENLEERNPEVRLIMKVNTSPSAGYIRFYNEFAKRPIMYLNYVYTKAEVKFTNTEKLLTTIHKGLIKALDLGMGQEILVYSPIVSMTKIQKTPLPERKALPIRWITWMSYLEDPRIQFHYDKTLPELQQVPTVTDDIIAKIKHPSEFSMVFYTDGSAIKHPNVNKSHNAGMGIAQVQFKPEFTVINTWSIPLGDHTAQLAEVAAVEFACKKALKIDGPVLIVTDSFYVAESVNKELPYWQSNGFFNNKKKPLKHVSKWKSIADCIQLKPDIIIIHEKGHQPTASTFHTEGNNLADKLATQGSYVVNAGKRTADGSEFEKRTADGSEFESPKKKAKVE

SEQ ID NO: 608 - protein, 2170 aa, synthetic construct
MPAAKRVKLDGGDKKYSIGLDIGTNSVGWAVITDEYKVPSKKFKVLGNTDRHSIKKNLIGALLFDSGETAEATRLKRTARRRYTRRKNRICYLQEIFSNEMAKVDDSFFHRLEESFLVEEDKKHERHPIFGNIVDEVAYHEKYPTIYHLRKKLVDSTDKADLRLIYLALAHMIKFRGHFLIEGDLNPDNSDVDKLFIQLVQTYNQLFEENPINASGVDAKAILSARLSKSRRLENLIAQLPGEKKNGLFGNLIALSLGLTPNFKSNFDLAEDAKLQLSKDTYDDDLDNLLAQIGDQYADLFLAAKNLSDAILLSDILRVNTEITKAPLSASMIKRYDEHHQDLTLLKALVRQQLPEKYKEIFFDQSKNGYAGYIDGGASQEEFYKFIKPILEKMDGTEELLVKLNREDLLRKQRTFDNGSIPHQIHLGELHAILRRQEDFYPFLKDNREKIEKILTFRIPYYVGPLARGNSRFAWMTRKSEETITPWNFEEVVDKGASAQSFIERMTNFDKNLPNEKVLPKHSLLYEYFTVYNELTKVKYVTEGMRKPAFLSGEQKKAIVDLLFKTNRKVTVKQLKEDYFKKIECFDSVEISGVEDRFNASLGTYHDLLKIIKDKDFLDNEENEDILEDIVLTLTLFEDREMIEERLKTYAHLFDDKVMKQLKRRRYTGWGRLSRKLINGIRDKQSGKTILDFLKSDGFANRNFMQLIHDDSLTFKEDIQKAQVSGQGDSLHEHIANLAGSPAIKKGILQTVKVVDELVKVMGRHKPENIVIEMARENQTTQKGQKNSRERMKRIEEGIKELGSQILKEHPVENTQLQNEKLYLYYLQNGRDMYVDQELDINRLSDYDVDHIVPQSFLKDDSIDNKVLTRSDKARGKSDNVPSEEVVKKMKNYWRQLLNAKLITQRKFDNLTKAERGGLSELDKAGFIKRQLVETRQITKHVAQILDSRMNTKYDENDKLIREVKVITLKSKLVSDFRKDFQFYKVREINNYHHAHDAYLNAVVGTALIKKYPKLESEFVYGDYKVYDVRKMIAKSEQEIGKATAKYFFYSNIMNFFKTEITLANGEIRKRPLIETNGETGEIVWDKGRDFATVRKVLSMPQVNIVKKTEVQTGGFSKESILPKRNSDKLIARKKDWDPKKYGGFDSPTVAYSVLVVAKVEKGKSKKLKSVKELLGITIMERSSFEKNPIDFLEAKGYKEVKKDLIIKLPKYSLFELENGRKRMLASAGELQKGNELALPSKYVNFLYLASHYEKLKGSPEDNEQKQLFVEQHKHYLDEIIEQISEFSKRVILADANLDKVLSAYNKHRDKPIREQAENIIHLFTLTNLGAPAAFKYFDTTIDRKRYTSTKEVLDATLIHQSITGLYETRIDLSQLGGDGGEAAAKGGMDPLQLLQPLEAEIKGTKLKAHWNSGATITCVPQAFLEEEVPIKNIWIKTIHGEKEQPVYYLTFKIQGRKVEAEVISSPYDYILVSPSDIPWLMKKPLQLTTLVPLQEYEERLLKQTMLTGSYKEKLQSLFLKYDALWQHWENQVGHRRIKPHHIATGTVNPRPQKQYPINPKAKASIQTVINDLLKQGVLIQQNSIMNTPVYPVPKPDGKWRMVLDYREVNKTIPLIAAQNQHSAGILSSIFRGKYKTTLDLSNGFWAHSITPESYWLTAFTWLGQQYCWTRLPQGFLNSPALFNADVVDLLKEVPNVQVYVDDIYISHDDPREHLEQLEKVFSLLLNAGYVVSLKKSEIAQHEVEFLGFNITKEGRGLTETFKQKLLNITPPRDLKQLQSILGLLNFARNFIPNFSELVKPLYNIIATAPGKYITWTTDNSQQLQNIISMLNSAENLEERNPEVRLIMKVNTSPSAGYIRFYNEFAKRPIMYLNYVYTKAEVKFTNTEKLLTTIHKGLIKALDLGMGQEILVYSPIVSMTKIQKTPLPERKALPIRWITWMSYLEDPRIQFHYDKTLPELQQVPTVTDDIIAKIKHPSEFSMVFYTDGSAIKHPNVNKSHNAGMGIAQVQFKPEFTVINTWSIPLGDHTAQLAEVAAVEFACKKALKIDGPVLIVTDSFYVAESVNKELPYWQSNGFFNNKKKPLKHVSKWKSIADCIQLKPDIIIIHEKGHQPTASTFHTEGNNLADKLATQGSYVVNAGKRTADGSEFEKRTADGSEFESPKKKAKVE

SEQ ID NO: 609 - protein, 2174 aa, synthetic construct
MPAAKRVKLDGGDKKYSIGLDIGTNSVGWAVITDEYKVPSKKFKVLGNTDRHSIKKNLIGALLFDSGETAEATRLKRTARRRYTRRKNRICYLQEIFSNEMAKVDDSFFHRLEESFLVEEDKKHERHPIFGNIVDEVAYHEKYPTIYHLRKKLVDSTDKADLRLIYLALAHMIKFRGHFLIEGDLNPDNSDVDKLFIQLVQTYNQLFEENPINASGVDAKAILSARLSKSRRLENLIAQLPGEKKNGLFGNLIALSLGLTPNFKSNFDLAEDAKLQLSKDTYDDDLDNLLAQIGDQYADLFLAAKNLSDAILLSDILRVNTEITKAPLSASMIKRYDEHHQDLTLLKALVRQQLPEKYKEIFFDQSKNGYAGYIDGGASQEEFYKFIKPILEKMDGTEELLVKLNREDLLRKQRTFDNGSIPHQIHLGELHAILRRQEDFYPFLKDNREKIEKILTFRIPYYVGPLARGNSRFAWMTRKSEETITPWNFEEVVDKGASAQSFIERMTNFDKNLPNEKVLPKHSLLYEYFTVYNELTKVKYVTEGMRKPAFLSGEQKKAIVDLLFKTNRKVTVKQLKEDYFKKIECFDSVEISGVEDRFNASLGTYHDLLKIIKDKDFLDNEENEDILEDIVLTLTLFEDREMIEERLKTYAHLFDDKVMKQLKRRRYTGWGRLSRKLINGIRDKQSGKTILDFLKSDGFANRNFMQLIHDDSLTFKEDIQKAQVSGQGDSLHEHIANLAGSPAIKKGILQTVKVVDELVKVMGRHKPENIVIEMARENQTTQKGQKNSRERMKRIEEGIKELGSQILKEHPVENTQLQNEKLYLYYLQNGRDMYVDQELDINRLSDYDVDHIVPQSFLKDDSIDNKVLTRSDKARGKSDNVPSEEVVKKMKNYWRQLLNAKLITQRKFDNLTKAERGGLSELDKAGFIKRQLVETRQITKHVAQILDSRMNTKYDENDKLIREVKVITLKSKLVSDFRKDFQFYKVREINNYHHAHDAYLNAVVGTALIKKYPKLESEFVYGDYKVYDVRKMIAKSEQEIGKATAKYFFYSNIMNFFKTEITLANGEIRKRPLIETNGETGEIVWDKGRDFATVRKVLSMPQVNIVKKTEVQTGGFSKESILPKRNSDKLIARKKDWDPKKYGGFDSPTVAYSVLVVAKVEKGKSKKLKSVKELLGITIMERSSFEKNPIDFLEAKGYKEVKKDLIIKLPKYSLFELENGRKRMLASAGELQKGNELALPSKYVNFLYLASHYEKLKGSPEDNEQKQLFVEQHKHYLDEIIEQISEFSKRVILADANLDKVLSAYNKHRDKPIREQAENIIHLFTLTNLGAPAAFKYFDTTIDRKRYTSTKEVLDATLIHQSITGLYETRIDLSQLGGDGGGGSPAPGSSGGMDPLQLLQPLEAEIKGTKLKAHWNSGATITCVPQAFLEEEVPIKNIWIKTIHGEKEQPVYYLTFKIQGRKVEAEVISSPYDYILVSPSDIPWLMKKPLQLTTLVPLQEYEERLLKQTMLTGSYKEKLQSLFLKYDALWQHWENQVGHRRIKPHHIATGTVNPRPQKQYPINPKAKASIQTVINDLLKQGVLIQQNSIMNTPVYPVPKPDGKWRMVLDYREVNKTIPLIAAQNQHSAGILSSIFRGKYKTTLDLSNGFWAHSITPESYWLTAFTWLGQQYCWTRLPQGFLNSPALFNADVVDLLKEVPNVQVYVDDIYISHDDPREHLEQLEKVFSLLLNAGYVVSLKKSEIAQHEVEFLGFNITKEGRGLTETFKQKLLNITPPRDLKQLQSILGLLNFARNFIPNFSELVKPLYNIIATAPGKYITWTTDNSQQLQNIISMLNSAENLEERNPEVRLIMKVNTSPSAGYIRFYNEFAKRPIMYLNYVYTKAEVKFTNTEKLLTTIHKGLIKALDLGMGQEILVYSPIVSMTKIQKTPLPERKALPIRWITWMSYLEDPRIQFHYDKTLPELQQVPTVTDDIIAKIKHPSEFSMVFYTDGSAIKHPNVNKSHNAGMGIAQVQFKPEFTVINTWSIPLGDHTAQLAEVAAVEFACKKALKIDGPVLIVTDSFYVAESVNKELPYWQSNGFFNNKKKPLKHVSKWKSIADCIQLKPDIIIIHEKGHQPTASTFHTEGNNLADKLATQGSYVVNAGKRTADGSEFEKRTADGSEFESPKKKAKVE

SEQ ID NO: 610 - protein, 2174 aa, synthetic construct
MPAAKRVKLDGGDKKYSIGLDIGTNSVGWAVITDEYKVPSKKFKVLGNTDRHSIKKNLIGALLFDSGETAEATRLKRTARRRYTRRKNRICYLQEIFSNEMAKVDDSFFHRLEESFLVEEDKKHERHPIFGNIVDEVAYHEKYPTIYHLRKKLVDSTDKADLRLIYLALAHMIKFRGHFLIEGDLNPDNSDVDKLFIQLVQTYNQLFEENPINASGVDAKAILSARLSKSRRLENLIAQLPGEKKNGLFGNLIALSLGLTPNFKSNFDLAEDAKLQLSKDTYDDDLDNLLAQIGDQYADLFLAAKNLSDAILLSDILRVNTEITKAPLSASMIKRYDEHHQDLTLLKALVRQQLPEKYKEIFFDQSKNGYAGYIDGGASQEEFYKFIKPILEKMDGTEELLVKLNREDLLRKQRTFDNGSIPHQIHLGELHAILRRQEDFYPFLKDNREKIEKILTFRIPYYVGPLARGNSRFAWMTRKSEETITPWNFEEVVDKGASAQSFIERMTNFDKNLPNEKVLPKHSLLYEYFTVYNELTKVKYVTEGMRKPAFLSGEQKKAIVDLLFKTNRKVTVKQLKEDYFKKIECFDSVEISGVEDRFNASLGTYHDLLKIIKDKDFLDNEENEDILEDIVLTLTLFEDREMIEERLKTYAHLFDDKVMKQLKRRRYTGWGRLSRKLINGIRDKQSGKTILDFLKSDGFANRNFMQLIHDDSLTFKEDIQKAQVSGQGDSLHEHIANLAGSPAIKKGILQTVKVVDELVKVMGRHKPENIVIEMARENQTTQKGQKNSRERMKRIEEGIKELGSQILKEHPVENTQLQNEKLYLYYLQNGRDMYVDQELDINRLSDYDVDHIVPQSFLKDDSIDNKVLTRSDKARGKSDNVPSEEVVKKMKNYWRQLLNAKLITQRKFDNLTKAERGGLSELDKAGFIKRQLVETRQITKHVAQILDSRMNTKYDENDKLIREVKVITLKSKLVSDFRKDFQFYKVREINNYHHAHDAYLNAVVGTALIKKYPKLESEFVYGDYKVYDVRKMIAKSEQEIGKATAKYFFYSNIMNFFKTEITLANGEIRKRPLIETNGETGEIVWDKGRDFATVRKVLSMPQVNIVKKTEVQTGGFSKESILPKRNSDKLIARKKDWDPKKYGGFDSPTVAYSVLVVAKVEKGKSKKLKSVKELLGITIMERSSFEKNPIDFLEAKGYKEVKKDLIIKLPKYSLFELENGRKRMLASAGELQKGNELALPSKYVNFLYLASHYEKLKGSPEDNEQKQLFVEQHKHYLDEIIEQISEFSKRVILADANLDKVLSAYNKHRDKPIREQAENIIHLFTLTNLGAPAAFKYFDTTIDRKRYTSTKEVLDATLIHQSITGLYETRIDLSQLGGDGGGSSGGGGGSGGMDPLQLLQPLEAEIKGTKLKAHWNSGATITCVPQAFLEEEVPIKNIWIKTIHGEKEQPVYYLTFKIQGRKVEAEVISSPYDYILVSPSDIPWLMKKPLQLTTLVPLQEYEERLLKQTMLTGSYKEKLQSLFLKYDALWQHWENQVGHRRIKPHHIATGTVNPRPQKQYPINPKAKASIQTVINDLLKQGVLIQQNSIMNTPVYPVPKPDGKWRMVLDYREVNKTIPLIAAQNQHSAGILSSIFRGKYKTTLDLSNGFWAHSITPESYWLTAFTWLGQQYCWTRLPQGFLNSPALFNADVVDLLKEVPNVQVYVDDIYISHDDPREHLEQLEKVFSLLLNAGYVVSLKKSEIAQHEVEFLGFNITKEGRGLTETFKQKLLNITPPRDLKQLQSILGLLNFARNFIPNFSELVKPLYNIIATAPGKYITWTTDNSQQLQNIISMLNSAENLEERNPEVRLIMKVNTSPSAGYIRFYNEFAKRPIMYLNYVYTKAEVKFTNTEKLLTTIHKGLIKALDLGMGQEILVYSPIVSMTKIQKTPLPERKALPIRWITWMSYLEDPRIQFHYDKTLPELQQVPTVTDDIIAKIKHPSEFSMVFYTDGSAIKHPNVNKSHNAGMGIAQVQFKPEFTVINTWSIPLGDHTAQLAEVAAVEFACKKALKIDGPVLIVTDSFYVAESVNKELPYWQSNGFFNNKKKPLKHVSKWKSIADCIQLKPDIIIIHEKGHQPTASTFHTEGNNLADKLATQGSYVVNAGKRTADGSEFEKRTADGSEFESPKKKAKVE

SEQ ID NO: 611 - protein, 2180 aa, synthetic construct
MPAAKRVKLDGGDKKYSIGLDIGTNSVGWAVITDEYKVPSKKFKVLGNTDRHSIKKNLIGALLFDSGETAEATRLKRTARRRYTRRKNRICYLQEIFSNEMAKVDDSFFHRLEESFLVEEDKKHERHPIFGNIVDEVAYHEKYPTIYHLRKKLVDSTDKADLRLIYLALAHMIKFRGHFLIEGDLNPDNSDVDKLFIQLVQTYNQLFEENPINASGVDAKAILSARLSKSRRLENLIAQLPGEKKNGLFGNLIALSLGLTPNFKSNFDLAEDAKLQLSKDTYDDDLDNLLAQIGDQYADLFLAAKNLSDAILLSDILRVNTEITKAPLSASMIKRYDEHHQDLTLLKALVRQQLPEKYKEIFFDQSKNGYAGYIDGGASQEEFYKFIKPILEKMDGTEELLVKLNREDLLRKQRTFDNGSIPHQIHLGELHAILRRQEDFYPFLKDNREKIEKILTFRIPYYVGPLARGNSRFAWMTRKSEETITPWNFEEVVDKGASAQSFIERMTNFDKNLPNEKVLPKHSLLYEYFTVYNELTKVKYVTEGMRKPAFLSGEQKKAIVDLLFKTNRKVTVKQLKEDYFKKIECFDSVEISGVEDRFNASLGTYHDLLKIIKDKDFLDNEENEDILEDIVLTLTLFEDREMIEERLKTYAHLFDDKVMKQLKRRRYTGWGRLSRKLINGIRDKQSGKTILDFLKSDGFANRNFMQLIHDDSLTFKEDIQKAQVSGQGDSLHEHIANLAGSPAIKKGILQTVKVVDELVKVMGRHKPENIVIEMARENQTTQKGQKNSRERMKRIEEGIKELGSQILKEHPVENTQLQNEKLYLYYLQNGRDMYVDQELDINRLSDYDVDHIVPQSFLKDDSIDNKVLTRSDKARGKSDNVPSEEVVKKMKNYWRQLLNAKLITQRKFDNLTKAERGGLSELDKAGFIKRQLVETRQITKHVAQILDSRMNTKYDENDKLIREVKVITLKSKLVSDFRKDFQFYKVREINNYHHAHDAYLNAVVGTALIKKYPKLESEFVYGDYKVYDVRKMIAKSEQEIGKATAKYFFYSNIMNFFKTEITLANGEIRKRPLIETNGETGEIVWDKGRDFATVRKVLSMPQVNIVKKTEVQTGGFSKESILPKRNSDKLIARKKDWDPKKYGGFDSPTVAYSVLVVAKVEKGKSKKLKSVKELLGITIMERSSFEKNPIDFLEAKGYKEVKKDLIIKLPKYSLFELENGRKRMLASAGELQKGNELALPSKYVNFLYLASHYEKLKGSPEDNEQKQLFVEQHKHYLDEIIEQISEFSKRVILADANLDKVLSAYNKHRDKPIREQAENIIHLFTLTNLGAPAAFKYFDTTIDRKRYTSTKEVLDATLIHQSITGLYETRIDLSQLGGDGGGGGGSEAAAKGGGGSGGMDPLQLLQPLEAEIKGTKLKAHWNSGATITCVPQAFLEEEVPIKNIWIKTIHGEKEQPVYYLTFKIQGRKVEAEVISSPYDYILVSPSDIPWLMKKPLQLTTLVPLQEYEERLLKQTMLTGSYKEKLQSLFLKYDALWQHWENQVGHRRIKPHHIATGTVNPRPQKQYPINPKAKASIQTVINDLLKQGVLIQQNSIMNTPVYPVPKPDGKWRMVLDYREVNKTIPLIAAQNQHSAGILSSIFRGKYKTTLDLSNGFWAHSITPESYWLTAFTWLGQQYCWTRLPQGFLNSPALFNADVVDLLKEVPNVQVYVDDIYISHDDPREHLEQLEKVFSLLLNAGYVVSLKKSEIAQHEVEFLGFNITKEGRGLTETFKQKLLNITPPRDLKQLQSILGLLNFARNFIPNFSELVKPLYNIIATAPGKYITWTTDNSQQLQNIISMLNSAENLEERNPEVRLIMKVNTSPSAGYIRFYNEFAKRPIMYLNYVYTKAEVKFTNTEKLLTTIHKGLIKALDLGMGQEILVYSPIVSMTKIQKTPLPERKALPIRWITWMSYLEDPRIQFHYDKTLPELQQVPTVTDDIIAKIKHPSEFSMVFYTDGSAIKHPNVNKSHNAGMGIAQVQFKPEFTVINTWSIPLGDHTAQLAEVAAVEFACKKALKIDGPVLIVTDSFYVAESVNKELPYWQSNGFFNNKKKPLKHVSKWKSIADCIQLKPDIIIIHEKGHQPTASTFHTEGNNLADKLATQGSYVVNAGKRTADGSEFEKRTADGSEFESPKKKAKVE

SEQ ID NO: 612 - protein, 2174 aa, synthetic construct
MPAAKRVKLDGGDKKYSIGLDIGTNSVGWAVITDEYKVPSKKFKVLGNTDRHSIKKNLIGALLFDSGETAEATRLKRTARRRYTRRKNRICYLQEIFSNEMAKVDDSFFHRLEESFLVEEDKKHERHPIFGNIVDEVAYHEKYPTIYHLRKKLVDSTDKADLRLIYLALAHMIKFRGHFLIEGDLNPDNSDVDKLFIQLVQTYNQLFEENPINASGVDAKAILSARLSKSRRLENLIAQLPGEKKNGLFGNLIALSLGLTPNFKSNFDLAEDAKLQLSKDTYDDDLDNLLAQIGDQYADLFLAAKNLSDAILLSDILRVNTEITKAPLSASMIKRYDEHHQDLTLLKALVRQQLPEKYKEIFFDQSKNGYAGYIDGGASQEEFYKFIKPILEKMDGTEELLVKLNREDLLRKQRTFDNGSIPHQIHLGELHAILRRQEDFYPFLKDNREKIEKILTFRIPYYVGPLARGNSRFAWMTRKSEETITPWNFEEVVDKGASAQSFIERMTNFDKNLPNEKVLPKHSLLYEYFTVYNELTKVKYVTEGMRKPAFLSGEQKKAIVDLLFKTNRKVTVKQLKEDYFKKIECFDSVEISGVEDRFNASLGTYHDLLKIIKDKDFLDNEENEDILEDIVLTLTLFEDREMIEERLKTYAHLFDDKVMKQLKRRRYTGWGRLSRKLINGIRDKQSGKTILDFLKSDGFANRNFMQLIHDDSLTFKEDIQKAQVSGQGDSLHEHIANLAGSPAIKKGILQTVKVVDELVKVMGRHKPENIVIEMARENQTTQKGQKNSRERMKRIEEGIKELGSQILKEHPVENTQLQNEKLYLYYLQNGRDMYVDQELDINRLSDYDVDHIVPQSFLKDDSIDNKVLTRSDKARGKSDNVPSEEVVKKMKNYWRQLLNAKLITQRKFDNLTKAERGGLSELDKAGFIKRQLVETRQITKHVAQILDSRMNTKYDENDKLIREVKVITLKSKLVSDFRKDFQFYKVREINNYHHAHDAYLNAVVGTALIKKYPKLESEFVYGDYKVYDVRKMIAKSEQEIGKATAKYFFYSNIMNFFKTEITLANGEIRKRPLIETNGETGEIVWDKGRDFATVRKVLSMPQVNIVKKTEVQTGGFSKESILPKRNSDKLIARKKDWDPKKYGGFDSPTVAYSVLVVAKVEKGKSKKLKSVKELLGITIMERSSFEKNPIDFLEAKGYKEVKKDLIIKLPKYSLFELENGRKRMLASAGELQKGNELALPSKYVNFLYLASHYEKLKGSPEDNEQKQLFVEQHKHYLDEIIEQISEFSKRVILADANLDKVLSAYNKHRDKPIREQAENIIHLFTLTNLGAPAAFKYFDTTIDRKRYTSTKEVLDATLIHQSITGLYETRIDLSQLGGDGGGSSPAPGGGGGMDPLQLLQPLEAEIKGTKLKAHWNSGATITCVPQAFLEEEVPIKNIWIKTIHGEKEQPVYYLTFKIQGRKVEAEVISSPYDYILVSPSDIPWLMKKPLQLTTLVPLQEYEERLLKQTMLTGSYKEKLQSLFLKYDALWQHWENQVGHRRIKPHHIATGTVNPRPQKQYPINPKAKASIQTVINDLLKQGVLIQQNSIMNTPVYPVPKPDGKWRMVLDYREVNKTIPLIAAQNQHSAGILSSIFRGKYKTTLDLSNGFWAHSITPESYWLTAFTWLGQQYCWTRLPQGFLNSPALFNADVVDLLKEVPNVQVYVDDIYISHDDPREHLEQLEKVFSLLLNAGYVVSLKKSEIAQHEVEFLGFNITKEGRGLTETFKQKLLNITPPRDLKQLQSILGLLNFARNFIPNFSELVKPLYNIIATAPGKYITWTTDNSQQLQNIISMLNSAENLEERNPEVRLIMKVNTSPSAGYIRFYNEFAKRPIMYLNYVYTKAEVKFTNTEKLLTTIHKGLIKALDLGMGQEILVYSPIVSMTKIQKTPLPERKALPIRWITWMSYLEDPRIQFHYDKTLPELQQVPTVTDDIIAKIKHPSEFSMVFYTDGSAIKHPNVNKSHNAGMGIAQVQFKPEFTVINTWSIPLGDHTAQLAEVAAVEFACKKALKIDGPVLIVTDSFYVAESVNKELPYWQSNGFFNNKKKPLKHVSKWKSIADCIQLKPDIIIIHEKGHQPTASTFHTEGNNLADKLATQGSYVVNAGKRTADGSEFEKRTADGSEFESPKKKAKVE

SEQ ID NO: 613 - protein, 2176 aa, synthetic construct
MPAAKRVKLDGGDKKYSIGLDIGTNSVGWAVITDEYKVPSKKFKVLGNTDRHSIKKNLIGALLFDSGETAEATRLKRTARRRYTRRKNRICYLQEIFSNEMAKVDDSFFHRLEESFLVEEDKKHERHPIFGNIVDEVAYHEKYPTIYHLRKKLVDSTDKADLRLIYLALAHMIKFRGHFLIEGDLNPDNSDVDKLFIQLVQTYNQLFEENPINASGVDAKAILSARLSKSRRLENLIAQLPGEKKNGLFGNLIALSLGLTPNFKSNFDLAEDAKLQLSKDTYDDDLDNLLAQIGDQYADLFLAAKNLSDAILLSDILRVNTEITKAPLSASMIKRYDEHHQDLTLLKALVRQQLPEKYKEIFFDQSKNGYAGYIDGGASQEEFYKFIKPILEKMDGTEELLVKLNREDLLRKQRTFDNGSIPHQIHLGELHAILRRQEDFYPFLKDNREKIEKILTFRIPYYVGPLARGNSRFAWMTRKSEETITPWNFEEVVDKGASAQSFIERMTNFDKNLPNEKVLPKHSLLYEYFTVYNELTKVKYVTEGMRKPAFLSGEQKKAIVDLLFKTNRKVTVKQLKEDYFKKIECFDSVEISGVEDRFNASLGTYHDLLKIIKDKDFLDNEENEDILEDIVLTLTLFEDREMIEERLKTYAHLFDDKVMKQLKRRRYTGWGRLSRKLINGIRDKQSGKTILDFLKSDGFANRNFMQLIHDDSLTFKEDIQKAQVSGQGDSLHEHIANLAGSPAIKKGILQTVKVVDELVKVMGRHKPENIVIEMARENQTTQKGQKNSRERMKRIEEGIKELGSQILKEHPVENTQLQNEKLYLYYLQNGRDMYVDQELDINRLSDYDVDHIVPQSFLKDDSIDNKVLTRSDKARGKSDNVPSEEVVKKMKNYWRQLLNAKLITQRKFDNLTKAERGGLSELDKAGFIKRQLVETRQITKHVAQILDSRMNTKYDENDKLIREVKVITLKSKLVSDFRKDFQFYKVREINNYHHAHDAYLNAVVGTALIKKYPKLESEFVYGDYKVYDVRKMIAKSEQEIGKATAKYFFYSNIMNFFKTEITLANGEIRKRPLIETNGETGEIVWDKGRDFATVRKVLSMPQVNIVKKTEVQTGGFSKESILPKRNSDKLIARKKDWDPKKYGGFDSPTVAYSVLVVAKVEKGKSKKLKSVKELLGITIMERSSFEKNPIDFLEAKGYKEVKKDLIIKLPKYSLFELENGRKRMLASAGELQKGNELALPSKYVNFLYLASHYEKLKGSPEDNEQKQLFVEQHKHYLDEIIEQISEFSKRVILADANLDKVLSAYNKHRDKPIREQAENIIHLFTLTNLGAPAAFKYFDTTIDRKRYTSTKEVLDATLIHQSITGLYETRIDLSQLGGDGGGGGGSSEAAAKGGMDPLQLLQPLEAEIKGTKLKAHWNSGATITCVPQAFLEEEVPIKNIWIKTIHGEKEQPVYYLTFKIQGRKVEAEVISSPYDYILVSPSDIPWLMKKPLQLTTLVPLQEYEERLLKQTMLTGSYKEKLQSLFLKYDALWQHWENQVGHRRIKPHHIATGTVNPRPQKQYPINPKAKASIQTVINDLLKQGVLIQQNSIMNTPVYPVPKPDGKWRMVLDYREVNKTIPLIAAQNQHSAGILSSIFRGKYKTTLDLSNGFWAHSITPESYWLTAFTWLGQQYCWTRLPQGFLNSPALFNADVVDLLKEVPNVQVYVDDIYISHDDPREHLEQLEKVFSLLLNAGYVVSLKKSEIAQHEVEFLGFNITKEGRGLTETFKQKLLNITPPRDLKQLQSILGLLNFARNFIPNFSELVKPLYNIIATAPGKYITWTTDNSQQLQNIISMLNSAENLEERNPEVRLIMKVNTSPSAGYIRFYNEFAKRPIMYLNYVYTKAEVKFTNTEKLLTTIHKGLIKALDLGMGQEILVYSPIVSMTKIQKTPLPERKALPIRWITWMSYLEDPRIQFHYDKTLPELQQVPTVTDDIIAKIKHPSEFSMVFYTDGSAIKHPNVNKSHNAGMGIAQVQFKPEFTVINTWSIPLGDHTAQLAEVAAVEFACKKALKIDGPVLIVTDSFYVAESVNKELPYWQSNGFFNNKKKPLKHVSKWKSIADCIQLKPDIIIIHEKGHQPTASTFHTEGNNLADKLATQGSYVVNAGKRTADGSEFEKRTADGSEFESPKKKAKVE

SEQ ID NO: 614 - protein, 2176 aa, synthetic construct
MPAAKRVKLDGGDKKYSIGLDIGTNSVGWAVITDEYKVPSKKFKVLGNTDRHSIKKNLIGALLFDSGETAEATRLKRTARRRYTRRKNRICYLQEIFSNEMAKVDDSFFHRLEESFLVEEDKKHERHPIFGNIVDEVAYHEKYPTIYHLRKKLVDSTDKADLRLIYLALAHMIKFRGHFLIEGDLNPDNSDVDKLFIQLVQTYNQLFEENPINASGVDAKAILSARLSKSRRLENLIAQLPGEKKNGLFGNLIALSLGLTPNFKSNFDLAEDAKLQLSKDTYDDDLDNLLAQIGDQYADLFLAAKNLSDAILLSDILRVNTEITKAPLSASMIKRYDEHHQDLTLLKALVRQQLPEKYKEIFFDQSKNGYAGYIDGGASQEEFYKFIKPILEKMDGTEELLVKLNREDLLRKQRTFDNGSIPHQIHLGELHAILRRQEDFYPFLKDNREKIEKILTFRIPYYVGPLARGNSRFAWMTRKSEETITPWNFEEVVDKGASAQSFIERMTNFDKNLPNEKVLPKHSLLYEYFTVYNELTKVKYVTEGMRKPAFLSGEQKKAIVDLLFKTNRKVTVKQLKEDYFKKIECFDSVEISGVEDRFNASLGTYHDLLKIIKDKDFLDNEENEDILEDIVLTLTLFEDREMIEERLKTYAHLFDDKVMKQLKRRRYTGWGRLSRKLINGIRDKQSGKTILDFLKSDGFANRNFMQLIHDDSLTFKEDIQKAQVSGQGDSLHEHIANLAGSPAIKKGILQTVKVVDELVKVMGRHKPENIVIEMARENQTTQKGQKNSRERMKRIEEGIKELGSQILKEHPVENTQLQNEKLYLYYLQNGRDMYVDQELDINRLSDYDVDHIVPQSFLKDDSIDNKVLTRSDKARGKSDNVPSEEVVKKMKNYWRQLLNAKLITQRKFDNLTKAERGGLSELDKAGFIKRQLVETRQITKHVAQILDSRMNTKYDENDKLIREVKVITLKSKLVSDFRKDFQFYKVREINNYHHAHDAYLNAVVGTALIKKYPKLESEFVYGDYKVYDVRKMIAKSEQEIGKATAKYFFYSNIMNFFKTEITLANGEIRKRPLIETNGETGEIVWDKGRDFATVRKVLSMPQVNIVKKTEVQTGGFSKESILPKRNSDKLIARKKDWDPKKYGGFDSPTVAYSVLVVAKVEKGKSKKLKSVKELLGITIMERSSFEKNPIDFLEAKGYKEVKKDLIIKLPKYSLFELENGRKRMLASAGELQKGNELALPSKYVNFLYLASHYEKLKGSPEDNEQKQLFVEQHKHYLDEIIEQISEFSKRVILADANLDKVLSAYNKHRDKPIREQAENIIHLFTLTNLGAPAAFKYFDTTIDRKRYTSTKEVLDATLIHQSITGLYETRIDLSQLGGDGGGGSGSSEAAAKGGMDPLQLLQPLEAEIKGTKLKAHWNSGATITCVPQAFLEEEVPIKNIWIKTIHGEKEQPVYYLTFKIQGRKVEAEVISSPYDYILVSPSDIPWLMKKPLQLTTLVPLQEYEERLLKQTMLTGSYKEKLQSLFLKYDALWQHWENQVGHRRIKPHHIATGTVNPRPQKQYPINPKAKASIQTVINDLLKQGVLIQQNSIMNTPVYPVPKPDGKWRMVLDYREVNKTIPLIAAQNQHSAGILSSIFRGKYKTTLDLSNGFWAHSITPESYWLTAFTWLGQQYCWTRLPQGFLNSPALFNADVVDLLKEVPNVQVYVDDIYISHDDPREHLEQLEKVFSLLLNAGYVVSLKKSEIAQHEVEFLGFNITKEGRGLTETFKQKLLNITPPRDLKQLQSILGLLNFARNFIPNFSELVKPLYNIIATAPGKYITWTTDNSQQLQNIISMLNSAENLEERNPEVRLIMKVNTSPSAGYIRFYNEFAKRPIMYLNYVYTKAEVKFTNTEKLLTTIHKGLIKALDLGMGQEILVYSPIVSMTKIQKTPLPERKALPIRWITWMSYLEDPRIQFHYDKTLPELQQVPTVTDDIIAKIKHPSEFSMVFYTDGSAIKHPNVNKSHNAGMGIAQVQFKPEFTVINTWSIPLGDHTAQLAEVAAVEFACKKALKIDGPVLIVTDSFYVAESVNKELPYWQSNGFFNNKKKPLKHVSKWKSIADCIQLKPDIIIIHEKGHQPTASTFHTEGNNLADKLATQGSYVVNAGKRTADGSEFEKRTADGSEFESPKKKAKVE

SEQ ID NO: 615 - protein, 2185 aa, synthetic construct
MPAAKRVKLDGGDKKYSIGLDIGTNSVGWAVITDEYKVPSKKFKVLGNTDRHSIKKNLIGALLFDSGETAEATRLKRTARRRYTRRKNRICYLQEIFSNEMAKVDDSFFHRLEESFLVEEDKKHERHPIFGNIVDEVAYHEKYPTIYHLRKKLVDSTDKADLRLIYLALAHMIKFRGHFLIEGDLNPDNSDVDKLFIQLVQTYNQLFEENPINASGVDAKAILSARLSKSRRLENLIAQLPGEKKNGLFGNLIALSLGLTPNFKSNFDLAEDAKLQLSKDTYDDDLDNLLAQIGDQYADLFLAAKNLSDAILLSDILRVNTEITKAPLSASMIKRYDEHHQDLTLLKALVRQQLPEKYKEIFFDQSKNGYAGYIDGGASQEEFYKFIKPILEKMDGTEELLVKLNREDLLRKQRTFDNGSIPHQIHLGELHAILRRQEDFYPFLKDNREKIEKILTFRIPYYVGPLARGNSRFAWMTRKSEETITPWNFEEVVDKGASAQSFIERMTNFDKNLPNEKVLPKHSLLYEYFTVYNELTKVKYVTEGMRKPAFLSGEQKKAIVDLLFKTNRKVTVKQLKEDYFKKIECFDSVEISGVEDRFNASLGTYHDLLKIIKDKDFLDNEENEDILEDIVLTLTLFEDREMIEERLKTYAHLFDDKVMKQLKRRRYTGWGRLSRKLINGIRDKQSGKTILDFLKSDGFANRNFMQLIHDDSLTFKEDIQKAQVSGQGDSLHEHIANLAGSPAIKKGILQTVKVVDELVKVMGRHKPENIVIEMARENQTTQKGQKNSRERMKRIEEGIKELGSQILKEHPVENTQLQNEKLYLYYLQNGRDMYVDQELDINRLSDYDVDHIVPQSFLKDDSIDNKVLTRSDKARGKSDNVPSEEVVKKMKNYWRQLLNAKLITQRKFDNLTKAERGGLSELDKAGFIKRQLVETRQITKHVAQILDSRMNTKYDENDKLIREVKVITLKSKLVSDFRKDFQFYKVREINNYHHAHDAYLNAVVGTALIKKYPKLESEFVYGDYKVYDVRKMIAKSEQEIGKATAKYFFYSNIMNFFKTEITLANGEIRKRPLIETNGETGEIVWDKGRDFATVRKVLSMPQVNIVKKTEVQTGGFSKESILPKRNSDKLIARKKDWDPKKYGGFDSPTVAYSVLVVAKVEKGKSKKLKSVKELLGITIMERSSFEKNPIDFLEAKGYKEVKKDLIIKLPKYSLFELENGRKRMLASAGELQKGNELALPSKYVNFLYLASHYEKLKGSPEDNEQKQLFVEQHKHYLDEIIEQISEFSKRVILADANLDKVLSAYNKHRDKPIREQAENIIHLFTLTNLGAPAAFKYFDTTIDRKRYTSTKEVLDATLIHQSITGLYETRIDLSQLGGDGGGGGGSGGGGSGGGGSGGGGSGGMDPLQLLQPLEAEIKGTKLKAHWNSGATITCVPQAFLEEEVPIKNIWIKTIHGEKEQPVYYLTFKIQGRKVEAEVISSPYDYILVSPSDIPWLMKKPLQLTTLVPLQEYEERLLKQTMLTGSYKEKLQSLFLKYDALWQHWENQVGHRRIKPHHIATGTVNPRPQKQYPINPKAKASIQTVINDLLKQGVLIQQNSIMNTPVYPVPKPDGKWRMVLDYREVNKTIPLIAAQNQHSAGILSSIFRGKYKTTLDLSNGFWAHSITPESYWLTAFTWLGQQYCWTRLPQGFLNSPALFNADVVDLLKEVPNVQVYVDDIYISHDDPREHLEQLEKVFSLLLNAGYVVSLKKSEIAQHEVEFLGFNITKEGRGLTETFKQKLLNITPPRDLKQLQSILGLLNFARNFIPNFSELVKPLYNIIATAPGKYITWTTDNSQQLQNIISMLNSAENLEERNPEVRLIMKVNTSPSAGYIRFYNEFAKRPIMYLNYVYTKAEVKFTNTEKLLTTIHKGLIKALDLGMGQEILVYSPIVSMTKIQKTPLPERKALPIRWITWMSYLEDPRIQFHYDKTLPELQQVPTVTDDIIAKIKHPSEFSMVFYTDGSAIKHPNVNKSHNAGMGIAQVQFKPEFTVINTWSIPLGDHTAQLAEVAAVEFACKKALKIDGPVLIVTDSFYVAESVNKELPYWQSNGFFNNKKKPLKHVSKWKSIADCIQLKPDIIIIHEKGHQPTASTFHTEGNNLADKLATQGSYVVNAGKRTADGSEFEKRTADGSEFESPKKKAKVE

SEQ ID NO: 616 - protein, 2176 aa, synthetic construct
MPAAKRVKLDGGDKKYSIGLDIGTNSVGWAVITDEYKVPSKKFKVLGNTDRHSIKKNLIGALLFDSGETAEATRLKRTARRRYTRRKNRICYLQEIFSNEMAKVDDSFFHRLEESFLVEEDKKHERHPIFGNIVDEVAYHEKYPTIYHLRKKLVDSTDKADLRLIYLALAHMIKFRGHFLIEGDLNPDNSDVDKLFIQLVQTYNQLFEENPINASGVDAKAILSARLSKSRRLENLIAQLPGEKKNGLFGNLIALSLGLTPNFKSNFDLAEDAKLQLSKDTYDDDLDNLLAQIGDQYADLFLAAKNLSDAILLSDILRVNTEITKAPLSASMIKRYDEHHQDLTLLKALVRQQLPEKYKEIFFDQSKNGYAGYIDGGASQEEFYKFIKPILEKMDGTEELLVKLNREDLLRKQRTFDNGSIPHQIHLGELHAILRRQEDFYPFLKDNREKIEKILTFRIPYYVGPLARGNSRFAWMTRKSEETITPWNFEEVVDKGASAQSFIERMTNFDKNLPNEKVLPKHSLLYEYFTVYNELTKVKYVTEGMRKPAFLSGEQKKAIVDLLFKTNRKVTVKQLKEDYFKKIECFDSVEISGVEDRFNASLGTYHDLLKIIKDKDFLDNEENEDILEDIVLTLTLFEDREMIEERLKTYAHLFDDKVMKQLKRRRYTGWGRLSRKLINGIRDKQSGKTILDFLKSDGFANRNFMQLIHDDSLTFKEDIQKAQVSGQGDSLHEHIANLAGSPAIKKGILQTVKVVDELVKVMGRHKPENIVIEMARENQTTQKGQKNSRERMKRIEEGIKELGSQILKEHPVENTQLQNEKLYLYYLQNGRDMYVDQELDINRLSDYDVDHIVPQSFLKDDSIDNKVLTRSDKARGKSDNVPSEEVVKKMKNYWRQLLNAKLITQRKFDNLTKAERGGLSELDKAGFIKRQLVETRQITKHVAQILDSRMNTKYDENDKLIREVKVITLKSKLVSDFRKDFQFYKVREINNYHHAHDAYLNAVVGTALIKKYPKLESEFVYGDYKVYDVRKMIAKSEQEIGKATAKYFFYSNIMNFFKTEITLANGEIRKRPLIETNGETGEIVWDKGRDFATVRKVLSMPQVNIVKKTEVQTGGFSKESILPKRNSDKLIARKKDWDPKKYGGFDSPTVAYSVLVVAKVEKGKSKKLKSVKELLGITIMERSSFEKNPIDFLEAKGYKEVKKDLIIKLPKYSLFELENGRKRMLASAGELQKGNELALPSKYVNFLYLASHYEKLKGSPEDNEQKQLFVEQHKHYLDEIIEQISEFSKRVILADANLDKVLSAYNKHRDKPIREQAENIIHLFTLTNLGAPAAFKYFDTTIDRKRYTSTKEVLDATLIHQSITGLYETRIDLSQLGGDGGPAPEAAAKGGGGGMDPLQLLQPLEAEIKGTKLKAHWNSGATITCVPQAFLEEEVPIKNIWIKTIHGEKEQPVYYLTFKIQGRKVEAEVISSPYDYILVSPSDIPWLMKKPLQLTTLVPLQEYEERLLKQTMLTGSYKEKLQSLFLKYDALWQHWENQVGHRRIKPHHIATGTVNPRPQKQYPINPKAKASIQTVINDLLKQGVLIQQNSIMNTPVYPVPKPDGKWRMVLDYREVNKTIPLIAAQNQHSAGILSSIFRGKYKTTLDLSNGFWAHSITPESYWLTAFTWLGQQYCWTRLPQGFLNSPALFNADVVDLLKEVPNVQVYVDDIYISHDDPREHLEQLEKVFSLLLNAGYVVSLKKSEIAQHEVEFLGFNITKEGRGLTETFKQKLLNITPPRDLKQLQSILGLLNFARNFIPNFSELVKPLYNIIATAPGKYITWTTDNSQQLQNIISMLNSAENLEERNPEVRLIMKVNTSPSAGYIRFYNEFAKRPIMYLNYVYTKAEVKFTNTEKLLTTIHKGLIKALDLGMGQEILVYSPIVSMTKIQKTPLPERKALPIRWITWMSYLEDPRIQFHYDKTLPELQQVPTVTDDIIAKIKHPSEFSMVFYTDGSAIKHPNVNKSHNAGMGIAQVQFKPEFTVINTWSIPLGDHTAQLAEVAAVEFACKKALKIDGPVLIVTDSFYVAESVNKELPYWQSNGFFNNKKKPLKHVSKWKSIADCIQLKPDIIIIHEKGHQPTASTFHTEGNNLADKLATQGSYVVNAGKRTADGSEFEKRTADGSEFESPKKKAKVE

SEQ ID NO: 617 - protein, 2174 aa, synthetic construct
MPAAKRVKLDGGDKKYSIGLDIGTNSVGWAVITDEYKVPSKKFKVLGNTDRHSIKKNLIGALLFDSGETAEATRLKRTARRRYTRRKNRICYLQEIFSNEMAKVDDSFFHRLEESFLVEEDKKHERHPIFGNIVDEVAYHEKYPTIYHLRKKLVDSTDKADLRLIYLALAHMIKFRGHFLIEGDLNPDNSDVDKLFIQLVQTYNQLFEENPINASGVDAKAILSARLSKSRRLENLIAQLPGEKKNGLFGNLIALSLGLTPNFKSNFDLAEDAKLQLSKDTYDDDLDNLLAQIGDQYADLFLAAKNLSDAILLSDILRVNTEITKAPLSASMIKRYDEHHQDLTLLKALVRQQLPEKYKEIFFDQSKNGYAGYIDGGASQEEFYKFIKPILEKMDGTEELLVKLNREDLLRKQRTFDNGSIPHQIHLGELHAILRRQEDFYPFLKDNREKIEKILTFRIPYYVGPLARGNSRFAWMTRKSEETITPWNFEEVVDKGASAQSFIERMTNFDKNLPNEKVLPKHSLLYEYFTVYNELTKVKYVTEGMRKPAFLSGEQKKAIVDLLFKTNRKVTVKQLKEDYFKKIECFDSVEISGVEDRFNASLGTYHDLLKIIKDKDFLDNEENEDILEDIVLTLTLFEDREMIEERLKTYAHLFDDKVMKQLKRRRYTGWGRLSRKLINGIRDKQSGKTILDFLKSDGFANRNFMQLIHDDSLTFKEDIQKAQVSGQGDSLHEHIANLAGSPAIKKGILQTVKVVDELVKVMGRHKPENIVIEMARENQTTQKGQKNSRERMKRIEEGIKELGSQILKEHPVENTQLQNEKLYLYYLQNGRDMYVDQELDINRLSDYDVDHIVPQSFLKDDSIDNKVLTRSDKARGKSDNVPSEEVVKKMKNYWRQLLNAKLITQRKFDNLTKAERGGLSELDKAGFIKRQLVETRQITKHVAQILDSRMNTKYDENDKLIREVKVITLKSKLVSDFRKDFQFYKVREINNYHHAHDAYLNAVVGTALIKKYPKLESEFVYGDYKVYDVRKMIAKSEQEIGKATAKYFFYSNIMNFFKTEITLANGEIRKRPLIETNGETGEIVWDKGRDFATVRKVLSMPQVNIVKKTEVQTGGFSKESILPKRNSDKLIARKKDWDPKKYGGFDSPTVAYSVLVVAKVEKGKSKKLKSVKELLGITIMERSSFEKNPIDFLEAKGYKEVKKDLIIKLPKYSLFELENGRKRMLASAGELQKGNELALPSKYVNFLYLASHYEKLKGSPEDNEQKQLFVEQHKHYLDEIIEQISEFSKRVILADANLDKVLSAYNKHRDKPIREQAENIIHLFTLTNLGAPAAFKYFDTTIDRKRYTSTKEVLDATLIHQSITGLYETRIDLSQLGGDGGPAPGSSGGGGGMDPLQLLQPLEAEIKGTKLKAHWNSGATITCVPQAFLEEEVPIKNIWIKTIHGEKEQPVYYLTFKIQGRKVEAEVISSPYDYILVSPSDIPWLMKKPLQLTTLVPLQEYEERLLKQTMLTGSYKEKLQSLFLKYDALWQHWENQVGHRRIKPHHIATGTVNPRPQKQYPINPKAKASIQTVINDLLKQGVLIQQNSIMNTPVYPVPKPDGKWRMVLDYREVNKTIPLIAAQNQHSAGILSSIFRGKYKTTLDLSNGFWAHSITPESYWLTAFTWLGQQYCWTRLPQGFLNSPALFNADVVDLLKEVPNVQVYVDDIYISHDDPREHLEQLEKVFSLLLNAGYVVSLKKSEIAQHEVEFLGFNITKEGRGLTETFKQKLLNITPPRDLKQLQSILGLLNFARNFIPNFSELVKPLYNIIATAPGKYITWTTDNSQQLQNIISMLNSAENLEERNPEVRLIMKVNTSPSAGYIRFYNEFAKRPIMYLNYVYTKAEVKFTNTEKLLTTIHKGLIKALDLGMGQEILVYSPIVSMTKIQKTPLPERKALPIRWITWMSYLEDPRIQFHYDKTLPELQQVPTVTDDIIAKIKHPSEFSMVFYTDGSAIKHPNVNKSHNAGMGIAQVQFKPEFTVINTWSIPLGDHTAQLAEVAAVEFACKKALKIDGPVLIVTDSFYVAESVNKELPYWQSNGFFNNKKKPLKHVSKWKSIADCIQLKPDIIIIHEKGHQPTASTFHTEGNNLADKLATQGSYVVNAGKRTADGSEFEKRTADGSEFESPKKKAKVE

SEQ ID NO: 618 - protein, 2174 aa, synthetic construct
MPAAKRVKLDGGDKKYSIGLDIGTNSVGWAVITDEYKVPSKKFKVLGNTDRHSIKKNLIGALLFDSGETAEATRLKRTARRRYTRRKNRICYLQEIFSNEMAKVDDSFFHRLEESFLVEEDKKHERHPIFGNIVDEVAYHEKYPTIYHLRKKLVDSTDKADLRLIYLALAHMIKFRGHFLIEGDLNPDNSDVDKLFIQLVQTYNQLFEENPINASGVDAKAILSARLSKSRRLENLIAQLPGEKKNGLFGNLIALSLGLTPNFKSNFDLAEDAKLQLSKDTYDDDLDNLLAQIGDQYADLFLAAKNLSDAILLSDILRVNTEITKAPLSASMIKRYDEHHQDLTLLKALVRQQLPEKYKEIFFDQSKNGYAGYIDGGASQEEFYKFIKPILEKMDGTEELLVKLNREDLLRKQRTFDNGSIPHQIHLGELHAILRRQEDFYPFLKDNREKIEKILTFRIPYYVGPLARGNSRFAWMTRKSEETITPWNFEEVVDKGASAQSFIERMTNFDKNLPNEKVLPKHSLLYEYFTVYNELTKVKYVTEGMRKPAFLSGEQKKAIVDLLFKTNRKVTVKQLKEDYFKKIECFDSVEISGVEDRFNASLGTYHDLLKIIKDKDFLDNEENEDILEDIVLTLTLFEDREMIEERLKTYAHLFDDKVMKQLKRRRYTGWGRLSRKLINGIRDKQSGKTILDFLKSDGFANRNFMQLIHDDSLTFKEDIQKAQVSGQGDSLHEHIANLAGSPAIKKGILQTVKVVDELVKVMGRHKPENIVIEMARENQTTQKGQKNSRERMKRIEEGIKELGSQILKEHPVENTQLQNEKLYLYYLQNGRDMYVDQELDINRLSDYDVDHIVPQSFLKDDSIDNKVLTRSDKARGKSDNVPSEEVVKKMKNYWRQLLNAKLITQRKFDNLTKAERGGLSELDKAGFIKRQLVETRQITKHVAQILDSRMNTKYDENDKLIREVKVITLKSKLVSDFRKDFQFYKVREINNYHHAHDAYLNAVVGTALIKKYPKLESEFVYGDYKVYDVRKMIAKSEQEIGKATAKYFFYSNIMNFFKTEITLANGEIRKRPLIETNGETGEIVWDKGRDFATVRKVLSMPQVNIVKKTEVQTGGFSKESILPKRNSDKLIARKKDWDPKKYGGFDSPTVAYSVLVVAKVEKGKSKKLKSVKELLGITIMERSSFEKNPIDFLEAKGYKEVKKDLIIKLPKYSLFELENGRKRMLASAGELQKGNELALPSKYVNFLYLASHYEKLKGSPEDNEQKQLFVEQHKHYLDEIIEQISEFSKRVILADANLDKVLSAYNKHRDKPIREQAENIIHLFTLTNLGAPAAFKYFDTTIDRKRYTSTKEVLDATLIHQSITGLYETRIDLSQLGGDGGPAPGGSGGGGGMDPLQLLQPLEAEIKGTKLKAHWNSGATITCVPQAFLEEEVPIKNIWIKTIHGEKEQPVYYLTFKIQGRKVEAEVISSPYDYILVSPSDIPWLMKKPLQLTTLVPLQEYEERLLKQTMLTGSYKEKLQSLFLKYDALWQHWENQVGHRRIKPHHIATGTVNPRPQKQYPINPKAKASIQTVINDLLKQGVLIQQNSIMNTPVYPVPKPDGKWRMVLDYREVNKTIPLIAAQNQHSAGILSSIFRGKYKTTLDLSNGFWAHSITPESYWLTAFTWLGQQYCWTRLPQGFLNSPALFNADVVDLLKEVPNVQVYVDDIYISHDDPREHLEQLEKVFSLLLNAGYVVSLKKSEIAQHEVEFLGFNITKEGRGLTETFKQKLLNITPPRDLKQLQSILGLLNFARNFIPNFSELVKPLYNIIATAPGKYITWTTDNSQQLQNIISMLNSAENLEERNPEVRLIMKVNTSPSAGYIRFYNEFAKRPIMYLNYVYTKAEVKFTNTEKLLTTIHKGLIKALDLGMGQEILVYSPIVSMTKIQKTPLPERKALPIRWITWMSYLEDPRIQFHYDKTLPELQQVPTVTDDIIAKIKHPSEFSMVFYTDGSAIKHPNVNKSHNAGMGIAQVQFKPEFTVINTWSIPLGDHTAQLAEVAAVEFACKKALKIDGPVLIVTDSFYVAESVNKELPYWQSNGFFNNKKKPLKHVSKWKSIADCIQLKPDIIIIHEKGHQPTASTFHTEGNNLADKLATQGSYVVNAGKRTADGSEFEKRTADGSEFESPKKKAKVE

SEQ ID NO: 619 - protein, 2173 aa, synthetic construct
MPAAKRVKLDGGDKKYSIGLDIGTNSVGWAVITDEYKVPSKKFKVLGNTDRHSIKKNLIGALLFDSGETAEATRLKRTARRRYTRRKNRICYLQEIFSNEMAKVDDSFFHRLEESFLVEEDKKHERHPIFGNIVDEVAYHEKYPTIYHLRKKLVDSTDKADLRLIYLALAHMIKFRGHFLIEGDLNPDNSDVDKLFIQLVQTYNQLFEENPINASGVDAKAILSARLSKSRRLENLIAQLPGEKKNGLFGNLIALSLGLTPNFKSNFDLAEDAKLQLSKDTYDDDLDNLLAQIGDQYADLFLAAKNLSDAILLSDILRVNTEITKAPLSASMIKRYDEHHQDLTLLKALVRQQLPEKYKEIFFDQSKNGYAGYIDGGASQEEFYKFIKPILEKMDGTEELLVKLNREDLLRKQRTFDNGSIPHQIHLGELHAILRRQEDFYPFLKDNREKIEKILTFRIPYYVGPLARGNSRFAWMTRKSEETITPWNFEEVVDKGASAQSFIERMTNFDKNLPNEKVLPKHSLLYEYFTVYNELTKVKYVTEGMRKPAFLSGEQKKAIVDLLFKTNRKVTVKQLKEDYFKKIECFDSVEISGVEDRFNASLGTYHDLLKIIKDKDFLDNEENEDILEDIVLTLTLFEDREMIEERLKTYAHLFDDKVMKQLKRRRYTGWGRLSRKLINGIRDKQSGKTILDFLKSDGFANRNFMQLIHDDSLTFKEDIQKAQVSGQGDSLHEHIANLAGSPAIKKGILQTVKVVDELVKVMGRHKPENIVIEMARENQTTQKGQKNSRERMKRIEEGIKELGSQILKEHPVENTQLQNEKLYLYYLQNGRDMYVDQELDINRLSDYDVDHIVPQSFLKDDSIDNKVLTRSDKARGKSDNVPSEEVVKKMKNYWRQLLNAKLITQRKFDNLTKAERGGLSELDKAGFIKRQLVETRQITKHVAQILDSRMNTKYDENDKLIREVKVITLKSKLVSDFRKDFQFYKVREINNYHHAHDAYLNAVVGTALIKKYPKLESEFVYGDYKVYDVRKMIAKSEQEIGKATAKYFFYSNIMNFFKTEITLANGEIRKRPLIETNGETGEIVWDKGRDFATVRKVLSMPQVNIVKKTEVQTGGFSKESILPKRNSDKLIARKKDWDPKKYGGFDSPTVAYSVLVVAKVEKGKSKKLKSVKELLGITIMERSSFEKNPIDFLEAKGYKEVKKDLIIKLPKYSLFELENGRKRMLASAGELQKGNELALPSKYVNFLYLASHYEKLKGSPEDNEQKQLFVEQHKHYLDEIIEQISEFSKRVILADANLDKVLSAYNKHRDKPIREQAENIIHLFTLTNLGAPAAFKYFDTTIDRKRYTSTKEVLDATLIHQSITGLYETRIDLSQLGGDGGEAAAKPAPGGMDPLQLLQPLEAEIKGTKLKAHWNSGATITCVPQAFLEEEVPIKNIWIKTIHGEKEQPVYYLTFKIQGRKVEAEVISSPYDYILVSPSDIPWLMKKPLQLTTLVPLQEYEERLLKQTMLTGSYKEKLQSLFLKYDALWQHWENQVGHRRIKPHHIATGTVNPRPQKQYPINPKAKASIQTVINDLLKQGVLIQQNSIMNTPVYPVPKPDGKWRMVLDYREVNKTIPLIAAQNQHSAGILSSIFRGKYKTTLDLSNGFWAHSITPESYWLTAFTWLGQQYCWTRLPQGFLNSPALFNADVVDLLKEVPNVQVYVDDIYISHDDPREHLEQLEKVFSLLLNAGYVVSLKKSEIAQHEVEFLGFNITKEGRGLTETFKQKLLNITPPRDLKQLQSILGLLNFARNFIPNFSELVKPLYNIIATAPGKYITWTTDNSQQLQNIISMLNSAENLEERNPEVRLIMKVNTSPSAGYIRFYNEFAKRPIMYLNYVYTKAEVKFTNTEKLLTTIHKGLIKALDLGMGQEILVYSPIVSMTKIQKTPLPERKALPIRWITWMSYLEDPRIQFHYDKTLPELQQVPTVTDDIIAKIKHPSEFSMVFYTDGSAIKHPNVNKSHNAGMGIAQVQFKPEFTVINTWSIPLGDHTAQLAEVAAVEFACKKALKIDGPVLIVTDSFYVAESVNKELPYWQSNGFFNNKKKPLKHVSKWKSIADCIQLKPDIIIIHEKGHQPTASTFHTEGNNLADKLATQGSYVVNAGKRTADGSEFEKRTADGSEFESPKKKAKVE

SEQ ID NO: 620 - protein, 2176 aa, synthetic construct
MPAAKRVKLDGGDKKYSIGLDIGTNSVGWAVITDEYKVPSKKFKVLGNTDRHSIKKNLIGALLFDSGETAEATRLKRTARRRYTRRKNRICYLQEIFSNEMAKVDDSFFHRLEESFLVEEDKKHERHPIFGNIVDEVAYHEKYPTIYHLRKKLVDSTDKADLRLIYLALAHMIKFRGHFLIEGDLNPDNSDVDKLFIQLVQTYNQLFEENPINASGVDAKAILSARLSKSRRLENLIAQLPGEKKNGLFGNLIALSLGLTPNFKSNFDLAEDAKLQLSKDTYDDDLDNLLAQIGDQYADLFLAAKNLSDAILLSDILRVNTEITKAPLSASMIKRYDEHHQDLTLLKALVRQQLPEKYKEIFFDQSKNGYAGYIDGGASQEEFYKFIKPILEKMDGTEELLVKLNREDLLRKQRTFDNGSIPHQIHLGELHAILRRQEDFYPFLKDNREKIEKILTFRIPYYVGPLARGNSRFAWMTRKSEETITPWNFEEVVDKGASAQSFIERMTNFDKNLPNEKVLPKHSLLYEYFTVYNELTKVKYVTEGMRKPAFLSGEQKKAIVDLLFKTNRKVTVKQLKEDYFKKIECFDSVEISGVEDRFNASLGTYHDLLKIIKDKDFLDNEENEDILEDIVLTLTLFEDREMIEERLKTYAHLFDDKVMKQLKRRRYTGWGRLSRKLINGIRDKQSGKTILDFLKSDGFANRNFMQLIHDDSLTFKEDIQKAQVSGQGDSLHEHIANLAGSPAIKKGILQTVKVVDELVKVMGRHKPENIVIEMARENQTTQKGQKNSRERMKRIEEGIKELGSQILKEHPVENTQLQNEKLYLYYLQNGRDMYVDQELDINRLSDYDVDHIVPQSFLKDDSIDNKVLTRSDKARGKSDNVPSEEVVKKMKNYWRQLLNAKLITQRKFDNLTKAERGGLSELDKAGFIKRQLVETRQITKHVAQILDSRMNTKYDENDKLIREVKVITLKSKLVSDFRKDFQFYKVREINNYHHAHDAYLNAVVGTALIKKYPKLESEFVYGDYKVYDVRKMIAKSEQEIGKATAKYFFYSNIMNFFKTEITLANGEIRKRPLIETNGETGEIVWDKGRDFATVRKVLSMPQVNIVKKTEVQTGGFSKESILPKRNSDKLIARKKDWDPKKYGGFDSPTVAYSVLVVAKVEKGKSKKLKSVKELLGITIMERSSFEKNPIDFLEAKGYKEVKKDLIIKLPKYSLFELENGRKRMLASAGELQKGNELALPSKYVNFLYLASHYEKLKGSPEDNEQKQLFVEQHKHYLDEIIEQISEFSKRVILADANLDKVLSAYNKHRDKPIREQAENIIHLFTLTNLGAPAAFKYFDTTIDRKRYTSTKEVLDATLIHQSITGLYETRIDLSQLGGDGGGGGEAAAKGSSGGMDPLQLLQPLEAEIKGTKLKAHWNSGATITCVPQAFLEEEVPIKNIWIKTIHGEKEQPVYYLTFKIQGRKVEAEVISSPYDYILVSPSDIPWLMKKPLQLTTLVPLQEYEERLLKQTMLTGSYKEKLQSLFLKYDALWQHWENQVGHRRIKPHHIATGTVNPRPQKQYPINPKAKASIQTVINDLLKQGVLIQQNSIMNTPVYPVPKPDGKWRMVLDYREVNKTIPLIAAQNQHSAGILSSIFRGKYKTTLDLSNGFWAHSITPESYWLTAFTWLGQQYCWTRLPQGFLNSPALFNADVVDLLKEVPNVQVYVDDIYISHDDPREHLEQLEKVFSLLLNAGYVVSLKKSEIAQHEVEFLGFNITKEGRGLTETFKQKLLNITPPRDLKQLQSILGLLNFARNFIPNFSELVKPLYNIIATAPGKYITWTTDNSQQLQNIISMLNSAENLEERNPEVRLIMKVNTSPSAGYIRFYNEFAKRPIMYLNYVYTKAEVKFTNTEKLLTTIHKGLIKALDLGMGQEILVYSPIVSMTKIQKTPLPERKALPIRWITWMSYLEDPRIQFHYDKTLPELQQVPTVTDDIIAKIKHPSEFSMVFYTDGSAIKHPNVNKSHNAGMGIAQVQFKPEFTVINTWSIPLGDHTAQLAEVAAVEFACKKALKIDGPVLIVTDSFYVAESVNKELPYWQSNGFFNNKKKPLKHVSKWKSIADCIQLKPDIIIIHEKGHQPTASTFHTEGNNLADKLATQGSYVVNAGKRTADGSEFEKRTADGSEFESPKKKAKVE

SEQ ID NO: 621 - protein, 2176 aa, synthetic construct
MPAAKRVKLDGGDKKYSIGLDIGTNSVGWAVITDEYKVPSKKFKVLGNTDRHSIKKNLIGALLFDSGETAEATRLKRTARRRYTRRKNRICYLQEIFSNEMAKVDDSFFHRLEESFLVEEDKKHERHPIFGNIVDEVAYHEKYPTIYHLRKKLVDSTDKADLRLIYLALAHMIKFRGHFLIEGDLNPDNSDVDKLFIQLVQTYNQLFEENPINASGVDAKAILSARLSKSRRLENLIAQLPGEKKNGLFGNLIALSLGLTPNFKSNFDLAEDAKLQLSKDTYDDDLDNLLAQIGDQYADLFLAAKNLSDAILLSDILRVNTEITKAPLSASMIKRYDEHHQDLTLLKALVRQQLPEKYKEIFFDQSKNGYAGYIDGGASQEEFYKFIKPILEKMDGTEELLVKLNREDLLRKQRTFDNGSIPHQIHLGELHAILRRQEDFYPFLKDNREKIEKILTFRIPYYVGPLARGNSRFAWMTRKSEETITPWNFEEVVDKGASAQSFIERMTNFDKNLPNEKVLPKHSLLYEYFTVYNELTKVKYVTEGMRKPAFLSGEQKKAIVDLLFKTNRKVTVKQLKEDYFKKIECFDSVEISGVEDRFNASLGTYHDLLKIIKDKDFLDNEENEDILEDIVLTLTLFEDREMIEERLKTYAHLFDDKVMKQLKRRRYTGWGRLSRKLINGIRDKQSGKTILDFLKSDGFANRNFMQLIHDDSLTFKEDIQKAQVSGQGDSLHEHIANLAGSPAIKKGILQTVKVVDELVKVMGRHKPENIVIEMARENQTTQKGQKNSRERMKRIEEGIKELGSQILKEHPVENTQLQNEKLYLYYLQNGRDMYVDQELDINRLSDYDVDHIVPQSFLKDDSIDNKVLTRSDKARGKSDNVPSEEVVKKMKNYWRQLLNAKLITQRKFDNLTKAERGGLSELDKAGFIKRQLVETRQITKHVAQILDSRMNTKYDENDKLIREVKVITLKSKLVSDFRKDFQFYKVREINNYHHAHDAYLNAVVGTALIKKYPKLESEFVYGDYKVYDVRKMIAKSEQEIGKATAKYFFYSNIMNFFKTEITLANGEIRKRPLIETNGETGEIVWDKGRDFATVRKVLSMPQVNIVKKTEVQTGGFSKESILPKRNSDKLIARKKDWDPKKYGGFDSPTVAYSVLVVAKVEKGKSKKLKSVKELLGITIMERSSFEKNPIDFLEAKGYKEVKKDLIIKLPKYSLFELENGRKRMLASAGELQKGNELALPSKYVNFLYLASHYEKLKGSPEDNEQKQLFVEQHKHYLDEIIEQISEFSKRVILADANLDKVLSAYNKHRDKPIREQAENIIHLFTLTNLGAPAAFKYFDTTIDRKRYTSTKEVLDATLIHQSITGLYETRIDLSQLGGDGGGGGEAAAKPAPGGMDPLQLLQPLEAEIKGTKLKAHWNSGATITCVPQAFLEEEVPIKNIWIKTIHGEKEQPVYYLTFKIQGRKVEAEVISSPYDYILVSPSDIPWLMKKPLQLTTLVPLQEYEERLLKQTMLTGSYKEKLQSLFLKYDALWQHWENQVGHRRIKPHHIATGTVNPRPQKQYPINPKAKASIQTVINDLLKQGVLIQQNSIMNTPVYPVPKPDGKWRMVLDYREVNKTIPLIAAQNQHSAGILSSIFRGKYKTTLDLSNGFWAHSITPESYWLTAFTWLGQQYCWTRLPQGFLNSPALFNADVVDLLKEVPNVQVYVDDIYISHDDPREHLEQLEKVFSLLLNAGYVVSLKKSEIAQHEVEFLGFNITKEGRGLTETFKQKLLNITPPRDLKQLQSILGLLNFARNFIPNFSELVKPLYNIIATAPGKYITWTTDNSQQLQNIISMLNSAENLEERNPEVRLIMKVNTSPSAGYIRFYNEFAKRPIMYLNYVYTKAEVKFTNTEKLLTTIHKGLIKALDLGMGQEILVYSPIVSMTKIQKTPLPERKALPIRWITWMSYLEDPRIQFHYDKTLPELQQVPTVTDDIIAKIKHPSEFSMVFYTDGSAIKHPNVNKSHNAGMGIAQVQFKPEFTVINTWSIPLGDHTAQLAEVAAVEFACKKALKIDGPVLIVTDSFYVAESVNKELPYWQSNGFFNNKKKPLKHVSKWKSIADCIQLKPDIIIIHEKGHQPTASTFHTEGNNLADKLATQGSYVVNAGKRTADGSEFEKRTADGSEFESPKKKAKVE

SEQ ID NO: 622 - protein, 2176 aa, synthetic construct
MPAAKRVKLDGGDKKYSIGLDIGTNSVGWAVITDEYKVPSKKFKVLGNTDRHSIKKNLIGALLFDSGETAEATRLKRTARRRYTRRKNRICYLQEIFSNEMAKVDDSFFHRLEESFLVEEDKKHERHPIFGNIVDEVAYHEKYPTIYHLRKKLVDSTDKADLRLIYLALAHMIKFRGHFLIEGDLNPDNSDVDKLFIQLVQTYNQLFEENPINASGVDAKAILSARLSKSRRLENLIAQLPGEKKNGLFGNLIALSLGLTPNFKSNFDLAEDAKLQLSKDTYDDDLDNLLAQIGDQYADLFLAAKNLSDAILLSDILRVNTEITKAPLSASMIKRYDEHHQDLTLLKALVRQQLPEKYKEIFFDQSKNGYAGYIDGGASQEEFYKFIKPILEKMDGTEELLVKLNREDLLRKQRTFDNGSIPHQIHLGELHAILRRQEDFYPFLKDNREKIEKILTFRIPYYVGPLARGNSRFAWMTRKSEETITPWNFEEVVDKGASAQSFIERMTNFDKNLPNEKVLPKHSLLYEYFTVYNELTKVKYVTEGMRKPAFLSGEQKKAIVDLLFKTNRKVTVKQLKEDYFKKIECFDSVEISGVEDRFNASLGTYHDLLKIIKDKDFLDNEENEDILEDIVLTLTLFEDREMIEERLKTYAHLFDDKVMKQLKRRRYTGWGRLSRKLINGIRDKQSGKTILDFLKSDGFANRNFMQLIHDDSLTFKEDIQKAQVSGQGDSLHEHIANLAGSPAIKKGILQTVKVVDELVKVMGRHKPENIVIEMARENQTTQKGQKNSRERMKRIEEGIKELGSQILKEHPVENTQLQNEKLYLYYLQNGRDMYVDQELDINRLSDYDVDHIVPQSFLKDDSIDNKVLTRSDKARGKSDNVPSEEVVKKMKNYWRQLLNAKLITQRKFDNLTKAERGGLSELDKAGFIKRQLVETRQITKHVAQILDSRMNTKYDENDKLIREVKVITLKSKLVSDFRKDFQFYKVREINNYHHAHDAYLNAVVGTALIKKYPKLESEFVYGDYKVYDVRKMIAKSEQEIGKATAKYFFYSNIMNFFKTEITLANGEIRKRPLIETNGETGEIVWDKGRDFATVRKVLSMPQVNIVKKTEVQTGGFSKESILPKRNSDKLIARKKDWDPKKYGGFDSPTVAYSVLVVAKVEKGKSKKLKSVKELLGITIMERSSFEKNPIDFLEAKGYKEVKKDLIIKLPKYSLFELENGRKRMLASAGELQKGNELALPSKYVNFLYLASHYEKLKGSPEDNEQKQLFVEQHKHYLDEIIEQISEFSKRVILADANLDKVLSAYNKHRDKPIREQAENIIHLFTLTNLGAPAAFKYFDTTIDRKRYTSTKEVLDATLIHQSITGLYETRIDLSQLGGDGGPAPGGGEAAAKGGMDPLQLLQPLEAEIKGTKLKAHWNSGATITCVPQAFLEEEVPIKNIWIKTIHGEKEQPVYYLTFKIQGRKVEAEVISSPYDYILVSPSDIPWLMKKPLQLTTLVPLQEYEERLLKQTMLTGSYKEKLQSLFLKYDALWQHWENQVGHRRIKPHHIATGTVNPRPQKQYPINPKAKASIQTVINDLLKQGVLIQQNSIMNTPVYPVPKPDGKWRMVLDYREVNKTIPLIAAQNQHSAGILSSIFRGKYKTTLDLSNGFWAHSITPESYWLTAFTWLGQQYCWTRLPQGFLNSPALFNADVVDLLKEVPNVQVYVDDIYISHDDPREHLEQLEKVFSLLLNAGYVVSLKKSEIAQHEVEFLGFNITKEGRGLTETFKQKLLNITPPRDLKQLQSILGLLNFARNFIPNFSELVKPLYNIIATAPGKYITWTTDNSQQLQNIISMLNSAENLEERNPEVRLIMKVNTSPSAGYIRFYNEFAKRPIMYLNYVYTKAEVKFTNTEKLLTTIHKGLIKALDLGMGQEILVYSPIVSMTKIQKTPLPERKALPIRWITWMSYLEDPRIQFHYDKTLPELQQVPTVTDDIIAKIKHPSEFSMVFYTDGSAIKHPNVNKSHNAGMGIAQVQFKPEFTVINTWSIPLGDHTAQLAEVAAVEFACKKALKIDGPVLIVTDSFYVAESVNKELPYWQSNGFFNNKKKPLKHVSKWKSIADCIQLKPDIIIIHEKGHQPTASTFHTEGNNLADKLATQGSYVVNAGKRTADGSEFEKRTADGSEFESPKKKAKVE

SEQ ID NO: 623 - protein, 2168 aa, synthetic construct
MPAAKRVKLDGGDKKYSIGLDIGTNSVGWAVITDEYKVPSKKFKVLGNTDRHSIKKNLIGALLFDSGETAEATRLKRTARRRYTRRKNRICYLQEIFSNEMAKVDDSFFHRLEESFLVEEDKKHERHPIFGNIVDEVAYHEKYPTIYHLRKKLVDSTDKADLRLIYLALAHMIKFRGHFLIEGDLNPDNSDVDKLFIQLVQTYNQLFEENPINASGVDAKAILSARLSKSRRLENLIAQLPGEKKNGLFGNLIALSLGLTPNFKSNFDLAEDAKLQLSKDTYDDDLDNLLAQIGDQYADLFLAAKNLSDAILLSDILRVNTEITKAPLSASMIKRYDEHHQDLTLLKALVRQQLPEKYKEIFFDQSKNGYAGYIDGGASQEEFYKFIKPILEKMDGTEELLVKLNREDLLRKQRTFDNGSIPHQIHLGELHAILRRQEDFYPFLKDNREKIEKILTFRIPYYVGPLARGNSRFAWMTRKSEETITPWNFEEVVDKGASAQSFIERMTNFDKNLPNEKVLPKHSLLYEYFTVYNELTKVKYVTEGMRKPAFLSGEQKKAIVDLLFKTNRKVTVKQLKEDYFKKIECFDSVEISGVEDRFNASLGTYHDLLKIIKDKDFLDNEENEDILEDIVLTLTLFEDREMIEERLKTYAHLFDDKVMKQLKRRRYTGWGRLSRKLINGIRDKQSGKTILDFLKSDGFANRNFMQLIHDDSLTFKEDIQKAQVSGQGDSLHEHIANLAGSPAIKKGILQTVKVVDELVKVMGRHKPENIVIEMARENQTTQKGQKNSRERMKRIEEGIKELGSQILKEHPVENTQLQNEKLYLYYLQNGRDMYVDQELDINRLSDYDVDHIVPQSFLKDDSIDNKVLTRSDKARGKSDNVPSEEVVKKMKNYWRQLLNAKLITQRKFDNLTKAERGGLSELDKAGFIKRQLVETRQITKHVAQILDSRMNTKYDENDKLIREVKVITLKSKLVSDFRKDFQFYKVREINNYHHAHDAYLNAVVGTALIKKYPKLESEFVYGDYKVYDVRKMIAKSEQEIGKATAKYFFYSNIMNFFKTEITLANGEIRKRPLIETNGETGEIVWDKGRDFATVRKVLSMPQVNIVKKTEVQTGGFSKESILPKRNSDKLIARKKDWDPKKYGGFDSPTVAYSVLVVAKVEKGKSKKLKSVKELLGITIMERSSFEKNPIDFLEAKGYKEVKKDLIIKLPKYSLFELENGRKRMLASAGELQKGNELALPSKYVNFLYLASHYEKLKGSPEDNEQKQLFVEQHKHYLDEIIEQISEFSKRVILADANLDKVLSAYNKHRDKPIREQAENIIHLFTLTNLGAPAAFKYFDTTIDRKRYTSTKEVLDATLIHQSITGLYETRIDLSQLGGDGGGGGGGMDPLQLLQPLEAEIKGTKLKAHWNSGATITCVPQAFLEEEVPIKNIWIKTIHGEKEQPVYYLTFKIQGRKVEAEVISSPYDYILVSPSDIPWLMKKPLQLTTLVPLQEYEERLLKQTMLTGSYKEKLQSLFLKYDALWQHWENQVGHRRIKPHHIATGTVNPRPQKQYPINPKAKASIQTVINDLLKQGVLIQQNSIMNTPVYPVPKPDGKWRMVLDYREVNKTIPLIAAQNQHSAGILSSIFRGKYKTTLDLSNGFWAHSITPESYWLTAFTWLGQQYCWTRLPQGFLNSPALFNADVVDLLKEVPNVQVYVDDIYISHDDPREHLEQLEKVFSLLLNAGYVVSLKKSEIAQHEVEFLGFNITKEGRGLTETFKQKLLNITPPRDLKQLQSILGLLNFARNFIPNFSELVKPLYNIIATAPGKYITWTTDNSQQLQNIISMLNSAENLEERNPEVRLIMKVNTSPSAGYIRFYNEFAKRPIMYLNYVYTKAEVKFTNTEKLLTTIHKGLIKALDLGMGQEILVYSPIVSMTKIQKTPLPERKALPIRWITWMSYLEDPRIQFHYDKTLPELQQVPTVTDDIIAKIKHPSEFSMVFYTDGSAIKHPNVNKSHNAGMGIAQVQFKPEFTVINTWSIPLGDHTAQLAEVAAVEFACKKALKIDGPVLIVTDSFYVAESVNKELPYWQSNGFFNNKKKPLKHVSKWKSIADCIQLKPDIIIIHEKGHQPTASTFHTEGNNLADKLATQGSYVVNAGKRTADGSEFEKRTADGSEFESPKKKAKVE

SEQ ID NO: 624 - protein, 2180 aa, synthetic construct
MPAAKRVKLDGGDKKYSIGLDIGTNSVGWAVITDEYKVPSKKFKVLGNTDRHSIKKNLIGALLFDSGETAEATRLKRTARRRYTRRKNRICYLQEIFSNEMAKVDDSFFHRLEESFLVEEDKKHERHPIFGNIVDEVAYHEKYPTIYHLRKKLVDSTDKADLRLIYLALAHMIKFRGHFLIEGDLNPDNSDVDKLFIQLVQTYNQLFEENPINASGVDAKAILSARLSKSRRLENLIAQLPGEKKNGLFGNLIALSLGLTPNFKSNFDLAEDAKLQLSKDTYDDDLDNLLAQIGDQYADLFLAAKNLSDAILLSDILRVNTEITKAPLSASMIKRYDEHHQDLTLLKALVRQQLPEKYKEIFFDQSKNGYAGYIDGGASQEEFYKFIKPILEKMDGTEELLVKLNREDLLRKQRTFDNGSIPHQIHLGELHAILRRQEDFYPFLKDNREKIEKILTFRIPYYVGPLARGNSRFAWMTRKSEETITPWNFEEVVDKGASAQSFIERMTNFDKNLPNEKVLPKHSLLYEYFTVYNELTKVKYVTEGMRKPAFLSGEQKKAIVDLLFKTNRKVTVKQLKEDYFKKIECFDSVEISGVEDRFNASLGTYHDLLKIIKDKDFLDNEENEDILEDIVLTLTLFEDREMIEERLKTYAHLFDDKVMKQLKRRRYTGWGRLSRKLINGIRDKQSGKTILDFLKSDGFANRNFMQLIHDDSLTFKEDIQKAQVSGQGDSLHEHIANLAGSPAIKKGILQTVKVVDELVKVMGRHKPENIVIEMARENQTTQKGQKNSRERMKRIEEGIKELGSQILKEHPVENTQLQNEKLYLYYLQNGRDMYVDQELDINRLSDYDVDHIVPQSFLKDDSIDNKVLTRSDKARGKSDNVPSEEVVKKMKNYWRQLLNAKLITQRKFDNLTKAERGGLSELDKAGFIKRQLVETRQITKHVAQILDSRMNTKYDENDKLIREVKVITLKSKLVSDFRKDFQFYKVREINNYHHAHDAYLNAVVGTALIKKYPKLESEFVYGDYKVYDVRKMIAKSEQEIGKATAKYFFYSNIMNFFKTEITLANGEIRKRPLIETNGETGEIVWDKGRDFATVRKVLSMPQVNIVKKTEVQTGGFSKESILPKRNSDKLIARKKDWDPKKYGGFDSPTVAYSVLVVAKVEKGKSKKLKSVKELLGITIMERSSFEKNPIDFLEAKGYKEVKKDLIIKLPKYSLFELENGRKRMLASAGELQKGNELALPSKYVNFLYLASHYEKLKGSPEDNEQKQLFVEQHKHYLDEIIEQISEFSKRVILADANLDKVLSAYNKHRDKPIREQAENIIHLFTLTNLGAPAAFKYFDTTIDRKRYTSTKEVLDATLIHQSITGLYETRIDLSQLGGDGGEAAAKEAAAKEAAAKGGMDPLQLLQPLEAEIKGTKLKAHWNSGATITCVPQAFLEEEVPIKNIWIKTIHGEKEQPVYYLTFKIQGRKVEAEVISSPYDYILVSPSDIPWLMKKPLQLTTLVPLQEYEERLLKQTMLTGSYKEKLQSLFLKYDALWQHWENQVGHRRIKPHHIATGTVNPRPQKQYPINPKAKASIQTVINDLLKQGVLIQQNSIMNTPVYPVPKPDGKWRMVLDYREVNKTIPLIAAQNQHSAGILSSIFRGKYKTTLDLSNGFWAHSITPESYWLTAFTWLGQQYCWTRLPQGFLNSPALFNADVVDLLKEVPNVQVYVDDIYISHDDPREHLEQLEKVFSLLLNAGYVVSLKKSEIAQHEVEFLGFNITKEGRGLTETFKQKLLNITPPRDLKQLQSILGLLNFARNFIPNFSELVKPLYNIIATAPGKYITWTTDNSQQLQNIISMLNSAENLEERNPEVRLIMKVNTSPSAGYIRFYNEFAKRPIMYLNYVYTKAEVKFTNTEKLLTTIHKGLIKALDLGMGQEILVYSPIVSMTKIQKTPLPERKALPIRWITWMSYLEDPRIQFHYDKTLPELQQVPTVTDDIIAKIKHPSEFSMVFYTDGSAIKHPNVNKSHNAGMGIAQVQFKPEFTVINTWSIPLGDHTAQLAEVAAVEFACKKALKIDGPVLIVTDSFYVAESVNKELPYWQSNGFFNNKKKPLKHVSKWKSIADCIQLKPDIIIIHEKGHQPTASTFHTEGNNLADKLATQGSYVVNAGKRTADGSEFEKRTADGSEFESPKKKAKVE

SEQ ID NO: 625 - protein, 2173 aa, synthetic construct
MPAAKRVKLDGGDKKYSIGLDIGTNSVGWAVITDEYKVPSKKFKVLGNTDRHSIKKNLIGALLFDSGETAEATRLKRTARRRYTRRKNRICYLQEIFSNEMAKVDDSFFHRLEESFLVEEDKKHERHPIFGNIVDEVAYHEKYPTIYHLRKKLVDSTDKADLRLIYLALAHMIKFRGHFLIEGDLNPDNSDVDKLFIQLVQTYNQLFEENPINASGVDAKAILSARLSKSRRLENLIAQLPGEKKNGLFGNLIALSLGLTPNFKSNFDLAEDAKLQLSKDTYDDDLDNLLAQIGDQYADLFLAAKNLSDAILLSDILRVNTEITKAPLSASMIKRYDEHHQDLTLLKALVRQQLPEKYKEIFFDQSKNGYAGYIDGGASQEEFYKFIKPILEKMDGTEELLVKLNREDLLRKQRTFDNGSIPHQIHLGELHAILRRQEDFYPFLKDNREKIEKILTFRIPYYVGPLARGNSRFAWMTRKSEETITPWNFEEVVDKGASAQSFIERMTNFDKNLPNEKVLPKHSLLYEYFTVYNELTKVKYVTEGMRKPAFLSGEQKKAIVDLLFKTNRKVTVKQLKEDYFKKIECFDSVEISGVEDRFNASLGTYHDLLKIIKDKDFLDNEENEDILEDIVLTLTLFEDREMIEERLKTYAHLFDDKVMKQLKRRRYTGWGRLSRKLINGIRDKQSGKTILDFLKSDGFANRNFMQLIHDDSLTFKEDIQKAQVSGQGDSLHEHIANLAGSPAIKKGILQTVKVVDELVKVMGRHKPENIVIEMARENQTTQKGQKNSRERMKRIEEGIKELGSQILKEHPVENTQLQNEKLYLYYLQNGRDMYVDQELDINRLSDYDVDHIVPQSFLKDDSIDNKVLTRSDKARGKSDNVPSEEVVKKMKNYWRQLLNAKLITQRKFDNLTKAERGGLSELDKAGFIKRQLVETRQITKHVAQILDSRMNTKYDENDKLIREVKVITLKSKLVSDFRKDFQFYKVREINNYHHAHDAYLNAVVGTALIKKYPKLESEFVYGDYKVYDVRKMIAKSEQEIGKATAKYFFYSNIMNFFKTEITLANGEIRKRPLIETNGETGEIVWDKGRDFATVRKVLSMPQVNIVKKTEVQTGGFSKESILPKRNSDKLIARKKDWDPKKYGGFDSPTVAYSVLVVAKVEKGKSKKLKSVKELLGITIMERSSFEKNPIDFLEAKGYKEVKKDLIIKLPKYSLFELENGRKRMLASAGELQKGNELALPSKYVNFLYLASHYEKLKGSPEDNEQKQLFVEQHKHYLDEIIEQISEFSKRVILADANLDKVLSAYNKHRDKPIREQAENIIHLFTLTNLGAPAAFKYFDTTIDRKRYTSTKEVLDATLIHQSITGLYETRIDLSQLGGDGGEAAAKGGGGGMDPLQLLQPLEAEIKGTKLKAHWNSGATITCVPQAFLEEEVPIKNIWIKTIHGEKEQPVYYLTFKIQGRKVEAEVISSPYDYILVSPSDIPWLMKKPLQLTTLVPLQEYEERLLKQTMLTGSYKEKLQSLFLKYDALWQHWENQVGHRRIKPHHIATGTVNPRPQKQYPINPKAKASIQTVINDLLKQGVLIQQNSIMNTPVYPVPKPDGKWRMVLDYREVNKTIPLIAAQNQHSAGILSSIFRGKYKTTLDLSNGFWAHSITPESYWLTAFTWLGQQYCWTRLPQGFLNSPALFNADVVDLLKEVPNVQVYVDDIYISHDDPREHLEQLEKVFSLLLNAGYVVSLKKSEIAQHEVEFLGFNITKEGRGLTETFKQKLLNITPPRDLKQLQSILGLLNFARNFIPNFSELVKPLYNIIATAPGKYITWTTDNSQQLQNIISMLNSAENLEERNPEVRLIMKVNTSPSAGYIRFYNEFAKRPIMYLNYVYTKAEVKFTNTEKLLTTIHKGLIKALDLGMGQEILVYSPIVSMTKIQKTPLPERKALPIRWITWMSYLEDPRIQFHYDKTLPELQQVPTVTDDIIAKIKHPSEFSMVFYTDGSAIKHPNVNKSHNAGMGIAQVQFKPEFTVINTWSIPLGDHTAQLAEVAAVEFACKKALKIDGPVLIVTDSFYVAESVNKELPYWQSNGFFNNKKKPLKHVSKWKSIADCIQLKPDIIIIHEKGHQPTASTFHTEGNNLADKLATQGSYVVNAGKRTADGSEFEKRTADGSEFESPKKKAKVE

SEQ ID NO: 626 - protein, 2176 aa, synthetic construct
MPAAKRVKLDGGDKKYSIGLDIGTNSVGWAVITDEYKVPSKKFKVLGNTDRHSIKKNLIGALLFDSGETAEATRLKRTARRRYTRRKNRICYLQEIFSNEMAKVDDSFFHRLEESFLVEEDKKHERHPIFGNIVDEVAYHEKYPTIYHLRKKLVDSTDKADLRLIYLALAHMIKFRGHFLIEGDLNPDNSDVDKLFIQLVQTYNQLFEENPINASGVDAKAILSARLSKSRRLENLIAQLPGEKKNGLFGNLIALSLGLTPNFKSNFDLAEDAKLQLSKDTYDDDLDNLLAQIGDQYADLFLAAKNLSDAILLSDILRVNTEITKAPLSASMIKRYDEHHQDLTLLKALVRQQLPEKYKEIFFDQSKNGYAGYIDGGASQEEFYKFIKPILEKMDGTEELLVKLNREDLLRKQRTFDNGSIPHQIHLGELHAILRRQEDFYPFLKDNREKIEKILTFRIPYYVGPLARGNSRFAWMTRKSEETITPWNFEEVVDKGASAQSFIERMTNFDKNLPNEKVLPKHSLLYEYFTVYNELTKVKYVTEGMRKPAFLSGEQKKAIVDLLFKTNRKVTVKQLKEDYFKKIECFDSVEISGVEDRFNASLGTYHDLLKIIKDKDFLDNEENEDILEDIVLTLTLFEDREMIEERLKTYAHLFDDKVMKQLKRRRYTGWGRLSRKLINGIRDKQSGKTILDFLKSDGFANRNFMQLIHDDSLTFKEDIQKAQVSGQGDSLHEHIANLAGSPAIKKGILQTVKVVDELVKVMGRHKPENIVIEMARENQTTQKGQKNSRERMKRIEEGIKELGSQILKEHPVENTQLQNEKLYLYYLQNGRDMYVDQELDINRLSDYDVDHIVPQSFLKDDSIDNKVLTRSDKARGKSDNVPSEEVVKKMKNYWRQLLNAKLITQRKFDNLTKAERGGLSELDKAGFIKRQLVETRQITKHVAQILDSRMNTKYDENDKLIREVKVITLKSKLVSDFRKDFQFYKVREINNYHHAHDAYLNAVVGTALIKKYPKLESEFVYGDYKVYDVRKMIAKSEQEIGKATAKYFFYSNIMNFFKTEITLANGEIRKRPLIETNGETGEIVWDKGRDFATVRKVLSMPQVNIVKKTEVQTGGFSKESILPKRNSDKLIARKKDWDPKKYGGFDSPTVAYSVLVVAKVEKGKSKKLKSVKELLGITIMERSSFEKNPIDFLEAKGYKEVKKDLIIKLPKYSLFELENGRKRMLASAGELQKGNELALPSKYVNFLYLASHYEKLKGSPEDNEQKQLFVEQHKHYLDEIIEQISEFSKRVILADANLDKVLSAYNKHRDKPIREQAENIIHLFTLTNLGAPAAFKYFDTTIDRKRYTSTKEVLDATLIHQSITGLYETRIDLSQLGGDGGEAAAKGGGGGSGGMDPLQLLQPLEAEIKGTKLKAHWNSGATITCVPQAFLEEEVPIKNIWIKTIHGEKEQPVYYLTFKIQGRKVEAEVISSPYDYILVSPSDIPWLMKKPLQLTTLVPLQEYEERLLKQTMLTGSYKEKLQSLFLKYDALWQHWENQVGHRRIKPHHIATGTVNPRPQKQYPINPKAKASIQTVINDLLKQGVLIQQNSIMNTPVYPVPKPDGKWRMVLDYREVNKTIPLIAAQNQHSAGILSSIFRGKYKTTLDLSNGFWAHSITPESYWLTAFTWLGQQYCWTRLPQGFLNSPALFNADVVDLLKEVPNVQVYVDDIYISHDDPREHLEQLEKVFSLLLNAGYVVSLKKSEIAQHEVEFLGFNITKEGRGLTETFKQKLLNITPPRDLKQLQSILGLLNFARNFIPNFSELVKPLYNIIATAPGKYITWTTDNSQQLQNIISMLNSAENLEERNPEVRLIMKVNTSPSAGYIRFYNEFAKRPIMYLNYVYTKAEVKFTNTEKLLTTIHKGLIKALDLGMGQEILVYSPIVSMTKIQKTPLPERKALPIRWITWMSYLEDPRIQFHYDKTLPELQQVPTVTDDIIAKIKHPSEFSMVFYTDGSAIKHPNVNKSHNAGMGIAQVQFKPEFTVINTWSIPLGDHTAQLAEVAAVEFACKKALKIDGPVLIVTDSFYVAESVNKELPYWQSNGFFNNKKKPLKHVSKWKSIADCIQLKPDIIIIHEKGHQPTASTFHTEGNNLADKLATQGSYVVNAGKRTADGSEFEKRTADGSEFESPKKKAKVE

SEQ ID NO: 627 - protein, 2177 aa, synthetic construct
MPAAKRVKLDGGDKKYSIGLDIGTNSVGWAVITDEYKVPSKKFKVLGNTDRHSIKKNLIGALLFDSGETAEATRLKRTARRRYTRRKNRICYLQEIFSNEMAKVDDSFFHRLEESFLVEEDKKHERHPIFGNIVDEVAYHEKYPTIYHLRKKLVDSTDKADLRLIYLALAHMIKFRGHFLIEGDLNPDNSDVDKLFIQLVQTYNQLFEENPINASGVDAKAILSARLSKSRRLENLIAQLPGEKKNGLFGNLIALSLGLTPNFKSNFDLAEDAKLQLSKDTYDDDLDNLLAQIGDQYADLFLAAKNLSDAILLSDILRVNTEITKAPLSASMIKRYDEHHQDLTLLKALVRQQLPEKYKEIFFDQSKNGYAGYIDGGASQEEFYKFIKPILEKMDGTEELLVKLNREDLLRKQRTFDNGSIPHQIHLGELHAILRRQEDFYPFLKDNREKIEKILTFRIPYYVGPLARGNSRFAWMTRKSEETITPWNFEEVVDKGASAQSFIERMTNFDKNLPNEKVLPKHSLLYEYFTVYNELTKVKYVTEGMRKPAFLSGEQKKAIVDLLFKTNRKVTVKQLKEDYFKKIECFDSVEISGVEDRFNASLGTYHDLLKIIKDKDFLDNEENEDILEDIVLTLTLFEDREMIEERLKTYAHLFDDKVMKQLKRRRYTGWGRLSRKLINGIRDKQSGKTILDFLKSDGFANRNFMQLIHDDSLTFKEDIQKAQVSGQGDSLHEHIANLAGSPAIKKGILQTVKVVDELVKVMGRHKPENIVIEMARENQTTQKGQKNSRERMKRIEEGIKELGSQILKEHPVENTQLQNEKLYLYYLQNGRDMYVDQELDINRLSDYDVDHIVPQSFLKDDSIDNKVLTRSDKARGKSDNVPSEEVVKKMKNYWRQLLNAKLITQRKFDNLTKAERGGLSELDKAGFIKRQLVETRQITKHVAQILDSRMNTKYDENDKLIREVKVITLKSKLVSDFRKDFQFYKVREINNYHHAHDAYLNAVVGTALIKKYPKLESEFVYGDYKVYDVRKMIAKSEQEIGKATAKYFFYSNIMNFFKTEITLANGEIRKRPLIETNGETGEIVWDKGRDFATVRKVLSMPQVNIVKKTEVQTGGFSKESILPKRNSDKLIARKKDWDPKKYGGFDSPTVAYSVLVVAKVEKGKSKKLKSVKELLGITIMERSSFEKNPIDFLEAKGYKEVKKDLIIKLPKYSLFELENGRKRMLASAGELQKGNELALPSKYVNFLYLASHYEKLKGSPEDNEQKQLFVEQHKHYLDEIIEQISEFSKRVILADANLDKVLSAYNKHRDKPIREQAENIIHLFTLTNLGAPAAFKYFDTTIDRKRYTSTKEVLDATLIHQSITGLYETRIDLSQLGGDGGGSSGSSGSSGSSGGMDPLQLLQPLEAEIKGTKLKAHWNSGATITCVPQAFLEEEVPIKNIWIKTIHGEKEQPVYYLTFKIQGRKVEAEVISSPYDYILVSPSDIPWLMKKPLQLTTLVPLQEYEERLLKQTMLTGSYKEKLQSLFLKYDALWQHWENQVGHRRIKPHHIATGTVNPRPQKQYPINPKAKASIQTVINDLLKQGVLIQQNSIMNTPVYPVPKPDGKWRMVLDYREVNKTIPLIAAQNQHSAGILSSIFRGKYKTTLDLSNGFWAHSITPESYWLTAFTWLGQQYCWTRLPQGFLNSPALFNADVVDLLKEVPNVQVYVDDIYISHDDPREHLEQLEKVFSLLLNAGYVVSLKKSEIAQHEVEFLGFNITKEGRGLTETFKQKLLNITPPRDLKQLQSILGLLNFARNFIPNFSELVKPLYNIIATAPGKYITWTTDNSQQLQNIISMLNSAENLEERNPEVRLIMKVNTSPSAGYIRFYNEFAKRPIMYLNYVYTKAEVKFTNTEKLLTTIHKGLIKALDLGMGQEILVYSPIVSMTKIQKTPLPERKALPIRWITWMSYLEDPRIQFHYDKTLPELQQVPTVTDDIIAKIKHPSEFSMVFYTDGSAIKHPNVNKSHNAGMGIAQVQFKPEFTVINTWSIPLGDHTAQLAEVAAVEFACKKALKIDGPVLIVTDSFYVAESVNKELPYWQSNGFFNNKKKPLKHVSKWKSIADCIQLKPDIIIIHEKGHQPTASTFHTEGNNLADKLATQGSYVVNAGKRTADGSEFEKRTADGSEFESPKKKAKVE

SEQ ID NO: 628 - protein, 2176 aa, synthetic construct
MPAAKRVKLDGGDKKYSIGLDIGTNSVGWAVITDEYKVPSKKFKVLGNTDRHSIKKNLIGALLFDSGETAEATRLKRTARRRYTRRKNRICYLQEIFSNEMAKVDDSFFHRLEESFLVEEDKKHERHPIFGNIVDEVAYHEKYPTIYHLRKKLVDSTDKADLRLIYLALAHMIKFRGHFLIEGDLNPDNSDVDKLFIQLVQTYNQLFEENPINASGVDAKAILSARLSKSRRLENLIAQLPGEKKNGLFGNLIALSLGLTPNFKSNFDLAEDAKLQLSKDTYDDDLDNLLAQIGDQYADLFLAAKNLSDAILLSDILRVNTEITKAPLSASMIKRYDEHHQDLTLLKALVRQQLPEKYKEIFFDQSKNGYAGYIDGGASQEEFYKFIKPILEKMDGTEELLVKLNREDLLRKQRTFDNGSIPHQIHLGELHAILRRQEDFYPFLKDNREKIEKILTFRIPYYVGPLARGNSRFAWMTRKSEETITPWNFEEVVDKGASAQSFIERMTNFDKNLPNEKVLPKHSLLYEYFTVYNELTKVKYVTEGMRKPAFLSGEQKKAIVDLLFKTNRKVTVKQLKEDYFKKIECFDSVEISGVEDRFNASLGTYHDLLKIIKDKDFLDNEENEDILEDIVLTLTLFEDREMIEERLKTYAHLFDDKVMKQLKRRRYTGWGRLSRKLINGIRDKQSGKTILDFLKSDGFANRNFMQLIHDDSLTFKEDIQKAQVSGQGDSLHEHIANLAGSPAIKKGILQTVKVVDELVKVMGRHKPENIVIEMARENQTTQKGQKNSRERMKRIEEGIKELGSQILKEHPVENTQLQNEKLYLYYLQNGRDMYVDQELDINRLSDYDVDHIVPQSFLKDDSIDNKVLTRSDKARGKSDNVPSEEVVKKMKNYWRQLLNAKLITQRKFDNLTKAERGGLSELDKAGFIKRQLVETRQITKHVAQILDSRMNTKYDENDKLIREVKVITLKSKLVSDFRKDFQFYKVREINNYHHAHDAYLNAVVGTALIKKYPKLESEFVYGDYKVYDVRKMIAKSEQEIGKATAKYFFYSNIMNFFKTEITLANGEIRKRPLIETNGETGEIVWDKGRDFATVRKVLSMPQVNIVKKTEVQTGGFSKESILPKRNSDKLIARKKDWDPKKYGGFDSPTVAYSVLVVAKVEKGKSKKLKSVKELLGITIMERSSFEKNPIDFLEAKGYKEVKKDLIIKLPKYSLFELENGRKRMLASAGELQKGNELALPSKYVNFLYLASHYEKLKGSPEDNEQKQLFVEQHKHYLDEIIEQISEFSKRVILADANLDKVLSAYNKHRDKPIREQAENIIHLFTLTNLGAPAAFKYFDTTIDRKRYTSTKEVLDATLIHQSITGLYETRIDLSQLGGDGGGSSEAAAKGGSGGMDPLQLLQPLEAEIKGTKLKAHWNSGATITCVPQAFLEEEVPIKNIWIKTIHGEKEQPVYYLTFKIQGRKVEAEVISSPYDYILVSPSDIPWLMKKPLQLTTLVPLQEYEERLLKQTMLTGSYKEKLQSLFLKYDALWQHWENQVGHRRIKPHHIATGTVNPRPQKQYPINPKAKASIQTVINDLLKQGVLIQQNSIMNTPVYPVPKPDGKWRMVLDYREVNKTIPLIAAQNQHSAGILSSIFRGKYKTTLDLSNGFWAHSITPESYWLTAFTWLGQQYCWTRLPQGFLNSPALFNADVVDLLKEVPNVQVYVDDIYISHDDPREHLEQLEKVFSLLLNAGYVVSLKKSEIAQHEVEFLGFNITKEGRGLTETFKQKLLNITPPRDLKQLQSILGLLNFARNFIPNFSELVKPLYNIIATAPGKYITWTTDNSQQLQNIISMLNSAENLEERNPEVRLIMKVNTSPSAGYIRFYNEFAKRPIMYLNYVYTKAEVKFTNTEKLLTTIHKGLIKALDLGMGQEILVYSPIVSMTKIQKTPLPERKALPIRWITWMSYLEDPRIQFHYDKTLPELQQVPTVTDDIIAKIKHPSEFSMVFYTDGSAIKHPNVNKSHNAGMGIAQVQFKPEFTVINTWSIPLGDHTAQLAEVAAVEFACKKALKIDGPVLIVTDSFYVAESVNKELPYWQSNGFFNNKKKPLKHVSKWKSIADCIQLKPDIIIIHEKGHQPTASTFHTEGNNLADKLATQGSYVVNAGKRTADGSEFEKRTADGSEFESPKKKAKVE

SEQ ID NO: 629 - protein, 2176 aa, synthetic construct
MPAAKRVKLDGGDKKYSIGLDIGTNSVGWAVITDEYKVPSKKFKVLGNTDRHSIKKNLIGALLFDSGETAEATRLKRTARRRYTRRKNRICYLQEIFSNEMAKVDDSFFHRLEESFLVEEDKKHERHPIFGNIVDEVAYHEKYPTIYHLRKKLVDSTDKADLRLIYLALAHMIKFRGHFLIEGDLNPDNSDVDKLFIQLVQTYNQLFEENPINASGVDAKAILSARLSKSRRLENLIAQLPGEKKNGLFGNLIALSLGLTPNFKSNFDLAEDAKLQLSKDTYDDDLDNLLAQIGDQYADLFLAAKNLSDAILLSDILRVNTEITKAPLSASMIKRYDEHHQDLTLLKALVRQQLPEKYKEIFFDQSKNGYAGYIDGGASQEEFYKFIKPILEKMDGTEELLVKLNREDLLRKQRTFDNGSIPHQIHLGELHAILRRQEDFYPFLKDNREKIEKILTFRIPYYVGPLARGNSRFAWMTRKSEETITPWNFEEVVDKGASAQSFIERMTNFDKNLPNEKVLPKHSLLYEYFTVYNELTKVKYVTEGMRKPAFLSGEQKKAIVDLLFKTNRKVTVKQLKEDYFKKIECFDSVEISGVEDRFNASLGTYHDLLKIIKDKDFLDNEENEDILEDIVLTLTLFEDREMIEERLKTYAHLFDDKVMKQLKRRRYTGWGRLSRKLINGIRDKQSGKTILDFLKSDGFANRNFMQLIHDDSLTFKEDIQKAQVSGQGDSLHEHIANLAGSPAIKKGILQTVKVVDELVKVMGRHKPENIVIEMARENQTTQKGQKNSRERMKRIEEGIKELGSQILKEHPVENTQLQNEKLYLYYLQNGRDMYVDQELDINRLSDYDVDHIVPQSFLKDDSIDNKVLTRSDKARGKSDNVPSEEVVKKMKNYWRQLLNAKLITQRKFDNLTKAERGGLSELDKAGFIKRQLVETRQITKHVAQILDSRMNTKYDENDKLIREVKVITLKSKLVSDFRKDFQFYKVREINNYHHAHDAYLNAVVGTALIKKYPKLESEFVYGDYKVYDVRKMIAKSEQEIGKATAKYFFYSNIMNFFKTEITLANGEIRKRPLIETNGETGEIVWDKGRDFATVRKVLSMPQVNIVKKTEVQTGGFSKESILPKRNSDKLIARKKDWDPKKYGGFDSPTVAYSVLVVAKVEKGKSKKLKSVKELLGITIMERSSFEKNPIDFLEAKGYKEVKKDLIIKLPKYSLFELENGRKRMLASAGELQKGNELALPSKYVNFLYLASHYEKLKGSPEDNEQKQLFVEQHKHYLDEIIEQISEFSKRVILADANLDKVLSAYNKHRDKPIREQAENIIHLFTLTNLGAPAAFKYFDTTIDRKRYTSTKEVLDATLIHQSITGLYETRIDLSQLGGDGGEAAAKGGSPAPGGMDPLQLLQPLEAEIKGTKLKAHWNSGATITCVPQAFLEEEVPIKNIWIKTIHGEKEQPVYYLTFKIQGRKVEAEVISSPYDYILVSPSDIPWLMKKPLQLTTLVPLQEYEERLLKQTMLTGSYKEKLQSLFLKYDALWQHWENQVGHRRIKPHHIATGTVNPRPQKQYPINPKAKASIQTVINDLLKQGVLIQQNSIMNTPVYPVPKPDGKWRMVLDYREVNKTIPLIAAQNQHSAGILSSIFRGKYKTTLDLSNGFWAHSITPESYWLTAFTWLGQQYCWTRLPQGFLNSPALFNADVVDLLKEVPNVQVYVDDIYISHDDPREHLEQLEKVFSLLLNAGYVVSLKKSEIAQHEVEFLGFNITKEGRGLTETFKQKLLNITPPRDLKQLQSILGLLNFARNFIPNFSELVKPLYNIIATAPGKYITWTTDNSQQLQNIISMLNSAENLEERNPEVRLIMKVNTSPSAGYIRFYNEFAKRPIMYLNYVYTKAEVKFTNTEKLLTTIHKGLIKALDLGMGQEILVYSPIVSMTKIQKTPLPERKALPIRWITWMSYLEDPRIQFHYDKTLPELQQVPTVTDDIIAKIKHPSEFSMVFYTDGSAIKHPNVNKSHNAGMGIAQVQFKPEFTVINTWSIPLGDHTAQLAEVAAVEFACKKALKIDGPVLIVTDSFYVAESVNKELPYWQSNGFFNNKKKPLKHVSKWKSIADCIQLKPDIIIIHEKGHQPTASTFHTEGNNLADKLATQGSYVVNAGKRTADGSEFEKRTADGSEFESPKKKAKVE

SEQ ID NO: 630 - protein, 2176 aa, synthetic construct
MPAAKRVKLDGGDKKYSIGLDIGTNSVGWAVITDEYKVPSKKFKVLGNTDRHSIKKNLIGALLFDSGETAEATRLKRTARRRYTRRKNRICYLQEIFSNEMAKVDDSFFHRLEESFLVEEDKKHERHPIFGNIVDEVAYHEKYPTIYHLRKKLVDSTDKADLRLIYLALAHMIKFRGHFLIEGDLNPDNSDVDKLFIQLVQTYNQLFEENPINASGVDAKAILSARLSKSRRLENLIAQLPGEKKNGLFGNLIALSLGLTPNFKSNFDLAEDAKLQLSKDTYDDDLDNLLAQIGDQYADLFLAAKNLSDAILLSDILRVNTEITKAPLSASMIKRYDEHHQDLTLLKALVRQQLPEKYKEIFFDQSKNGYAGYIDGGASQEEFYKFIKPILEKMDGTEELLVKLNREDLLRKQRTFDNGSIPHQIHLGELHAILRRQEDFYPFLKDNREKIEKILTFRIPYYVGPLARGNSRFAWMTRKSEETITPWNFEEVVDKGASAQSFIERMTNFDKNLPNEKVLPKHSLLYEYFTVYNELTKVKYVTEGMRKPAFLSGEQKKAIVDLLFKTNRKVTVKQLKEDYFKKIECFDSVEISGVEDRFNASLGTYHDLLKIIKDKDFLDNEENEDILEDIVLTLTLFEDREMIEERLKTYAHLFDDKVMKQLKRRRYTGWGRLSRKLINGIRDKQSGKTILDFLKSDGFANRNFMQLIHDDSLTFKEDIQKAQVSGQGDSLHEHIANLAGSPAIKKGILQTVKVVDELVKVMGRHKPENIVIEMARENQTTQKGQKNSRERMKRIEEGIKELGSQILKEHPVENTQLQNEKLYLYYLQNGRDMYVDQELDINRLSDYDVDHIVPQSFLKDDSIDNKVLTRSDKARGKSDNVPSEEVVKKMKNYWRQLLNAKLITQRKFDNLTKAERGGLSELDKAGFIKRQLVETRQITKHVAQILDSRMNTKYDENDKLIREVKVITLKSKLVSDFRKDFQFYKVREINNYHHAHDAYLNAVVGTALIKKYPKLESEFVYGDYKVYDVRKMIAKSEQEIGKATAKYFFYSNIMNFFKTEITLANGEIRKRPLIETNGETGEIVWDKGRDFATVRKVLSMPQVNIVKKTEVQTGGFSKESILPKRNSDKLIARKKDWDPKKYGGFDSPTVAYSVLVVAKVEKGKSKKLKSVKELLGITIMERSSFEKNPIDFLEAKGYKEVKKDLIIKLPKYSLFELENGRKRMLASAGELQKGNELALPSKYVNFLYLASHYEKLKGSPEDNEQKQLFVEQHKHYLDEIIEQISEFSKRVILADANLDKVLSAYNKHRDKPIREQAENIIHLFTLTNLGAPAAFKYFDTTIDRKRYTSTKEVLDATLIHQSITGLYETRIDLSQLGGDGGGGGGGSEAAAKGGMDPLQLLQPLEAEIKGTKLKAHWNSGATITCVPQAFLEEEVPIKNIWIKTIHGEKEQPVYYLTFKIQGRKVEAEVISSPYDYILVSPSDIPWLMKKPLQLTTLVPLQEYEERLLKQTMLTGSYKEKLQSLFLKYDALWQHWENQVGHRRIKPHHIATGTVNPRPQKQYPINPKAKASIQTVINDLLKQGVLIQQNSIMNTPVYPVPKPDGKWRMVLDYREVNKTIPLIAAQNQHSAGILSSIFRGKYKTTLDLSNGFWAHSITPESYWLTAFTWLGQQYCWTRLPQGFLNSPALFNADVVDLLKEVPNVQVYVDDIYISHDDPREHLEQLEKVFSLLLNAGYVVSLKKSEIAQHEVEFLGFNITKEGRGLTETFKQKLLNITPPRDLKQLQSILGLLNFARNFIPNFSELVKPLYNIIATAPGKYITWTTDNSQQLQNIISMLNSAENLEERNPEVRLIMKVNTSPSAGYIRFYNEFAKRPIMYLNYVYTKAEVKFTNTEKLLTTIHKGLIKALDLGMGQEILVYSPIVSMTKIQKTPLPERKALPIRWITWMSYLEDPRIQFHYDKTLPELQQVPTVTDDIIAKIKHPSEFSMVFYTDGSAIKHPNVNKSHNAGMGIAQVQFKPEFTVINTWSIPLGDHTAQLAEVAAVEFACKKALKIDGPVLIVTDSFYVAESVNKELPYWQSNGFFNNKKKPLKHVSKWKSIADCIQLKPDIIIIHEKGHQPTASTFHTEGNNLADKLATQGSYVVNAGKRTADGSEFEKRTADGSEFESPKKKAKVE

SEQ ID NO: 631 - protein, 2174 aa, synthetic construct
MPAAKRVKLDGGDKKYSIGLDIGTNSVGWAVITDEYKVPSKKFKVLGNTDRHSIKKNLIGALLFDSGETAEATRLKRTARRRYTRRKNRICYLQEIFSNEMAKVDDSFFHRLEESFLVEEDKKHERHPIFGNIVDEVAYHEKYPTIYHLRKKLVDSTDKADLRLIYLALAHMIKFRGHFLIEGDLNPDNSDVDKLFIQLVQTYNQLFEENPINASGVDAKAILSARLSKSRRLENLIAQLPGEKKNGLFGNLIALSLGLTPNFKSNFDLAEDAKLQLSKDTYDDDLDNLLAQIGDQYADLFLAAKNLSDAILLSDILRVNTEITKAPLSASMIKRYDEHHQDLTLLKALVRQQLPEKYKEIFFDQSKNGYAGYIDGGASQEEFYKFIKPILEKMDGTEELLVKLNREDLLRKQRTFDNGSIPHQIHLGELHAILRRQEDFYPFLKDNREKIEKILTFRIPYYVGPLARGNSRFAWMTRKSEETITPWNFEEVVDKGASAQSFIERMTNFDKNLPNEKVLPKHSLLYEYFTVYNELTKVKYVTEGMRKPAFLSGEQKKAIVDLLFKTNRKVTVKQLKEDYFKKIECFDSVEISGVEDRFNASLGTYHDLLKIIKDKDFLDNEENEDILEDIVLTLTLFEDREMIEERLKTYAHLFDDKVMKQLKRRRYTGWGRLSRKLINGIRDKQSGKTILDFLKSDGFANRNFMQLIHDDSLTFKEDIQKAQVSGQGDSLHEHIANLAGSPAIKKGILQTVKVVDELVKVMGRHKPENIVIEMARENQTTQKGQKNSRERMKRIEEGIKELGSQILKEHPVENTQLQNEKLYLYYLQNGRDMYVDQELDINRLSDYDVDHIVPQSFLKDDSIDNKVLTRSDKARGKSDNVPSEEVVKKMKNYWRQLLNAKLITQRKFDNLTKAERGGLSELDKAGFIKRQLVETRQITKHVAQILDSRMNTKYDENDKLIREVKVITLKSKLVSDFRKDFQFYKVREINNYHHAHDAYLNAVVGTALIKKYPKLESEFVYGDYKVYDVRKMIAKSEQEIGKATAKYFFYSNIMNFFKTEITLANGEIRKRPLIETNGETGEIVWDKGRDFATVRKVLSMPQVNIVKKTEVQTGGFSKESILPKRNSDKLIARKKDWDPKKYGGFDSPTVAYSVLVVAKVEKGKSKKLKSVKELLGITIMERSSFEKNPIDFLEAKGYKEVKKDLIIKLPKYSLFELENGRKRMLASAGELQKGNELALPSKYVNFLYLASHYEKLKGSPEDNEQKQLFVEQHKHYLDEIIEQISEFSKRVILADANLDKVLSAYNKHRDKPIREQAENIIHLFTLTNLGAPAAFKYFDTTIDRKRYTSTKEVLDATLIHQSITGLYETRIDLSQLGGDGGGGGGSSPAPGGMDPLQLLQPLEAEIKGTKLKAHWNSGATITCVPQAFLEEEVPIKNIWIKTIHGEKEQPVYYLTFKIQGRKVEAEVISSPYDYILVSPSDIPWLMKKPLQLTTLVPLQEYEERLLKQTMLTGSYKEKLQSLFLKYDALWQHWENQVGHRRIKPHHIATGTVNPRPQKQYPINPKAKASIQTVINDLLKQGVLIQQNSIMNTPVYPVPKPDGKWRMVLDYREVNKTIPLIAAQNQHSAGILSSIFRGKYKTTLDLSNGFWAHSITPESYWLTAFTWLGQQYCWTRLPQGFLNSPALFNADVVDLLKEVPNVQVYVDDIYISHDDPREHLEQLEKVFSLLLNAGYVVSLKKSEIAQHEVEFLGFNITKEGRGLTETFKQKLLNITPPRDLKQLQSILGLLNFARNFIPNFSELVKPLYNIIATAPGKYITWTTDNSQQLQNIISMLNSAENLEERNPEVRLIMKVNTSPSAGYIRFYNEFAKRPIMYLNYVYTKAEVKFTNTEKLLTTIHKGLIKALDLGMGQEILVYSPIVSMTKIQKTPLPERKALPIRWITWMSYLEDPRIQFHYDKTLPELQQVPTVTDDIIAKIKHPSEFSMVFYTDGSAIKHPNVNKSHNAGMGIAQVQFKPEFTVINTWSIPLGDHTAQLAEVAAVEFACKKALKIDGPVLIVTDSFYVAESVNKELPYWQSNGFFNNKKKPLKHVSKWKSIADCIQLKPDIIIIHEKGHQPTASTFHTEGNNLADKLATQGSYVVNAGKRTADGSEFEKRTADGSEFESPKKKAKVE

SEQ ID NO: 632 - protein, 2176 aa, synthetic construct
MPAAKRVKLDGGDKKYSIGLDIGTNSVGWAVITDEYKVPSKKFKVLGNTDRHSIKKNLIGALLFDSGETAEATRLKRTARRRYTRRKNRICYLQEIFSNEMAKVDDSFFHRLEESFLVEEDKKHERHPIFGNIVDEVAYHEKYPTIYHLRKKLVDSTDKADLRLIYLALAHMIKFRGHFLIEGDLNPDNSDVDKLFIQLVQTYNQLFEENPINASGVDAKAILSARLSKSRRLENLIAQLPGEKKNGLFGNLIALSLGLTPNFKSNFDLAEDAKLQLSKDTYDDDLDNLLAQIGDQYADLFLAAKNLSDAILLSDILRVNTEITKAPLSASMIKRYDEHHQDLTLLKALVRQQLPEKYKEIFFDQSKNGYAGYIDGGASQEEFYKFIKPILEKMDGTEELLVKLNREDLLRKQRTFDNGSIPHQIHLGELHAILRRQEDFYPFLKDNREKIEKILTFRIPYYVGPLARGNSRFAWMTRKSEETITPWNFEEVVDKGASAQSFIERMTNFDKNLPNEKVLPKHSLLYEYFTVYNELTKVKYVTEGMRKPAFLSGEQKKAIVDLLFKTNRKVTVKQLKEDYFKKIECFDSVEISGVEDRFNASLGTYHDLLKIIKDKDFLDNEENEDILEDIVLTLTLFEDREMIEERLKTYAHLFDDKVMKQLKRRRYTGWGRLSRKLINGIRDKQSGKTILDFLKSDGFANRNFMQLIHDDSLTFKEDIQKAQVSGQGDSLHEHIANLAGSPAIKKGILQTVKVVDELVKVMGRHKPENIVIEMARENQTTQKGQKNSRERMKRIEEGIKELGSQILKEHPVENTQLQNEKLYLYYLQNGRDMYVDQELDINRLSDYDVDHIVPQSFLKDDSIDNKVLTRSDKARGKSDNVPSEEVVKKMKNYWRQLLNAKLITQRKFDNLTKAERGGLSELDKAGFIKRQLVETRQITKHVAQILDSRMNTKYDENDKLIREVKVITLKSKLVSDFRKDFQFYKVREINNYHHAHDAYLNAVVGTALIKKYPKLESEFVYGDYKVYDVRKMIAKSEQEIGKATAKYFFYSNIMNFFKTEITLANGEIRKRPLIETNGETGEIVWDKGRDFATVRKVLSMPQVNIVKKTEVQTGGFSKESILPKRNSDKLIARKKDWDPKKYGGFDSPTVAYSVLVVAKVEKGKSKKLKSVKELLGITIMERSSFEKNPIDFLEAKGYKEVKKDLIIKLPKYSLFELENGRKRMLASAGELQKGNELALPSKYVNFLYLASHYEKLKGSPEDNEQKQLFVEQHKHYLDEIIEQISEFSKRVILADANLDKVLSAYNKHRDKPIREQAENIIHLFTLTNLGAPAAFKYFDTTIDRKRYTSTKEVLDATLIHQSITGLYETRIDLSQLGGDGGEAAAKPAPGSSGGMDPLQLLQPLEAEIKGTKLKAHWNSGATITCVPQAFLEEEVPIKNIWIKTIHGEKEQPVYYLTFKIQGRKVEAEVISSPYDYILVSPSDIPWLMKKPLQLTTLVPLQEYEERLLKQTMLTGSYKEKLQSLFLKYDALWQHWENQVGHRRIKPHHIATGTVNPRPQKQYPINPKAKASIQTVINDLLKQGVLIQQNSIMNTPVYPVPKPDGKWRMVLDYREVNKTIPLIAAQNQHSAGILSSIFRGKYKTTLDLSNGFWAHSITPESYWLTAFTWLGQQYCWTRLPQGFLNSPALFNADVVDLLKEVPNVQVYVDDIYISHDDPREHLEQLEKVFSLLLNAGYVVSLKKSEIAQHEVEFLGFNITKEGRGLTETFKQKLLNITPPRDLKQLQSILGLLNFARNFIPNFSELVKPLYNIIATAPGKYITWTTDNSQQLQNIISMLNSAENLEERNPEVRLIMKVNTSPSAGYIRFYNEFAKRPIMYLNYVYTKAEVKFTNTEKLLTTIHKGLIKALDLGMGQEILVYSPIVSMTKIQKTPLPERKALPIRWITWMSYLEDPRIQFHYDKTLPELQQVPTVTDDIIAKIKHPSEFSMVFYTDGSAIKHPNVNKSHNAGMGIAQVQFKPEFTVINTWSIPLGDHTAQLAEVAAVEFACKKALKIDGPVLIVTDSFYVAESVNKELPYWQSNGFFNNKKKPLKHVSKWKSIADCIQLKPDIIIIHEKGHQPTASTFHTEGNNLADKLATQGSYVVNAGKRTADGSEFEKRTADGSEFESPKKKAKVE

SEQ ID NO: 633 - protein, 2176 aa, synthetic construct
MPAAKRVKLDGGDKKYSIGLDIGTNSVGWAVITDEYKVPSKKFKVLGNTDRHSIKKNLIGALLFDSGETAEATRLKRTARRRYTRRKNRICYLQEIFSNEMAKVDDSFFHRLEESFLVEEDKKHERHPIFGNIVDEVAYHEKYPTIYHLRKKLVDSTDKADLRLIYLALAHMIKFRGHFLIEGDLNPDNSDVDKLFIQLVQTYNQLFEENPINASGVDAKAILSARLSKSRRLENLIAQLPGEKKNGLFGNLIALSLGLTPNFKSNFDLAEDAKLQLSKDTYDDDLDNLLAQIGDQYADLFLAAKNLSDAILLSDILRVNTEITKAPLSASMIKRYDEHHQDLTLLKALVRQQLPEKYKEIFFDQSKNGYAGYIDGGASQEEFYKFIKPILEKMDGTEELLVKLNREDLLRKQRTFDNGSIPHQIHLGELHAILRRQEDFYPFLKDNREKIEKILTFRIPYYVGPLARGNSRFAWMTRKSEETITPWNFEEVVDKGASAQSFIERMTNFDKNLPNEKVLPKHSLLYEYFTVYNELTKVKYVTEGMRKPAFLSGEQKKAIVDLLFKTNRKVTVKQLKEDYFKKIECFDSVEISGVEDRFNASLGTYHDLLKIIKDKDFLDNEENEDILEDIVLTLTLFEDREMIEERLKTYAHLFDDKVMKQLKRRRYTGWGRLSRKLINGIRDKQSGKTILDFLKSDGFANRNFMQLIHDDSLTFKEDIQKAQVSGQGDSLHEHIANLAGSPAIKKGILQTVKVVDELVKVMGRHKPENIVIEMARENQTTQKGQKNSRERMKRIEEGIKELGSQILKEHPVENTQLQNEKLYLYYLQNGRDMYVDQELDINRLSDYDVDHIVPQSFLKDDSIDNKVLTRSDKARGKSDNVPSEEVVKKMKNYWRQLLNAKLITQRKFDNLTKAERGGLSELDKAGFIKRQLVETRQITKHVAQILDSRMNTKYDENDKLIREVKVITLKSKLVSDFRKDFQFYKVREINNYHHAHDAYLNAVVGTALIKKYPKLESEFVYGDYKVYDVRKMIAKSEQEIGKATAKYFFYSNIMNFFKTEITLANGEIRKRPLIETNGETGEIVWDKGRDFATVRKVLSMPQVNIVKKTEVQTGGFSKESILPKRNSDKLIARKKDWDPKKYGGFDSPTVAYSVLVVAKVEKGKSKKLKSVKELLGITIMERSSFEKNPIDFLEAKGYKEVKKDLIIKLPKYSLFELENGRKRMLASAGELQKGNELALPSKYVNFLYLASHYEKLKGSPEDNEQKQLFVEQHKHYLDEIIEQISEFSKRVILADANLDKVLSAYNKHRDKPIREQAENIIHLFTLTNLGAPAAFKYFDTTIDRKRYTSTKEVLDATLIHQSITGLYETRIDLSQLGGDGGGGSPAPEAAAKGGMDPLQLLQPLEAEIKGTKLKAHWNSGATITCVPQAFLEEEVPIKNIWIKTIHGEKEQPVYYLTFKIQGRKVEAEVISSPYDYILVSPSDIPWLMKKPLQLTTLVPLQEYEERLLKQTMLTGSYKEKLQSLFLKYDALWQHWENQVGHRRIKPHHIATGTVNPRPQKQYPINPKAKASIQTVINDLLKQGVLIQQNSIMNTPVYPVPKPDGKWRMVLDYREVNKTIPLIAAQNQHSAGILSSIFRGKYKTTLDLSNGFWAHSITPESYWLTAFTWLGQQYCWTRLPQGFLNSPALFNADVVDLLKEVPNVQVYVDDIYISHDDPREHLEQLEKVFSLLLNAGYVVSLKKSEIAQHEVEFLGFNITKEGRGLTETFKQKLLNITPPRDLKQLQSILGLLNFARNFIPNFSELVKPLYNIIATAPGKYITWTTDNSQQLQNIISMLNSAENLEERNPEVRLIMKVNTSPSAGYIRFYNEFAKRPIMYLNYVYTKAEVKFTNTEKLLTTIHKGLIKALDLGMGQEILVYSPIVSMTKIQKTPLPERKALPIRWITWMSYLEDPRIQFHYDKTLPELQQVPTVTDDIIAKIKHPSEFSMVFYTDGSAIKHPNVNKSHNAGMGIAQVQFKPEFTVINTWSIPLGDHTAQLAEVAAVEFACKKALKIDGPVLIVTDSFYVAESVNKELPYWQSNGFFNNKKKPLKHVSKWKSIADCIQLKPDIIIIHEKGHQPTASTFHTEGNNLADKLATQGSYVVNAGKRTADGSEFEKRTADGSEFESPKKKAKVE

SEQ ID NO: 634 - protein, 2174 aa, synthetic construct
MPAAKRVKLDGGDKKYSIGLDIGTNSVGWAVITDEYKVPSKKFKVLGNTDRHSIKKNLIGALLFDSGETAEATRLKRTARRRYTRRKNRICYLQEIFSNEMAKVDDSFFHRLEESFLVEEDKKHERHPIFGNIVDEVAYHEKYPTIYHLRKKLVDSTDKADLRLIYLALAHMIKFRGHFLIEGDLNPDNSDVDKLFIQLVQTYNQLFEENPINASGVDAKAILSARLSKSRRLENLIAQLPGEKKNGLFGNLIALSLGLTPNFKSNFDLAEDAKLQLSKDTYDDDLDNLLAQIGDQYADLFLAAKNLSDAILLSDILRVNTEITKAPLSASMIKRYDEHHQDLTLLKALVRQQLPEKYKEIFFDQSKNGYAGYIDGGASQEEFYKFIKPILEKMDGTEELLVKLNREDLLRKQRTFDNGSIPHQIHLGELHAILRRQEDFYPFLKDNREKIEKILTFRIPYYVGPLARGNSRFAWMTRKSEETITPWNFEEVVDKGASAQSFIERMTNFDKNLPNEKVLPKHSLLYEYFTVYNELTKVKYVTEGMRKPAFLSGEQKKAIVDLLFKTNRKVTVKQLKEDYFKKIECFDSVEISGVEDRFNASLGTYHDLLKIIKDKDFLDNEENEDILEDIVLTLTLFEDREMIEERLKTYAHLFDDKVMKQLKRRRYTGWGRLSRKLINGIRDKQSGKTILDFLKSDGFANRNFMQLIHDDSLTFKEDIQKAQVSGQGDSLHEHIANLAGSPAIKKGILQTVKVVDELVKVMGRHKPENIVIEMARENQTTQKGQKNSRERMKRIEEGIKELGSQILKEHPVENTQLQNEKLYLYYLQNGRDMYVDQELDINRLSDYDVDHIVPQSFLKDDSIDNKVLTRSDKARGKSDNVPSEEVVKKMKNYWRQLLNAKLITQRKFDNLTKAERGGLSELDKAGFIKRQLVETRQITKHVAQILDSRMNTKYDENDKLIREVKVITLKSKLVSDFRKDFQFYKVREINNYHHAHDAYLNAVVGTALIKKYPKLESEFVYGDYKVYDVRKMIAKSEQEIGKATAKYFFYSNIMNFFKTEITLANGEIRKRPLIETNGETGEIVWDKGRDFATVRKVLSMPQVNIVKKTEVQTGGFSKESILPKRNSDKLIARKKDWDPKKYGGFDSPTVAYSVLVVAKVEKGKSKKLKSVKELLGITIMERSSFEKNPIDFLEAKGYKEVKKDLIIKLPKYSLFELENGRKRMLASAGELQKGNELALPSKYVNFLYLASHYEKLKGSPEDNEQKQLFVEQHKHYLDEIIEQISEFSKRVILADANLDKVLSAYNKHRDKPIREQAENIIHLFTLTNLGAPAAFKYFDTTIDRKRYTSTKEVLDATLIHQSITGLYETRIDLSQLGGDGGGGGPAPGSSGGMDPLQLLQPLEAEIKGTKLKAHWNSGATITCVPQAFLEEEVPIKNIWIKTIHGEKEQPVYYLTFKIQGRKVEAEVISSPYDYILVSPSDIPWLMKKPLQLTTLVPLQEYEERLLKQTMLTGSYKEKLQSLFLKYDALWQHWENQVGHRRIKPHHIATGTVNPRPQKQYPINPKAKASIQTVINDLLKQGVLIQQNSIMNTPVYPVPKPDGKWRMVLDYREVNKTIPLIAAQNQHSAGILSSIFRGKYKTTLDLSNGFWAHSITPESYWLTAFTWLGQQYCWTRLPQGFLNSPALFNADVVDLLKEVPNVQVYVDDIYISHDDPREHLEQLEKVFSLLLNAGYVVSLKKSEIAQHEVEFLGFNITKEGRGLTETFKQKLLNITPPRDLKQLQSILGLLNFARNFIPNFSELVKPLYNIIATAPGKYITWTTDNSQQLQNIISMLNSAENLEERNPEVRLIMKVNTSPSAGYIRFYNEFAKRPIMYLNYVYTKAEVKFTNTEKLLTTIHKGLIKALDLGMGQEILVYSPIVSMTKIQKTPLPERKALPIRWITWMSYLEDPRIQFHYDKTLPELQQVPTVTDDIIAKIKHPSEFSMVFYTDGSAIKHPNVNKSHNAGMGIAQVQFKPEFTVINTWSIPLGDHTAQLAEVAAVEFACKKALKIDGPVLIVTDSFYVAESVNKELPYWQSNGFFNNKKKPLKHVSKWKSIADCIQLKPDIIIIHEKGHQPTASTFHTEGNNLADKLATQGSYVVNAGKRTADGSEFEKRTADGSEFESPKKKAKVE

SEQ ID NO: 635 - protein, 2174 aa, synthetic construct
MPAAKRVKLDGGDKKYSIGLDIGTNSVGWAVITDEYKVPSKKFKVLGNTDRHSIKKNLIGALLFDSGETAEATRLKRTARRRYTRRKNRICYLQEIFSNEMAKVDDSFFHRLEESFLVEEDKKHERHPIFGNIVDEVAYHEKYPTIYHLRKKLVDSTDKADLRLIYLALAHMIKFRGHFLIEGDLNPDNSDVDKLFIQLVQTYNQLFEENPINASGVDAKAILSARLSKSRRLENLIAQLPGEKKNGLFGNLIALSLGLTPNFKSNFDLAEDAKLQLSKDTYDDDLDNLLAQIGDQYADLFLAAKNLSDAILLSDILRVNTEITKAPLSASMIKRYDEHHQDLTLLKALVRQQLPEKYKEIFFDQSKNGYAGYIDGGASQEEFYKFIKPILEKMDGTEELLVKLNREDLLRKQRTFDNGSIPHQIHLGELHAILRRQEDFYPFLKDNREKIEKILTFRIPYYVGPLARGNSRFAWMTRKSEETITPWNFEEVVDKGASAQSFIERMTNFDKNLPNEKVLPKHSLLYEYFTVYNELTKVKYVTEGMRKPAFLSGEQKKAIVDLLFKTNRKVTVKQLKEDYFKKIECFDSVEISGVEDRFNASLGTYHDLLKIIKDKDFLDNEENEDILEDIVLTLTLFEDREMIEERLKTYAHLFDDKVMKQLKRRRYTGWGRLSRKLINGIRDKQSGKTILDFLKSDGFANRNFMQLIHDDSLTFKEDIQKAQVSGQGDSLHEHIANLAGSPAIKKGILQTVKVVDELVKVMGRHKPENIVIEMARENQTTQKGQKNSRERMKRIEEGIKELGSQILKEHPVENTQLQNEKLYLYYLQNGRDMYVDQELDINRLSDYDVDHIVPQSFLKDDSIDNKVLTRSDKARGKSDNVPSEEVVKKMKNYWRQLLNAKLITQRKFDNLTKAERGGLSELDKAGFIKRQLVETRQITKHVAQILDSRMNTKYDENDKLIREVKVITLKSKLVSDFRKDFQFYKVREINNYHHAHDAYLNAVVGTALIKKYPKLESEFVYGDYKVYDVRKMIAKSEQEIGKATAKYFFYSNIMNFFKTEITLANGEIRKRPLIETNGETGEIVWDKGRDFATVRKVLSMPQVNIVKKTEVQTGGFSKESILPKRNSDKLIARKKDWDPKKYGGFDSPTVAYSVLVVAKVEKGKSKKLKSVKELLGITIMERSSFEKNPIDFLEAKGYKEVKKDLIIKLPKYSLFELENGRKRMLASAGELQKGNELALPSKYVNFLYLASHYEKLKGSPEDNEQKQLFVEQHKHYLDEIIEQISEFSKRVILADANLDKVLSAYNKHRDKPIREQAENIIHLFTLTNLGAPAAFKYFDTTIDRKRYTSTKEVLDATLIHQSITGLYETRIDLSQLGGDGGGGSGSSPAPGGMDPLQLLQPLEAEIKGTKLKAHWNSGATITCVPQAFLEEEVPIKNIWIKTIHGEKEQPVYYLTFKIQGRKVEAEVISSPYDYILVSPSDIPWLMKKPLQLTTLVPLQEYEERLLKQTMLTGSYKEKLQSLFLKYDALWQHWENQVGHRRIKPHHIATGTVNPRPQKQYPINPKAKASIQTVINDLLKQGVLIQQNSIMNTPVYPVPKPDGKWRMVLDYREVNKTIPLIAAQNQHSAGILSSIFRGKYKTTLDLSNGFWAHSITPESYWLTAFTWLGQQYCWTRLPQGFLNSPALFNADVVDLLKEVPNVQVYVDDIYISHDDPREHLEQLEKVFSLLLNAGYVVSLKKSEIAQHEVEFLGFNITKEGRGLTETFKQKLLNITPPRDLKQLQSILGLLNFARNFIPNFSELVKPLYNIIATAPGKYITWTTDNSQQLQNIISMLNSAENLEERNPEVRLIMKVNTSPSAGYIRFYNEFAKRPIMYLNYVYTKAEVKFTNTEKLLTTIHKGLIKALDLGMGQEILVYSPIVSMTKIQKTPLPERKALPIRWITWMSYLEDPRIQFHYDKTLPELQQVPTVTDDIIAKIKHPSEFSMVFYTDGSAIKHPNVNKSHNAGMGIAQVQFKPEFTVINTWSIPLGDHTAQLAEVAAVEFACKKALKIDGPVLIVTDSFYVAESVNKELPYWQSNGFFNNKKKPLKHVSKWKSIADCIQLKPDIIIIHEKGHQPTASTFHTEGNNLADKLATQGSYVVNAGKRTADGSEFEKRTADGSEFESPKKKAKVE

SEQ ID NO: 636 - protein, 2176 aa, synthetic construct
MPAAKRVKLDGGDKKYSIGLDIGTNSVGWAVITDEYKVPSKKFKVLGNTDRHSIKKNLIGALLFDSGETAEATRLKRTARRRYTRRKNRICYLQEIFSNEMAKVDDSFFHRLEESFLVEEDKKHERHPIFGNIVDEVAYHEKYPTIYHLRKKLVDSTDKADLRLIYLALAHMIKFRGHFLIEGDLNPDNSDVDKLFIQLVQTYNQLFEENPINASGVDAKAILSARLSKSRRLENLIAQLPGEKKNGLFGNLIALSLGLTPNFKSNFDLAEDAKLQLSKDTYDDDLDNLLAQIGDQYADLFLAAKNLSDAILLSDILRVNTEITKAPLSASMIKRYDEHHQDLTLLKALVRQQLPEKYKEIFFDQSKNGYAGYIDGGASQEEFYKFIKPILEKMDGTEELLVKLNREDLLRKQRTFDNGSIPHQIHLGELHAILRRQEDFYPFLKDNREKIEKILTFRIPYYVGPLARGNSRFAWMTRKSEETITPWNFEEVVDKGASAQSFIERMTNFDKNLPNEKVLPKHSLLYEYFTVYNELTKVKYVTEGMRKPAFLSGEQKKAIVDLLFKTNRKVTVKQLKEDYFKKIECFDSVEISGVEDRFNASLGTYHDLLKIIKDKDFLDNEENEDILEDIVLTLTLFEDREMIEERLKTYAHLFDDKVMKQLKRRRYTGWGRLSRKLINGIRDKQSGKTILDFLKSDGFANRNFMQLIHDDSLTFKEDIQKAQVSGQGDSLHEHIANLAGSPAIKKGILQTVKVVDELVKVMGRHKPENIVIEMARENQTTQKGQKNSRERMKRIEEGIKELGSQILKEHPVENTQLQNEKLYLYYLQNGRDMYVDQELDINRLSDYDVDHIVPQSFLKDDSIDNKVLTRSDKARGKSDNVPSEEVVKKMKNYWRQLLNAKLITQRKFDNLTKAERGGLSELDKAGFIKRQLVETRQITKHVAQILDSRMNTKYDENDKLIREVKVITLKSKLVSDFRKDFQFYKVREINNYHHAHDAYLNAVVGTALIKKYPKLESEFVYGDYKVYDVRKMIAKSEQEIGKATAKYFFYSNIMNFFKTEITLANGEIRKRPLIETNGETGEIVWDKGRDFATVRKVLSMPQVNIVKKTEVQTGGFSKESILPKRNSDKLIARKKDWDPKKYGGFDSPTVAYSVLVVAKVEKGKSKKLKSVKELLGITIMERSSFEKNPIDFLEAKGYKEVKKDLIIKLPKYSLFELENGRKRMLASAGELQKGNELALPSKYVNFLYLASHYEKLKGSPEDNEQKQLFVEQHKHYLDEIIEQISEFSKRVILADANLDKVLSAYNKHRDKPIREQAENIIHLFTLTNLGAPAAFKYFDTTIDRKRYTSTKEVLDATLIHQSITGLYETRIDLSQLGGDGGEAAAKGGGPAPGGMDPLQLLQPLEAEIKGTKLKAHWNSGATITCVPQAFLEEEVPIKNIWIKTIHGEKEQPVYYLTFKIQGRKVEAEVISSPYDYILVSPSDIPWLMKKPLQLTTLVPLQEYEERLLKQTMLTGSYKEKLQSLFLKYDALWQHWENQVGHRRIKPHHIATGTVNPRPQKQYPINPKAKASIQTVINDLLKQGVLIQQNSIMNTPVYPVPKPDGKWRMVLDYREVNKTIPLIAAQNQHSAGILSSIFRGKYKTTLDLSNGFWAHSITPESYWLTAFTWLGQQYCWTRLPQGFLNSPALFNADVVDLLKEVPNVQVYVDDIYISHDDPREHLEQLEKVFSLLLNAGYVVSLKKSEIAQHEVEFLGFNITKEGRGLTETFKQKLLNITPPRDLKQLQSILGLLNFARNFIPNFSELVKPLYNIIATAPGKYITWTTDNSQQLQNIISMLNSAENLEERNPEVRLIMKVNTSPSAGYIRFYNEFAKRPIMYLNYVYTKAEVKFTNTEKLLTTIHKGLIKALDLGMGQEILVYSPIVSMTKIQKTPLPERKALPIRWITWMSYLEDPRIQFHYDKTLPELQQVPTVTDDIIAKIKHPSEFSMVFYTDGSAIKHPNVNKSHNAGMGIAQVQFKPEFTVINTWSIPLGDHTAQLAEVAAVEFACKKALKIDGPVLIVTDSFYVAESVNKELPYWQSNGFFNNKKKPLKHVSKWKSIADCIQLKPDIIIIHEKGHQPTASTFHTEGNNLADKLATQGSYVVNAGKRTADGSEFEKRTADGSEFESPKKKAKVE

SEQ ID NO: 637 - protein, 2180 aa, synthetic construct
MPAAKRVKLDGGDKKYSIGLDIGTNSVGWAVITDEYKVPSKKFKVLGNTDRHSIKKNLIGALLFDSGETAEATRLKRTARRRYTRRKNRICYLQEIFSNEMAKVDDSFFHRLEESFLVEEDKKHERHPIFGNIVDEVAYHEKYPTIYHLRKKLVDSTDKADLRLIYLALAHMIKFRGHFLIEGDLNPDNSDVDKLFIQLVQTYNQLFEENPINASGVDAKAILSARLSKSRRLENLIAQLPGEKKNGLFGNLIALSLGLTPNFKSNFDLAEDAKLQLSKDTYDDDLDNLLAQIGDQYADLFLAAKNLSDAILLSDILRVNTEITKAPLSASMIKRYDEHHQDLTLLKALVRQQLPEKYKEIFFDQSKNGYAGYIDGGASQEEFYKFIKPILEKMDGTEELLVKLNREDLLRKQRTFDNGSIPHQIHLGELHAILRRQEDFYPFLKDNREKIEKILTFRIPYYVGPLARGNSRFAWMTRKSEETITPWNFEEVVDKGASAQSFIERMTNFDKNLPNEKVLPKHSLLYEYFTVYNELTKVKYVTEGMRKPAFLSGEQKKAIVDLLFKTNRKVTVKQLKEDYFKKIECFDSVEISGVEDRFNASLGTYHDLLKIIKDKDFLDNEENEDILEDIVLTLTLFEDREMIEERLKTYAHLFDDKVMKQLKRRRYTGWGRLSRKLINGIRDKQSGKTILDFLKSDGFANRNFMQLIHDDSLTFKEDIQKAQVSGQGDSLHEHIANLAGSPAIKKGILQTVKVVDELVKVMGRHKPENIVIEMARENQTTQKGQKNSRERMKRIEEGIKELGSQILKEHPVENTQLQNEKLYLYYLQNGRDMYVDQELDINRLSDYDVDHIVPQSFLKDDSIDNKVLTRSDKARGKSDNVPSEEVVKKMKNYWRQLLNAKLITQRKFDNLTKAERGGLSELDKAGFIKRQLVETRQITKHVAQILDSRMNTKYDENDKLIREVKVITLKSKLVSDFRKDFQFYKVREINNYHHAHDAYLNAVVGTALIKKYPKLESEFVYGDYKVYDVRKMIAKSEQEIGKATAKYFFYSNIMNFFKTEITLANGEIRKRPLIETNGETGEIVWDKGRDFATVRKVLSMPQVNIVKKTEVQTGGFSKESILPKRNSDKLIARKKDWDPKKYGGFDSPTVAYSVLVVAKVEKGKSKKLKSVKELLGITIMERSSFEKNPIDFLEAKGYKEVKKDLIIKLPKYSLFELENGRKRMLASAGELQKGNELALPSKYVNFLYLASHYEKLKGSPEDNEQKQLFVEQHKHYLDEIIEQISEFSKRVILADANLDKVLSAYNKHRDKPIREQAENIIHLFTLTNLGAPAAFKYFDTTIDRKRYTSTKEVLDATLIHQSITGLYETRIDLSQLGGDGGGSSGSSGSSGSSGSSGGMDPLQLLQPLEAEIKGTKLKAHWNSGATITCVPQAFLEEEVPIKNIWIKTIHGEKEQPVYYLTFKIQGRKVEAEVISSPYDYILVSPSDIPWLMKKPLQLTTLVPLQEYEERLLKQTMLTGSYKEKLQSLFLKYDALWQHWENQVGHRRIKPHHIATGTVNPRPQKQYPINPKAKASIQTVINDLLKQGVLIQQNSIMNTPVYPVPKPDGKWRMVLDYREVNKTIPLIAAQNQHSAGILSSIFRGKYKTTLDLSNGFWAHSITPESYWLTAFTWLGQQYCWTRLPQGFLNSPALFNADVVDLLKEVPNVQVYVDDIYISHDDPREHLEQLEKVFSLLLNAGYVVSLKKSEIAQHEVEFLGFNITKEGRGLTETFKQKLLNITPPRDLKQLQSILGLLNFARNFIPNFSELVKPLYNIIATAPGKYITWTTDNSQQLQNIISMLNSAENLEERNPEVRLIMKVNTSPSAGYIRFYNEFAKRPIMYLNYVYTKAEVKFTNTEKLLTTIHKGLIKALDLGMGQEILVYSPIVSMTKIQKTPLPERKALPIRWITWMSYLEDPRIQFHYDKTLPELQQVPTVTDDIIAKIKHPSEFSMVFYTDGSAIKHPNVNKSHNAGMGIAQVQFKPEFTVINTWSIPLGDHTAQLAEVAAVEFACKKALKIDGPVLIVTDSFYVAESVNKELPYWQSNGFFNNKKKPLKHVSKWKSIADCIQLKPDIIIIHEKGHQPTASTFHTEGNNLADKLATQGSYVVNAGKRTADGSEFEKRTADGSEFESPKKKAKVE

SEQ ID NO: 638 - protein, 2173 aa, synthetic construct
MPAAKRVKLDGGDKKYSIGLDIGTNSVGWAVITDEYKVPSKKFKVLGNTDRHSIKKNLIGALLFDSGETAEATRLKRTARRRYTRRKNRICYLQEIFSNEMAKVDDSFFHRLEESFLVEEDKKHERHPIFGNIVDEVAYHEKYPTIYHLRKKLVDSTDKADLRLIYLALAHMIKFRGHFLIEGDLNPDNSDVDKLFIQLVQTYNQLFEENPINASGVDAKAILSARLSKSRRLENLIAQLPGEKKNGLFGNLIALSLGLTPNFKSNFDLAEDAKLQLSKDTYDDDLDNLLAQIGDQYADLFLAAKNLSDAILLSDILRVNTEITKAPLSASMIKRYDEHHQDLTLLKALVRQQLPEKYKEIFFDQSKNGYAGYIDGGASQEEFYKFIKPILEKMDGTEELLVKLNREDLLRKQRTFDNGSIPHQIHLGELHAILRRQEDFYPFLKDNREKIEKILTFRIPYYVGPLARGNSRFAWMTRKSEETITPWNFEEVVDKGASAQSFIERMTNFDKNLPNEKVLPKHSLLYEYFTVYNELTKVKYVTEGMRKPAFLSGEQKKAIVDLLFKTNRKVTVKQLKEDYFKKIECFDSVEISGVEDRFNASLGTYHDLLKIIKDKDFLDNEENEDILEDIVLTLTLFEDREMIEERLKTYAHLFDDKVMKQLKRRRYTGWGRLSRKLINGIRDKQSGKTILDFLKSDGFANRNFMQLIHDDSLTFKEDIQKAQVSGQGDSLHEHIANLAGSPAIKKGILQTVKVVDELVKVMGRHKPENIVIEMARENQTTQKGQKNSRERMKRIEEGIKELGSQILKEHPVENTQLQNEKLYLYYLQNGRDMYVDQELDINRLSDYDVDHIVPQSFLKDDSIDNKVLTRSDKARGKSDNVPSEEVVKKMKNYWRQLLNAKLITQRKFDNLTKAERGGLSELDKAGFIKRQLVETRQITKHVAQILDSRMNTKYDENDKLIREVKVITLKSKLVSDFRKDFQFYKVREINNYHHAHDAYLNAVVGTALIKKYPKLESEFVYGDYKVYDVRKMIAKSEQEIGKATAKYFFYSNIMNFFKTEITLANGEIRKRPLIETNGETGEIVWDKGRDFATVRKVLSMPQVNIVKKTEVQTGGFSKESILPKRNSDKLIARKKDWDPKKYGGFDSPTVAYSVLVVAKVEKGKSKKLKSVKELLGITIMERSSFEKNPIDFLEAKGYKEVKKDLIIKLPKYSLFELENGRKRMLASAGELQKGNELALPSKYVNFLYLASHYEKLKGSPEDNEQKQLFVEQHKHYLDEIIEQISEFSKRVILADANLDKVLSAYNKHRDKPIREQAENIIHLFTLTNLGAPAAFKYFDTTIDRKRYTSTKEVLDATLIHQSITGLYETRIDLSQLGGDGGEAAAKGSSGGMDPLQLLQPLEAEIKGTKLKAHWNSGATITCVPQAFLEEEVPIKNIWIKTIHGEKEQPVYYLTFKIQGRKVEAEVISSPYDYILVSPSDIPWLMKKPLQLTTLVPLQEYEERLLKQTMLTGSYKEKLQSLFLKYDALWQHWENQVGHRRIKPHHIATGTVNPRPQKQYPINPKAKASIQTVINDLLKQGVLIQQNSIMNTPVYPVPKPDGKWRMVLDYREVNKTIPLIAAQNQHSAGILSSIFRGKYKTTLDLSNGFWAHSITPESYWLTAFTWLGQQYCWTRLPQGFLNSPALFNADVVDLLKEVPNVQVYVDDIYISHDDPREHLEQLEKVFSLLLNAGYVVSLKKSEIAQHEVEFLGFNITKEGRGLTETFKQKLLNITPPRDLKQLQSILGLLNFARNFIPNFSELVKPLYNIIATAPGKYITWTTDNSQQLQNIISMLNSAENLEERNPEVRLIMKVNTSPSAGYIRFYNEFAKRPIMYLNYVYTKAEVKFTNTEKLLTTIHKGLIKALDLGMGQEILVYSPIVSMTKIQKTPLPERKALPIRWITWMSYLEDPRIQFHYDKTLPELQQVPTVTDDIIAKIKHPSEFSMVFYTDGSAIKHPNVNKSHNAGMGIAQVQFKPEFTVINTWSIPLGDHTAQLAEVAAVEFACKKALKIDGPVLIVTDSFYVAESVNKELPYWQSNGFFNNKKKPLKHVSKWKSIADCIQLKPDIIIIHEKGHQPTASTFHTEGNNLADKLATQGSYVVNAGKRTADGSEFEKRTADGSEFESPKKKAKVE

SEQ ID NO: 639 - protein, 2172 aa, synthetic construct
MPAAKRVKLDGGDKKYSIGLDIGTNSVGWAVITDEYKVPSKKFKVLGNTDRHSIKKNLIGALLFDSGETAEATRLKRTARRRYTRRKNRICYLQEIFSNEMAKVDDSFFHRLEESFLVEEDKKHERHPIFGNIVDEVAYHEKYPTIYHLRKKLVDSTDKADLRLIYLALAHMIKFRGHFLIEGDLNPDNSDVDKLFIQLVQTYNQLFEENPINASGVDAKAILSARLSKSRRLENLIAQLPGEKKNGLFGNLIALSLGLTPNFKSNFDLAEDAKLQLSKDTYDDDLDNLLAQIGDQYADLFLAAKNLSDAILLSDILRVNTEITKAPLSASMIKRYDEHHQDLTLLKALVRQQLPEKYKEIFFDQSKNGYAGYIDGGASQEEFYKFIKPILEKMDGTEELLVKLNREDLLRKQRTFDNGSIPHQIHLGELHAILRRQEDFYPFLKDNREKIEKILTFRIPYYVGPLARGNSRFAWMTRKSEETITPWNFEEVVDKGASAQSFIERMTNFDKNLPNEKVLPKHSLLYEYFTVYNELTKVKYVTEGMRKPAFLSGEQKKAIVDLLFKTNRKVTVKQLKEDYFKKIECFDSVEISGVEDRFNASLGTYHDLLKIIKDKDFLDNEENEDILEDIVLTLTLFEDREMIEERLKTYAHLFDDKVMKQLKRRRYTGWGRLSRKLINGIRDKQSGKTILDFLKSDGFANRNFMQLIHDDSLTFKEDIQKAQVSGQGDSLHEHIANLAGSPAIKKGILQTVKVVDELVKVMGRHKPENIVIEMARENQTTQKGQKNSRERMKRIEEGIKELGSQILKEHPVENTQLQNEKLYLYYLQNGRDMYVDQELDINRLSDYDVDHIVPQSFLKDDSIDNKVLTRSDKARGKSDNVPSEEVVKKMKNYWRQLLNAKLITQRKFDNLTKAERGGLSELDKAGFIKRQLVETRQITKHVAQILDSRMNTKYDENDKLIREVKVITLKSKLVSDFRKDFQFYKVREINNYHHAHDAYLNAVVGTALIKKYPKLESEFVYGDYKVYDVRKMIAKSEQEIGKATAKYFFYSNIMNFFKTEITLANGEIRKRPLIETNGETGEIVWDKGRDFATVRKVLSMPQVNIVKKTEVQTGGFSKESILPKRNSDKLIARKKDWDPKKYGGFDSPTVAYSVLVVAKVEKGKSKKLKSVKELLGITIMERSSFEKNPIDFLEAKGYKEVKKDLIIKLPKYSLFELENGRKRMLASAGELQKGNELALPSKYVNFLYLASHYEKLKGSPEDNEQKQLFVEQHKHYLDEIIEQISEFSKRVILADANLDKVLSAYNKHRDKPIREQAENIIHLFTLTNLGAPAAFKYFDTTIDRKRYTSTKEVLDATLIHQSITGLYETRIDLSQLGGDGGGGGGGGGGGMDPLQLLQPLEAEIKGTKLKAHWNSGATITCVPQAFLEEEVPIKNIWIKTIHGEKEQPVYYLTFKIQGRKVEAEVISSPYDYILVSPSDIPWLMKKPLQLTTLVPLQEYEERLLKQTMLTGSYKEKLQSLFLKYDALWQHWENQVGHRRIKPHHIATGTVNPRPQKQYPINPKAKASIQTVINDLLKQGVLIQQNSIMNTPVYPVPKPDGKWRMVLDYREVNKTIPLIAAQNQHSAGILSSIFRGKYKTTLDLSNGFWAHSITPESYWLTAFTWLGQQYCWTRLPQGFLNSPALFNADVVDLLKEVPNVQVYVDDIYISHDDPREHLEQLEKVFSLLLNAGYVVSLKKSEIAQHEVEFLGFNITKEGRGLTETFKQKLLNITPPRDLKQLQSILGLLNFARNFIPNFSELVKPLYNIIATAPGKYITWTTDNSQQLQNIISMLNSAENLEERNPEVRLIMKVNTSPSAGYIRFYNEFAKRPIMYLNYVYTKAEVKFTNTEKLLTTIHKGLIKALDLGMGQEILVYSPIVSMTKIQKTPLPERKALPIRWITWMSYLEDPRIQFHYDKTLPELQQVPTVTDDIIAKIKHPSEFSMVFYTDGSAIKHPNVNKSHNAGMGIAQVQFKPEFTVINTWSIPLGDHTAQLAEVAAVEFACKKALKIDGPVLIVTDSFYVAESVNKELPYWQSNGFFNNKKKPLKHVSKWKSIADCIQLKPDIIIIHEKGHQPTASTFHTEGNNLADKLATQGSYVVNAGKRTADGSEFEKRTADGSEFESPKKKAKVE

SEQ ID NO: 640 - protein, 2176 aa, synthetic construct
MPAAKRVKLDGGDKKYSIGLDIGTNSVGWAVITDEYKVPSKKFKVLGNTDRHSIKKNLIGALLFDSGETAEATRLKRTARRRYTRRKNRICYLQEIFSNEMAKVDDSFFHRLEESFLVEEDKKHERHPIFGNIVDEVAYHEKYPTIYHLRKKLVDSTDKADLRLIYLALAHMIKFRGHFLIEGDLNPDNSDVDKLFIQLVQTYNQLFEENPINASGVDAKAILSARLSKSRRLENLIAQLPGEKKNGLFGNLIALSLGLTPNFKSNFDLAEDAKLQLSKDTYDDDLDNLLAQIGDQYADLFLAAKNLSDAILLSDILRVNTEITKAPLSASMIKRYDEHHQDLTLLKALVRQQLPEKYKEIFFDQSKNGYAGYIDGGASQEEFYKFIKPILEKMDGTEELLVKLNREDLLRKQRTFDNGSIPHQIHLGELHAILRRQEDFYPFLKDNREKIEKILTFRIPYYVGPLARGNSRFAWMTRKSEETITPWNFEEVVDKGASAQSFIERMTNFDKNLPNEKVLPKHSLLYEYFTVYNELTKVKYVTEGMRKPAFLSGEQKKAIVDLLFKTNRKVTVKQLKEDYFKKIECFDSVEISGVEDRFNASLGTYHDLLKIIKDKDFLDNEENEDILEDIVLTLTLFEDREMIEERLKTYAHLFDDKVMKQLKRRRYTGWGRLSRKLINGIRDKQSGKTILDFLKSDGFANRNFMQLIHDDSLTFKEDIQKAQVSGQGDSLHEHIANLAGSPAIKKGILQTVKVVDELVKVMGRHKPENIVIEMARENQTTQKGQKNSRERMKRIEEGIKELGSQILKEHPVENTQLQNEKLYLYYLQNGRDMYVDQELDINRLSDYDVDHIVPQSFLKDDSIDNKVLTRSDKARGKSDNVPSEEVVKKMKNYWRQLLNAKLITQRKFDNLTKAERGGLSELDKAGFIKRQLVETRQITKHVAQILDSRMNTKYDENDKLIREVKVITLKSKLVSDFRKDFQFYKVREINNYHHAHDAYLNAVVGTALIKKYPKLESEFVYGDYKVYDVRKMIAKSEQEIGKATAKYFFYSNIMNFFKTEITLANGEIRKRPLIETNGETGEIVWDKGRDFATVRKVLSMPQVNIVKKTEVQTGGFSKESILPKRNSDKLIARKKDWDPKKYGGFDSPTVAYSVLVVAKVEKGKSKKLKSVKELLGITIMERSSFEKNPIDFLEAKGYKEVKKDLIIKLPKYSLFELENGRKRMLASAGELQKGNELALPSKYVNFLYLASHYEKLKGSPEDNEQKQLFVEQHKHYLDEIIEQISEFSKRVILADANLDKVLSAYNKHRDKPIREQAENIIHLFTLTNLGAPAAFKYFDTTIDRKRYTSTKEVLDATLIHQSITGLYETRIDLSQLGGDGGGGSEAAAKGSSGGMDPLQLLQPLEAEIKGTKLKAHWNSGATITCVPQAFLEEEVPIKNIWIKTIHGEKEQPVYYLTFKIQGRKVEAEVISSPYDYILVSPSDIPWLMKKPLQLTTLVPLQEYEERLLKQTMLTGSYKEKLQSLFLKYDALWQHWENQVGHRRIKPHHIATGTVNPRPQKQYPINPKAKASIQTVINDLLKQGVLIQQNSIMNTPVYPVPKPDGKWRMVLDYREVNKTIPLIAAQNQHSAGILSSIFRGKYKTTLDLSNGFWAHSITPESYWLTAFTWLGQQYCWTRLPQGFLNSPALFNADVVDLLKEVPNVQVYVDDIYISHDDPREHLEQLEKVFSLLLNAGYVVSLKKSEIAQHEVEFLGFNITKEGRGLTETFKQKLLNITPPRDLKQLQSILGLLNFARNFIPNFSELVKPLYNIIATAPGKYITWTTDNSQQLQNIISMLNSAENLEERNPEVRLIMKVNTSPSAGYIRFYNEFAKRPIMYLNYVYTKAEVKFTNTEKLLTTIHKGLIKALDLGMGQEILVYSPIVSMTKIQKTPLPERKALPIRWITWMSYLEDPRIQFHYDKTLPELQQVPTVTDDIIAKIKHPSEFSMVFYTDGSAIKHPNVNKSHNAGMGIAQVQFKPEFTVINTWSIPLGDHTAQLAEVAAVEFACKKALKIDGPVLIVTDSFYVAESVNKELPYWQSNGFFNNKKKPLKHVSKWKSIADCIQLKPDIIIIHEKGHQPTASTFHTEGNNLADKLATQGSYVVNAGKRTADGSEFEKRTADGSEFESPKKKAKVE

SEQ ID NO: 641 - protein, 2176 aa, synthetic construct
MPAAKRVKLDGGDKKYSIGLDIGTNSVGWAVITDEYKVPSKKFKVLGNTDRHSIKKNLIGALLFDSGETAEATRLKRTARRRYTRRKNRICYLQEIFSNEMAKVDDSFFHRLEESFLVEEDKKHERHPIFGNIVDEVAYHEKYPTIYHLRKKLVDSTDKADLRLIYLALAHMIKFRGHFLIEGDLNPDNSDVDKLFIQLVQTYNQLFEENPINASGVDAKAILSARLSKSRRLENLIAQLPGEKKNGLFGNLIALSLGLTPNFKSNFDLAEDAKLQLSKDTYDDDLDNLLAQIGDQYADLFLAAKNLSDAILLSDILRVNTEITKAPLSASMIKRYDEHHQDLTLLKALVRQQLPEKYKEIFFDQSKNGYAGYIDGGASQEEFYKFIKPILEKMDGTEELLVKLNREDLLRKQRTFDNGSIPHQIHLGELHAILRRQEDFYPFLKDNREKIEKILTFRIPYYVGPLARGNSRFAWMTRKSEETITPWNFEEVVDKGASAQSFIERMTNFDKNLPNEKVLPKHSLLYEYFTVYNELTKVKYVTEGMRKPAFLSGEQKKAIVDLLFKTNRKVTVKQLKEDYFKKIECFDSVEISGVEDRFNASLGTYHDLLKIIKDKDFLDNEENEDILEDIVLTLTLFEDREMIEERLKTYAHLFDDKVMKQLKRRRYTGWGRLSRKLINGIRDKQSGKTILDFLKSDGFANRNFMQLIHDDSLTFKEDIQKAQVSGQGDSLHEHIANLAGSPAIKKGILQTVKVVDELVKVMGRHKPENIVIEMARENQTTQKGQKNSRERMKRIEEGIKELGSQILKEHPVENTQLQNEKLYLYYLQNGRDMYVDQELDINRLSDYDVDHIVPQSFLKDDSIDNKVLTRSDKARGKSDNVPSEEVVKKMKNYWRQLLNAKLITQRKFDNLTKAERGGLSELDKAGFIKRQLVETRQITKHVAQILDSRMNTKYDENDKLIREVKVITLKSKLVSDFRKDFQFYKVREINNYHHAHDAYLNAVVGTALIKKYPKLESEFVYGDYKVYDVRKMIAKSEQEIGKATAKYFFYSNIMNFFKTEITLANGEIRKRPLIETNGETGEIVWDKGRDFATVRKVLSMPQVNIVKKTEVQTGGFSKESILPKRNSDKLIARKKDWDPKKYGGFDSPTVAYSVLVVAKVEKGKSKKLKSVKELLGITIMERSSFEKNPIDFLEAKGYKEVKKDLIIKLPKYSLFELENGRKRMLASAGELQKGNELALPSKYVNFLYLASHYEKLKGSPEDNEQKQLFVEQHKHYLDEIIEQISEFSKRVILADANLDKVLSAYNKHRDKPIREQAENIIHLFTLTNLGAPAAFKYFDTTIDRKRYTSTKEVLDATLIHQSITGLYETRIDLSQLGGDGGPAPEAAAKGGSGGMDPLQLLQPLEAEIKGTKLKAHWNSGATITCVPQAFLEEEVPIKNIWIKTIHGEKEQPVYYLTFKIQGRKVEAEVISSPYDYILVSPSDIPWLMKKPLQLTTLVPLQEYEERLLKQTMLTGSYKEKLQSLFLKYDALWQHWENQVGHRRIKPHHIATGTVNPRPQKQYPINPKAKASIQTVINDLLKQGVLIQQNSIMNTPVYPVPKPDGKWRMVLDYREVNKTIPLIAAQNQHSAGILSSIFRGKYKTTLDLSNGFWAHSITPESYWLTAFTWLGQQYCWTRLPQGFLNSPALFNADVVDLLKEVPNVQVYVDDIYISHDDPREHLEQLEKVFSLLLNAGYVVSLKKSEIAQHEVEFLGFNITKEGRGLTETFKQKLLNITPPRDLKQLQSILGLLNFARNFIPNFSELVKPLYNIIATAPGKYITWTTDNSQQLQNIISMLNSAENLEERNPEVRLIMKVNTSPSAGYIRFYNEFAKRPIMYLNYVYTKAEVKFTNTEKLLTTIHKGLIKALDLGMGQEILVYSPIVSMTKIQKTPLPERKALPIRWITWMSYLEDPRIQFHYDKTLPELQQVPTVTDDIIAKIKHPSEFSMVFYTDGSAIKHPNVNKSHNAGMGIAQVQFKPEFTVINTWSIPLGDHTAQLAEVAAVEFACKKALKIDGPVLIVTDSFYVAESVNKELPYWQSNGFFNNKKKPLKHVSKWKSIADCIQLKPDIIIIHEKGHQPTASTFHTEGNNLADKLATQGSYVVNAGKRTADGSEFEKRTADGSEFESPKKKAKVE

SEQ ID NO: 642 - protein, 2173 aa, synthetic construct
MPAAKRVKLDGGDKKYSIGLDIGTNSVGWAVITDEYKVPSKKFKVLGNTDRHSIKKNLIGALLFDSGETAEATRLKRTARRRYTRRKNRICYLQEIFSNEMAKVDDSFFHRLEESFLVEEDKKHERHPIFGNIVDEVAYHEKYPTIYHLRKKLVDSTDKADLRLIYLALAHMIKFRGHFLIEGDLNPDNSDVDKLFIQLVQTYNQLFEENPINASGVDAKAILSARLSKSRRLENLIAQLPGEKKNGLFGNLIALSLGLTPNFKSNFDLAEDAKLQLSKDTYDDDLDNLLAQIGDQYADLFLAAKNLSDAILLSDILRVNTEITKAPLSASMIKRYDEHHQDLTLLKALVRQQLPEKYKEIFFDQSKNGYAGYIDGGASQEEFYKFIKPILEKMDGTEELLVKLNREDLLRKQRTFDNGSIPHQIHLGELHAILRRQEDFYPFLKDNREKIEKILTFRIPYYVGPLARGNSRFAWMTRKSEETITPWNFEEVVDKGASAQSFIERMTNFDKNLPNEKVLPKHSLLYEYFTVYNELTKVKYVTEGMRKPAFLSGEQKKAIVDLLFKTNRKVTVKQLKEDYFKKIECFDSVEISGVEDRFNASLGTYHDLLKIIKDKDFLDNEENEDILEDIVLTLTLFEDREMIEERLKTYAHLFDDKVMKQLKRRRYTGWGRLSRKLINGIRDKQSGKTILDFLKSDGFANRNFMQLIHDDSLTFKEDIQKAQVSGQGDSLHEHIANLAGSPAIKKGILQTVKVVDELVKVMGRHKPENIVIEMARENQTTQKGQKNSRERMKRIEEGIKELGSQILKEHPVENTQLQNEKLYLYYLQNGRDMYVDQELDINRLSDYDVDHIVPQSFLKDDSIDNKVLTRSDKARGKSDNVPSEEVVKKMKNYWRQLLNAKLITQRKFDNLTKAERGGLSELDKAGFIKRQLVETRQITKHVAQILDSRMNTKYDENDKLIREVKVITLKSKLVSDFRKDFQFYKVREINNYHHAHDAYLNAVVGTALIKKYPKLESEFVYGDYKVYDVRKMIAKSEQEIGKATAKYFFYSNIMNFFKTEITLANGEIRKRPLIETNGETGEIVWDKGRDFATVRKVLSMPQVNIVKKTEVQTGGFSKESILPKRNSDKLIARKKDWDPKKYGGFDSPTVAYSVLVVAKVEKGKSKKLKSVKELLGITIMERSSFEKNPIDFLEAKGYKEVKKDLIIKLPKYSLFELENGRKRMLASAGELQKGNELALPSKYVNFLYLASHYEKLKGSPEDNEQKQLFVEQHKHYLDEIIEQISEFSKRVILADANLDKVLSAYNKHRDKPIREQAENIIHLFTLTNLGAPAAFKYFDTTIDRKRYTSTKEVLDATLIHQSITGLYETRIDLSQLGGDGGGGGGGGGGGGMDPLQLLQPLEAEIKGTKLKAHWNSGATITCVPQAFLEEEVPIKNIWIKTIHGEKEQPVYYLTFKIQGRKVEAEVISSPYDYILVSPSDIPWLMKKPLQLTTLVPLQEYEERLLKQTMLTGSYKEKLQSLFLKYDALWQHWENQVGHRRIKPHHIATGTVNPRPQKQYPINPKAKASIQTVINDLLKQGVLIQQNSIMNTPVYPVPKPDGKWRMVLDYREVNKTIPLIAAQNQHSAGILSSIFRGKYKTTLDLSNGFWAHSITPESYWLTAFTWLGQQYCWTRLPQGFLNSPALFNADVVDLLKEVPNVQVYVDDIYISHDDPREHLEQLEKVFSLLLNAGYVVSLKKSEIAQHEVEFLGFNITKEGRGLTETFKQKLLNITPPRDLKQLQSILGLLNFARNFIPNFSELVKPLYNIIATAPGKYITWTTDNSQQLQNIISMLNSAENLEERNPEVRLIMKVNTSPSAGYIRFYNEFAKRPIMYLNYVYTKAEVKFTNTEKLLTTIHKGLIKALDLGMGQEILVYSPIVSMTKIQKTPLPERKALPIRWITWMSYLEDPRIQFHYDKTLPELQQVPTVTDDIIAKIKHPSEFSMVFYTDGSAIKHPNVNKSHNAGMGIAQVQFKPEFTVINTWSIPLGDHTAQLAEVAAVEFACKKALKIDGPVLIVTDSFYVAESVNKELPYWQSNGFFNNKKKPLKHVSKWKSIADCIQLKPDIIIIHEKGHQPTASTFHTEGNNLADKLATQGSYVVNAGKRTADGSEFEKRTADGSEFESPKKKAKVE

SEQ ID NO: 643 - protein, 2171 aa, synthetic construct
MPAAKRVKLDGGDKKYSIGLDIGTNSVGWAVITDEYKVPSKKFKVLGNTDRHSIKKNLIGALLFDSGETAEATRLKRTARRRYTRRKNRICYLQEIFSNEMAKVDDSFFHRLEESFLVEEDKKHERHPIFGNIVDEVAYHEKYPTIYHLRKKLVDSTDKADLRLIYLALAHMIKFRGHFLIEGDLNPDNSDVDKLFIQLVQTYNQLFEENPINASGVDAKAILSARLSKSRRLENLIAQLPGEKKNGLFGNLIALSLGLTPNFKSNFDLAEDAKLQLSKDTYDDDLDNLLAQIGDQYADLFLAAKNLSDAILLSDILRVNTEITKAPLSASMIKRYDEHHQDLTLLKALVRQQLPEKYKEIFFDQSKNGYAGYIDGGASQEEFYKFIKPILEKMDGTEELLVKLNREDLLRKQRTFDNGSIPHQIHLGELHAILRRQEDFYPFLKDNREKIEKILTFRIPYYVGPLARGNSRFAWMTRKSEETITPWNFEEVVDKGASAQSFIERMTNFDKNLPNEKVLPKHSLLYEYFTVYNELTKVKYVTEGMRKPAFLSGEQKKAIVDLLFKTNRKVTVKQLKEDYFKKIECFDSVEISGVEDRFNASLGTYHDLLKIIKDKDFLDNEENEDILEDIVLTLTLFEDREMIEERLKTYAHLFDDKVMKQLKRRRYTGWGRLSRKLINGIRDKQSGKTILDFLKSDGFANRNFMQLIHDDSLTFKEDIQKAQVSGQGDSLHEHIANLAGSPAIKKGILQTVKVVDELVKVMGRHKPENIVIEMARENQTTQKGQKNSRERMKRIEEGIKELGSQILKEHPVENTQLQNEKLYLYYLQNGRDMYVDQELDINRLSDYDVDHIVPQSFLKDDSIDNKVLTRSDKARGKSDNVPSEEVVKKMKNYWRQLLNAKLITQRKFDNLTKAERGGLSELDKAGFIKRQLVETRQITKHVAQILDSRMNTKYDENDKLIREVKVITLKSKLVSDFRKDFQFYKVREINNYHHAHDAYLNAVVGTALIKKYPKLESEFVYGDYKVYDVRKMIAKSEQEIGKATAKYFFYSNIMNFFKTEITLANGEIRKRPLIETNGETGEIVWDKGRDFATVRKVLSMPQVNIVKKTEVQTGGFSKESILPKRNSDKLIARKKDWDPKKYGGFDSPTVAYSVLVVAKVEKGKSKKLKSVKELLGITIMERSSFEKNPIDFLEAKGYKEVKKDLIIKLPKYSLFELENGRKRMLASAGELQKGNELALPSKYVNFLYLASHYEKLKGSPEDNEQKQLFVEQHKHYLDEIIEQISEFSKRVILADANLDKVLSAYNKHRDKPIREQAENIIHLFTLTNLGAPAAFKYFDTTIDRKRYTSTKEVLDATLIHQSITGLYETRIDLSQLGGDGGGGSGSSGGMDPLQLLQPLEAEIKGTKLKAHWNSGATITCVPQAFLEEEVPIKNIWIKTIHGEKEQPVYYLTFKIQGRKVEAEVISSPYDYILVSPSDIPWLMKKPLQLTTLVPLQEYEERLLKQTMLTGSYKEKLQSLFLKYDALWQHWENQVGHRRIKPHHIATGTVNPRPQKQYPINPKAKASIQTVINDLLKQGVLIQQNSIMNTPVYPVPKPDGKWRMVLDYREVNKTIPLIAAQNQHSAGILSSIFRGKYKTTLDLSNGFWAHSITPESYWLTAFTWLGQQYCWTRLPQGFLNSPALFNADVVDLLKEVPNVQVYVDDIYISHDDPREHLEQLEKVFSLLLNAGYVVSLKKSEIAQHEVEFLGFNITKEGRGLTETFKQKLLNITPPRDLKQLQSILGLLNFARNFIPNFSELVKPLYNIIATAPGKYITWTTDNSQQLQNIISMLNSAENLEERNPEVRLIMKVNTSPSAGYIRFYNEFAKRPIMYLNYVYTKAEVKFTNTEKLLTTIHKGLIKALDLGMGQEILVYSPIVSMTKIQKTPLPERKALPIRWITWMSYLEDPRIQFHYDKTLPELQQVPTVTDDIIAKIKHPSEFSMVFYTDGSAIKHPNVNKSHNAGMGIAQVQFKPEFTVINTWSIPLGDHTAQLAEVAAVEFACKKALKIDGPVLIVTDSFYVAESVNKELPYWQSNGFFNNKKKPLKHVSKWKSIADCIQLKPDIIIIHEKGHQPTASTFHTEGNNLADKLATQGSYVVNAGKRTADGSEFEKRTADGSEFESPKKKAKVE

SEQ ID NO: 644 - protein, 2171 aa, synthetic construct
MPAAKRVKLDGGDKKYSIGLDIGTNSVGWAVITDEYKVPSKKFKVLGNTDRHSIKKNLIGALLFDSGETAEATRLKRTARRRYTRRKNRICYLQEIFSNEMAKVDDSFFHRLEESFLVEEDKKHERHPIFGNIVDEVAYHEKYPTIYHLRKKLVDSTDKADLRLIYLALAHMIKFRGHFLIEGDLNPDNSDVDKLFIQLVQTYNQLFEENPINASGVDAKAILSARLSKSRRLENLIAQLPGEKKNGLFGNLIALSLGLTPNFKSNFDLAEDAKLQLSKDTYDDDLDNLLAQIGDQYADLFLAAKNLSDAILLSDILRVNTEITKAPLSASMIKRYDEHHQDLTLLKALVRQQLPEKYKEIFFDQSKNGYAGYIDGGASQEEFYKFIKPILEKMDGTEELLVKLNREDLLRKQRTFDNGSIPHQIHLGELHAILRRQEDFYPFLKDNREKIEKILTFRIPYYVGPLARGNSRFAWMTRKSEETITPWNFEEVVDKGASAQSFIERMTNFDKNLPNEKVLPKHSLLYEYFTVYNELTKVKYVTEGMRKPAFLSGEQKKAIVDLLFKTNRKVTVKQLKEDYFKKIECFDSVEISGVEDRFNASLGTYHDLLKIIKDKDFLDNEENEDILEDIVLTLTLFEDREMIEERLKTYAHLFDDKVMKQLKRRRYTGWGRLSRKLINGIRDKQSGKTILDFLKSDGFANRNFMQLIHDDSLTFKEDIQKAQVSGQGDSLHEHIANLAGSPAIKKGILQTVKVVDELVKVMGRHKPENIVIEMARENQTTQKGQKNSRERMKRIEEGIKELGSQILKEHPVENTQLQNEKLYLYYLQNGRDMYVDQELDINRLSDYDVDHIVPQSFLKDDSIDNKVLTRSDKARGKSDNVPSEEVVKKMKNYWRQLLNAKLITQRKFDNLTKAERGGLSELDKAGFIKRQLVETRQITKHVAQILDSRMNTKYDENDKLIREVKVITLKSKLVSDFRKDFQFYKVREINNYHHAHDAYLNAVVGTALIKKYPKLESEFVYGDYKVYDVRKMIAKSEQEIGKATAKYFFYSNIMNFFKTEITLANGEIRKRPLIETNGETGEIVWDKGRDFATVRKVLSMPQVNIVKKTEVQTGGFSKESILPKRNSDKLIARKKDWDPKKYGGFDSPTVAYSVLVVAKVEKGKSKKLKSVKELLGITIMERSSFEKNPIDFLEAKGYKEVKKDLIIKLPKYSLFELENGRKRMLASAGELQKGNELALPSKYVNFLYLASHYEKLKGSPEDNEQKQLFVEQHKHYLDEIIEQISEFSKRVILADANLDKVLSAYNKHRDKPIREQAENIIHLFTLTNLGAPAAFKYFDTTIDRKRYTSTKEVLDATLIHQSITGLYETRIDLSQLGGDGGGGGGGGGGMDPLQLLQPLEAEIKGTKLKAHWNSGATITCVPQAFLEEEVPIKNIWIKTIHGEKEQPVYYLTFKIQGRKVEAEVISSPYDYILVSPSDIPWLMKKPLQLTTLVPLQEYEERLLKQTMLTGSYKEKLQSLFLKYDALWQHWENQVGHRRIKPHHIATGTVNPRPQKQYPINPKAKASIQTVINDLLKQGVLIQQNSIMNTPVYPVPKPDGKWRMVLDYREVNKTIPLIAAQNQHSAGILSSIFRGKYKTTLDLSNGFWAHSITPESYWLTAFTWLGQQYCWTRLPQGFLNSPALFNADVVDLLKEVPNVQVYVDDIYISHDDPREHLEQLEKVFSLLLNAGYVVSLKKSEIAQHEVEFLGFNITKEGRGLTETFKQKLLNITPPRDLKQLQSILGLLNFARNFIPNFSELVKPLYNIIATAPGKYITWTTDNSQQLQNIISMLNSAENLEERNPEVRLIMKVNTSPSAGYIRFYNEFAKRPIMYLNYVYTKAEVKFTNTEKLLTTIHKGLIKALDLGMGQEILVYSPIVSMTKIQKTPLPERKALPIRWITWMSYLEDPRIQFHYDKTLPELQQVPTVTDDIIAKIKHPSEFSMVFYTDGSAIKHPNVNKSHNAGMGIAQVQFKPEFTVINTWSIPLGDHTAQLAEVAAVEFACKKALKIDGPVLIVTDSFYVAESVNKELPYWQSNGFFNNKKKPLKHVSKWKSIADCIQLKPDIIIIHEKGHQPTASTFHTEGNNLADKLATQGSYVVNAGKRTADGSEFEKRTADGSEFESPKKKAKVE

SEQ ID NO: 645 - protein, 2174 aa, synthetic construct
MPAAKRVKLDGGDKKYSIGLDIGTNSVGWAVITDEYKVPSKKFKVLGNTDRHSIKKNLIGALLFDSGETAEATRLKRTARRRYTRRKNRICYLQEIFSNEMAKVDDSFFHRLEESFLVEEDKKHERHPIFGNIVDEVAYHEKYPTIYHLRKKLVDSTDKADLRLIYLALAHMIKFRGHFLIEGDLNPDNSDVDKLFIQLVQTYNQLFEENPINASGVDAKAILSARLSKSRRLENLIAQLPGEKKNGLFGNLIALSLGLTPNFKSNFDLAEDAKLQLSKDTYDDDLDNLLAQIGDQYADLFLAAKNLSDAILLSDILRVNTEITKAPLSASMIKRYDEHHQDLTLLKALVRQQLPEKYKEIFFDQSKNGYAGYIDGGASQEEFYKFIKPILEKMDGTEELLVKLNREDLLRKQRTFDNGSIPHQIHLGELHAILRRQEDFYPFLKDNREKIEKILTFRIPYYVGPLARGNSRFAWMTRKSEETITPWNFEEVVDKGASAQSFIERMTNFDKNLPNEKVLPKHSLLYEYFTVYNELTKVKYVTEGMRKPAFLSGEQKKAIVDLLFKTNRKVTVKQLKEDYFKKIECFDSVEISGVEDRFNASLGTYHDLLKIIKDKDFLDNEENEDILEDIVLTLTLFEDREMIEERLKTYAHLFDDKVMKQLKRRRYTGWGRLSRKLINGIRDKQSGKTILDFLKSDGFANRNFMQLIHDDSLTFKEDIQKAQVSGQGDSLHEHIANLAGSPAIKKGILQTVKVVDELVKVMGRHKPENIVIEMARENQTTQKGQKNSRERMKRIEEGIKELGSQILKEHPVENTQLQNEKLYLYYLQNGRDMYVDQELDINRLSDYDVDHIVPQSFLKDDSIDNKVLTRSDKARGKSDNVPSEEVVKKMKNYWRQLLNAKLITQRKFDNLTKAERGGLSELDKAGFIKRQLVETRQITKHVAQILDSRMNTKYDENDKLIREVKVITLKSKLVSDFRKDFQFYKVREINNYHHAHDAYLNAVVGTALIKKYPKLESEFVYGDYKVYDVRKMIAKSEQEIGKATAKYFFYSNIMNFFKTEITLANGEIRKRPLIETNGETGEIVWDKGRDFATVRKVLSMPQVNIVKKTEVQTGGFSKESILPKRNSDKLIARKKDWDPKKYGGFDSPTVAYSVLVVAKVEKGKSKKLKSVKELLGITIMERSSFEKNPIDFLEAKGYKEVKKDLIIKLPKYSLFELENGRKRMLASAGELQKGNELALPSKYVNFLYLASHYEKLKGSPEDNEQKQLFVEQHKHYLDEIIEQISEFSKRVILADANLDKVLSAYNKHRDKPIREQAENIIHLFTLTNLGAPAAFKYFDTTIDRKRYTSTKEVLDATLIHQSITGLYETRIDLSQLGGDGGGGSGGGPAPGGMDPLQLLQPLEAEIKGTKLKAHWNSGATITCVPQAFLEEEVPIKNIWIKTIHGEKEQPVYYLTFKIQGRKVEAEVISSPYDYILVSPSDIPWLMKKPLQLTTLVPLQEYEERLLKQTMLTGSYKEKLQSLFLKYDALWQHWENQVGHRRIKPHHIATGTVNPRPQKQYPINPKAKASIQTVINDLLKQGVLIQQNSIMNTPVYPVPKPDGKWRMVLDYREVNKTIPLIAAQNQHSAGILSSIFRGKYKTTLDLSNGFWAHSITPESYWLTAFTWLGQQYCWTRLPQGFLNSPALFNADVVDLLKEVPNVQVYVDDIYISHDDPREHLEQLEKVFSLLLNAGYVVSLKKSEIAQHEVEFLGFNITKEGRGLTETFKQKLLNITPPRDLKQLQSILGLLNFARNFIPNFSELVKPLYNIIATAPGKYITWTTDNSQQLQNIISMLNSAENLEERNPEVRLIMKVNTSPSAGYIRFYNEFAKRPIMYLNYVYTKAEVKFTNTEKLLTTIHKGLIKALDLGMGQEILVYSPIVSMTKIQKTPLPERKALPIRWITWMSYLEDPRIQFHYDKTLPELQQVPTVTDDIIAKIKHPSEFSMVFYTDGSAIKHPNVNKSHNAGMGIAQVQFKPEFTVINTWSIPLGDHTAQLAEVAAVEFACKKALKIDGPVLIVTDSFYVAESVNKELPYWQSNGFFNNKKKPLKHVSKWKSIADCIQLKPDIIIIHEKGHQPTASTFHTEGNNLADKLATQGSYVVNAGKRTADGSEFEKRTADGSEFESPKKKAKVE

SEQ ID NO: 646 - protein, 2176 aa, synthetic construct
MPAAKRVKLDGGDKKYSIGLDIGTNSVGWAVITDEYKVPSKKFKVLGNTDRHSIKKNLIGALLFDSGETAEATRLKRTARRRYTRRKNRICYLQEIFSNEMAKVDDSFFHRLEESFLVEEDKKHERHPIFGNIVDEVAYHEKYPTIYHLRKKLVDSTDKADLRLIYLALAHMIKFRGHFLIEGDLNPDNSDVDKLFIQLVQTYNQLFEENPINASGVDAKAILSARLSKSRRLENLIAQLPGEKKNGLFGNLIALSLGLTPNFKSNFDLAEDAKLQLSKDTYDDDLDNLLAQIGDQYADLFLAAKNLSDAILLSDILRVNTEITKAPLSASMIKRYDEHHQDLTLLKALVRQQLPEKYKEIFFDQSKNGYAGYIDGGASQEEFYKFIKPILEKMDGTEELLVKLNREDLLRKQRTFDNGSIPHQIHLGELHAILRRQEDFYPFLKDNREKIEKILTFRIPYYVGPLARGNSRFAWMTRKSEETITPWNFEEVVDKGASAQSFIERMTNFDKNLPNEKVLPKHSLLYEYFTVYNELTKVKYVTEGMRKPAFLSGEQKKAIVDLLFKTNRKVTVKQLKEDYFKKIECFDSVEISGVEDRFNASLGTYHDLLKIIKDKDFLDNEENEDILEDIVLTLTLFEDREMIEERLKTYAHLFDDKVMKQLKRRRYTGWGRLSRKLINGIRDKQSGKTILDFLKSDGFANRNFMQLIHDDSLTFKEDIQKAQVSGQGDSLHEHIANLAGSPAIKKGILQTVKVVDELVKVMGRHKPENIVIEMARENQTTQKGQKNSRERMKRIEEGIKELGSQILKEHPVENTQLQNEKLYLYYLQNGRDMYVDQELDINRLSDYDVDHIVPQSFLKDDSIDNKVLTRSDKARGKSDNVPSEEVVKKMKNYWRQLLNAKLITQRKFDNLTKAERGGLSELDKAGFIKRQLVETRQITKHVAQILDSRMNTKYDENDKLIREVKVITLKSKLVSDFRKDFQFYKVREINNYHHAHDAYLNAVVGTALIKKYPKLESEFVYGDYKVYDVRKMIAKSEQEIGKATAKYFFYSNIMNFFKTEITLANGEIRKRPLIETNGETGEIVWDKGRDFATVRKVLSMPQVNIVKKTEVQTGGFSKESILPKRNSDKLIARKKDWDPKKYGGFDSPTVAYSVLVVAKVEKGKSKKLKSVKELLGITIMERSSFEKNPIDFLEAKGYKEVKKDLIIKLPKYSLFELENGRKRMLASAGELQKGNELALPSKYVNFLYLASHYEKLKGSPEDNEQKQLFVEQHKHYLDEIIEQISEFSKRVILADANLDKVLSAYNKHRDKPIREQAENIIHLFTLTNLGAPAAFKYFDTTIDRKRYTSTKEVLDATLIHQSITGLYETRIDLSQLGGDGGEAAAKGGSGGGGGMDPLQLLQPLEAEIKGTKLKAHWNSGATITCVPQAFLEEEVPIKNIWIKTIHGEKEQPVYYLTFKIQGRKVEAEVISSPYDYILVSPSDIPWLMKKPLQLTTLVPLQEYEERLLKQTMLTGSYKEKLQSLFLKYDALWQHWENQVGHRRIKPHHIATGTVNPRPQKQYPINPKAKASIQTVINDLLKQGVLIQQNSIMNTPVYPVPKPDGKWRMVLDYREVNKTIPLIAAQNQHSAGILSSIFRGKYKTTLDLSNGFWAHSITPESYWLTAFTWLGQQYCWTRLPQGFLNSPALFNADVVDLLKEVPNVQVYVDDIYISHDDPREHLEQLEKVFSLLLNAGYVVSLKKSEIAQHEVEFLGFNITKEGRGLTETFKQKLLNITPPRDLKQLQSILGLLNFARNFIPNFSELVKPLYNIIATAPGKYITWTTDNSQQLQNIISMLNSAENLEERNPEVRLIMKVNTSPSAGYIRFYNEFAKRPIMYLNYVYTKAEVKFTNTEKLLTTIHKGLIKALDLGMGQEILVYSPIVSMTKIQKTPLPERKALPIRWITWMSYLEDPRIQFHYDKTLPELQQVPTVTDDIIAKIKHPSEFSMVFYTDGSAIKHPNVNKSHNAGMGIAQVQFKPEFTVINTWSIPLGDHTAQLAEVAAVEFACKKALKIDGPVLIVTDSFYVAESVNKELPYWQSNGFFNNKKKPLKHVSKWKSIADCIQLKPDIIIIHEKGHQPTASTFHTEGNNLADKLATQGSYVVNAGKRTADGSEFEKRTADGSEFESPKKKAKVE

SEQ ID NO: 647 - protein, 2211 aa, synthetic construct
MPAAKRVKLDGGDKKYSIGLDIGTNSVGWAVITDEYKVPSKKFKVLGNTDRHSIKKNLIGALLFDSGETAEATRLKRTARRRYTRRKNRICYLQEIFSNEMAKVDDSFFHRLEESFLVEEDKKHERHPIFGNIVDEVAYHEKYPTIYHLRKKLVDSTDKADLRLIYLALAHMIKFRGHFLIEGDLNPDNSDVDKLFIQLVQTYNQLFEENPINASGVDAKAILSARLSKSRRLENLIAQLPGEKKNGLFGNLIALSLGLTPNFKSNFDLAEDAKLQLSKDTYDDDLDNLLAQIGDQYADLFLAAKNLSDAILLSDILRVNTEITKAPLSASMIKRYDEHHQDLTLLKALVRQQLPEKYKEIFFDQSKNGYAGYIDGGASQEEFYKFIKPILEKMDGTEELLVKLNREDLLRKQRTFDNGSIPHQIHLGELHAILRRQEDFYPFLKDNREKIEKILTFRIPYYVGPLARGNSRFAWMTRKSEETITPWNFEEVVDKGASAQSFIERMTNFDKNLPNEKVLPKHSLLYEYFTVYNELTKVKYVTEGMRKPAFLSGEQKKAIVDLLFKTNRKVTVKQLKEDYFKKIECFDSVEISGVEDRFNASLGTYHDLLKIIKDKDFLDNEENEDILEDIVLTLTLFEDREMIEERLKTYAHLFDDKVMKQLKRRRYTGWGRLSRKLINGIRDKQSGKTILDFLKSDGFANRNFMQLIHDDSLTFKEDIQKAQVSGQGDSLHEHIANLAGSPAIKKGILQTVKVVDELVKVMGRHKPENIVIEMARENQTTQKGQKNSRERMKRIEEGIKELGSQILKEHPVENTQLQNEKLYLYYLQNGRDMYVDQELDINRLSDYDVDHIVPQSFLKDDSIDNKVLTRSDKARGKSDNVPSEEVVKKMKNYWRQLLNAKLITQRKFDNLTKAERGGLSELDKAGFIKRQLVETRQITKHVAQILDSRMNTKYDENDKLIREVKVITLKSKLVSDFRKDFQFYKVREINNYHHAHDAYLNAVVGTALIKKYPKLESEFVYGDYKVYDVRKMIAKSEQEIGKATAKYFFYSNIMNFFKTEITLANGEIRKRPLIETNGETGEIVWDKGRDFATVRKVLSMPQVNIVKKTEVQTGGFSKESILPKRNSDKLIARKKDWDPKKYGGFDSPTVAYSVLVVAKVEKGKSKKLKSVKELLGITIMERSSFEKNPIDFLEAKGYKEVKKDLIIKLPKYSLFELENGRKRMLASAGELQKGNELALPSKYVNFLYLASHYEKLKGSPEDNEQKQLFVEQHKHYLDEIIEQISEFSKRVILADANLDKVLSAYNKHRDKPIREQAENIIHLFTLTNLGAPAAFKYFDTTIDRKRYTSTKEVLDATLIHQSITGLYETRIDLSQLGGDGGAEAAAKEAAAKEAAAKEAAAKALEAEAAAKEAAAKEAAAKEAAAKAGGMDPLQLLQPLEAEIKGTKLKAHWNSGATITCVPQAFLEEEVPIKNIWIKTIHGEKEQPVYYLTFKIQGRKVEAEVISSPYDYILVSPSDIPWLMKKPLQLTTLVPLQEYEERLLKQTMLTGSYKEKLQSLFLKYDALWQHWENQVGHRRIKPHHIATGTVNPRPQKQYPINPKAKASIQTVINDLLKQGVLIQQNSIMNTPVYPVPKPDGKWRMVLDYREVNKTIPLIAAQNQHSAGILSSIFRGKYKTTLDLSNGFWAHSITPESYWLTAFTWLGQQYCWTRLPQGFLNSPALFNADVVDLLKEVPNVQVYVDDIYISHDDPREHLEQLEKVFSLLLNAGYVVSLKKSEIAQHEVEFLGFNITKEGRGLTETFKQKLLNITPPRDLKQLQSILGKLNFARNFIPNFSELVKPLYNIIATAPGKYITWTTDNSQQLQNIISMLNSAENLEERNPEVRLIMKVNTSPSAGYIRFYNEFAKRPIMYLNYVYTKAEVKFTNTEKLLTTIHKGLIKALDLGMGQEILVYSPIVSMTKIQKTPLPERKALPIRWITWMSYLEDPRIQFHYDKTLPELQQVPTVTDDIIAKIKHPSEFSMVFYTDGSAIKHPNVNKSHNAGMGIAQVQFKPEFTVINTWSIPLGDHTAQLAEVAAVEFACKKALKIDGPVLIVTDSFYVAESVNKELPYWQSNGFFNNKKKPLKHVSKWKSIADCIQLKPDIIIIHEKGHQPTASTFHTEGNNLADKLATQGSYVVNAGKRTADGSEFEKRTADGSEFESPKKKAKVE

SEQ ID NO: 648 - protein, 2195 aa, synthetic construct
MPAAKRVKLDGGDKKYSIGLDIGTNSVGWAVITDEYKVPSKKFKVLGNTDRHSIKKNLIGALLFDSGETAEATRLKRTARRRYTRRKNRICYLQEIFSNEMAKVDDSFFHRLEESFLVEEDKKHERHPIFGNIVDEVAYHEKYPTIYHLRKKLVDSTDKADLRLIYLALAHMIKFRGHFLIEGDLNPDNSDVDKLFIQLVQTYNQLFEENPINASGVDAKAILSARLSKSRRLENLIAQLPGEKKNGLFGNLIALSLGLTPNFKSNFDLAEDAKLQLSKDTYDDDLDNLLAQIGDQYADLFLAAKNLSDAILLSDILRVNTEITKAPLSASMIKRYDEHHQDLTLLKALVRQQLPEKYKEIFFDQSKNGYAGYIDGGASQEEFYKFIKPILEKMDGTEELLVKLNREDLLRKQRTFDNGSIPHQIHLGELHAILRRQEDFYPFLKDNREKIEKILTFRIPYYVGPLARGNSRFAWMTRKSEETITPWNFEEVVDKGASAQSFIERMTNFDKNLPNEKVLPKHSLLYEYFTVYNELTKVKYVTEGMRKPAFLSGEQKKAIVDLLFKTNRKVTVKQLKEDYFKKIECFDSVEISGVEDRFNASLGTYHDLLKIIKDKDFLDNEENEDILEDIVLTLTLFEDREMIEERLKTYAHLFDDKVMKQLKRRRYTGWGRLSRKLINGIRDKQSGKTILDFLKSDGFANRNFMQLIHDDSLTFKEDIQKAQVSGQGDSLHEHIANLAGSPAIKKGILQTVKVVDELVKVMGRHKPENIVIEMARENQTTQKGQKNSRERMKRIEEGIKELGSQILKEHPVENTQLQNEKLYLYYLQNGRDMYVDQELDINRLSDYDVDHIVPQSFLKDDSIDNKVLTRSDKARGKSDNVPSEEVVKKMKNYWRQLLNAKLITQRKFDNLTKAERGGLSELDKAGFIKRQLVETRQITKHVAQILDSRMNTKYDENDKLIREVKVITLKSKLVSDFRKDFQFYKVREINNYHHAHDAYLNAVVGTALIKKYPKLESEFVYGDYKVYDVRKMIAKSEQEIGKATAKYFFYSNIMNFFKTEITLANGEIRKRPLIETNGETGEIVWDKGRDFATVRKVLSMPQVNIVKKTEVQTGGFSKESILPKRNSDKLIARKKDWDPKKYGGFDSPTVAYSVLVVAKVEKGKSKKLKSVKELLGITIMERSSFEKNPIDFLEAKGYKEVKKDLIIKLPKYSLFELENGRKRMLASAGELQKGNELALPSKYVNFLYLASHYEKLKGSPEDNEQKQLFVEQHKHYLDEIIEQISEFSKRVILADANLDKVLSAYNKHRDKPIREQAENIIHLFTLTNLGAPAAFKYFDTTIDRKRYTSTKEVLDATLIHQSITGLYETRIDLSQLGGDGGGGGGSGGGGSGGGGSGGGGSGGGGSGGGGSGGMDPLQLLQPLEAEIKGTKLKAHWNSGATITCVPQAFLEEEVPIKNIWIKTIHGEKEQPVYYLTFKIQGRKVEAEVISSPYDYILVSPSDIPWLMKKPLQLTTLVPLQEYEERLLKQTMLTGSYKEKLQSLFLKYDALWQHWENQVGHRRIKPHHIATGTVNPRPQKQYPINPKAKASIQTVINDLLKQGVLIQQNSIMNTPVYPVPKPDGKWRMVLDYREVNKTIPLIAAQNQHSAGILSSIFRGKYKTTLDLSNGFWAHSITPESYWLTAFTWLGQQYCWTRLPQGFLNSPALFNADVVDLLKEVPNVQVYVDDIYISHDDPREHLEQLEKVFSLLLNAGYVVSLKKSEIAQHEVEFLGFNITKEGRGLTETFKQKLLNITPPRDLKQLQSILGKLNFARNFIPNFSELVKPLYNIIATAPGKYITWTTDNSQQLQNIISMLNSAENLEERNPEVRLIMKVNTSPSAGYIRFYNEFAKRPIMYLNYVYTKAEVKFTNTEKLLTTIHKGLIKALDLGMGQEILVYSPIVSMTKIQKTPLPERKALPIRWITWMSYLEDPRIQFHYDKTLPELQQVPTVTDDIIAKIKHPSEFSMVFYTDGSAIKHPNVNKSHNAGMGIAQVQFKPEFTVINTWSIPLGDHTAQLAEVAAVEFACKKALKIDGPVLIVTDSFYVAESVNKELPYWQSNGFFNNKKKPLKHVSKWKSIADCIQLKPDIIIIHEKGHQPTASTFHTEGNNLADKLATQGSYVVNAGKRTADGSEFEKRTADGSEFESPKKKAKVE

SEQ ID NO: 649 - protein, 2190 aa, synthetic construct
MPAAKRVKLDGGDKKYSIGLDIGTNSVGWAVITDEYKVPSKKFKVLGNTDRHSIKKNLIGALLFDSGETAEATRLKRTARRRYTRRKNRICYLQEIFSNEMAKVDDSFFHRLEESFLVEEDKKHERHPIFGNIVDEVAYHEKYPTIYHLRKKLVDSTDKADLRLIYLALAHMIKFRGHFLIEGDLNPDNSDVDKLFIQLVQTYNQLFEENPINASGVDAKAILSARLSKSRRLENLIAQLPGEKKNGLFGNLIALSLGLTPNFKSNFDLAEDAKLQLSKDTYDDDLDNLLAQIGDQYADLFLAAKNLSDAILLSDILRVNTEITKAPLSASMIKRYDEHHQDLTLLKALVRQQLPEKYKEIFFDQSKNGYAGYIDGGASQEEFYKFIKPILEKMDGTEELLVKLNREDLLRKQRTFDNGSIPHQIHLGELHAILRRQEDFYPFLKDNREKIEKILTFRIPYYVGPLARGNSRFAWMTRKSEETITPWNFEEVVDKGASAQSFIERMTNFDKNLPNEKVLPKHSLLYEYFTVYNELTKVKYVTEGMRKPAFLSGEQKKAIVDLLFKTNRKVTVKQLKEDYFKKIECFDSVEISGVEDRFNASLGTYHDLLKIIKDKDFLDNEENEDILEDIVLTLTLFEDREMIEERLKTYAHLFDDKVMKQLKRRRYTGWGRLSRKLINGIRDKQSGKTILDFLKSDGFANRNFMQLIHDDSLTFKEDIQKAQVSGQGDSLHEHIANLAGSPAIKKGILQTVKVVDELVKVMGRHKPENIVIEMARENQTTQKGQKNSRERMKRIEEGIKELGSQILKEHPVENTQLQNEKLYLYYLQNGRDMYVDQELDINRLSDYDVDHIVPQSFLKDDSIDNKVLTRSDKARGKSDNVPSEEVVKKMKNYWRQLLNAKLITQRKFDNLTKAERGGLSELDKAGFIKRQLVETRQITKHVAQILDSRMNTKYDENDKLIREVKVITLKSKLVSDFRKDFQFYKVREINNYHHAHDAYLNAVVGTALIKKYPKLESEFVYGDYKVYDVRKMIAKSEQEIGKATAKYFFYSNIMNFFKTEITLANGEIRKRPLIETNGETGEIVWDKGRDFATVRKVLSMPQVNIVKKTEVQTGGFSKESILPKRNSDKLIARKKDWDPKKYGGFDSPTVAYSVLVVAKVEKGKSKKLKSVKELLGITIMERSSFEKNPIDFLEAKGYKEVKKDLIIKLPKYSLFELENGRKRMLASAGELQKGNELALPSKYVNFLYLASHYEKLKGSPEDNEQKQLFVEQHKHYLDEIIEQISEFSKRVILADANLDKVLSAYNKHRDKPIREQAENIIHLFTLTNLGAPAAFKYFDTTIDRKRYTSTKEVLDATLIHQSITGLYETRIDLSQLGGDGGEAAAKEAAAKEAAAKEAAAKEAAAKGGMDPLQLLQPLEAEIKGTKLKAHWNSGATITCVPQAFLEEEVPIKNIWIKTIHGEKEQPVYYLTFKIQGRKVEAEVISSPYDYILVSPSDIPWLMKKPLQLTTLVPLQEYEERLLKQTMLTGSYKEKLQSLFLKYDALWQHWENQVGHRRIKPHHIATGTVNPRPQKQYPINPKAKASIQTVINDLLKQGVLIQQNSIMNTPVYPVPKPDGKWRMVLDYREVNKTIPLIAAQNQHSAGILSSIFRGKYKTTLDLSNGFWAHSITPESYWLTAFTWLGQQYCWTRLPQGFLNSPALFNADVVDLLKEVPNVQVYVDDIYISHDDPREHLEQLEKVFSLLLNAGYVVSLKKSEIAQHEVEFLGFNITKEGRGLTETFKQKLLNITPPRDLKQLQSILGKLNFARNFIPNFSELVKPLYNIIATAPGKYITWTTDNSQQLQNIISMLNSAENLEERNPEVRLIMKVNTSPSAGYIRFYNEFAKRPIMYLNYVYTKAEVKFTNTEKLLTTIHKGLIKALDLGMGQEILVYSPIVSMTKIQKTPLPERKALPIRWITWMSYLEDPRIQFHYDKTLPELQQVPTVTDDIIAKIKHPSEFSMVFYTDGSAIKHPNVNKSHNAGMGIAQVQFKPEFTVINTWSIPLGDHTAQLAEVAAVEFACKKALKIDGPVLIVTDSFYVAESVNKELPYWQSNGFFNNKKKPLKHVSKWKSIADCIQLKPDIIIIHEKGHQPTASTFHTEGNNLADKLATQGSYVVNAGKRTADGSEFEKRTADGSEFESPKKKAKVE

SEQ ID NO: 650 - protein, 2176 aa, synthetic construct
MPAAKRVKLDGGDKKYSIGLDIGTNSVGWAVITDEYKVPSKKFKVLGNTDRHSIKKNLIGALLFDSGETAEATRLKRTARRRYTRRKNRICYLQEIFSNEMAKVDDSFFHRLEESFLVEEDKKHERHPIFGNIVDEVAYHEKYPTIYHLRKKLVDSTDKADLRLIYLALAHMIKFRGHFLIEGDLNPDNSDVDKLFIQLVQTYNQLFEENPINASGVDAKAILSARLSKSRRLENLIAQLPGEKKNGLFGNLIALSLGLTPNFKSNFDLAEDAKLQLSKDTYDDDLDNLLAQIGDQYADLFLAAKNLSDAILLSDILRVNTEITKAPLSASMIKRYDEHHQDLTLLKALVRQQLPEKYKEIFFDQSKNGYAGYIDGGASQEEFYKFIKPILEKMDGTEELLVKLNREDLLRKQRTFDNGSIPHQIHLGELHAILRRQEDFYPFLKDNREKIEKILTFRIPYYVGPLARGNSRFAWMTRKSEETITPWNFEEVVDKGASAQSFIERMTNFDKNLPNEKVLPKHSLLYEYFTVYNELTKVKYVTEGMRKPAFLSGEQKKAIVDLLFKTNRKVTVKQLKEDYFKKIECFDSVEISGVEDRFNASLGTYHDLLKIIKDKDFLDNEENEDILEDIVLTLTLFEDREMIEERLKTYAHLFDDKVMKQLKRRRYTGWGRLSRKLINGIRDKQSGKTILDFLKSDGFANRNFMQLIHDDSLTFKEDIQKAQVSGQGDSLHEHIANLAGSPAIKKGILQTVKVVDELVKVMGRHKPENIVIEMARENQTTQKGQKNSRERMKRIEEGIKELGSQILKEHPVENTQLQNEKLYLYYLQNGRDMYVDQELDINRLSDYDVDHIVPQSFLKDDSIDNKVLTRSDKARGKSDNVPSEEVVKKMKNYWRQLLNAKLITQRKFDNLTKAERGGLSELDKAGFIKRQLVETRQITKHVAQILDSRMNTKYDENDKLIREVKVITLKSKLVSDFRKDFQFYKVREINNYHHAHDAYLNAVVGTALIKKYPKLESEFVYGDYKVYDVRKMIAKSEQEIGKATAKYFFYSNIMNFFKTEITLANGEIRKRPLIETNGETGEIVWDKGRDFATVRKVLSMPQVNIVKKTEVQTGGFSKESILPKRNSDKLIARKKDWDPKKYGGFDSPTVAYSVLVVAKVEKGKSKKLKSVKELLGITIMERSSFEKNPIDFLEAKGYKEVKKDLIIKLPKYSLFELENGRKRMLASAGELQKGNELALPSKYVNFLYLASHYEKLKGSPEDNEQKQLFVEQHKHYLDEIIEQISEFSKRVILADANLDKVLSAYNKHRDKPIREQAENIIHLFTLTNLGAPAAFKYFDTTIDRKRYTSTKEVLDATLIHQSITGLYETRIDLSQLGGDGGPAPGSSEAAAKGGMDPLQLLQPLEAEIKGTKLKAHWNSGATITCVPQAFLEEEVPIKNIWIKTIHGEKEQPVYYLTFKIQGRKVEAEVISSPYDYILVSPSDIPWLMKKPLQLTTLVPLQEYEERLLKQTMLTGSYKEKLQSLFLKYDALWQHWENQVGHRRIKPHHIATGTVNPRPQKQYPINPKAKASIQTVINDLLKQGVLIQQNSIMNTPVYPVPKPDGKWRMVLDYREVNKTIPLIAAQNQHSAGILSSIFRGKYKTTLDLSNGFWAHSITPESYWLTAFTWLGQQYCWTRLPQGFLNSPALFNADVVDLLKEVPNVQVYVDDIYISHDDPREHLEQLEKVFSLLLNAGYVVSLKKSEIAQHEVEFLGFNITKEGRGLTETFKQKLLNITPPRDLKQLQSILGKLNFARNFIPNFSELVKPLYNIIATAPGKYITWTTDNSQQLQNIISMLNSAENLEERNPEVRLIMKVNTSPSAGYIRFYNEFAKRPIMYLNYVYTKAEVKFTNTEKLLTTIHKGLIKALDLGMGQEILVYSPIVSMTKIQKTPLPERKALPIRWITWMSYLEDPRIQFHYDKTLPELQQVPTVTDDIIAKIKHPSEFSMVFYTDGSAIKHPNVNKSHNAGMGIAQVQFKPEFTVINTWSIPLGDHTAQLAEVAAVEFACKKALKIDGPVLIVTDSFYVAESVNKELPYWQSNGFFNNKKKPLKHVSKWKSIADCIQLKPDIIIIHEKGHQPTASTFHTEGNNLADKLATQGSYVVNAGKRTADGSEFEKRTADGSEFESPKKKAKVE

SEQ ID NO: 651 - protein, 2195 aa, synthetic construct
MPAAKRVKLDGGDKKYSIGLDIGTNSVGWAVITDEYKVPSKKFKVLGNTDRHSIKKNLIGALLFDSGETAEATRLKRTARRRYTRRKNRICYLQEIFSNEMAKVDDSFFHRLEESFLVEEDKKHERHPIFGNIVDEVAYHEKYPTIYHLRKKLVDSTDKADLRLIYLALAHMIKFRGHFLIEGDLNPDNSDVDKLFIQLVQTYNQLFEENPINASGVDAKAILSARLSKSRRLENLIAQLPGEKKNGLFGNLIALSLGLTPNFKSNFDLAEDAKLQLSKDTYDDDLDNLLAQIGDQYADLFLAAKNLSDAILLSDILRVNTEITKAPLSASMIKRYDEHHQDLTLLKALVRQQLPEKYKEIFFDQSKNGYAGYIDGGASQEEFYKFIKPILEKMDGTEELLVKLNREDLLRKQRTFDNGSIPHQIHLGELHAILRRQEDFYPFLKDNREKIEKILTFRIPYYVGPLARGNSRFAWMTRKSEETITPWNFEEVVDKGASAQSFIERMTNFDKNLPNEKVLPKHSLLYEYFTVYNELTKVKYVTEGMRKPAFLSGEQKKAIVDLLFKTNRKVTVKQLKEDYFKKIECFDSVEISGVEDRFNASLGTYHDLLKIIKDKDFLDNEENEDILEDIVLTLTLFEDREMIEERLKTYAHLFDDKVMKQLKRRRYTGWGRLSRKLINGIRDKQSGKTILDFLKSDGFANRNFMQLIHDDSLTFKEDIQKAQVSGQGDSLHEHIANLAGSPAIKKGILQTVKVVDELVKVMGRHKPENIVIEMARENQTTQKGQKNSRERMKRIEEGIKELGSQILKEHPVENTQLQNEKLYLYYLQNGRDMYVDQELDINRLSDYDVDHIVPQSFLKDDSIDNKVLTRSDKARGKSDNVPSEEVVKKMKNYWRQLLNAKLITQRKFDNLTKAERGGLSELDKAGFIKRQLVETRQITKHVAQILDSRMNTKYDENDKLIREVKVITLKSKLVSDFRKDFQFYKVREINNYHHAHDAYLNAVVGTALIKKYPKLESEFVYGDYKVYDVRKMIAKSEQEIGKATAKYFFYSNIMNFFKTEITLANGEIRKRPLIETNGETGEIVWDKGRDFATVRKVLSMPQVNIVKKTEVQTGGFSKESILPKRNSDKLIARKKDWDPKKYGGFDSPTVAYSVLVVAKVEKGKSKKLKSVKELLGITIMERSSFEKNPIDFLEAKGYKEVKKDLIIKLPKYSLFELENGRKRMLASAGELQKGNELALPSKYVNFLYLASHYEKLKGSPEDNEQKQLFVEQHKHYLDEIIEQISEFSKRVILADANLDKVLSAYNKHRDKPIREQAENIIHLFTLTNLGAPAAFKYFDTTIDRKRYTSTKEVLDATLIHQSITGLYETRIDLSQLGGDGGEAAAKEAAAKEAAAKEAAAKEAAAKEAAAKGGMDPLQLLQPLEAEIKGTKLKAHWNSGATITCVPQAFLEEEVPIKNIWIKTIHGEKEQPVYYLTFKIQGRKVEAEVISSPYDYILVSPSDIPWLMKKPLQLTTLVPLQEYEERLLKQTMLTGSYKEKLQSLFLKYDALWQHWENQVGHRRIKPHHIATGTVNPRPQKQYPINPKAKASIQTVINDLLKQGVLIQQNSIMNTPVYPVPKPDGKWRMVLDYREVNKTIPLIAAQNQHSAGILSSIFRGKYKTTLDLSNGFWAHSITPESYWLTAFTWLGQQYCWTRLPQGFLNSPALFNADVVDLLKEVPNVQVYVDDIYISHDDPREHLEQLEKVFSLLLNAGYVVSLKKSEIAQHEVEFLGFNITKEGRGLTETFKQKLLNITPPRDLKQLQSILGKLNFARNFIPNFSELVKPLYNIIATAPGKYITWTTDNSQQLQNIISMLNSAENLEERNPEVRLIMKVNTSPSAGYIRFYNEFAKRPIMYLNYVYTKAEVKFTNTEKLLTTIHKGLIKALDLGMGQEILVYSPIVSMTKIQKTPLPERKALPIRWITWMSYLEDPRIQFHYDKTLPELQQVPTVTDDIIAKIKHPSEFSMVFYTDGSAIKHPNVNKSHNAGMGIAQVQFKPEFTVINTWSIPLGDHTAQLAEVAAVEFACKKALKIDGPVLIVTDSFYVAESVNKELPYWQSNGFFNNKKKPLKHVSKWKSIADCIQLKPDIIIIHEKGHQPTASTFHTEGNNLADKLATQGSYVVNAGKRTADGSEFEKRTADGSEFESPKKKAKVE

SEQ ID NO: 652 - protein, 2198 aa, synthetic construct
MPAAKRVKLDGGDKKYSIGLDIGTNSVGWAVITDEYKVPSKKFKVLGNTDRHSIKKNLIGALLFDSGETAEATRLKRTARRRYTRRKNRICYLQEIFSNEMAKVDDSFFHRLEESFLVEEDKKHERHPIFGNIVDEVAYHEKYPTIYHLRKKLVDSTDKADLRLIYLALAHMIKFRGHFLIEGDLNPDNSDVDKLFIQLVQTYNQLFEENPINASGVDAKAILSARLSKSRRLENLIAQLPGEKKNGLFGNLIALSLGLTPNFKSNFDLAEDAKLQLSKDTYDDDLDNLLAQIGDQYADLFLAAKNLSDAILLSDILRVNTEITKAPLSASMIKRYDEHHQDLTLLKALVRQQLPEKYKEIFFDQSKNGYAGYIDGGASQEEFYKFIKPILEKMDGTEELLVKLNREDLLRKQRTFDNGSIPHQIHLGELHAILRRQEDFYPFLKDNREKIEKILTFRIPYYVGPLARGNSRFAWMTRKSEETITPWNFEEVVDKGASAQSFIERMTNFDKNLPNEKVLPKHSLLYEYFTVYNELTKVKYVTEGMRKPAFLSGEQKKAIVDLLFKTNRKVTVKQLKEDYFKKIECFDSVEISGVEDRFNASLGTYHDLLKIIKDKDFLDNEENEDILEDIVLTLTLFEDREMIEERLKTYAHLFDDKVMKQLKRRRYTGWGRLSRKLINGIRDKQSGKTILDFLKSDGFANRNFMQLIHDDSLTFKEDIQKAQVSGQGDSLHEHIANLAGSPAIKKGILQTVKVVDELVKVMGRHKPENIVIEMARENQTTQKGQKNSRERMKRIEEGIKELGSQILKEHPVENTQLQNEKLYLYYLQNGRDMYVDQELDINRLSDYDVDHIVPQSFLKDDSIDNKVLTRSDKARGKSDNVPSEEVVKKMKNYWRQLLNAKLITQRKFDNLTKAERGGLSELDKAGFIKRQLVETRQITKHVAQILDSRMNTKYDENDKLIREVKVITLKSKLVSDFRKDFQFYKVREINNYHHAHDAYLNAVVGTALIKKYPKLESEFVYGDYKVYDVRKMIAKSEQEIGKATAKYFFYSNIMNFFKTEITLANGEIRKRPLIETNGETGEIVWDKGRDFATVRKVLSMPQVNIVKKTEVQTGGFSKESILPKRNSDKLIARKKDWDPKKYGGFDSPTVAYSVLVVAKVEKGKSKKLKSVKELLGITIMERSSFEKNPIDFLEAKGYKEVKKDLIIKLPKYSLFELENGRKRMLASAGELQKGNELALPSKYVNFLYLASHYEKLKGSPEDNEQKQLFVEQHKHYLDEIIEQISEFSKRVILADANLDKVLSAYNKHRDKPIREQAENIIHLFTLTNLGAPAAFKYFDTTIDRKRYTSTKEVLDATLIHQSITGLYETRIDLSQLGGDGGSGGSSGGSSGSETPGTSESATPESSGGSSGGSSGGMDPLQLLQPLEAEIKGTKLKAHWNSGATITCVPQAFLEEEVPIKNIWIKTIHGEKEQPVYYLTFKIQGRKVEAEVISSPYDYILVSPSDIPWLMKKPLQLTTLVPLQEYEERLLKQTMLTGSYKEKLQSLFLKYDALWQHWENQVGHRRIKPHHIATGTVNPRPQKQYPINPKAKASIQTVINDLLKQGVLIQQNSIMNTPVYPVPKPDGKWRMVLDYREVNKTIPLIAAQNQHSAGILSSIFRGKYKTTLDLSNGFWAHSITPESYWLTAFTWLGQQYCWTRLPQGFLNSPALFNADVVDLLKEVPNVQVYVDDIYISHDDPREHLEQLEKVFSLLLNAGYVVSLKKSEIAQHEVEFLGFNITKEGRGLTETFKQKLLNITPPRDLKQLQSILGKLNFARNFIPNFSELVKPLYNIIATAPGKYITWTTDNSQQLQNIISMLNSAENLEERNPEVRLIMKVNTSPSAGYIRFYNEFAKRPIMYLNYVYTKAEVKFTNTEKLLTTIHKGLIKALDLGMGQEILVYSPIVSMTKIQKTPLPERKALPIRWITWMSYLEDPRIQFHYDKTLPELQQVPTVTDDIIAKIKHPSEFSMVFYTDGSAIKHPNVNKSHNAGMGIAQVQFKPEFTVINTWSIPLGDHTAQLAEVAAVEFACKKALKIDGPVLIVTDSFYVAESVNKELPYWQSNGFFNNKKKPLKHVSKWKSIADCIQLKPDIIIIHEKGHQPTASTFHTEGNNLADKLATQGSYVVNAGKRTADGSEFEKRTADGSEFESPKKKAKVE

SEQ ID NO: 653 - protein, 2176 aa, synthetic construct
MPAAKRVKLDGGDKKYSIGLDIGTNSVGWAVITDEYKVPSKKFKVLGNTDRHSIKKNLIGALLFDSGETAEATRLKRTARRRYTRRKNRICYLQEIFSNEMAKVDDSFFHRLEESFLVEEDKKHERHPIFGNIVDEVAYHEKYPTIYHLRKKLVDSTDKADLRLIYLALAHMIKFRGHFLIEGDLNPDNSDVDKLFIQLVQTYNQLFEENPINASGVDAKAILSARLSKSRRLENLIAQLPGEKKNGLFGNLIALSLGLTPNFKSNFDLAEDAKLQLSKDTYDDDLDNLLAQIGDQYADLFLAAKNLSDAILLSDILRVNTEITKAPLSASMIKRYDEHHQDLTLLKALVRQQLPEKYKEIFFDQSKNGYAGYIDGGASQEEFYKFIKPILEKMDGTEELLVKLNREDLLRKQRTFDNGSIPHQIHLGELHAILRRQEDFYPFLKDNREKIEKILTFRIPYYVGPLARGNSRFAWMTRKSEETITPWNFEEVVDKGASAQSFIERMTNFDKNLPNEKVLPKHSLLYEYFTVYNELTKVKYVTEGMRKPAFLSGEQKKAIVDLLFKTNRKVTVKQLKEDYFKKIECFDSVEISGVEDRFNASLGTYHDLLKIIKDKDFLDNEENEDILEDIVLTLTLFEDREMIEERLKTYAHLFDDKVMKQLKRRRYTGWGRLSRKLINGIRDKQSGKTILDFLKSDGFANRNFMQLIHDDSLTFKEDIQKAQVSGQGDSLHEHIANLAGSPAIKKGILQTVKVVDELVKVMGRHKPENIVIEMARENQTTQKGQKNSRERMKRIEEGIKELGSQILKEHPVENTQLQNEKLYLYYLQNGRDMYVDQELDINRLSDYDVDHIVPQSFLKDDSIDNKVLTRSDKARGKSDNVPSEEVVKKMKNYWRQLLNAKLITQRKFDNLTKAERGGLSELDKAGFIKRQLVETRQITKHVAQILDSRMNTKYDENDKLIREVKVITLKSKLVSDFRKDFQFYKVREINNYHHAHDAYLNAVVGTALIKKYPKLESEFVYGDYKVYDVRKMIAKSEQEIGKATAKYFFYSNIMNFFKTEITLANGEIRKRPLIETNGETGEIVWDKGRDFATVRKVLSMPQVNIVKKTEVQTGGFSKESILPKRNSDKLIARKKDWDPKKYGGFDSPTVAYSVLVVAKVEKGKSKKLKSVKELLGITIMERSSFEKNPIDFLEAKGYKEVKKDLIIKLPKYSLFELENGRKRMLASAGELQKGNELALPSKYVNFLYLASHYEKLKGSPEDNEQKQLFVEQHKHYLDEIIEQISEFSKRVILADANLDKVLSAYNKHRDKPIREQAENIIHLFTLTNLGAPAAFKYFDTTIDRKRYTSTKEVLDATLIHQSITGLYETRIDLSQLGGDGGGGGGGSEAAAKGGMDPLQLLQPLEAEIKGTKLKAHWNSGATITCVPQAFLEEEVPIKNIWIKTIHGEKEQPVYYLTFKIQGRKVEAEVISSPYDYILVSPSDIPWLMKKPLQLTTLVPLQEYEERLLKQTMLTGSYKEKLQSLFLKYDALWQHWENQVGHRRIKPHHIATGTVNPRPQKQYPINPKAKASIQTVINDLLKQGVLIQQNSIMNTPVYPVPKPDGKWRMVLDYREVNKTIPLIAAQNQHSAGILSSIFRGKYKTTLDLSNGFWAHSITPESYWLTAFTWLGQQYCWTRLPQGFLNSPALFNADVVDLLKEVPNVQVYVDDIYISHDDPREHLEQLEKVFSLLLNAGYVVSLKKSEIAQHEVEFLGFNITKEGRGLTETFKQKLLNITPPRDLKQLQSILGKLNFARNFIPNFSELVKPLYNIIATAPGKYITWTTDNSQQLQNIISMLNSAENLEERNPEVRLIMKVNTSPSAGYIRFYNEFAKRPIMYLNYVYTKAEVKFTNTEKLLTTIHKGLIKALDLGMGQEILVYSPIVSMTKIQKTPLPERKALPIRWITWMSYLEDPRIQFHYDKTLPELQQVPTVTDDIIAKIKHPSEFSMVFYTDGSAIKHPNVNKSHNAGMGIAQVQFKPEFTVINTWSIPLGDHTAQLAEVAAVEFACKKALKIDGPVLIVTDSFYVAESVNKELPYWQSNGFFNNKKKPLKHVSKWKSIADCIQLKPDIIIIHEKGHQPTASTFHTEGNNLADKLATQGSYVVNAGKRTADGSEFEKRTADGSEFESPKKKAKVE

SEQ ID NO: 654 - protein, 2178 aa, synthetic construct
MPAAKRVKLDGGDKKYSIGLDIGTNSVGWAVITDEYKVPSKKFKVLGNTDRHSIKKNLIGALLFDSGETAEATRLKRTARRRYTRRKNRICYLQEIFSNEMAKVDDSFFHRLEESFLVEEDKKHERHPIFGNIVDEVAYHEKYPTIYHLRKKLVDSTDKADLRLIYLALAHMIKFRGHFLIEGDLNPDNSDVDKLFIQLVQTYNQLFEENPINASGVDAKAILSARLSKSRRLENLIAQLPGEKKNGLFGNLIALSLGLTPNFKSNFDLAEDAKLQLSKDTYDDDLDNLLAQIGDQYADLFLAAKNLSDAILLSDILRVNTEITKAPLSASMIKRYDEHHQDLTLLKALVRQQLPEKYKEIFFDQSKNGYAGYIDGGASQEEFYKFIKPILEKMDGTEELLVKLNREDLLRKQRTFDNGSIPHQIHLGELHAILRRQEDFYPFLKDNREKIEKILTFRIPYYVGPLARGNSRFAWMTRKSEETITPWNFEEVVDKGASAQSFIERMTNFDKNLPNEKVLPKHSLLYEYFTVYNELTKVKYVTEGMRKPAFLSGEQKKAIVDLLFKTNRKVTVKQLKEDYFKKIECFDSVEISGVEDRFNASLGTYHDLLKIIKDKDFLDNEENEDILEDIVLTLTLFEDREMIEERLKTYAHLFDDKVMKQLKRRRYTGWGRLSRKLINGIRDKQSGKTILDFLKSDGFANRNFMQLIHDDSLTFKEDIQKAQVSGQGDSLHEHIANLAGSPAIKKGILQTVKVVDELVKVMGRHKPENIVIEMARENQTTQKGQKNSRERMKRIEEGIKELGSQILKEHPVENTQLQNEKLYLYYLQNGRDMYVDQELDINRLSDYDVDHIVPQSFLKDDSIDNKVLTRSDKARGKSDNVPSEEVVKKMKNYWRQLLNAKLITQRKFDNLTKAERGGLSELDKAGFIKRQLVETRQITKHVAQILDSRMNTKYDENDKLIREVKVITLKSKLVSDFRKDFQFYKVREINNYHHAHDAYLNAVVGTALIKKYPKLESEFVYGDYKVYDVRKMIAKSEQEIGKATAKYFFYSNIMNFFKTEITLANGEIRKRPLIETNGETGEIVWDKGRDFATVRKVLSMPQVNIVKKTEVQTGGFSKESILPKRNSDKLIARKKDWDPKKYGGFDSPTVAYSVLVVAKVEKGKSKKLKSVKELLGITIMERSSFEKNPIDFLEAKGYKEVKKDLIIKLPKYSLFELENGRKRMLASAGELQKGNELALPSKYVNFLYLASHYEKLKGSPEDNEQKQLFVEQHKHYLDEIIEQISEFSKRVILADANLDKVLSAYNKHRDKPIREQAENIIHLFTLTNLGAPAAFKYFDTTIDRKRYTSTKEVLDATLIHQSITGLYETRIDLSQLGGDGGPAPAPAPAPAPAPGGMDPLQLLQPLEAEIKGTKLKAHWNSGATITCVPQAFLEEEVPIKNIWIKTIHGEKEQPVYYLTFKIQGRKVEAEVISSPYDYILVSPSDIPWLMKKPLQLTTLVPLQEYEERLLKQTMLTGSYKEKLQSLFLKYDALWQHWENQVGHRRIKPHHIATGTVNPRPQKQYPINPKAKASIQTVINDLLKQGVLIQQNSIMNTPVYPVPKPDGKWRMVLDYREVNKTIPLIAAQNQHSAGILSSIFRGKYKTTLDLSNGFWAHSITPESYWLTAFTWLGQQYCWTRLPQGFLNSPALFNADVVDLLKEVPNVQVYVDDIYISHDDPREHLEQLEKVFSLLLNAGYVVSLKKSEIAQHEVEFLGFNITKEGRGLTETFKQKLLNITPPRDLKQLQSILGKLNFARNFIPNFSELVKPLYNIIATAPGKYITWTTDNSQQLQNIISMLNSAENLEERNPEVRLIMKVNTSPSAGYIRFYNEFAKRPIMYLNYVYTKAEVKFTNTEKLLTTIHKGLIKALDLGMGQEILVYSPIVSMTKIQKTPLPERKALPIRWITWMSYLEDPRIQFHYDKTLPELQQVPTVTDDIIAKIKHPSEFSMVFYTDGSAIKHPNVNKSHNAGMGIAQVQFKPEFTVINTWSIPLGDHTAQLAEVAAVEFACKKALKIDGPVLIVTDSFYVAESVNKELPYWQSNGFFNNKKKPLKHVSKWKSIADCIQLKPDIIIIHEKGHQPTASTFHTEGNNLADKLATQGSYVVNAGKRTADGSEFEKRTADGSEFESPKKKAKVE

SEQ ID NO: 655 - protein, 2176 aa, synthetic construct
MPAAKRVKLDGGDKKYSIGLDIGTNSVGWAVITDEYKVPSKKFKVLGNTDRHSIKKNLIGALLFDSGETAEATRLKRTARRRYTRRKNRICYLQEIFSNEMAKVDDSFFHRLEESFLVEEDKKHERHPIFGNIVDEVAYHEKYPTIYHLRKKLVDSTDKADLRLIYLALAHMIKFRGHFLIEGDLNPDNSDVDKLFIQLVQTYNQLFEENPINASGVDAKAILSARLSKSRRLENLIAQLPGEKKNGLFGNLIALSLGLTPNFKSNFDLAEDAKLQLSKDTYDDDLDNLLAQIGDQYADLFLAAKNLSDAILLSDILRVNTEITKAPLSASMIKRYDEHHQDLTLLKALVRQQLPEKYKEIFFDQSKNGYAGYIDGGASQEEFYKFIKPILEKMDGTEELLVKLNREDLLRKQRTFDNGSIPHQIHLGELHAILRRQEDFYPFLKDNREKIEKILTFRIPYYVGPLARGNSRFAWMTRKSEETITPWNFEEVVDKGASAQSFIERMTNFDKNLPNEKVLPKHSLLYEYFTVYNELTKVKYVTEGMRKPAFLSGEQKKAIVDLLFKTNRKVTVKQLKEDYFKKIECFDSVEISGVEDRFNASLGTYHDLLKIIKDKDFLDNEENEDILEDIVLTLTLFEDREMIEERLKTYAHLFDDKVMKQLKRRRYTGWGRLSRKLINGIRDKQSGKTILDFLKSDGFANRNFMQLIHDDSLTFKEDIQKAQVSGQGDSLHEHIANLAGSPAIKKGILQTVKVVDELVKVMGRHKPENIVIEMARENQTTQKGQKNSRERMKRIEEGIKELGSQILKEHPVENTQLQNEKLYLYYLQNGRDMYVDQELDINRLSDYDVDHIVPQSFLKDDSIDNKVLTRSDKARGKSDNVPSEEVVKKMKNYWRQLLNAKLITQRKFDNLTKAERGGLSELDKAGFIKRQLVETRQITKHVAQILDSRMNTKYDENDKLIREVKVITLKSKLVSDFRKDFQFYKVREINNYHHAHDAYLNAVVGTALIKKYPKLESEFVYGDYKVYDVRKMIAKSEQEIGKATAKYFFYSNIMNFFKTEITLANGEIRKRPLIETNGETGEIVWDKGRDFATVRKVLSMPQVNIVKKTEVQTGGFSKESILPKRNSDKLIARKKDWDPKKYGGFDSPTVAYSVLVVAKVEKGKSKKLKSVKELLGITIMERSSFEKNPIDFLEAKGYKEVKKDLIIKLPKYSLFELENGRKRMLASAGELQKGNELALPSKYVNFLYLASHYEKLKGSPEDNEQKQLFVEQHKHYLDEIIEQISEFSKRVILADANLDKVLSAYNKHRDKPIREQAENIIHLFTLTNLGAPAAFKYFDTTIDRKRYTSTKEVLDATLIHQSITGLYETRIDLSQLGGDGGGGGGSSEAAAKGGMDPLQLLQPLEAEIKGTKLKAHWNSGATITCVPQAFLEEEVPIKNIWIKTIHGEKEQPVYYLTFKIQGRKVEAEVISSPYDYILVSPSDIPWLMKKPLQLTTLVPLQEYEERLLKQTMLTGSYKEKLQSLFLKYDALWQHWENQVGHRRIKPHHIATGTVNPRPQKQYPINPKAKASIQTVINDLLKQGVLIQQNSIMNTPVYPVPKPDGKWRMVLDYREVNKTIPLIAAQNQHSAGILSSIFRGKYKTTLDLSNGFWAHSITPESYWLTAFTWLGQQYCWTRLPQGFLNSPALFNADVVDLLKEVPNVQVYVDDIYISHDDPREHLEQLEKVFSLLLNAGYVVSLKKSEIAQHEVEFLGFNITKEGRGLTETFKQKLLNITPPRDLKQLQSILGKLNFARNFIPNFSELVKPLYNIIATAPGKYITWTTDNSQQLQNIISMLNSAENLEERNPEVRLIMKVNTSPSAGYIRFYNEFAKRPIMYLNYVYTKAEVKFTNTEKLLTTIHKGLIKALDLGMGQEILVYSPIVSMTKIQKTPLPERKALPIRWITWMSYLEDPRIQFHYDKTLPELQQVPTVTDDIIAKIKHPSEFSMVFYTDGSAIKHPNVNKSHNAGMGIAQVQFKPEFTVINTWSIPLGDHTAQLAEVAAVEFACKKALKIDGPVLIVTDSFYVAESVNKELPYWQSNGFFNNKKKPLKHVSKWKSIADCIQLKPDIIIIHEKGHQPTASTFHTEGNNLADKLATQGSYVVNAGKRTADGSEFEKRTADGSEFESPKKKAKVE

SEQ ID NO: 656 - protein, 2181 aa, synthetic construct
MPAAKRVKLDGGDKKYSIGLDIGTNSVGWAVITDEYKVPSKKFKVLGNTDRHSIKKNLIGALLFDSGETAEATRLKRTARRRYTRRKNRICYLQEIFSNEMAKVDDSFFHRLEESFLVEEDKKHERHPIFGNIVDEVAYHEKYPTIYHLRKKLVDSTDKADLRLIYLALAHMIKFRGHFLIEGDLNPDNSDVDKLFIQLVQTYNQLFEENPINASGVDAKAILSARLSKSRRLENLIAQLPGEKKNGLFGNLIALSLGLTPNFKSNFDLAEDAKLQLSKDTYDDDLDNLLAQIGDQYADLFLAAKNLSDAILLSDILRVNTEITKAPLSASMIKRYDEHHQDLTLLKALVRQQLPEKYKEIFFDQSKNGYAGYIDGGASQEEFYKFIKPILEKMDGTEELLVKLNREDLLRKQRTFDNGSIPHQIHLGELHAILRRQEDFYPFLKDNREKIEKILTFRIPYYVGPLARGNSRFAWMTRKSEETITPWNFEEVVDKGASAQSFIERMTNFDKNLPNEKVLPKHSLLYEYFTVYNELTKVKYVTEGMRKPAFLSGEQKKAIVDLLFKTNRKVTVKQLKEDYFKKIECFDSVEISGVEDRFNASLGTYHDLLKIIKDKDFLDNEENEDILEDIVLTLTLFEDREMIEERLKTYAHLFDDKVMKQLKRRRYTGWGRLSRKLINGIRDKQSGKTILDFLKSDGFANRNFMQLIHDDSLTFKEDIQKAQVSGQGDSLHEHIANLAGSPAIKKGILQTVKVVDELVKVMGRHKPENIVIEMARENQTTQKGQKNSRERMKRIEEGIKELGSQILKEHPVENTQLQNEKLYLYYLQNGRDMYVDQELDINRLSDYDVDHIVPQSFLKDDSIDNKVLTRSDKARGKSDNVPSEEVVKKMKNYWRQLLNAKLITQRKFDNLTKAERGGLSELDKAGFIKRQLVETRQITKHVAQILDSRMNTKYDENDKLIREVKVITLKSKLVSDFRKDFQFYKVREINNYHHAHDAYLNAVVGTALIKKYPKLESEFVYGDYKVYDVRKMIAKSEQEIGKATAKYFFYSNIMNFFKTEITLANGEIRKRPLIETNGETGEIVWDKGRDFATVRKVLSMPQVNIVKKTEVQTGGFSKESILPKRNSDKLIARKKDWDPKKYGGFDSPTVAYSVLVVAKVEKGKSKKLKSVKELLGITIMERSSFEKNPIDFLEAKGYKEVKKDLIIKLPKYSLFELENGRKRMLASAGELQKGNELALPSKYVNFLYLASHYEKLKGSPEDNEQKQLFVEQHKHYLDEIIEQISEFSKRVILADANLDKVLSAYNKHRDKPIREQAENIIHLFTLTNLGAPAAFKYFDTTIDRKRYTSTKEVLDATLIHQSITGLYETRIDLSQLGGDGGSGSETPGTSESATPESGGMDPLQLLQPLEAEIKGTKLKAHWNSGATITCVPQAFLEEEVPIKNIWIKTIHGEKEQPVYYLTFKIQGRKVEAEVISSPYDYILVSPSDIPWLMKKPLQLTTLVPLQEYEERLLKQTMLTGSYKEKLQSLFLKYDALWQHWENQVGHRRIKPHHIATGTVNPRPQKQYPINPKAKASIQTVINDLLKQGVLIQQNSIMNTPVYPVPKPDGKWRMVLDYREVNKTIPLIAAQNQHSAGILSSIFRGKYKTTLDLSNGFWAHSITPESYWLTAFTWLGQQYCWTRLPQGFLNSPALFNADVVDLLKEVPNVQVYVDDIYISHDDPREHLEQLEKVFSLLLNAGYVVSLKKSEIAQHEVEFLGFNITKEGRGLTETFKQKLLNITPPRDLKQLQSILGKLNFARNFIPNFSELVKPLYNIIATAPGKYITWTTDNSQQLQNIISMLNSAENLEERNPEVRLIMKVNTSPSAGYIRFYNEFAKRPIMYLNYVYTKAEVKFTNTEKLLTTIHKGLIKALDLGMGQEILVYSPIVSMTKIQKTPLPERKALPIRWITWMSYLEDPRIQFHYDKTLPELQQVPTVTDDIIAKIKHPSEFSMVFYTDGSAIKHPNVNKSHNAGMGIAQVQFKPEFTVINTWSIPLGDHTAQLAEVAAVEFACKKALKIDGPVLIVTDSFYVAESVNKELPYWQSNGFFNNKKKPLKHVSKWKSIADCIQLKPDIIIIHEKGHQPTASTFHTEGNNLADKLATQGSYVVNAGKRTADGSEFEKRTADGSEFESPKKKAKVE

SEQ ID NO: 657 - protein, 2177 aa, synthetic construct
MPAAKRVKLDGGDKKYSIGLDIGTNSVGWAVITDEYKVPSKKFKVLGNTDRHSIKKNLIGALLFDSGETAEATRLKRTARRRYTRRKNRICYLQEIFSNEMAKVDDSFFHRLEESFLVEEDKKHERHPIFGNIVDEVAYHEKYPTIYHLRKKLVDSTDKADLRLIYLALAHMIKFRGHFLIEGDLNPDNSDVDKLFIQLVQTYNQLFEENPINASGVDAKAILSARLSKSRRLENLIAQLPGEKKNGLFGNLIALSLGLTPNFKSNFDLAEDAKLQLSKDTYDDDLDNLLAQIGDQYADLFLAAKNLSDAILLSDILRVNTEITKAPLSASMIKRYDEHHQDLTLLKALVRQQLPEKYKEIFFDQSKNGYAGYIDGGASQEEFYKFIKPILEKMDGTEELLVKLNREDLLRKQRTFDNGSIPHQIHLGELHAILRRQEDFYPFLKDNREKIEKILTFRIPYYVGPLARGNSRFAWMTRKSEETITPWNFEEVVDKGASAQSFIERMTNFDKNLPNEKVLPKHSLLYEYFTVYNELTKVKYVTEGMRKPAFLSGEQKKAIVDLLFKTNRKVTVKQLKEDYFKKIECFDSVEISGVEDRFNASLGTYHDLLKIIKDKDFLDNEENEDILEDIVLTLTLFEDREMIEERLKTYAHLFDDKVMKQLKRRRYTGWGRLSRKLINGIRDKQSGKTILDFLKSDGFANRNFMQLIHDDSLTFKEDIQKAQVSGQGDSLHEHIANLAGSPAIKKGILQTVKVVDELVKVMGRHKPENIVIEMARENQTTQKGQKNSRERMKRIEEGIKELGSQILKEHPVENTQLQNEKLYLYYLQNGRDMYVDQELDINRLSDYDVDHIVPQSFLKDDSIDNKVLTRSDKARGKSDNVPSEEVVKKMKNYWRQLLNAKLITQRKFDNLTKAERGGLSELDKAGFIKRQLVETRQITKHVAQILDSRMNTKYDENDKLIREVKVITLKSKLVSDFRKDFQFYKVREINNYHHAHDAYLNAVVGTALIKKYPKLESEFVYGDYKVYDVRKMIAKSEQEIGKATAKYFFYSNIMNFFKTEITLANGEIRKRPLIETNGETGEIVWDKGRDFATVRKVLSMPQVNIVKKTEVQTGGFSKESILPKRNSDKLIARKKDWDPKKYGGFDSPTVAYSVLVVAKVEKGKSKKLKSVKELLGITIMERSSFEKNPIDFLEAKGYKEVKKDLIIKLPKYSLFELENGRKRMLASAGELQKGNELALPSKYVNFLYLASHYEKLKGSPEDNEQKQLFVEQHKHYLDEIIEQISEFSKRVILADANLDKVLSAYNKHRDKPIREQAENIIHLFTLTNLGAPAAFKYFDTTIDRKRYTSTKEVLDATLIHQSITGLYETRIDLSQLGGDGGGSAGSAAGSGEFGGMDPLQLLQPLEAEIKGTKLKAHWNSGATITCVPQAFLEEEVPIKNIWIKTIHGEKEQPVYYLTFKIQGRKVEAEVISSPYDYILVSPSDIPWLMKKPLQLTTLVPLQEYEERLLKQTMLTGSYKEKLQSLFLKYDALWQHWENQVGHRRIKPHHIATGTVNPRPQKQYPINPKAKASIQTVINDLLKQGVLIQQNSIMNTPVYPVPKPDGKWRMVLDYREVNKTIPLIAAQNQHSAGILSSIFRGKYKTTLDLSNGFWAHSITPESYWLTAFTWLGQQYCWTRLPQGFLNSPALFNADVVDLLKEVPNVQVYVDDIYISHDDPREHLEQLEKVFSLLLNAGYVVSLKKSEIAQHEVEFLGFNITKEGRGLTETFKQKLLNITPPRDLKQLQSILGKLNFARNFIPNFSELVKPLYNIIATAPGKYITWTTDNSQQLQNIISMLNSAENLEERNPEVRLIMKVNTSPSAGYIRFYNEFAKRPIMYLNYVYTKAEVKFTNTEKLLTTIHKGLIKALDLGMGQEILVYSPIVSMTKIQKTPLPERKALPIRWITWMSYLEDPRIQFHYDKTLPELQQVPTVTDDIIAKIKHPSEFSMVFYTDGSAIKHPNVNKSHNAGMGIAQVQFKPEFTVINTWSIPLGDHTAQLAEVAAVEFACKKALKIDGPVLIVTDSFYVAESVNKELPYWQSNGFFNNKKKPLKHVSKWKSIADCIQLKPDIIIIHEKGHQPTASTFHTEGNNLADKLATQGSYVVNAGKRTADGSEFEKRTADGSEFESPKKKAKVE

SEQ ID NO: 658 - protein, 2168 aa, synthetic construct
MPAAKRVKLDGGDKKYSIGLDIGTNSVGWAVITDEYKVPSKKFKVLGNTDRHSIKKNLIGALLFDSGETAEATRLKRTARRRYTRRKNRICYLQEIFSNEMAKVDDSFFHRLEESFLVEEDKKHERHPIFGNIVDEVAYHEKYPTIYHLRKKLVDSTDKADLRLIYLALAHMIKFRGHFLIEGDLNPDNSDVDKLFIQLVQTYNQLFEENPINASGVDAKAILSARLSKSRRLENLIAQLPGEKKNGLFGNLIALSLGLTPNFKSNFDLAEDAKLQLSKDTYDDDLDNLLAQIGDQYADLFLAAKNLSDAILLSDILRVNTEITKAPLSASMIKRYDEHHQDLTLLKALVRQQLPEKYKEIFFDQSKNGYAGYIDGGASQEEFYKFIKPILEKMDGTEELLVKLNREDLLRKQRTFDNGSIPHQIHLGELHAILRRQEDFYPFLKDNREKIEKILTFRIPYYVGPLARGNSRFAWMTRKSEETITPWNFEEVVDKGASAQSFIERMTNFDKNLPNEKVLPKHSLLYEYFTVYNELTKVKYVTEGMRKPAFLSGEQKKAIVDLLFKTNRKVTVKQLKEDYFKKIECFDSVEISGVEDRFNASLGTYHDLLKIIKDKDFLDNEENEDILEDIVLTLTLFEDREMIEERLKTYAHLFDDKVMKQLKRRRYTGWGRLSRKLINGIRDKQSGKTILDFLKSDGFANRNFMQLIHDDSLTFKEDIQKAQVSGQGDSLHEHIANLAGSPAIKKGILQTVKVVDELVKVMGRHKPENIVIEMARENQTTQKGQKNSRERMKRIEEGIKELGSQILKEHPVENTQLQNEKLYLYYLQNGRDMYVDQELDINRLSDYDVDHIVPQSFLKDDSIDNKVLTRSDKARGKSDNVPSEEVVKKMKNYWRQLLNAKLITQRKFDNLTKAERGGLSELDKAGFIKRQLVETRQITKHVAQILDSRMNTKYDENDKLIREVKVITLKSKLVSDFRKDFQFYKVREINNYHHAHDAYLNAVVGTALIKKYPKLESEFVYGDYKVYDVRKMIAKSEQEIGKATAKYFFYSNIMNFFKTEITLANGEIRKRPLIETNGETGEIVWDKGRDFATVRKVLSMPQVNIVKKTEVQTGGFSKESILPKRNSDKLIARKKDWDPKKYGGFDSPTVAYSVLVVAKVEKGKSKKLKSVKELLGITIMERSSFEKNPIDFLEAKGYKEVKKDLIIKLPKYSLFELENGRKRMLASAGELQKGNELALPSKYVNFLYLASHYEKLKGSPEDNEQKQLFVEQHKHYLDEIIEQISEFSKRVILADANLDKVLSAYNKHRDKPIREQAENIIHLFTLTNLGAPAAFKYFDTTIDRKRYTSTKEVLDATLIHQSITGLYETRIDLSQLGGDGGGGGGGMDPLQLLQPLEAEIKGTKLKAHWNSGATITCVPQAFLEEEVPIKNIWIKTIHGEKEQPVYYLTFKIQGRKVEAEVISSPYDYILVSPSDIPWLMKKPLQLTTLVPLQEYEERLLKQTMLTGSYKEKLQSLFLKYDALWQHWENQVGHRRIKPHHIATGTVNPRPQKQYPINPKAKASIQTVINDLLKQGVLIQQNSIMNTPVYPVPKPDGKWRMVLDYREVNKTIPLIAAQNQHSAGILSSIFRGKYKTTLDLSNGFWAHSITPESYWLTAFTWLGQQYCWTRLPQGFLNSPALFNADVVDLLKEVPNVQVYVDDIYISHDDPREHLEQLEKVFSLLLNAGYVVSLKKSEIAQHEVEFLGFNITKEGRGLTETFKQKLLNITPPRDLKQLQSILGKLNFARNFIPNFSELVKPLYNIIATAPGKYITWTTDNSQQLQNIISMLNSAENLEERNPEVRLIMKVNTSPSAGYIRFYNEFAKRPIMYLNYVYTKAEVKFTNTEKLLTTIHKGLIKALDLGMGQEILVYSPIVSMTKIQKTPLPERKALPIRWITWMSYLEDPRIQFHYDKTLPELQQVPTVTDDIIAKIKHPSEFSMVFYTDGSAIKHPNVNKSHNAGMGIAQVQFKPEFTVINTWSIPLGDHTAQLAEVAAVEFACKKALKIDGPVLIVTDSFYVAESVNKELPYWQSNGFFNNKKKPLKHVSKWKSIADCIQLKPDIIIIHEKGHQPTASTFHTEGNNLADKLATQGSYVVNAGKRTADGSEFEKRTADGSEFESPKKKAKVE

SEQ ID NO: 659 - protein, 2176 aa, synthetic construct
MPAAKRVKLDGGDKKYSIGLDIGTNSVGWAVITDEYKVPSKKFKVLGNTDRHSIKKNLIGALLFDSGETAEATRLKRTARRRYTRRKNRICYLQEIFSNEMAKVDDSFFHRLEESFLVEEDKKHERHPIFGNIVDEVAYHEKYPTIYHLRKKLVDSTDKADLRLIYLALAHMIKFRGHFLIEGDLNPDNSDVDKLFIQLVQTYNQLFEENPINASGVDAKAILSARLSKSRRLENLIAQLPGEKKNGLFGNLIALSLGLTPNFKSNFDLAEDAKLQLSKDTYDDDLDNLLAQIGDQYADLFLAAKNLSDAILLSDILRVNTEITKAPLSASMIKRYDEHHQDLTLLKALVRQQLPEKYKEIFFDQSKNGYAGYIDGGASQEEFYKFIKPILEKMDGTEELLVKLNREDLLRKQRTFDNGSIPHQIHLGELHAILRRQEDFYPFLKDNREKIEKILTFRIPYYVGPLARGNSRFAWMTRKSEETITPWNFEEVVDKGASAQSFIERMTNFDKNLPNEKVLPKHSLLYEYFTVYNELTKVKYVTEGMRKPAFLSGEQKKAIVDLLFKTNRKVTVKQLKEDYFKKIECFDSVEISGVEDRFNASLGTYHDLLKIIKDKDFLDNEENEDILEDIVLTLTLFEDREMIEERLKTYAHLFDDKVMKQLKRRRYTGWGRLSRKLINGIRDKQSGKTILDFLKSDGFANRNFMQLIHDDSLTFKEDIQKAQVSGQGDSLHEHIANLAGSPAIKKGILQTVKVVDELVKVMGRHKPENIVIEMARENQTTQKGQKNSRERMKRIEEGIKELGSQILKEHPVENTQLQNEKLYLYYLQNGRDMYVDQELDINRLSDYDVDHIVPQSFLKDDSIDNKVLTRSDKARGKSDNVPSEEVVKKMKNYWRQLLNAKLITQRKFDNLTKAERGGLSELDKAGFIKRQLVETRQITKHVAQILDSRMNTKYDENDKLIREVKVITLKSKLVSDFRKDFQFYKVREINNYHHAHDAYLNAVVGTALIKKYPKLESEFVYGDYKVYDVRKMIAKSEQEIGKATAKYFFYSNIMNFFKTEITLANGEIRKRPLIETNGETGEIVWDKGRDFATVRKVLSMPQVNIVKKTEVQTGGFSKESILPKRNSDKLIARKKDWDPKKYGGFDSPTVAYSVLVVAKVEKGKSKKLKSVKELLGITIMERSSFEKNPIDFLEAKGYKEVKKDLIIKLPKYSLFELENGRKRMLASAGELQKGNELALPSKYVNFLYLASHYEKLKGSPEDNEQKQLFVEQHKHYLDEIIEQISEFSKRVILADANLDKVLSAYNKHRDKPIREQAENIIHLFTLTNLGAPAAFKYFDTTIDRKRYTSTKEVLDATLIHQSITGLYETRIDLSQLGGDGGGGSGGGEAAAKGGMDPLQLLQPLEAEIKGTKLKAHWNSGATITCVPQAFLEEEVPIKNIWIKTIHGEKEQPVYYLTFKIQGRKVEAEVISSPYDYILVSPSDIPWLMKKPLQLTTLVPLQEYEERLLKQTMLTGSYKEKLQSLFLKYDALWQHWENQVGHRRIKPHHIATGTVNPRPQKQYPINPKAKASIQTVINDLLKQGVLIQQNSIMNTPVYPVPKPDGKWRMVLDYREVNKTIPLIAAQNQHSAGILSSIFRGKYKTTLDLSNGFWAHSITPESYWLTAFTWLGQQYCWTRLPQGFLNSPALFNADVVDLLKEVPNVQVYVDDIYISHDDPREHLEQLEKVFSLLLNAGYVVSLKKSEIAQHEVEFLGFNITKEGRGLTETFKQKLLNITPPRDLKQLQSILGKLNFARNFIPNFSELVKPLYNIIATAPGKYITWTTDNSQQLQNIISMLNSAENLEERNPEVRLIMKVNTSPSAGYIRFYNEFAKRPIMYLNYVYTKAEVKFTNTEKLLTTIHKGLIKALDLGMGQEILVYSPIVSMTKIQKTPLPERKALPIRWITWMSYLEDPRIQFHYDKTLPELQQVPTVTDDIIAKIKHPSEFSMVFYTDGSAIKHPNVNKSHNAGMGIAQVQFKPEFTVINTWSIPLGDHTAQLAEVAAVEFACKKALKIDGPVLIVTDSFYVAESVNKELPYWQSNGFFNNKKKPLKHVSKWKSIADCIQLKPDIIIIHEKGHQPTASTFHTEGNNLADKLATQGSYVVNAGKRTADGSEFEKRTADGSEFESPKKKAKVE

SEQ ID NO: 660 - protein, 2180 aa, synthetic construct
MPAAKRVKLDGGDKKYSIGLDIGTNSVGWAVITDEYKVPSKKFKVLGNTDRHSIKKNLIGALLFDSGETAEATRLKRTARRRYTRRKNRICYLQEIFSNEMAKVDDSFFHRLEESFLVEEDKKHERHPIFGNIVDEVAYHEKYPTIYHLRKKLVDSTDKADLRLIYLALAHMIKFRGHFLIEGDLNPDNSDVDKLFIQLVQTYNQLFEENPINASGVDAKAILSARLSKSRRLENLIAQLPGEKKNGLFGNLIALSLGLTPNFKSNFDLAEDAKLQLSKDTYDDDLDNLLAQIGDQYADLFLAAKNLSDAILLSDILRVNTEITKAPLSASMIKRYDEHHQDLTLLKALVRQQLPEKYKEIFFDQSKNGYAGYIDGGASQEEFYKFIKPILEKMDGTEELLVKLNREDLLRKQRTFDNGSIPHQIHLGELHAILRRQEDFYPFLKDNREKIEKILTFRIPYYVGPLARGNSRFAWMTRKSEETITPWNFEEVVDKGASAQSFIERMTNFDKNLPNEKVLPKHSLLYEYFTVYNELTKVKYVTEGMRKPAFLSGEQKKAIVDLLFKTNRKVTVKQLKEDYFKKIECFDSVEISGVEDRFNASLGTYHDLLKIIKDKDFLDNEENEDILEDIVLTLTLFEDREMIEERLKTYAHLFDDKVMKQLKRRRYTGWGRLSRKLINGIRDKQSGKTILDFLKSDGFANRNFMQLIHDDSLTFKEDIQKAQVSGQGDSLHEHIANLAGSPAIKKGILQTVKVVDELVKVMGRHKPENIVIEMARENQTTQKGQKNSRERMKRIEEGIKELGSQILKEHPVENTQLQNEKLYLYYLQNGRDMYVDQELDINRLSDYDVDHIVPQSFLKDDSIDNKVLTRSDKARGKSDNVPSEEVVKKMKNYWRQLLNAKLITQRKFDNLTKAERGGLSELDKAGFIKRQLVETRQITKHVAQILDSRMNTKYDENDKLIREVKVITLKSKLVSDFRKDFQFYKVREINNYHHAHDAYLNAVVGTALIKKYPKLESEFVYGDYKVYDVRKMIAKSEQEIGKATAKYFFYSNIMNFFKTEITLANGEIRKRPLIETNGETGEIVWDKGRDFATVRKVLSMPQVNIVKKTEVQTGGFSKESILPKRNSDKLIARKKDWDPKKYGGFDSPTVAYSVLVVAKVEKGKSKKLKSVKELLGITIMERSSFEKNPIDFLEAKGYKEVKKDLIIKLPKYSLFELENGRKRMLASAGELQKGNELALPSKYVNFLYLASHYEKLKGSPEDNEQKQLFVEQHKHYLDEIIEQISEFSKRVILADANLDKVLSAYNKHRDKPIREQAENIIHLFTLTNLGAPAAFKYFDTTIDRKRYTSTKEVLDATLIHQSITGLYETRIDLSQLGGDGGEAAAKGGGGSEAAAKGGMDPLQLLQPLEAEIKGTKLKAHWNSGATITCVPQAFLEEEVPIKNIWIKTIHGEKEQPVYYLTFKIQGRKVEAEVISSPYDYILVSPSDIPWLMKKPLQLTTLVPLQEYEERLLKQTMLTGSYKEKLQSLFLKYDALWQHWENQVGHRRIKPHHIATGTVNPRPQKQYPINPKAKASIQTVINDLLKQGVLIQQNSIMNTPVYPVPKPDGKWRMVLDYREVNKTIPLIAAQNQHSAGILSSIFRGKYKTTLDLSNGFWAHSITPESYWLTAFTWLGQQYCWTRLPQGFLNSPALFNADVVDLLKEVPNVQVYVDDIYISHDDPREHLEQLEKVFSLLLNAGYVVSLKKSEIAQHEVEFLGFNITKEGRGLTETFKQKLLNITPPRDLKQLQSILGKLNFARNFIPNFSELVKPLYNIIATAPGKYITWTTDNSQQLQNIISMLNSAENLEERNPEVRLIMKVNTSPSAGYIRFYNEFAKRPIMYLNYVYTKAEVKFTNTEKLLTTIHKGLIKALDLGMGQEILVYSPIVSMTKIQKTPLPERKALPIRWITWMSYLEDPRIQFHYDKTLPELQQVPTVTDDIIAKIKHPSEFSMVFYTDGSAIKHPNVNKSHNAGMGIAQVQFKPEFTVINTWSIPLGDHTAQLAEVAAVEFACKKALKIDGPVLIVTDSFYVAESVNKELPYWQSNGFFNNKKKPLKHVSKWKSIADCIQLKPDIIIIHEKGHQPTASTFHTEGNNLADKLATQGSYVVNAGKRTADGSEFEKRTADGSEFESPKKKAKVE

SEQ ID NO: 661 - protein, 2176 aa, synthetic construct
MPAAKRVKLDGGDKKYSIGLDIGTNSVGWAVITDEYKVPSKKFKVLGNTDRHSIKKNLIGALLFDSGETAEATRLKRTARRRYTRRKNRICYLQEIFSNEMAKVDDSFFHRLEESFLVEEDKKHERHPIFGNIVDEVAYHEKYPTIYHLRKKLVDSTDKADLRLIYLALAHMIKFRGHFLIEGDLNPDNSDVDKLFIQLVQTYNQLFEENPINASGVDAKAILSARLSKSRRLENLIAQLPGEKKNGLFGNLIALSLGLTPNFKSNFDLAEDAKLQLSKDTYDDDLDNLLAQIGDQYADLFLAAKNLSDAILLSDILRVNTEITKAPLSASMIKRYDEHHQDLTLLKALVRQQLPEKYKEIFFDQSKNGYAGYIDGGASQEEFYKFIKPILEKMDGTEELLVKLNREDLLRKQRTFDNGSIPHQIHLGELHAILRRQEDFYPFLKDNREKIEKILTFRIPYYVGPLARGNSRFAWMTRKSEETITPWNFEEVVDKGASAQSFIERMTNFDKNLPNEKVLPKHSLLYEYFTVYNELTKVKYVTEGMRKPAFLSGEQKKAIVDLLFKTNRKVTVKQLKEDYFKKIECFDSVEISGVEDRFNASLGTYHDLLKIIKDKDFLDNEENEDILEDIVLTLTLFEDREMIEERLKTYAHLFDDKVMKQLKRRRYTGWGRLSRKLINGIRDKQSGKTILDFLKSDGFANRNFMQLIHDDSLTFKEDIQKAQVSGQGDSLHEHIANLAGSPAIKKGILQTVKVVDELVKVMGRHKPENIVIEMARENQTTQKGQKNSRERMKRIEEGIKELGSQILKEHPVENTQLQNEKLYLYYLQNGRDMYVDQELDINRLSDYDVDHIVPQSFLKDDSIDNKVLTRSDKARGKSDNVPSEEVVKKMKNYWRQLLNAKLITQRKFDNLTKAERGGLSELDKAGFIKRQLVETRQITKHVAQILDSRMNTKYDENDKLIREVKVITLKSKLVSDFRKDFQFYKVREINNYHHAHDAYLNAVVGTALIKKYPKLESEFVYGDYKVYDVRKMIAKSEQEIGKATAKYFFYSNIMNFFKTEITLANGEIRKRPLIETNGETGEIVWDKGRDFATVRKVLSMPQVNIVKKTEVQTGGFSKESILPKRNSDKLIARKKDWDPKKYGGFDSPTVAYSVLVVAKVEKGKSKKLKSVKELLGITIMERSSFEKNPIDFLEAKGYKEVKKDLIIKLPKYSLFELENGRKRMLASAGELQKGNELALPSKYVNFLYLASHYEKLKGSPEDNEQKQLFVEQHKHYLDEIIEQISEFSKRVILADANLDKVLSAYNKHRDKPIREQAENIIHLFTLTNLGAPAAFKYFDTTIDRKRYTSTKEVLDATLIHQSITGLYETRIDLSQLGGDGGGGSEAAAKGGGGGMDPLQLLQPLEAEIKGTKLKAHWNSGATITCVPQAFLEEEVPIKNIWIKTIHGEKEQPVYYLTFKIQGRKVEAEVISSPYDYILVSPSDIPWLMKKPLQLTTLVPLQEYEERLLKQTMLTGSYKEKLQSLFLKYDALWQHWENQVGHRRIKPHHIATGTVNPRPQKQYPINPKAKASIQTVINDLLKQGVLIQQNSIMNTPVYPVPKPDGKWRMVLDYREVNKTIPLIAAQNQHSAGILSSIFRGKYKTTLDLSNGFWAHSITPESYWLTAFTWLGQQYCWTRLPQGFLNSPALFNADVVDLLKEVPNVQVYVDDIYISHDDPREHLEQLEKVFSLLLNAGYVVSLKKSEIAQHEVEFLGFNITKEGRGLTETFKQKLLNITPPRDLKQLQSILGKLNFARNFIPNFSELVKPLYNIIATAPGKYITWTTDNSQQLQNIISMLNSAENLEERNPEVRLIMKVNTSPSAGYIRFYNEFAKRPIMYLNYVYTKAEVKFTNTEKLLTTIHKGLIKALDLGMGQEILVYSPIVSMTKIQKTPLPERKALPIRWITWMSYLEDPRIQFHYDKTLPELQQVPTVTDDIIAKIKHPSEFSMVFYTDGSAIKHPNVNKSHNAGMGIAQVQFKPEFTVINTWSIPLGDHTAQLAEVAAVEFACKKALKIDGPVLIVTDSFYVAESVNKELPYWQSNGFFNNKKKPLKHVSKWKSIADCIQLKPDIIIIHEKGHQPTASTFHTEGNNLADKLATQGSYVVNAGKRTADGSEFEKRTADGSEFESPKKKAKVE

SEQ ID NO: 662 - protein, 2183 aa, synthetic construct
MPAAKRVKLDGGDKKYSIGLDIGTNSVGWAVITDEYKVPSKKFKVLGNTDRHSIKKNLIGALLFDSGETAEATRLKRTARRRYTRRKNRICYLQEIFSNEMAKVDDSFFHRLEESFLVEEDKKHERHPIFGNIVDEVAYHEKYPTIYHLRKKLVDSTDKADLRLIYLALAHMIKFRGHFLIEGDLNPDNSDVDKLFIQLVQTYNQLFEENPINASGVDAKAILSARLSKSRRLENLIAQLPGEKKNGLFGNLIALSLGLTPNFKSNFDLAEDAKLQLSKDTYDDDLDNLLAQIGDQYADLFLAAKNLSDAILLSDILRVNTEITKAPLSASMIKRYDEHHQDLTLLKALVRQQLPEKYKEIFFDQSKNGYAGYIDGGASQEEFYKFIKPILEKMDGTEELLVKLNREDLLRKQRTFDNGSIPHQIHLGELHAILRRQEDFYPFLKDNREKIEKILTFRIPYYVGPLARGNSRFAWMTRKSEETITPWNFEEVVDKGASAQSFIERMTNFDKNLPNEKVLPKHSLLYEYFTVYNELTKVKYVTEGMRKPAFLSGEQKKAIVDLLFKTNRKVTVKQLKEDYFKKIECFDSVEISGVEDRFNASLGTYHDLLKIIKDKDFLDNEENEDILEDIVLTLTLFEDREMIEERLKTYAHLFDDKVMKQLKRRRYTGWGRLSRKLINGIRDKQSGKTILDFLKSDGFANRNFMQLIHDDSLTFKEDIQKAQVSGQGDSLHEHIANLAGSPAIKKGILQTVKVVDELVKVMGRHKPENIVIEMARENQTTQKGQKNSRERMKRIEEGIKELGSQILKEHPVENTQLQNEKLYLYYLQNGRDMYVDQELDINRLSDYDVDHIVPQSFLKDDSIDNKVLTRSDKARGKSDNVPSEEVVKKMKNYWRQLLNAKLITQRKFDNLTKAERGGLSELDKAGFIKRQLVETRQITKHVAQILDSRMNTKYDENDKLIREVKVITLKSKLVSDFRKDFQFYKVREINNYHHAHDAYLNAVVGTALIKKYPKLESEFVYGDYKVYDVRKMIAKSEQEIGKATAKYFFYSNIMNFFKTEITLANGEIRKRPLIETNGETGEIVWDKGRDFATVRKVLSMPQVNIVKKTEVQTGGFSKESILPKRNSDKLIARKKDWDPKKYGGFDSPTVAYSVLVVAKVEKGKSKKLKSVKELLGITIMERSSFEKNPIDFLEAKGYKEVKKDLIIKLPKYSLFELENGRKRMLASAGELQKGNELALPSKYVNFLYLASHYEKLKGSPEDNEQKQLFVEQHKHYLDEIIEQISEFSKRVILADANLDKVLSAYNKHRDKPIREQAENIIHLFTLTNLGAPAAFKYFDTTIDRKRYTSTKEVLDATLIHQSITGLYETRIDLSQLGGDGGGSSGSSGSSGSSGSSGSSGGMDPLQLLQPLEAEIKGTKLKAHWNSGATITCVPQAFLEEEVPIKNIWIKTIHGEKEQPVYYLTFKIQGRKVEAEVISSPYDYILVSPSDIPWLMKKPLQLTTLVPLQEYEERLLKQTMLTGSYKEKLQSLFLKYDALWQHWENQVGHRRIKPHHIATGTVNPRPQKQYPINPKAKASIQTVINDLLKQGVLIQQNSIMNTPVYPVPKPDGKWRMVLDYREVNKTIPLIAAQNQHSAGILSSIFRGKYKTTLDLSNGFWAHSITPESYWLTAFTWLGQQYCWTRLPQGFLNSPALFNADVVDLLKEVPNVQVYVDDIYISHDDPREHLEQLEKVFSLLLNAGYVVSLKKSEIAQHEVEFLGFNITKEGRGLTETFKQKLLNITPPRDLKQLQSILGKLNFARNFIPNFSELVKPLYNIIATAPGKYITWTTDNSQQLQNIISMLNSAENLEERNPEVRLIMKVNTSPSAGYIRFYNEFAKRPIMYLNYVYTKAEVKFTNTEKLLTTIHKGLIKALDLGMGQEILVYSPIVSMTKIQKTPLPERKALPIRWITWMSYLEDPRIQFHYDKTLPELQQVPTVTDDIIAKIKHPSEFSMVFYTDGSAIKHPNVNKSHNAGMGIAQVQFKPEFTVINTWSIPLGDHTAQLAEVAAVEFACKKALKIDGPVLIVTDSFYVAESVNKELPYWQSNGFFNNKKKPLKHVSKWKSIADCIQLKPDIIIIHEKGHQPTASTFHTEGNNLADKLATQGSYVVNAGKRTADGSEFEKRTADGSEFESPKKKAKVE

SEQ ID NO: 663 - protein, 2176 aa, synthetic construct
MPAAKRVKLDGGDKKYSIGLDIGTNSVGWAVITDEYKVPSKKFKVLGNTDRHSIKKNLIGALLFDSGETAEATRLKRTARRRYTRRKNRICYLQEIFSNEMAKVDDSFFHRLEESFLVEEDKKHERHPIFGNIVDEVAYHEKYPTIYHLRKKLVDSTDKADLRLIYLALAHMIKFRGHFLIEGDLNPDNSDVDKLFIQLVQTYNQLFEENPINASGVDAKAILSARLSKSRRLENLIAQLPGEKKNGLFGNLIALSLGLTPNFKSNFDLAEDAKLQLSKDTYDDDLDNLLAQIGDQYADLFLAAKNLSDAILLSDILRVNTEITKAPLSASMIKRYDEHHQDLTLLKALVRQQLPEKYKEIFFDQSKNGYAGYIDGGASQEEFYKFIKPILEKMDGTEELLVKLNREDLLRKQRTFDNGSIPHQIHLGELHAILRRQEDFYPFLKDNREKIEKILTFRIPYYVGPLARGNSRFAWMTRKSEETITPWNFEEVVDKGASAQSFIERMTNFDKNLPNEKVLPKHSLLYEYFTVYNELTKVKYVTEGMRKPAFLSGEQKKAIVDLLFKTNRKVTVKQLKEDYFKKIECFDSVEISGVEDRFNASLGTYHDLLKIIKDKDFLDNEENEDILEDIVLTLTLFEDREMIEERLKTYAHLFDDKVMKQLKRRRYTGWGRLSRKLINGIRDKQSGKTILDFLKSDGFANRNFMQLIHDDSLTFKEDIQKAQVSGQGDSLHEHIANLAGSPAIKKGILQTVKVVDELVKVMGRHKPENIVIEMARENQTTQKGQKNSRERMKRIEEGIKELGSQILKEHPVENTQLQNEKLYLYYLQNGRDMYVDQELDINRLSDYDVDHIVPQSFLKDDSIDNKVLTRSDKARGKSDNVPSEEVVKKMKNYWRQLLNAKLITQRKFDNLTKAERGGLSELDKAGFIKRQLVETRQITKHVAQILDSRMNTKYDENDKLIREVKVITLKSKLVSDFRKDFQFYKVREINNYHHAHDAYLNAVVGTALIKKYPKLESEFVYGDYKVYDVRKMIAKSEQEIGKATAKYFFYSNIMNFFKTEITLANGEIRKRPLIETNGETGEIVWDKGRDFATVRKVLSMPQVNIVKKTEVQTGGFSKESILPKRNSDKLIARKKDWDPKKYGGFDSPTVAYSVLVVAKVEKGKSKKLKSVKELLGITIMERSSFEKNPIDFLEAKGYKEVKKDLIIKLPKYSLFELENGRKRMLASAGELQKGNELALPSKYVNFLYLASHYEKLKGSPEDNEQKQLFVEQHKHYLDEIIEQISEFSKRVILADANLDKVLSAYNKHRDKPIREQAENIIHLFTLTNLGAPAAFKYFDTTIDRKRYTSTKEVLDATLIHQSITGLYETRIDLSQLGGDGGGGGPAPEAAAKGGMDPLQLLQPLEAEIKGTKLKAHWNSGATITCVPQAFLEEEVPIKNIWIKTIHGEKEQPVYYLTFKIQGRKVEAEVISSPYDYILVSPSDIPWLMKKPLQLTTLVPLQEYEERLLKQTMLTGSYKEKLQSLFLKYDALWQHWENQVGHRRIKPHHIATGTVNPRPQKQYPINPKAKASIQTVINDLLKQGVLIQQNSIMNTPVYPVPKPDGKWRMVLDYREVNKTIPLIAAQNQHSAGILSSIFRGKYKTTLDLSNGFWAHSITPESYWLTAFTWLGQQYCWTRLPQGFLNSPALFNADVVDLLKEVPNVQVYVDDIYISHDDPREHLEQLEKVFSLLLNAGYVVSLKKSEIAQHEVEFLGFNITKEGRGLTETFKQKLLNITPPRDLKQLQSILGKLNFARNFIPNFSELVKPLYNIIATAPGKYITWTTDNSQQLQNIISMLNSAENLEERNPEVRLIMKVNTSPSAGYIRFYNEFAKRPIMYLNYVYTKAEVKFTNTEKLLTTIHKGLIKALDLGMGQEILVYSPIVSMTKIQKTPLPERKALPIRWITWMSYLEDPRIQFHYDKTLPELQQVPTVTDDIIAKIKHPSEFSMVFYTDGSAIKHPNVNKSHNAGMGIAQVQFKPEFTVINTWSIPLGDHTAQLAEVAAVEFACKKALKIDGPVLIVTDSFYVAESVNKELPYWQSNGFFNNKKKPLKHVSKWKSIADCIQLKPDIIIIHEKGHQPTASTFHTEGNNLADKLATQGSYVVNAGKRTADGSEFEKRTADGSEFESPKKKAKVE

SEQ ID NO: 664 - protein, 2176 aa, synthetic construct
MPAAKRVKLDGGDKKYSIGLDIGTNSVGWAVITDEYKVPSKKFKVLGNTDRHSIKKNLIGALLFDSGETAEATRLKRTARRRYTRRKNRICYLQEIFSNEMAKVDDSFFHRLEESFLVEEDKKHERHPIFGNIVDEVAYHEKYPTIYHLRKKLVDSTDKADLRLIYLALAHMIKFRGHFLIEGDLNPDNSDVDKLFIQLVQTYNQLFEENPINASGVDAKAILSARLSKSRRLENLIAQLPGEKKNGLFGNLIALSLGLTPNFKSNFDLAEDAKLQLSKDTYDDDLDNLLAQIGDQYADLFLAAKNLSDAILLSDILRVNTEITKAPLSASMIKRYDEHHQDLTLLKALVRQQLPEKYKEIFFDQSKNGYAGYIDGGASQEEFYKFIKPILEKMDGTEELLVKLNREDLLRKQRTFDNGSIPHQIHLGELHAILRRQEDFYPFLKDNREKIEKILTFRIPYYVGPLARGNSRFAWMTRKSEETITPWNFEEVVDKGASAQSFIERMTNFDKNLPNEKVLPKHSLLYEYFTVYNELTKVKYVTEGMRKPAFLSGEQKKAIVDLLFKTNRKVTVKQLKEDYFKKIECFDSVEISGVEDRFNASLGTYHDLLKIIKDKDFLDNEENEDILEDIVLTLTLFEDREMIEERLKTYAHLFDDKVMKQLKRRRYTGWGRLSRKLINGIRDKQSGKTILDFLKSDGFANRNFMQLIHDDSLTFKEDIQKAQVSGQGDSLHEHIANLAGSPAIKKGILQTVKVVDELVKVMGRHKPENIVIEMARENQTTQKGQKNSRERMKRIEEGIKELGSQILKEHPVENTQLQNEKLYLYYLQNGRDMYVDQELDINRLSDYDVDHIVPQSFLKDDSIDNKVLTRSDKARGKSDNVPSEEVVKKMKNYWRQLLNAKLITQRKFDNLTKAERGGLSELDKAGFIKRQLVETRQITKHVAQILDSRMNTKYDENDKLIREVKVITLKSKLVSDFRKDFQFYKVREINNYHHAHDAYLNAVVGTALIKKYPKLESEFVYGDYKVYDVRKMIAKSEQEIGKATAKYFFYSNIMNFFKTEITLANGEIRKRPLIETNGETGEIVWDKGRDFATVRKVLSMPQVNIVKKTEVQTGGFSKESILPKRNSDKLIARKKDWDPKKYGGFDSPTVAYSVLVVAKVEKGKSKKLKSVKELLGITIMERSSFEKNPIDFLEAKGYKEVKKDLIIKLPKYSLFELENGRKRMLASAGELQKGNELALPSKYVNFLYLASHYEKLKGSPEDNEQKQLFVEQHKHYLDEIIEQISEFSKRVILADANLDKVLSAYNKHRDKPIREQAENIIHLFTLTNLGAPAAFKYFDTTIDRKRYTSTKEVLDATLIHQSITGLYETRIDLSQLGGDGGEAAAKPAPGGGGGMDPLQLLQPLEAEIKGTKLKAHWNSGATITCVPQAFLEEEVPIKNIWIKTIHGEKEQPVYYLTFKIQGRKVEAEVISSPYDYILVSPSDIPWLMKKPLQLTTLVPLQEYEERLLKQTMLTGSYKEKLQSLFLKYDALWQHWENQVGHRRIKPHHIATGTVNPRPQKQYPINPKAKASIQTVINDLLKQGVLIQQNSIMNTPVYPVPKPDGKWRMVLDYREVNKTIPLIAAQNQHSAGILSSIFRGKYKTTLDLSNGFWAHSITPESYWLTAFTWLGQQYCWTRLPQGFLNSPALFNADVVDLLKEVPNVQVYVDDIYISHDDPREHLEQLEKVFSLLLNAGYVVSLKKSEIAQHEVEFLGFNITKEGRGLTETFKQKLLNITPPRDLKQLQSILGKLNFARNFIPNFSELVKPLYNIIATAPGKYITWTTDNSQQLQNIISMLNSAENLEERNPEVRLIMKVNTSPSAGYIRFYNEFAKRPIMYLNYVYTKAEVKFTNTEKLLTTIHKGLIKALDLGMGQEILVYSPIVSMTKIQKTPLPERKALPIRWITWMSYLEDPRIQFHYDKTLPELQQVPTVTDDIIAKIKHPSEFSMVFYTDGSAIKHPNVNKSHNAGMGIAQVQFKPEFTVINTWSIPLGDHTAQLAEVAAVEFACKKALKIDGPVLIVTDSFYVAESVNKELPYWQSNGFFNNKKKPLKHVSKWKSIADCIQLKPDIIIIHEKGHQPTASTFHTEGNNLADKLATQGSYVVNAGKRTADGSEFEKRTADGSEFESPKKKAKVE

SEQ ID NO: 665 - protein, 2176 aa, synthetic construct
MPAAKRVKLDGGDKKYSIGLDIGTNSVGWAVITDEYKVPSKKFKVLGNTDRHSIKKNLIGALLFDSGETAEATRLKRTARRRYTRRKNRICYLQEIFSNEMAKVDDSFFHRLEESFLVEEDKKHERHPIFGNIVDEVAYHEKYPTIYHLRKKLVDSTDKADLRLIYLALAHMIKFRGHFLIEGDLNPDNSDVDKLFIQLVQTYNQLFEENPINASGVDAKAILSARLSKSRRLENLIAQLPGEKKNGLFGNLIALSLGLTPNFKSNFDLAEDAKLQLSKDTYDDDLDNLLAQIGDQYADLFLAAKNLSDAILLSDILRVNTEITKAPLSASMIKRYDEHHQDLTLLKALVRQQLPEKYKEIFFDQSKNGYAGYIDGGASQEEFYKFIKPILEKMDGTEELLVKLNREDLLRKQRTFDNGSIPHQIHLGELHAILRRQEDFYPFLKDNREKIEKILTFRIPYYVGPLARGNSRFAWMTRKSEETITPWNFEEVVDKGASAQSFIERMTNFDKNLPNEKVLPKHSLLYEYFTVYNELTKVKYVTEGMRKPAFLSGEQKKAIVDLLFKTNRKVTVKQLKEDYFKKIECFDSVEISGVEDRFNASLGTYHDLLKIIKDKDFLDNEENEDILEDIVLTLTLFEDREMIEERLKTYAHLFDDKVMKQLKRRRYTGWGRLSRKLINGIRDKQSGKTILDFLKSDGFANRNFMQLIHDDSLTFKEDIQKAQVSGQGDSLHEHIANLAGSPAIKKGILQTVKVVDELVKVMGRHKPENIVIEMARENQTTQKGQKNSRERMKRIEEGIKELGSQILKEHPVENTQLQNEKLYLYYLQNGRDMYVDQELDINRLSDYDVDHIVPQSFLKDDSIDNKVLTRSDKARGKSDNVPSEEVVKKMKNYWRQLLNAKLITQRKFDNLTKAERGGLSELDKAGFIKRQLVETRQITKHVAQILDSRMNTKYDENDKLIREVKVITLKSKLVSDFRKDFQFYKVREINNYHHAHDAYLNAVVGTALIKKYPKLESEFVYGDYKVYDVRKMIAKSEQEIGKATAKYFFYSNIMNFFKTEITLANGEIRKRPLIETNGETGEIVWDKGRDFATVRKVLSMPQVNIVKKTEVQTGGFSKESILPKRNSDKLIARKKDWDPKKYGGFDSPTVAYSVLVVAKVEKGKSKKLKSVKELLGITIMERSSFEKNPIDFLEAKGYKEVKKDLIIKLPKYSLFELENGRKRMLASAGELQKGNELALPSKYVNFLYLASHYEKLKGSPEDNEQKQLFVEQHKHYLDEIIEQISEFSKRVILADANLDKVLSAYNKHRDKPIREQAENIIHLFTLTNLGAPAAFKYFDTTIDRKRYTSTKEVLDATLIHQSITGLYETRIDLSQLGGDGGEAAAKGGSGSSGGMDPLQLLQPLEAEIKGTKLKAHWNSGATITCVPQAFLEEEVPIKNIWIKTIHGEKEQPVYYLTFKIQGRKVEAEVISSPYDYILVSPSDIPWLMKKPLQLTTLVPLQEYEERLLKQTMLTGSYKEKLQSLFLKYDALWQHWENQVGHRRIKPHHIATGTVNPRPQKQYPINPKAKASIQTVINDLLKQGVLIQQNSIMNTPVYPVPKPDGKWRMVLDYREVNKTIPLIAAQNQHSAGILSSIFRGKYKTTLDLSNGFWAHSITPESYWLTAFTWLGQQYCWTRLPQGFLNSPALFNADVVDLLKEVPNVQVYVDDIYISHDDPREHLEQLEKVFSLLLNAGYVVSLKKSEIAQHEVEFLGFNITKEGRGLTETFKQKLLNITPPRDLKQLQSILGKLNFARNFIPNFSELVKPLYNIIATAPGKYITWTTDNSQQLQNIISMLNSAENLEERNPEVRLIMKVNTSPSAGYIRFYNEFAKRPIMYLNYVYTKAEVKFTNTEKLLTTIHKGLIKALDLGMGQEILVYSPIVSMTKIQKTPLPERKALPIRWITWMSYLEDPRIQFHYDKTLPELQQVPTVTDDIIAKIKHPSEFSMVFYTDGSAIKHPNVNKSHNAGMGIAQVQFKPEFTVINTWSIPLGDHTAQLAEVAAVEFACKKALKIDGPVLIVTDSFYVAESVNKELPYWQSNGFFNNKKKPLKHVSKWKSIADCIQLKPDIIIIHEKGHQPTASTFHTEGNNLADKLATQGSYVVNAGKRTADGSEFEKRTADGSEFESPKKKAKVE

SEQ ID NO: 666 - protein, 2174 aa, synthetic construct
MPAAKRVKLDGGDKKYSIGLDIGTNSVGWAVITDEYKVPSKKFKVLGNTDRHSIKKNLIGALLFDSGETAEATRLKRTARRRYTRRKNRICYLQEIFSNEMAKVDDSFFHRLEESFLVEEDKKHERHPIFGNIVDEVAYHEKYPTIYHLRKKLVDSTDKADLRLIYLALAHMIKFRGHFLIEGDLNPDNSDVDKLFIQLVQTYNQLFEENPINASGVDAKAILSARLSKSRRLENLIAQLPGEKKNGLFGNLIALSLGLTPNFKSNFDLAEDAKLQLSKDTYDDDLDNLLAQIGDQYADLFLAAKNLSDAILLSDILRVNTEITKAPLSASMIKRYDEHHQDLTLLKALVRQQLPEKYKEIFFDQSKNGYAGYIDGGASQEEFYKFIKPILEKMDGTEELLVKLNREDLLRKQRTFDNGSIPHQIHLGELHAILRRQEDFYPFLKDNREKIEKILTFRIPYYVGPLARGNSRFAWMTRKSEETITPWNFEEVVDKGASAQSFIERMTNFDKNLPNEKVLPKHSLLYEYFTVYNELTKVKYVTEGMRKPAFLSGEQKKAIVDLLFKTNRKVTVKQLKEDYFKKIECFDSVEISGVEDRFNASLGTYHDLLKIIKDKDFLDNEENEDILEDIVLTLTLFEDREMIEERLKTYAHLFDDKVMKQLKRRRYTGWGRLSRKLINGIRDKQSGKTILDFLKSDGFANRNFMQLIHDDSLTFKEDIQKAQVSGQGDSLHEHIANLAGSPAIKKGILQTVKVVDELVKVMGRHKPENIVIEMARENQTTQKGQKNSRERMKRIEEGIKELGSQILKEHPVENTQLQNEKLYLYYLQNGRDMYVDQELDINRLSDYDVDHIVPQSFLKDDSIDNKVLTRSDKARGKSDNVPSEEVVKKMKNYWRQLLNAKLITQRKFDNLTKAERGGLSELDKAGFIKRQLVETRQITKHVAQILDSRMNTKYDENDKLIREVKVITLKSKLVSDFRKDFQFYKVREINNYHHAHDAYLNAVVGTALIKKYPKLESEFVYGDYKVYDVRKMIAKSEQEIGKATAKYFFYSNIMNFFKTEITLANGEIRKRPLIETNGETGEIVWDKGRDFATVRKVLSMPQVNIVKKTEVQTGGFSKESILPKRNSDKLIARKKDWDPKKYGGFDSPTVAYSVLVVAKVEKGKSKKLKSVKELLGITIMERSSFEKNPIDFLEAKGYKEVKKDLIIKLPKYSLFELENGRKRMLASAGELQKGNELALPSKYVNFLYLASHYEKLKGSPEDNEQKQLFVEQHKHYLDEIIEQISEFSKRVILADANLDKVLSAYNKHRDKPIREQAENIIHLFTLTNLGAPAAFKYFDTTIDRKRYTSTKEVLDATLIHQSITGLYETRIDLSQLGGDGGPAPAPAPAPGGMDPLQLLQPLEAEIKGTKLKAHWNSGATITCVPQAFLEEEVPIKNIWIKTIHGEKEQPVYYLTFKIQGRKVEAEVISSPYDYILVSPSDIPWLMKKPLQLTTLVPLQEYEERLLKQTMLTGSYKEKLQSLFLKYDALWQHWENQVGHRRIKPHHIATGTVNPRPQKQYPINPKAKASIQTVINDLLKQGVLIQQNSIMNTPVYPVPKPDGKWRMVLDYREVNKTIPLIAAQNQHSAGILSSIFRGKYKTTLDLSNGFWAHSITPESYWLTAFTWLGQQYCWTRLPQGFLNSPALFNADVVDLLKEVPNVQVYVDDIYISHDDPREHLEQLEKVFSLLLNAGYVVSLKKSEIAQHEVEFLGFNITKEGRGLTETFKQKLLNITPPRDLKQLQSILGKLNFARNFIPNFSELVKPLYNIIATAPGKYITWTTDNSQQLQNIISMLNSAENLEERNPEVRLIMKVNTSPSAGYIRFYNEFAKRPIMYLNYVYTKAEVKFTNTEKLLTTIHKGLIKALDLGMGQEILVYSPIVSMTKIQKTPLPERKALPIRWITWMSYLEDPRIQFHYDKTLPELQQVPTVTDDIIAKIKHPSEFSMVFYTDGSAIKHPNVNKSHNAGMGIAQVQFKPEFTVINTWSIPLGDHTAQLAEVAAVEFACKKALKIDGPVLIVTDSFYVAESVNKELPYWQSNGFFNNKKKPLKHVSKWKSIADCIQLKPDIIIIHEKGHQPTASTFHTEGNNLADKLATQGSYVVNAGKRTADGSEFEKRTADGSEFESPKKKAKVE

SEQ ID NO: 667 - protein, 2176 aa, synthetic construct
MPAAKRVKLDGGDKKYSIGLDIGTNSVGWAVITDEYKVPSKKFKVLGNTDRHSIKKNLIGALLFDSGETAEATRLKRTARRRYTRRKNRICYLQEIFSNEMAKVDDSFFHRLEESFLVEEDKKHERHPIFGNIVDEVAYHEKYPTIYHLRKKLVDSTDKADLRLIYLALAHMIKFRGHFLIEGDLNPDNSDVDKLFIQLVQTYNQLFEENPINASGVDAKAILSARLSKSRRLENLIAQLPGEKKNGLFGNLIALSLGLTPNFKSNFDLAEDAKLQLSKDTYDDDLDNLLAQIGDQYADLFLAAKNLSDAILLSDILRVNTEITKAPLSASMIKRYDEHHQDLTLLKALVRQQLPEKYKEIFFDQSKNGYAGYIDGGASQEEFYKFIKPILEKMDGTEELLVKLNREDLLRKQRTFDNGSIPHQIHLGELHAILRRQEDFYPFLKDNREKIEKILTFRIPYYVGPLARGNSRFAWMTRKSEETITPWNFEEVVDKGASAQSFIERMTNFDKNLPNEKVLPKHSLLYEYFTVYNELTKVKYVTEGMRKPAFLSGEQKKAIVDLLFKTNRKVTVKQLKEDYFKKIECFDSVEISGVEDRFNASLGTYHDLLKIIKDKDFLDNEENEDILEDIVLTLTLFEDREMIEERLKTYAHLFDDKVMKQLKRRRYTGWGRLSRKLINGIRDKQSGKTILDFLKSDGFANRNFMQLIHDDSLTFKEDIQKAQVSGQGDSLHEHIANLAGSPAIKKGILQTVKVVDELVKVMGRHKPENIVIEMARENQTTQKGQKNSRERMKRIEEGIKELGSQILKEHPVENTQLQNEKLYLYYLQNGRDMYVDQELDINRLSDYDVDHIVPQSFLKDDSIDNKVLTRSDKARGKSDNVPSEEVVKKMKNYWRQLLNAKLITQRKFDNLTKAERGGLSELDKAGFIKRQLVETRQITKHVAQILDSRMNTKYDENDKLIREVKVITLKSKLVSDFRKDFQFYKVREINNYHHAHDAYLNAVVGTALIKKYPKLESEFVYGDYKVYDVRKMIAKSEQEIGKATAKYFFYSNIMNFFKTEITLANGEIRKRPLIETNGETGEIVWDKGRDFATVRKVLSMPQVNIVKKTEVQTGGFSKESILPKRNSDKLIARKKDWDPKKYGGFDSPTVAYSVLVVAKVEKGKSKKLKSVKELLGITIMERSSFEKNPIDFLEAKGYKEVKKDLIIKLPKYSLFELENGRKRMLASAGELQKGNELALPSKYVNFLYLASHYEKLKGSPEDNEQKQLFVEQHKHYLDEIIEQISEFSKRVILADANLDKVLSAYNKHRDKPIREQAENIIHLFTLTNLGAPAAFKYFDTTIDRKRYTSTKEVLDATLIHQSITGLYETRIDLSQLGGDGGGSSGGGEAAAKGGMDPLQLLQPLEAEIKGTKLKAHWNSGATITCVPQAFLEEEVPIKNIWIKTIHGEKEQPVYYLTFKIQGRKVEAEVISSPYDYILVSPSDIPWLMKKPLQLTTLVPLQEYEERLLKQTMLTGSYKEKLQSLFLKYDALWQHWENQVGHRRIKPHHIATGTVNPRPQKQYPINPKAKASIQTVINDLLKQGVLIQQNSIMNTPVYPVPKPDGKWRMVLDYREVNKTIPLIAAQNQHSAGILSSIFRGKYKTTLDLSNGFWAHSITPESYWLTAFTWLGQQYCWTRLPQGFLNSPALFNADVVDLLKEVPNVQVYVDDIYISHDDPREHLEQLEKVFSLLLNAGYVVSLKKSEIAQHEVEFLGFNITKEGRGLTETFKQKLLNITPPRDLKQLQSILGKLNFARNFIPNFSELVKPLYNIIATAPGKYITWTTDNSQQLQNIISMLNSAENLEERNPEVRLIMKVNTSPSAGYIRFYNEFAKRPIMYLNYVYTKAEVKFTNTEKLLTTIHKGLIKALDLGMGQEILVYSPIVSMTKIQKTPLPERKALPIRWITWMSYLEDPRIQFHYDKTLPELQQVPTVTDDIIAKIKHPSEFSMVFYTDGSAIKHPNVNKSHNAGMGIAQVQFKPEFTVINTWSIPLGDHTAQLAEVAAVEFACKKALKIDGPVLIVTDSFYVAESVNKELPYWQSNGFFNNKKKPLKHVSKWKSIADCIQLKPDIIIIHEKGHQPTASTFHTEGNNLADKLATQGSYVVNAGKRTADGSEFEKRTADGSEFESPKKKAKVE

SEQ ID NO: 668 - protein, 2176 aa, synthetic construct
MPAAKRVKLDGGDKKYSIGLDIGTNSVGWAVITDEYKVPSKKFKVLGNTDRHSIKKNLIGALLFDSGETAEATRLKRTARRRYTRRKNRICYLQEIFSNEMAKVDDSFFHRLEESFLVEEDKKHERHPIFGNIVDEVAYHEKYPTIYHLRKKLVDSTDKADLRLIYLALAHMIKFRGHFLIEGDLNPDNSDVDKLFIQLVQTYNQLFEENPINASGVDAKAILSARLSKSRRLENLIAQLPGEKKNGLFGNLIALSLGLTPNFKSNFDLAEDAKLQLSKDTYDDDLDNLLAQIGDQYADLFLAAKNLSDAILLSDILRVNTEITKAPLSASMIKRYDEHHQDLTLLKALVRQQLPEKYKEIFFDQSKNGYAGYIDGGASQEEFYKFIKPILEKMDGTEELLVKLNREDLLRKQRTFDNGSIPHQIHLGELHAILRRQEDFYPFLKDNREKIEKILTFRIPYYVGPLARGNSRFAWMTRKSEETITPWNFEEVVDKGASAQSFIERMTNFDKNLPNEKVLPKHSLLYEYFTVYNELTKVKYVTEGMRKPAFLSGEQKKAIVDLLFKTNRKVTVKQLKEDYFKKIECFDSVEISGVEDRFNASLGTYHDLLKIIKDKDFLDNEENEDILEDIVLTLTLFEDREMIEERLKTYAHLFDDKVMKQLKRRRYTGWGRLSRKLINGIRDKQSGKTILDFLKSDGFANRNFMQLIHDDSLTFKEDIQKAQVSGQGDSLHEHIANLAGSPAIKKGILQTVKVVDELVKVMGRHKPENIVIEMARENQTTQKGQKNSRERMKRIEEGIKELGSQILKEHPVENTQLQNEKLYLYYLQNGRDMYVDQELDINRLSDYDVDHIVPQSFLKDDSIDNKVLTRSDKARGKSDNVPSEEVVKKMKNYWRQLLNAKLITQRKFDNLTKAERGGLSELDKAGFIKRQLVETRQITKHVAQILDSRMNTKYDENDKLIREVKVITLKSKLVSDFRKDFQFYKVREINNYHHAHDAYLNAVVGTALIKKYPKLESEFVYGDYKVYDVRKMIAKSEQEIGKATAKYFFYSNIMNFFKTEITLANGEIRKRPLIETNGETGEIVWDKGRDFATVRKVLSMPQVNIVKKTEVQTGGFSKESILPKRNSDKLIARKKDWDPKKYGGFDSPTVAYSVLVVAKVEKGKSKKLKSVKELLGITIMERSSFEKNPIDFLEAKGYKEVKKDLIIKLPKYSLFELENGRKRMLASAGELQKGNELALPSKYVNFLYLASHYEKLKGSPEDNEQKQLFVEQHKHYLDEIIEQISEFSKRVILADANLDKVLSAYNKHRDKPIREQAENIIHLFTLTNLGAPAAFKYFDTTIDRKRYTSTKEVLDATLIHQSITGLYETRIDLSQLGGDGGGGSEAAAKPAPGGMDPLQLLQPLEAEIKGTKLKAHWNSGATITCVPQAFLEEEVPIKNIWIKTIHGEKEQPVYYLTFKIQGRKVEAEVISSPYDYILVSPSDIPWLMKKPLQLTTLVPLQEYEERLLKQTMLTGSYKEKLQSLFLKYDALWQHWENQVGHRRIKPHHIATGTVNPRPQKQYPINPKAKASIQTVINDLLKQGVLIQQNSIMNTPVYPVPKPDGKWRMVLDYREVNKTIPLIAAQNQHSAGILSSIFRGKYKTTLDLSNGFWAHSITPESYWLTAFTWLGQQYCWTRLPQGFLNSPALFNADVVDLLKEVPNVQVYVDDIYISHDDPREHLEQLEKVFSLLLNAGYVVSLKKSEIAQHEVEFLGFNITKEGRGLTETFKQKLLNITPPRDLKQLQSILGKLNFARNFIPNFSELVKPLYNIIATAPGKYITWTTDNSQQLQNIISMLNSAENLEERNPEVRLIMKVNTSPSAGYIRFYNEFAKRPIMYLNYVYTKAEVKFTNTEKLLTTIHKGLIKALDLGMGQEILVYSPIVSMTKIQKTPLPERKALPIRWITWMSYLEDPRIQFHYDKTLPELQQVPTVTDDIIAKIKHPSEFSMVFYTDGSAIKHPNVNKSHNAGMGIAQVQFKPEFTVINTWSIPLGDHTAQLAEVAAVEFACKKALKIDGPVLIVTDSFYVAESVNKELPYWQSNGFFNNKKKPLKHVSKWKSIADCIQLKPDIIIIHEKGHQPTASTFHTEGNNLADKLATQGSYVVNAGKRTADGSEFEKRTADGSEFESPKKKAKVE

SEQ ID NO: 669 - protein, 2174 aa, synthetic construct
MPAAKRVKLDGGDKKYSIGLDIGTNSVGWAVITDEYKVPSKKFKVLGNTDRHSIKKNLIGALLFDSGETAEATRLKRTARRRYTRRKNRICYLQEIFSNEMAKVDDSFFHRLEESFLVEEDKKHERHPIFGNIVDEVAYHEKYPTIYHLRKKLVDSTDKADLRLIYLALAHMIKFRGHFLIEGDLNPDNSDVDKLFIQLVQTYNQLFEENPINASGVDAKAILSARLSKSRRLENLIAQLPGEKKNGLFGNLIALSLGLTPNFKSNFDLAEDAKLQLSKDTYDDDLDNLLAQIGDQYADLFLAAKNLSDAILLSDILRVNTEITKAPLSASMIKRYDEHHQDLTLLKALVRQQLPEKYKEIFFDQSKNGYAGYIDGGASQEEFYKFIKPILEKMDGTEELLVKLNREDLLRKQRTFDNGSIPHQIHLGELHAILRRQEDFYPFLKDNREKIEKILTFRIPYYVGPLARGNSRFAWMTRKSEETITPWNFEEVVDKGASAQSFIERMTNFDKNLPNEKVLPKHSLLYEYFTVYNELTKVKYVTEGMRKPAFLSGEQKKAIVDLLFKTNRKVTVKQLKEDYFKKIECFDSVEISGVEDRFNASLGTYHDLLKIIKDKDFLDNEENEDILEDIVLTLTLFEDREMIEERLKTYAHLFDDKVMKQLKRRRYTGWGRLSRKLINGIRDKQSGKTILDFLKSDGFANRNFMQLIHDDSLTFKEDIQKAQVSGQGDSLHEHIANLAGSPAIKKGILQTVKVVDELVKVMGRHKPENIVIEMARENQTTQKGQKNSRERMKRIEEGIKELGSQILKEHPVENTQLQNEKLYLYYLQNGRDMYVDQELDINRLSDYDVDHIVPQSFLKDDSIDNKVLTRSDKARGKSDNVPSEEVVKKMKNYWRQLLNAKLITQRKFDNLTKAERGGLSELDKAGFIKRQLVETRQITKHVAQILDSRMNTKYDENDKLIREVKVITLKSKLVSDFRKDFQFYKVREINNYHHAHDAYLNAVVGTALIKKYPKLESEFVYGDYKVYDVRKMIAKSEQEIGKATAKYFFYSNIMNFFKTEITLANGEIRKRPLIETNGETGEIVWDKGRDFATVRKVLSMPQVNIVKKTEVQTGGFSKESILPKRNSDKLIARKKDWDPKKYGGFDSPTVAYSVLVVAKVEKGKSKKLKSVKELLGITIMERSSFEKNPIDFLEAKGYKEVKKDLIIKLPKYSLFELENGRKRMLASAGELQKGNELALPSKYVNFLYLASHYEKLKGSPEDNEQKQLFVEQHKHYLDEIIEQISEFSKRVILADANLDKVLSAYNKHRDKPIREQAENIIHLFTLTNLGAPAAFKYFDTTIDRKRYTSTKEVLDATLIHQSITGLYETRIDLSQLGGDGGGGGGSSPAPGGMDPLQLLQPLEAEIKGTKLKAHWNSGATITCVPQAFLEEEVPIKNIWIKTIHGEKEQPVYYLTFKIQGRKVEAEVISSPYDYILVSPSDIPWLMKKPLQLTTLVPLQEYEERLLKQTMLTGSYKEKLQSLFLKYDALWQHWENQVGHRRIKPHHIATGTVNPRPQKQYPINPKAKASIQTVINDLLKQGVLIQQNSIMNTPVYPVPKPDGKWRMVLDYREVNKTIPLIAAQNQHSAGILSSIFRGKYKTTLDLSNGFWAHSITPESYWLTAFTWLGQQYCWTRLPQGFLNSPALFNADVVDLLKEVPNVQVYVDDIYISHDDPREHLEQLEKVFSLLLNAGYVVSLKKSEIAQHEVEFLGFNITKEGRGLTETFKQKLLNITPPRDLKQLQSILGKLNFARNFIPNFSELVKPLYNIIATAPGKYITWTTDNSQQLQNIISMLNSAENLEERNPEVRLIMKVNTSPSAGYIRFYNEFAKRPIMYLNYVYTKAEVKFTNTEKLLTTIHKGLIKALDLGMGQEILVYSPIVSMTKIQKTPLPERKALPIRWITWMSYLEDPRIQFHYDKTLPELQQVPTVTDDIIAKIKHPSEFSMVFYTDGSAIKHPNVNKSHNAGMGIAQVQFKPEFTVINTWSIPLGDHTAQLAEVAAVEFACKKALKIDGPVLIVTDSFYVAESVNKELPYWQSNGFFNNKKKPLKHVSKWKSIADCIQLKPDIIIIHEKGHQPTASTFHTEGNNLADKLATQGSYVVNAGKRTADGSEFEKRTADGSEFESPKKKAKVE

SEQ ID NO: 670 - protein, 2176 aa, synthetic construct
MPAAKRVKLDGGDKKYSIGLDIGTNSVGWAVITDEYKVPSKKFKVLGNTDRHSIKKNLIGALLFDSGETAEATRLKRTARRRYTRRKNRICYLQEIFSNEMAKVDDSFFHRLEESFLVEEDKKHERHPIFGNIVDEVAYHEKYPTIYHLRKKLVDSTDKADLRLIYLALAHMIKFRGHFLIEGDLNPDNSDVDKLFIQLVQTYNQLFEENPINASGVDAKAILSARLSKSRRLENLIAQLPGEKKNGLFGNLIALSLGLTPNFKSNFDLAEDAKLQLSKDTYDDDLDNLLAQIGDQYADLFLAAKNLSDAILLSDILRVNTEITKAPLSASMIKRYDEHHQDLTLLKALVRQQLPEKYKEIFFDQSKNGYAGYIDGGASQEEFYKFIKPILEKMDGTEELLVKLNREDLLRKQRTFDNGSIPHQIHLGELHAILRRQEDFYPFLKDNREKIEKILTFRIPYYVGPLARGNSRFAWMTRKSEETITPWNFEEVVDKGASAQSFIERMTNFDKNLPNEKVLPKHSLLYEYFTVYNELTKVKYVTEGMRKPAFLSGEQKKAIVDLLFKTNRKVTVKQLKEDYFKKIECFDSVEISGVEDRFNASLGTYHDLLKIIKDKDFLDNEENEDILEDIVLTLTLFEDREMIEERLKTYAHLFDDKVMKQLKRRRYTGWGRLSRKLINGIRDKQSGKTILDFLKSDGFANRNFMQLIHDDSLTFKEDIQKAQVSGQGDSLHEHIANLAGSPAIKKGILQTVKVVDELVKVMGRHKPENIVIEMARENQTTQKGQKNSRERMKRIEEGIKELGSQILKEHPVENTQLQNEKLYLYYLQNGRDMYVDQELDINRLSDYDVDHIVPQSFLKDDSIDNKVLTRSDKARGKSDNVPSEEVVKKMKNYWRQLLNAKLITQRKFDNLTKAERGGLSELDKAGFIKRQLVETRQITKHVAQILDSRMNTKYDENDKLIREVKVITLKSKLVSDFRKDFQFYKVREINNYHHAHDAYLNAVVGTALIKKYPKLESEFVYGDYKVYDVRKMIAKSEQEIGKATAKYFFYSNIMNFFKTEITLANGEIRKRPLIETNGETGEIVWDKGRDFATVRKVLSMPQVNIVKKTEVQTGGFSKESILPKRNSDKLIARKKDWDPKKYGGFDSPTVAYSVLVVAKVEKGKSKKLKSVKELLGITIMERSSFEKNPIDFLEAKGYKEVKKDLIIKLPKYSLFELENGRKRMLASAGELQKGNELALPSKYVNFLYLASHYEKLKGSPEDNEQKQLFVEQHKHYLDEIIEQISEFSKRVILADANLDKVLSAYNKHRDKPIREQAENIIHLFTLTNLGAPAAFKYFDTTIDRKRYTSTKEVLDATLIHQSITGLYETRIDLSQLGGDGGGSSGGSEAAAKGGMDPLQLLQPLEAEIKGTKLKAHWNSGATITCVPQAFLEEEVPIKNIWIKTIHGEKEQPVYYLTFKIQGRKVEAEVISSPYDYILVSPSDIPWLMKKPLQLTTLVPLQEYEERLLKQTMLTGSYKEKLQSLFLKYDALWQHWENQVGHRRIKPHHIATGTVNPRPQKQYPINPKAKASIQTVINDLLKQGVLIQQNSIMNTPVYPVPKPDGKWRMVLDYREVNKTIPLIAAQNQHSAGILSSIFRGKYKTTLDLSNGFWAHSITPESYWLTAFTWLGQQYCWTRLPQGFLNSPALFNADVVDLLKEVPNVQVYVDDIYISHDDPREHLEQLEKVFSLLLNAGYVVSLKKSEIAQHEVEFLGFNITKEGRGLTETFKQKLLNITPPRDLKQLQSILGKLNFARNFIPNFSELVKPLYNIIATAPGKYITWTTDNSQQLQNIISMLNSAENLEERNPEVRLIMKVNTSPSAGYIRFYNEFAKRPIMYLNYVYTKAEVKFTNTEKLLTTIHKGLIKALDLGMGQEILVYSPIVSMTKIQKTPLPERKALPIRWITWMSYLEDPRIQFHYDKTLPELQQVPTVTDDIIAKIKHPSEFSMVFYTDGSAIKHPNVNKSHNAGMGIAQVQFKPEFTVINTWSIPLGDHTAQLAEVAAVEFACKKALKIDGPVLIVTDSFYVAESVNKELPYWQSNGFFNNKKKPLKHVSKWKSIADCIQLKPDIIIIHEKGHQPTASTFHTEGNNLADKLATQGSYVVNAGKRTADGSEFEKRTADGSEFESPKKKAKVE

SEQ ID NO: 671 - protein, 2176 aa, synthetic construct
MPAAKRVKLDGGDKKYSIGLDIGTNSVGWAVITDEYKVPSKKFKVLGNTDRHSIKKNLIGALLFDSGETAEATRLKRTARRRYTRRKNRICYLQEIFSNEMAKVDDSFFHRLEESFLVEEDKKHERHPIFGNIVDEVAYHEKYPTIYHLRKKLVDSTDKADLRLIYLALAHMIKFRGHFLIEGDLNPDNSDVDKLFIQLVQTYNQLFEENPINASGVDAKAILSARLSKSRRLENLIAQLPGEKKNGLFGNLIALSLGLTPNFKSNFDLAEDAKLQLSKDTYDDDLDNLLAQIGDQYADLFLAAKNLSDAILLSDILRVNTEITKAPLSASMIKRYDEHHQDLTLLKALVRQQLPEKYKEIFFDQSKNGYAGYIDGGASQEEFYKFIKPILEKMDGTEELLVKLNREDLLRKQRTFDNGSIPHQIHLGELHAILRRQEDFYPFLKDNREKIEKILTFRIPYYVGPLARGNSRFAWMTRKSEETITPWNFEEVVDKGASAQSFIERMTNFDKNLPNEKVLPKHSLLYEYFTVYNELTKVKYVTEGMRKPAFLSGEQKKAIVDLLFKTNRKVTVKQLKEDYFKKIECFDSVEISGVEDRFNASLGTYHDLLKIIKDKDFLDNEENEDILEDIVLTLTLFEDREMIEERLKTYAHLFDDKVMKQLKRRRYTGWGRLSRKLINGIRDKQSGKTILDFLKSDGFANRNFMQLIHDDSLTFKEDIQKAQVSGQGDSLHEHIANLAGSPAIKKGILQTVKVVDELVKVMGRHKPENIVIEMARENQTTQKGQKNSRERMKRIEEGIKELGSQILKEHPVENTQLQNEKLYLYYLQNGRDMYVDQELDINRLSDYDVDHIVPQSFLKDDSIDNKVLTRSDKARGKSDNVPSEEVVKKMKNYWRQLLNAKLITQRKFDNLTKAERGGLSELDKAGFIKRQLVETRQITKHVAQILDSRMNTKYDENDKLIREVKVITLKSKLVSDFRKDFQFYKVREINNYHHAHDAYLNAVVGTALIKKYPKLESEFVYGDYKVYDVRKMIAKSEQEIGKATAKYFFYSNIMNFFKTEITLANGEIRKRPLIETNGETGEIVWDKGRDFATVRKVLSMPQVNIVKKTEVQTGGFSKESILPKRNSDKLIARKKDWDPKKYGGFDSPTVAYSVLVVAKVEKGKSKKLKSVKELLGITIMERSSFEKNPIDFLEAKGYKEVKKDLIIKLPKYSLFELENGRKRMLASAGELQKGNELALPSKYVNFLYLASHYEKLKGSPEDNEQKQLFVEQHKHYLDEIIEQISEFSKRVILADANLDKVLSAYNKHRDKPIREQAENIIHLFTLTNLGAPAAFKYFDTTIDRKRYTSTKEVLDATLIHQSITGLYETRIDLSQLGGDGGEAAAKGSSGGGGGMDPLQLLQPLEAEIKGTKLKAHWNSGATITCVPQAFLEEEVPIKNIWIKTIHGEKEQPVYYLTFKIQGRKVEAEVISSPYDYILVSPSDIPWLMKKPLQLTTLVPLQEYEERLLKQTMLTGSYKEKLQSLFLKYDALWQHWENQVGHRRIKPHHIATGTVNPRPQKQYPINPKAKASIQTVINDLLKQGVLIQQNSIMNTPVYPVPKPDGKWRMVLDYREVNKTIPLIAAQNQHSAGILSSIFRGKYKTTLDLSNGFWAHSITPESYWLTAFTWLGQQYCWTRLPQGFLNSPALFNADVVDLLKEVPNVQVYVDDIYISHDDPREHLEQLEKVFSLLLNAGYVVSLKKSEIAQHEVEFLGFNITKEGRGLTETFKQKLLNITPPRDLKQLQSILGKLNFARNFIPNFSELVKPLYNIIATAPGKYITWTTDNSQQLQNIISMLNSAENLEERNPEVRLIMKVNTSPSAGYIRFYNEFAKRPIMYLNYVYTKAEVKFTNTEKLLTTIHKGLIKALDLGMGQEILVYSPIVSMTKIQKTPLPERKALPIRWITWMSYLEDPRIQFHYDKTLPELQQVPTVTDDIIAKIKHPSEFSMVFYTDGSAIKHPNVNKSHNAGMGIAQVQFKPEFTVINTWSIPLGDHTAQLAEVAAVEFACKKALKIDGPVLIVTDSFYVAESVNKELPYWQSNGFFNNKKKPLKHVSKWKSIADCIQLKPDIIIIHEKGHQPTASTFHTEGNNLADKLATQGSYVVNAGKRTADGSEFEKRTADGSEFESPKKKAKVE

SEQ ID NO: 672 - protein, 2171 aa, synthetic construct
MPAAKRVKLDGGDKKYSIGLDIGTNSVGWAVITDEYKVPSKKFKVLGNTDRHSIKKNLIGALLFDSGETAEATRLKRTARRRYTRRKNRICYLQEIFSNEMAKVDDSFFHRLEESFLVEEDKKHERHPIFGNIVDEVAYHEKYPTIYHLRKKLVDSTDKADLRLIYLALAHMIKFRGHFLIEGDLNPDNSDVDKLFIQLVQTYNQLFEENPINASGVDAKAILSARLSKSRRLENLIAQLPGEKKNGLFGNLIALSLGLTPNFKSNFDLAEDAKLQLSKDTYDDDLDNLLAQIGDQYADLFLAAKNLSDAILLSDILRVNTEITKAPLSASMIKRYDEHHQDLTLLKALVRQQLPEKYKEIFFDQSKNGYAGYIDGGASQEEFYKFIKPILEKMDGTEELLVKLNREDLLRKQRTFDNGSIPHQIHLGELHAILRRQEDFYPFLKDNREKIEKILTFRIPYYVGPLARGNSRFAWMTRKSEETITPWNFEEVVDKGASAQSFIERMTNFDKNLPNEKVLPKHSLLYEYFTVYNELTKVKYVTEGMRKPAFLSGEQKKAIVDLLFKTNRKVTVKQLKEDYFKKIECFDSVEISGVEDRFNASLGTYHDLLKIIKDKDFLDNEENEDILEDIVLTLTLFEDREMIEERLKTYAHLFDDKVMKQLKRRRYTGWGRLSRKLINGIRDKQSGKTILDFLKSDGFANRNFMQLIHDDSLTFKEDIQKAQVSGQGDSLHEHIANLAGSPAIKKGILQTVKVVDELVKVMGRHKPENIVIEMARENQTTQKGQKNSRERMKRIEEGIKELGSQILKEHPVENTQLQNEKLYLYYLQNGRDMYVDQELDINRLSDYDVDHIVPQSFLKDDSIDNKVLTRSDKARGKSDNVPSEEVVKKMKNYWRQLLNAKLITQRKFDNLTKAERGGLSELDKAGFIKRQLVETRQITKHVAQILDSRMNTKYDENDKLIREVKVITLKSKLVSDFRKDFQFYKVREINNYHHAHDAYLNAVVGTALIKKYPKLESEFVYGDYKVYDVRKMIAKSEQEIGKATAKYFFYSNIMNFFKTEITLANGEIRKRPLIETNGETGEIVWDKGRDFATVRKVLSMPQVNIVKKTEVQTGGFSKESILPKRNSDKLIARKKDWDPKKYGGFDSPTVAYSVLVVAKVEKGKSKKLKSVKELLGITIMERSSFEKNPIDFLEAKGYKEVKKDLIIKLPKYSLFELENGRKRMLASAGELQKGNELALPSKYVNFLYLASHYEKLKGSPEDNEQKQLFVEQHKHYLDEIIEQISEFSKRVILADANLDKVLSAYNKHRDKPIREQAENIIHLFTLTNLGAPAAFKYFDTTIDRKRYTSTKEVLDATLIHQSITGLYETRIDLSQLGGDGGGGSPAPGGMDPLQLLQPLEAEIKGTKLKAHWNSGATITCVPQAFLEEEVPIKNIWIKTIHGEKEQPVYYLTFKIQGRKVEAEVISSPYDYILVSPSDIPWLMKKPLQLTTLVPLQEYEERLLKQTMLTGSYKEKLQSLFLKYDALWQHWENQVGHRRIKPHHIATGTVNPRPQKQYPINPKAKASIQTVINDLLKQGVLIQQNSIMNTPVYPVPKPDGKWRMVLDYREVNKTIPLIAAQNQHSAGILSSIFRGKYKTTLDLSNGFWAHSITPESYWLTAFTWLGQQYCWTRLPQGFLNSPALFNADVVDLLKEVPNVQVYVDDIYISHDDPREHLEQLEKVFSLLLNAGYVVSLKKSEIAQHEVEFLGFNITKEGRGLTETFKQKLLNITPPRDLKQLQSILGKLNFARNFIPNFSELVKPLYNIIATAPGKYITWTTDNSQQLQNIISMLNSAENLEERNPEVRLIMKVNTSPSAGYIRFYNEFAKRPIMYLNYVYTKAEVKFTNTEKLLTTIHKGLIKALDLGMGQEILVYSPIVSMTKIQKTPLPERKALPIRWITWMSYLEDPRIQFHYDKTLPELQQVPTVTDDIIAKIKHPSEFSMVFYTDGSAIKHPNVNKSHNAGMGIAQVQFKPEFTVINTWSIPLGDHTAQLAEVAAVEFACKKALKIDGPVLIVTDSFYVAESVNKELPYWQSNGFFNNKKKPLKHVSKWKSIADCIQLKPDIIIIHEKGHQPTASTFHTEGNNLADKLATQGSYVVNAGKRTADGSEFEKRTADGSEFESPKKKAKVE

SEQ ID NO: 673 - protein, 2185 aa, synthetic construct
MPAAKRVKLDGGDKKYSIGLDIGTNSVGWAVITDEYKVPSKKFKVLGNTDRHSIKKNLIGALLFDSGETAEATRLKRTARRRYTRRKNRICYLQEIFSNEMAKVDDSFFHRLEESFLVEEDKKHERHPIFGNIVDEVAYHEKYPTIYHLRKKLVDSTDKADLRLIYLALAHMIKFRGHFLIEGDLNPDNSDVDKLFIQLVQTYNQLFEENPINASGVDAKAILSARLSKSRRLENLIAQLPGEKKNGLFGNLIALSLGLTPNFKSNFDLAEDAKLQLSKDTYDDDLDNLLAQIGDQYADLFLAAKNLSDAILLSDILRVNTEITKAPLSASMIKRYDEHHQDLTLLKALVRQQLPEKYKEIFFDQSKNGYAGYIDGGASQEEFYKFIKPILEKMDGTEELLVKLNREDLLRKQRTFDNGSIPHQIHLGELHAILRRQEDFYPFLKDNREKIEKILTFRIPYYVGPLARGNSRFAWMTRKSEETITPWNFEEVVDKGASAQSFIERMTNFDKNLPNEKVLPKHSLLYEYFTVYNELTKVKYVTEGMRKPAFLSGEQKKAIVDLLFKTNRKVTVKQLKEDYFKKIECFDSVEISGVEDRFNASLGTYHDLLKIIKDKDFLDNEENEDILEDIVLTLTLFEDREMIEERLKTYAHLFDDKVMKQLKRRRYTGWGRLSRKLINGIRDKQSGKTILDFLKSDGFANRNFMQLIHDDSLTFKEDIQKAQVSGQGDSLHEHIANLAGSPAIKKGILQTVKVVDELVKVMGRHKPENIVIEMARENQTTQKGQKNSRERMKRIEEGIKELGSQILKEHPVENTQLQNEKLYLYYLQNGRDMYVDQELDINRLSDYDVDHIVPQSFLKDDSIDNKVLTRSDKARGKSDNVPSEEVVKKMKNYWRQLLNAKLITQRKFDNLTKAERGGLSELDKAGFIKRQLVETRQITKHVAQILDSRMNTKYDENDKLIREVKVITLKSKLVSDFRKDFQFYKVREINNYHHAHDAYLNAVVGTALIKKYPKLESEFVYGDYKVYDVRKMIAKSEQEIGKATAKYFFYSNIMNFFKTEITLANGEIRKRPLIETNGETGEIVWDKGRDFATVRKVLSMPQVNIVKKTEVQTGGFSKESILPKRNSDKLIARKKDWDPKKYGGFDSPTVAYSVLVVAKVEKGKSKKLKSVKELLGITIMERSSFEKNPIDFLEAKGYKEVKKDLIIKLPKYSLFELENGRKRMLASAGELQKGNELALPSKYVNFLYLASHYEKLKGSPEDNEQKQLFVEQHKHYLDEIIEQISEFSKRVILADANLDKVLSAYNKHRDKPIREQAENIIHLFTLTNLGAPAAFKYFDTTIDRKRYTSTKEVLDATLIHQSITGLYETRIDLSQLGGDGGGGGGSGGGGSGGGGSGGGGSGGMDPLQLLQPLEAEIKGTKLKAHWNSGATITCVPQAFLEEEVPIKNIWIKTIHGEKEQPVYYLTFKIQGRKVEAEVISSPYDYILVSPSDIPWLMKKPLQLTTLVPLQEYEERLLKQTMLTGSYKEKLQSLFLKYDALWQHWENQVGHRRIKPHHIATGTVNPRPQKQYPINPKAKASIQTVINDLLKQGVLIQQNSIMNTPVYPVPKPDGKWRMVLDYREVNKTIPLIAAQNQHSAGILSSIFRGKYKTTLDLSNGFWAHSITPESYWLTAFTWLGQQYCWTRLPQGFLNSPALFNADVVDLLKEVPNVQVYVDDIYISHDDPREHLEQLEKVFSLLLNAGYVVSLKKSEIAQHEVEFLGFNITKEGRGLTETFKQKLLNITPPRDLKQLQSILGKLNFARNFIPNFSELVKPLYNIIATAPGKYITWTTDNSQQLQNIISMLNSAENLEERNPEVRLIMKVNTSPSAGYIRFYNEFAKRPIMYLNYVYTKAEVKFTNTEKLLTTIHKGLIKALDLGMGQEILVYSPIVSMTKIQKTPLPERKALPIRWITWMSYLEDPRIQFHYDKTLPELQQVPTVTDDIIAKIKHPSEFSMVFYTDGSAIKHPNVNKSHNAGMGIAQVQFKPEFTVINTWSIPLGDHTAQLAEVAAVEFACKKALKIDGPVLIVTDSFYVAESVNKELPYWQSNGFFNNKKKPLKHVSKWKSIADCIQLKPDIIIIHEKGHQPTASTFHTEGNNLADKLATQGSYVVNAGKRTADGSEFEKRTADGSEFESPKKKAKVE

SEQ ID NO: 674 - protein, 2176 aa, synthetic construct
MPAAKRVKLDGGDKKYSIGLDIGTNSVGWAVITDEYKVPSKKFKVLGNTDRHSIKKNLIGALLFDSGETAEATRLKRTARRRYTRRKNRICYLQEIFSNEMAKVDDSFFHRLEESFLVEEDKKHERHPIFGNIVDEVAYHEKYPTIYHLRKKLVDSTDKADLRLIYLALAHMIKFRGHFLIEGDLNPDNSDVDKLFIQLVQTYNQLFEENPINASGVDAKAILSARLSKSRRLENLIAQLPGEKKNGLFGNLIALSLGLTPNFKSNFDLAEDAKLQLSKDTYDDDLDNLLAQIGDQYADLFLAAKNLSDAILLSDILRVNTEITKAPLSASMIKRYDEHHQDLTLLKALVRQQLPEKYKEIFFDQSKNGYAGYIDGGASQEEFYKFIKPILEKMDGTEELLVKLNREDLLRKQRTFDNGSIPHQIHLGELHAILRRQEDFYPFLKDNREKIEKILTFRIPYYVGPLARGNSRFAWMTRKSEETITPWNFEEVVDKGASAQSFIERMTNFDKNLPNEKVLPKHSLLYEYFTVYNELTKVKYVTEGMRKPAFLSGEQKKAIVDLLFKTNRKVTVKQLKEDYFKKIECFDSVEISGVEDRFNASLGTYHDLLKIIKDKDFLDNEENEDILEDIVLTLTLFEDREMIEERLKTYAHLFDDKVMKQLKRRRYTGWGRLSRKLINGIRDKQSGKTILDFLKSDGFANRNFMQLIHDDSLTFKEDIQKAQVSGQGDSLHEHIANLAGSPAIKKGILQTVKVVDELVKVMGRHKPENIVIEMARENQTTQKGQKNSRERMKRIEEGIKELGSQILKEHPVENTQLQNEKLYLYYLQNGRDMYVDQELDINRLSDYDVDHIVPQSFLKDDSIDNKVLTRSDKARGKSDNVPSEEVVKKMKNYWRQLLNAKLITQRKFDNLTKAERGGLSELDKAGFIKRQLVETRQITKHVAQILDSRMNTKYDENDKLIREVKVITLKSKLVSDFRKDFQFYKVREINNYHHAHDAYLNAVVGTALIKKYPKLESEFVYGDYKVYDVRKMIAKSEQEIGKATAKYFFYSNIMNFFKTEITLANGEIRKRPLIETNGETGEIVWDKGRDFATVRKVLSMPQVNIVKKTEVQTGGFSKESILPKRNSDKLIARKKDWDPKKYGGFDSPTVAYSVLVVAKVEKGKSKKLKSVKELLGITIMERSSFEKNPIDFLEAKGYKEVKKDLIIKLPKYSLFELENGRKRMLASAGELQKGNELALPSKYVNFLYLASHYEKLKGSPEDNEQKQLFVEQHKHYLDEIIEQISEFSKRVILADANLDKVLSAYNKHRDKPIREQAENIIHLFTLTNLGAPAAFKYFDTTIDRKRYTSTKEVLDATLIHQSITGLYETRIDLSQLGGDGGGSSEAAAKGGGGGMDPLQLLQPLEAEIKGTKLKAHWNSGATITCVPQAFLEEEVPIKNIWIKTIHGEKEQPVYYLTFKIQGRKVEAEVISSPYDYILVSPSDIPWLMKKPLQLTTLVPLQEYEERLLKQTMLTGSYKEKLQSLFLKYDALWQHWENQVGHRRIKPHHIATGTVNPRPQKQYPINPKAKASIQTVINDLLKQGVLIQQNSIMNTPVYPVPKPDGKWRMVLDYREVNKTIPLIAAQNQHSAGILSSIFRGKYKTTLDLSNGFWAHSITPESYWLTAFTWLGQQYCWTRLPQGFLNSPALFNADVVDLLKEVPNVQVYVDDIYISHDDPREHLEQLEKVFSLLLNAGYVVSLKKSEIAQHEVEFLGFNITKEGRGLTETFKQKLLNITPPRDLKQLQSILGKLNFARNFIPNFSELVKPLYNIIATAPGKYITWTTDNSQQLQNIISMLNSAENLEERNPEVRLIMKVNTSPSAGYIRFYNEFAKRPIMYLNYVYTKAEVKFTNTEKLLTTIHKGLIKALDLGMGQEILVYSPIVSMTKIQKTPLPERKALPIRWITWMSYLEDPRIQFHYDKTLPELQQVPTVTDDIIAKIKHPSEFSMVFYTDGSAIKHPNVNKSHNAGMGIAQVQFKPEFTVINTWSIPLGDHTAQLAEVAAVEFACKKALKIDGPVLIVTDSFYVAESVNKELPYWQSNGFFNNKKKPLKHVSKWKSIADCIQLKPDIIIIHEKGHQPTASTFHTEGNNLADKLATQGSYVVNAGKRTADGSEFEKRTADGSEFESPKKKAKVE

SEQ ID NO: 675 - protein, 2176 aa, synthetic construct
MPAAKRVKLDGGDKKYSIGLDIGTNSVGWAVITDEYKVPSKKFKVLGNTDRHSIKKNLIGALLFDSGETAEATRLKRTARRRYTRRKNRICYLQEIFSNEMAKVDDSFFHRLEESFLVEEDKKHERHPIFGNIVDEVAYHEKYPTIYHLRKKLVDSTDKADLRLIYLALAHMIKFRGHFLIEGDLNPDNSDVDKLFIQLVQTYNQLFEENPINASGVDAKAILSARLSKSRRLENLIAQLPGEKKNGLFGNLIALSLGLTPNFKSNFDLAEDAKLQLSKDTYDDDLDNLLAQIGDQYADLFLAAKNLSDAILLSDILRVNTEITKAPLSASMIKRYDEHHQDLTLLKALVRQQLPEKYKEIFFDQSKNGYAGYIDGGASQEEFYKFIKPILEKMDGTEELLVKLNREDLLRKQRTFDNGSIPHQIHLGELHAILRRQEDFYPFLKDNREKIEKILTFRIPYYVGPLARGNSRFAWMTRKSEETITPWNFEEVVDKGASAQSFIERMTNFDKNLPNEKVLPKHSLLYEYFTVYNELTKVKYVTEGMRKPAFLSGEQKKAIVDLLFKTNRKVTVKQLKEDYFKKIECFDSVEISGVEDRFNASLGTYHDLLKIIKDKDFLDNEENEDILEDIVLTLTLFEDREMIEERLKTYAHLFDDKVMKQLKRRRYTGWGRLSRKLINGIRDKQSGKTILDFLKSDGFANRNFMQLIHDDSLTFKEDIQKAQVSGQGDSLHEHIANLAGSPAIKKGILQTVKVVDELVKVMGRHKPENIVIEMARENQTTQKGQKNSRERMKRIEEGIKELGSQILKEHPVENTQLQNEKLYLYYLQNGRDMYVDQELDINRLSDYDVDHIVPQSFLKDDSIDNKVLTRSDKARGKSDNVPSEEVVKKMKNYWRQLLNAKLITQRKFDNLTKAERGGLSELDKAGFIKRQLVETRQITKHVAQILDSRMNTKYDENDKLIREVKVITLKSKLVSDFRKDFQFYKVREINNYHHAHDAYLNAVVGTALIKKYPKLESEFVYGDYKVYDVRKMIAKSEQEIGKATAKYFFYSNIMNFFKTEITLANGEIRKRPLIETNGETGEIVWDKGRDFATVRKVLSMPQVNIVKKTEVQTGGFSKESILPKRNSDKLIARKKDWDPKKYGGFDSPTVAYSVLVVAKVEKGKSKKLKSVKELLGITIMERSSFEKNPIDFLEAKGYKEVKKDLIIKLPKYSLFELENGRKRMLASAGELQKGNELALPSKYVNFLYLASHYEKLKGSPEDNEQKQLFVEQHKHYLDEIIEQISEFSKRVILADANLDKVLSAYNKHRDKPIREQAENIIHLFTLTNLGAPAAFKYFDTTIDRKRYTSTKEVLDATLIHQSITGLYETRIDLSQLGGDGGGSSPAPEAAAKGGMDPLQLLQPLEAEIKGTKLKAHWNSGATITCVPQAFLEEEVPIKNIWIKTIHGEKEQPVYYLTFKIQGRKVEAEVISSPYDYILVSPSDIPWLMKKPLQLTTLVPLQEYEERLLKQTMLTGSYKEKLQSLFLKYDALWQHWENQVGHRRIKPHHIATGTVNPRPQKQYPINPKAKASIQTVINDLLKQGVLIQQNSIMNTPVYPVPKPDGKWRMVLDYREVNKTIPLIAAQNQHSAGILSSIFRGKYKTTLDLSNGFWAHSITPESYWLTAFTWLGQQYCWTRLPQGFLNSPALFNADVVDLLKEVPNVQVYVDDIYISHDDPREHLEQLEKVFSLLLNAGYVVSLKKSEIAQHEVEFLGFNITKEGRGLTETFKQKLLNITPPRDLKQLQSILGKLNFARNFIPNFSELVKPLYNIIATAPGKYITWTTDNSQQLQNIISMLNSAENLEERNPEVRLIMKVNTSPSAGYIRFYNEFAKRPIMYLNYVYTKAEVKFTNTEKLLTTIHKGLIKALDLGMGQEILVYSPIVSMTKIQKTPLPERKALPIRWITWMSYLEDPRIQFHYDKTLPELQQVPTVTDDIIAKIKHPSEFSMVFYTDGSAIKHPNVNKSHNAGMGIAQVQFKPEFTVINTWSIPLGDHTAQLAEVAAVEFACKKALKIDGPVLIVTDSFYVAESVNKELPYWQSNGFFNNKKKPLKHVSKWKSIADCIQLKPDIIIIHEKGHQPTASTFHTEGNNLADKLATQGSYVVNAGKRTADGSEFEKRTADGSEFESPKKKAKVE

SEQ ID NO: 676 - protein, 2171 aa, synthetic construct
MPAAKRVKLDGGDKKYSIGLDIGTNSVGWAVITDEYKVPSKKFKVLGNTDRHSIKKNLIGALLFDSGETAEATRLKRTARRRYTRRKNRICYLQEIFSNEMAKVDDSFFHRLEESFLVEEDKKHERHPIFGNIVDEVAYHEKYPTIYHLRKKLVDSTDKADLRLIYLALAHMIKFRGHFLIEGDLNPDNSDVDKLFIQLVQTYNQLFEENPINASGVDAKAILSARLSKSRRLENLIAQLPGEKKNGLFGNLIALSLGLTPNFKSNFDLAEDAKLQLSKDTYDDDLDNLLAQIGDQYADLFLAAKNLSDAILLSDILRVNTEITKAPLSASMIKRYDEHHQDLTLLKALVRQQLPEKYKEIFFDQSKNGYAGYIDGGASQEEFYKFIKPILEKMDGTEELLVKLNREDLLRKQRTFDNGSIPHQIHLGELHAILRRQEDFYPFLKDNREKIEKILTFRIPYYVGPLARGNSRFAWMTRKSEETITPWNFEEVVDKGASAQSFIERMTNFDKNLPNEKVLPKHSLLYEYFTVYNELTKVKYVTEGMRKPAFLSGEQKKAIVDLLFKTNRKVTVKQLKEDYFKKIECFDSVEISGVEDRFNASLGTYHDLLKIIKDKDFLDNEENEDILEDIVLTLTLFEDREMIEERLKTYAHLFDDKVMKQLKRRRYTGWGRLSRKLINGIRDKQSGKTILDFLKSDGFANRNFMQLIHDDSLTFKEDIQKAQVSGQGDSLHEHIANLAGSPAIKKGILQTVKVVDELVKVMGRHKPENIVIEMARENQTTQKGQKNSRERMKRIEEGIKELGSQILKEHPVENTQLQNEKLYLYYLQNGRDMYVDQELDINRLSDYDVDHIVPQSFLKDDSIDNKVLTRSDKARGKSDNVPSEEVVKKMKNYWRQLLNAKLITQRKFDNLTKAERGGLSELDKAGFIKRQLVETRQITKHVAQILDSRMNTKYDENDKLIREVKVITLKSKLVSDFRKDFQFYKVREINNYHHAHDAYLNAVVGTALIKKYPKLESEFVYGDYKVYDVRKMIAKSEQEIGKATAKYFFYSNIMNFFKTEITLANGEIRKRPLIETNGETGEIVWDKGRDFATVRKVLSMPQVNIVKKTEVQTGGFSKESILPKRNSDKLIARKKDWDPKKYGGFDSPTVAYSVLVVAKVEKGKSKKLKSVKELLGITIMERSSFEKNPIDFLEAKGYKEVKKDLIIKLPKYSLFELENGRKRMLASAGELQKGNELALPSKYVNFLYLASHYEKLKGSPEDNEQKQLFVEQHKHYLDEIIEQISEFSKRVILADANLDKVLSAYNKHRDKPIREQAENIIHLFTLTNLGAPAAFKYFDTTIDRKRYTSTKEVLDATLIHQSITGLYETRIDLSQLGGDGGPAPGGGGGMDPLQLLQPLEAEIKGTKLKAHWNSGATITCVPQAFLEEEVPIKNIWIKTIHGEKEQPVYYLTFKIQGRKVEAEVISSPYDYILVSPSDIPWLMKKPLQLTTLVPLQEYEERLLKQTMLTGSYKEKLQSLFLKYDALWQHWENQVGHRRIKPHHIATGTVNPRPQKQYPINPKAKASIQTVINDLLKQGVLIQQNSIMNTPVYPVPKPDGKWRMVLDYREVNKTIPLIAAQNQHSAGILSSIFRGKYKTTLDLSNGFWAHSITPESYWLTAFTWLGQQYCWTRLPQGFLNSPALFNADVVDLLKEVPNVQVYVDDIYISHDDPREHLEQLEKVFSLLLNAGYVVSLKKSEIAQHEVEFLGFNITKEGRGLTETFKQKLLNITPPRDLKQLQSILGKLNFARNFIPNFSELVKPLYNIIATAPGKYITWTTDNSQQLQNIISMLNSAENLEERNPEVRLIMKVNTSPSAGYIRFYNEFAKRPIMYLNYVYTKAEVKFTNTEKLLTTIHKGLIKALDLGMGQEILVYSPIVSMTKIQKTPLPERKALPIRWITWMSYLEDPRIQFHYDKTLPELQQVPTVTDDIIAKIKHPSEFSMVFYTDGSAIKHPNVNKSHNAGMGIAQVQFKPEFTVINTWSIPLGDHTAQLAEVAAVEFACKKALKIDGPVLIVTDSFYVAESVNKELPYWQSNGFFNNKKKPLKHVSKWKSIADCIQLKPDIIIIHEKGHQPTASTFHTEGNNLADKLATQGSYVVNAGKRTADGSEFEKRTADGSEFESPKKKAKVE

SEQ ID NO: 677 - protein, 2180 aa, synthetic construct
MPAAKRVKLDGGDKKYSIGLDIGTNSVGWAVITDEYKVPSKKFKVLGNTDRHSIKKNLIGALLFDSGETAEATRLKRTARRRYTRRKNRICYLQEIFSNEMAKVDDSFFHRLEESFLVEEDKKHERHPIFGNIVDEVAYHEKYPTIYHLRKKLVDSTDKADLRLIYLALAHMIKFRGHFLIEGDLNPDNSDVDKLFIQLVQTYNQLFEENPINASGVDAKAILSARLSKSRRLENLIAQLPGEKKNGLFGNLIALSLGLTPNFKSNFDLAEDAKLQLSKDTYDDDLDNLLAQIGDQYADLFLAAKNLSDAILLSDILRVNTEITKAPLSASMIKRYDEHHQDLTLLKALVRQQLPEKYKEIFFDQSKNGYAGYIDGGASQEEFYKFIKPILEKMDGTEELLVKLNREDLLRKQRTFDNGSIPHQIHLGELHAILRRQEDFYPFLKDNREKIEKILTFRIPYYVGPLARGNSRFAWMTRKSEETITPWNFEEVVDKGASAQSFIERMTNFDKNLPNEKVLPKHSLLYEYFTVYNELTKVKYVTEGMRKPAFLSGEQKKAIVDLLFKTNRKVTVKQLKEDYFKKIECFDSVEISGVEDRFNASLGTYHDLLKIIKDKDFLDNEENEDILEDIVLTLTLFEDREMIEERLKTYAHLFDDKVMKQLKRRRYTGWGRLSRKLINGIRDKQSGKTILDFLKSDGFANRNFMQLIHDDSLTFKEDIQKAQVSGQGDSLHEHIANLAGSPAIKKGILQTVKVVDELVKVMGRHKPENIVIEMARENQTTQKGQKNSRERMKRIEEGIKELGSQILKEHPVENTQLQNEKLYLYYLQNGRDMYVDQELDINRLSDYDVDHIVPQSFLKDDSIDNKVLTRSDKARGKSDNVPSEEVVKKMKNYWRQLLNAKLITQRKFDNLTKAERGGLSELDKAGFIKRQLVETRQITKHVAQILDSRMNTKYDENDKLIREVKVITLKSKLVSDFRKDFQFYKVREINNYHHAHDAYLNAVVGTALIKKYPKLESEFVYGDYKVYDVRKMIAKSEQEIGKATAKYFFYSNIMNFFKTEITLANGEIRKRPLIETNGETGEIVWDKGRDFATVRKVLSMPQVNIVKKTEVQTGGFSKESILPKRNSDKLIARKKDWDPKKYGGFDSPTVAYSVLVVAKVEKGKSKKLKSVKELLGITIMERSSFEKNPIDFLEAKGYKEVKKDLIIKLPKYSLFELENGRKRMLASAGELQKGNELALPSKYVNFLYLASHYEKLKGSPEDNEQKQLFVEQHKHYLDEIIEQISEFSKRVILADANLDKVLSAYNKHRDKPIREQAENIIHLFTLTNLGAPAAFKYFDTTIDRKRYTSTKEVLDATLIHQSITGLYETRIDLSQLGGDGGGSSGSSGSSGSSGSSGGMDPLQLLQPLEAEIKGTKLKAHWNSGATITCVPQAFLEEEVPIKNIWIKTIHGEKEQPVYYLTFKIQGRKVEAEVISSPYDYILVSPSDIPWLMKKPLQLTTLVPLQEYEERLLKQTMLTGSYKEKLQSLFLKYDALWQHWENQVGHRRIKPHHIATGTVNPRPQKQYPINPKAKASIQTVINDLLKQGVLIQQNSIMNTPVYPVPKPDGKWRMVLDYREVNKTIPLIAAQNQHSAGILSSIFRGKYKTTLDLSNGFWAHSITPESYWLTAFTWLGQQYCWTRLPQGFLNSPALFNADVVDLLKEVPNVQVYVDDIYISHDDPREHLEQLEKVFSLLLNAGYVVSLKKSEIAQHEVEFLGFNITKEGRGLTETFKQKLLNITPPRDLKQLQSILGKLNFARNFIPNFSELVKPLYNIIATAPGKYITWTTDNSQQLQNIISMLNSAENLEERNPEVRLIMKVNTSPSAGYIRFYNEFAKRPIMYLNYVYTKAEVKFTNTEKLLTTIHKGLIKALDLGMGQEILVYSPIVSMTKIQKTPLPERKALPIRWITWMSYLEDPRIQFHYDKTLPELQQVPTVTDDIIAKIKHPSEFSMVFYTDGSAIKHPNVNKSHNAGMGIAQVQFKPEFTVINTWSIPLGDHTAQLAEVAAVEFACKKALKIDGPVLIVTDSFYVAESVNKELPYWQSNGFFNNKKKPLKHVSKWKSIADCIQLKPDIIIIHEKGHQPTASTFHTEGNNLADKLATQGSYVVNAGKRTADGSEFEKRTADGSEFESPKKKAKVE

SEQ ID NO: 678 - protein, 2174 aa, synthetic construct
MPAAKRVKLDGGDKKYSIGLDIGTNSVGWAVITDEYKVPSKKFKVLGNTDRHSIKKNLIGALLFDSGETAEATRLKRTARRRYTRRKNRICYLQEIFSNEMAKVDDSFFHRLEESFLVEEDKKHERHPIFGNIVDEVAYHEKYPTIYHLRKKLVDSTDKADLRLIYLALAHMIKFRGHFLIEGDLNPDNSDVDKLFIQLVQTYNQLFEENPINASGVDAKAILSARLSKSRRLENLIAQLPGEKKNGLFGNLIALSLGLTPNFKSNFDLAEDAKLQLSKDTYDDDLDNLLAQIGDQYADLFLAAKNLSDAILLSDILRVNTEITKAPLSASMIKRYDEHHQDLTLLKALVRQQLPEKYKEIFFDQSKNGYAGYIDGGASQEEFYKFIKPILEKMDGTEELLVKLNREDLLRKQRTFDNGSIPHQIHLGELHAILRRQEDFYPFLKDNREKIEKILTFRIPYYVGPLARGNSRFAWMTRKSEETITPWNFEEVVDKGASAQSFIERMTNFDKNLPNEKVLPKHSLLYEYFTVYNELTKVKYVTEGMRKPAFLSGEQKKAIVDLLFKTNRKVTVKQLKEDYFKKIECFDSVEISGVEDRFNASLGTYHDLLKIIKDKDFLDNEENEDILEDIVLTLTLFEDREMIEERLKTYAHLFDDKVMKQLKRRRYTGWGRLSRKLINGIRDKQSGKTILDFLKSDGFANRNFMQLIHDDSLTFKEDIQKAQVSGQGDSLHEHIANLAGSPAIKKGILQTVKVVDELVKVMGRHKPENIVIEMARENQTTQKGQKNSRERMKRIEEGIKELGSQILKEHPVENTQLQNEKLYLYYLQNGRDMYVDQELDINRLSDYDVDHIVPQSFLKDDSIDNKVLTRSDKARGKSDNVPSEEVVKKMKNYWRQLLNAKLITQRKFDNLTKAERGGLSELDKAGFIKRQLVETRQITKHVAQILDSRMNTKYDENDKLIREVKVITLKSKLVSDFRKDFQFYKVREINNYHHAHDAYLNAVVGTALIKKYPKLESEFVYGDYKVYDVRKMIAKSEQEIGKATAKYFFYSNIMNFFKTEITLANGEIRKRPLIETNGETGEIVWDKGRDFATVRKVLSMPQVNIVKKTEVQTGGFSKESILPKRNSDKLIARKKDWDPKKYGGFDSPTVAYSVLVVAKVEKGKSKKLKSVKELLGITIMERSSFEKNPIDFLEAKGYKEVKKDLIIKLPKYSLFELENGRKRMLASAGELQKGNELALPSKYVNFLYLASHYEKLKGSPEDNEQKQLFVEQHKHYLDEIIEQISEFSKRVILADANLDKVLSAYNKHRDKPIREQAENIIHLFTLTNLGAPAAFKYFDTTIDRKRYTSTKEVLDATLIHQSITGLYETRIDLSQLGGDGGGGGPAPGGSGGMDPLQLLQPLEAEIKGTKLKAHWNSGATITCVPQAFLEEEVPIKNIWIKTIHGEKEQPVYYLTFKIQGRKVEAEVISSPYDYILVSPSDIPWLMKKPLQLTTLVPLQEYEERLLKQTMLTGSYKEKLQSLFLKYDALWQHWENQVGHRRIKPHHIATGTVNPRPQKQYPINPKAKASIQTVINDLLKQGVLIQQNSIMNTPVYPVPKPDGKWRMVLDYREVNKTIPLIAAQNQHSAGILSSIFRGKYKTTLDLSNGFWAHSITPESYWLTAFTWLGQQYCWTRLPQGFLNSPALFNADVVDLLKEVPNVQVYVDDIYISHDDPREHLEQLEKVFSLLLNAGYVVSLKKSEIAQHEVEFLGFNITKEGRGLTETFKQKLLNITPPRDLKQLQSILGKLNFARNFIPNFSELVKPLYNIIATAPGKYITWTTDNSQQLQNIISMLNSAENLEERNPEVRLIMKVNTSPSAGYIRFYNEFAKRPIMYLNYVYTKAEVKFTNTEKLLTTIHKGLIKALDLGMGQEILVYSPIVSMTKIQKTPLPERKALPIRWITWMSYLEDPRIQFHYDKTLPELQQVPTVTDDIIAKIKHPSEFSMVFYTDGSAIKHPNVNKSHNAGMGIAQVQFKPEFTVINTWSIPLGDHTAQLAEVAAVEFACKKALKIDGPVLIVTDSFYVAESVNKELPYWQSNGFFNNKKKPLKHVSKWKSIADCIQLKPDIIIIHEKGHQPTASTFHTEGNNLADKLATQGSYVVNAGKRTADGSEFEKRTADGSEFESPKKKAKVE

SEQ ID NO: 679 - protein, 2176 aa, synthetic construct
MPAAKRVKLDGGDKKYSIGLDIGTNSVGWAVITDEYKVPSKKFKVLGNTDRHSIKKNLIGALLFDSGETAEATRLKRTARRRYTRRKNRICYLQEIFSNEMAKVDDSFFHRLEESFLVEEDKKHERHPIFGNIVDEVAYHEKYPTIYHLRKKLVDSTDKADLRLIYLALAHMIKFRGHFLIEGDLNPDNSDVDKLFIQLVQTYNQLFEENPINASGVDAKAILSARLSKSRRLENLIAQLPGEKKNGLFGNLIALSLGLTPNFKSNFDLAEDAKLQLSKDTYDDDLDNLLAQIGDQYADLFLAAKNLSDAILLSDILRVNTEITKAPLSASMIKRYDEHHQDLTLLKALVRQQLPEKYKEIFFDQSKNGYAGYIDGGASQEEFYKFIKPILEKMDGTEELLVKLNREDLLRKQRTFDNGSIPHQIHLGELHAILRRQEDFYPFLKDNREKIEKILTFRIPYYVGPLARGNSRFAWMTRKSEETITPWNFEEVVDKGASAQSFIERMTNFDKNLPNEKVLPKHSLLYEYFTVYNELTKVKYVTEGMRKPAFLSGEQKKAIVDLLFKTNRKVTVKQLKEDYFKKIECFDSVEISGVEDRFNASLGTYHDLLKIIKDKDFLDNEENEDILEDIVLTLTLFEDREMIEERLKTYAHLFDDKVMKQLKRRRYTGWGRLSRKLINGIRDKQSGKTILDFLKSDGFANRNFMQLIHDDSLTFKEDIQKAQVSGQGDSLHEHIANLAGSPAIKKGILQTVKVVDELVKVMGRHKPENIVIEMARENQTTQKGQKNSRERMKRIEEGIKELGSQILKEHPVENTQLQNEKLYLYYLQNGRDMYVDQELDINRLSDYDVDHIVPQSFLKDDSIDNKVLTRSDKARGKSDNVPSEEVVKKMKNYWRQLLNAKLITQRKFDNLTKAERGGLSELDKAGFIKRQLVETRQITKHVAQILDSRMNTKYDENDKLIREVKVITLKSKLVSDFRKDFQFYKVREINNYHHAHDAYLNAVVGTALIKKYPKLESEFVYGDYKVYDVRKMIAKSEQEIGKATAKYFFYSNIMNFFKTEITLANGEIRKRPLIETNGETGEIVWDKGRDFATVRKVLSMPQVNIVKKTEVQTGGFSKESILPKRNSDKLIARKKDWDPKKYGGFDSPTVAYSVLVVAKVEKGKSKKLKSVKELLGITIMERSSFEKNPIDFLEAKGYKEVKKDLIIKLPKYSLFELENGRKRMLASAGELQKGNELALPSKYVNFLYLASHYEKLKGSPEDNEQKQLFVEQHKHYLDEIIEQISEFSKRVILADANLDKVLSAYNKHRDKPIREQAENIIHLFTLTNLGAPAAFKYFDTTIDRKRYTSTKEVLDATLIHQSITGLYETRIDLSQLGGDGGGGSGSSEAAAKGGMDPLQLLQPLEAEIKGTKLKAHWNSGATITCVPQAFLEEEVPIKNIWIKTIHGEKEQPVYYLTFKIQGRKVEAEVISSPYDYILVSPSDIPWLMKKPLQLTTLVPLQEYEERLLKQTMLTGSYKEKLQSLFLKYDALWQHWENQVGHRRIKPHHIATGTVNPRPQKQYPINPKAKASIQTVINDLLKQGVLIQQNSIMNTPVYPVPKPDGKWRMVLDYREVNKTIPLIAAQNQHSAGILSSIFRGKYKTTLDLSNGFWAHSITPESYWLTAFTWLGQQYCWTRLPQGFLNSPALFNADVVDLLKEVPNVQVYVDDIYISHDDPREHLEQLEKVFSLLLNAGYVVSLKKSEIAQHEVEFLGFNITKEGRGLTETFKQKLLNITPPRDLKQLQSILGKLNFARNFIPNFSELVKPLYNIIATAPGKYITWTTDNSQQLQNIISMLNSAENLEERNPEVRLIMKVNTSPSAGYIRFYNEFAKRPIMYLNYVYTKAEVKFTNTEKLLTTIHKGLIKALDLGMGQEILVYSPIVSMTKIQKTPLPERKALPIRWITWMSYLEDPRIQFHYDKTLPELQQVPTVTDDIIAKIKHPSEFSMVFYTDGSAIKHPNVNKSHNAGMGIAQVQFKPEFTVINTWSIPLGDHTAQLAEVAAVEFACKKALKIDGPVLIVTDSFYVAESVNKELPYWQSNGFFNNKKKPLKHVSKWKSIADCIQLKPDIIIIHEKGHQPTASTFHTEGNNLADKLATQGSYVVNAGKRTADGSEFEKRTADGSEFESPKKKAKVE

SEQ ID NO: 680 - protein, 2176 aa, synthetic construct
MPAAKRVKLDGGDKKYSIGLDIGTNSVGWAVITDEYKVPSKKFKVLGNTDRHSIKKNLIGALLFDSGETAEATRLKRTARRRYTRRKNRICYLQEIFSNEMAKVDDSFFHRLEESFLVEEDKKHERHPIFGNIVDEVAYHEKYPTIYHLRKKLVDSTDKADLRLIYLALAHMIKFRGHFLIEGDLNPDNSDVDKLFIQLVQTYNQLFEENPINASGVDAKAILSARLSKSRRLENLIAQLPGEKKNGLFGNLIALSLGLTPNFKSNFDLAEDAKLQLSKDTYDDDLDNLLAQIGDQYADLFLAAKNLSDAILLSDILRVNTEITKAPLSASMIKRYDEHHQDLTLLKALVRQQLPEKYKEIFFDQSKNGYAGYIDGGASQEEFYKFIKPILEKMDGTEELLVKLNREDLLRKQRTFDNGSIPHQIHLGELHAILRRQEDFYPFLKDNREKIEKILTFRIPYYVGPLARGNSRFAWMTRKSEETITPWNFEEVVDKGASAQSFIERMTNFDKNLPNEKVLPKHSLLYEYFTVYNELTKVKYVTEGMRKPAFLSGEQKKAIVDLLFKTNRKVTVKQLKEDYFKKIECFDSVEISGVEDRFNASLGTYHDLLKIIKDKDFLDNEENEDILEDIVLTLTLFEDREMIEERLKTYAHLFDDKVMKQLKRRRYTGWGRLSRKLINGIRDKQSGKTILDFLKSDGFANRNFMQLIHDDSLTFKEDIQKAQVSGQGDSLHEHIANLAGSPAIKKGILQTVKVVDELVKVMGRHKPENIVIEMARENQTTQKGQKNSRERMKRIEEGIKELGSQILKEHPVENTQLQNEKLYLYYLQNGRDMYVDQELDINRLSDYDVDHIVPQSFLKDDSIDNKVLTRSDKARGKSDNVPSEEVVKKMKNYWRQLLNAKLITQRKFDNLTKAERGGLSELDKAGFIKRQLVETRQITKHVAQILDSRMNTKYDENDKLIREVKVITLKSKLVSDFRKDFQFYKVREINNYHHAHDAYLNAVVGTALIKKYPKLESEFVYGDYKVYDVRKMIAKSEQEIGKATAKYFFYSNIMNFFKTEITLANGEIRKRPLIETNGETGEIVWDKGRDFATVRKVLSMPQVNIVKKTEVQTGGFSKESILPKRNSDKLIARKKDWDPKKYGGFDSPTVAYSVLVVAKVEKGKSKKLKSVKELLGITIMERSSFEKNPIDFLEAKGYKEVKKDLIIKLPKYSLFELENGRKRMLASAGELQKGNELALPSKYVNFLYLASHYEKLKGSPEDNEQKQLFVEQHKHYLDEIIEQISEFSKRVILADANLDKVLSAYNKHRDKPIREQAENIIHLFTLTNLGAPAAFKYFDTTIDRKRYTSTKEVLDATLIHQSITGLYETRIDLSQLGGDGGEAAAKGGSPAPGGMDPLQLLQPLEAEIKGTKLKAHWNSGATITCVPQAFLEEEVPIKNIWIKTIHGEKEQPVYYLTFKIQGRKVEAEVISSPYDYILVSPSDIPWLMKKPLQLTTLVPLQEYEERLLKQTMLTGSYKEKLQSLFLKYDALWQHWENQVGHRRIKPHHIATGTVNPRPQKQYPINPKAKASIQTVINDLLKQGVLIQQNSIMNTPVYPVPKPDGKWRMVLDYREVNKTIPLIAAQNQHSAGILSSIFRGKYKTTLDLSNGFWAHSITPESYWLTAFTWLGQQYCWTRLPQGFLNSPALFNADVVDLLKEVPNVQVYVDDIYISHDDPREHLEQLEKVFSLLLNAGYVVSLKKSEIAQHEVEFLGFNITKEGRGLTETFKQKLLNITPPRDLKQLQSILGKLNFARNFIPNFSELVKPLYNIIATAPGKYITWTTDNSQQLQNIISMLNSAENLEERNPEVRLIMKVNTSPSAGYIRFYNEFAKRPIMYLNYVYTKAEVKFTNTEKLLTTIHKGLIKALDLGMGQEILVYSPIVSMTKIQKTPLPERKALPIRWITWMSYLEDPRIQFHYDKTLPELQQVPTVTDDIIAKIKHPSEFSMVFYTDGSAIKHPNVNKSHNAGMGIAQVQFKPEFTVINTWSIPLGDHTAQLAEVAAVEFACKKALKIDGPVLIVTDSFYVAESVNKELPYWQSNGFFNNKKKPLKHVSKWKSIADCIQLKPDIIIIHEKGHQPTASTFHTEGNNLADKLATQGSYVVNAGKRTADGSEFEKRTADGSEFESPKKKAKVE

SEQ ID NO: 681 - protein, 2175 aa, synthetic construct
MPAAKRVKLDGGDKKYSIGLDIGTNSVGWAVITDEYKVPSKKFKVLGNTDRHSIKKNLIGALLFDSGETAEATRLKRTARRRYTRRKNRICYLQEIFSNEMAKVDDSFFHRLEESFLVEEDKKHERHPIFGNIVDEVAYHEKYPTIYHLRKKLVDSTDKADLRLIYLALAHMIKFRGHFLIEGDLNPDNSDVDKLFIQLVQTYNQLFEENPINASGVDAKAILSARLSKSRRLENLIAQLPGEKKNGLFGNLIALSLGLTPNFKSNFDLAEDAKLQLSKDTYDDDLDNLLAQIGDQYADLFLAAKNLSDAILLSDILRVNTEITKAPLSASMIKRYDEHHQDLTLLKALVRQQLPEKYKEIFFDQSKNGYAGYIDGGASQEEFYKFIKPILEKMDGTEELLVKLNREDLLRKQRTFDNGSIPHQIHLGELHAILRRQEDFYPFLKDNREKIEKILTFRIPYYVGPLARGNSRFAWMTRKSEETITPWNFEEVVDKGASAQSFIERMTNFDKNLPNEKVLPKHSLLYEYFTVYNELTKVKYVTEGMRKPAFLSGEQKKAIVDLLFKTNRKVTVKQLKEDYFKKIECFDSVEISGVEDRFNASLGTYHDLLKIIKDKDFLDNEENEDILEDIVLTLTLFEDREMIEERLKTYAHLFDDKVMKQLKRRRYTGWGRLSRKLINGIRDKQSGKTILDFLKSDGFANRNFMQLIHDDSLTFKEDIQKAQVSGQGDSLHEHIANLAGSPAIKKGILQTVKVVDELVKVMGRHKPENIVIEMARENQTTQKGQKNSRERMKRIEEGIKELGSQILKEHPVENTQLQNEKLYLYYLQNGRDMYVDQELDINRLSDYDVDHIVPQSFLKDDSIDNKVLTRSDKARGKSDNVPSEEVVKKMKNYWRQLLNAKLITQRKFDNLTKAERGGLSELDKAGFIKRQLVETRQITKHVAQILDSRMNTKYDENDKLIREVKVITLKSKLVSDFRKDFQFYKVREINNYHHAHDAYLNAVVGTALIKKYPKLESEFVYGDYKVYDVRKMIAKSEQEIGKATAKYFFYSNIMNFFKTEITLANGEIRKRPLIETNGETGEIVWDKGRDFATVRKVLSMPQVNIVKKTEVQTGGFSKESILPKRNSDKLIARKKDWDPKKYGGFDSPTVAYSVLVVAKVEKGKSKKLKSVKELLGITIMERSSFEKNPIDFLEAKGYKEVKKDLIIKLPKYSLFELENGRKRMLASAGELQKGNELALPSKYVNFLYLASHYEKLKGSPEDNEQKQLFVEQHKHYLDEIIEQISEFSKRVILADANLDKVLSAYNKHRDKPIREQAENIIHLFTLTNLGAPAAFKYFDTTIDRKRYTSTKEVLDATLIHQSITGLYETRIDLSQLGGDGGGGGGSGGGGSGGMDPLQLLQPLEAEIKGTKLKAHWNSGATITCVPQAFLEEEVPIKNIWIKTIHGEKEQPVYYLTFKIQGRKVEAEVISSPYDYILVSPSDIPWLMKKPLQLTTLVPLQEYEERLLKQTMLTGSYKEKLQSLFLKYDALWQHWENQVGHRRIKPHHIATGTVNPRPQKQYPINPKAKASIQTVINDLLKQGVLIQQNSIMNTPVYPVPKPDGKWRMVLDYREVNKTIPLIAAQNQHSAGILSSIFRGKYKTTLDLSNGFWAHSITPESYWLTAFTWLGQQYCWTRLPQGFLNSPALFNADVVDLLKEVPNVQVYVDDIYISHDDPREHLEQLEKVFSLLLNAGYVVSLKKSEIAQHEVEFLGFNITKEGRGLTETFKQKLLNITPPRDLKQLQSILGKLNFARNFIPNFSELVKPLYNIIATAPGKYITWTTDNSQQLQNIISMLNSAENLEERNPEVRLIMKVNTSPSAGYIRFYNEFAKRPIMYLNYVYTKAEVKFTNTEKLLTTIHKGLIKALDLGMGQEILVYSPIVSMTKIQKTPLPERKALPIRWITWMSYLEDPRIQFHYDKTLPELQQVPTVTDDIIAKIKHPSEFSMVFYTDGSAIKHPNVNKSHNAGMGIAQVQFKPEFTVINTWSIPLGDHTAQLAEVAAVEFACKKALKIDGPVLIVTDSFYVAESVNKELPYWQSNGFFNNKKKPLKHVSKWKSIADCIQLKPDIIIIHEKGHQPTASTFHTEGNNLADKLATQGSYVVNAGKRTADGSEFEKRTADGSEFESPKKKAKVE

SEQ ID NO: 682 - protein, 2171 aa, synthetic construct
MPAAKRVKLDGGDKKYSIGLDIGTNSVGWAVITDEYKVPSKKFKVLGNTDRHSIKKNLIGALLFDSGETAEATRLKRTARRRYTRRKNRICYLQEIFSNEMAKVDDSFFHRLEESFLVEEDKKHERHPIFGNIVDEVAYHEKYPTIYHLRKKLVDSTDKADLRLIYLALAHMIKFRGHFLIEGDLNPDNSDVDKLFIQLVQTYNQLFEENPINASGVDAKAILSARLSKSRRLENLIAQLPGEKKNGLFGNLIALSLGLTPNFKSNFDLAEDAKLQLSKDTYDDDLDNLLAQIGDQYADLFLAAKNLSDAILLSDILRVNTEITKAPLSASMIKRYDEHHQDLTLLKALVRQQLPEKYKEIFFDQSKNGYAGYIDGGASQEEFYKFIKPILEKMDGTEELLVKLNREDLLRKQRTFDNGSIPHQIHLGELHAILRRQEDFYPFLKDNREKIEKILTFRIPYYVGPLARGNSRFAWMTRKSEETITPWNFEEVVDKGASAQSFIERMTNFDKNLPNEKVLPKHSLLYEYFTVYNELTKVKYVTEGMRKPAFLSGEQKKAIVDLLFKTNRKVTVKQLKEDYFKKIECFDSVEISGVEDRFNASLGTYHDLLKIIKDKDFLDNEENEDILEDIVLTLTLFEDREMIEERLKTYAHLFDDKVMKQLKRRRYTGWGRLSRKLINGIRDKQSGKTILDFLKSDGFANRNFMQLIHDDSLTFKEDIQKAQVSGQGDSLHEHIANLAGSPAIKKGILQTVKVVDELVKVMGRHKPENIVIEMARENQTTQKGQKNSRERMKRIEEGIKELGSQILKEHPVENTQLQNEKLYLYYLQNGRDMYVDQELDINRLSDYDVDHIVPQSFLKDDSIDNKVLTRSDKARGKSDNVPSEEVVKKMKNYWRQLLNAKLITQRKFDNLTKAERGGLSELDKAGFIKRQLVETRQITKHVAQILDSRMNTKYDENDKLIREVKVITLKSKLVSDFRKDFQFYKVREINNYHHAHDAYLNAVVGTALIKKYPKLESEFVYGDYKVYDVRKMIAKSEQEIGKATAKYFFYSNIMNFFKTEITLANGEIRKRPLIETNGETGEIVWDKGRDFATVRKVLSMPQVNIVKKTEVQTGGFSKESILPKRNSDKLIARKKDWDPKKYGGFDSPTVAYSVLVVAKVEKGKSKKLKSVKELLGITIMERSSFEKNPIDFLEAKGYKEVKKDLIIKLPKYSLFELENGRKRMLASAGELQKGNELALPSKYVNFLYLASHYEKLKGSPEDNEQKQLFVEQHKHYLDEIIEQISEFSKRVILADANLDKVLSAYNKHRDKPIREQAENIIHLFTLTNLGAPAAFKYFDTTIDRKRYTSTKEVLDATLIHQSITGLYETRIDLSQLGGDGGGGSGGSGGMDPLQLLQPLEAEIKGTKLKAHWNSGATITCVPQAFLEEEVPIKNIWIKTIHGEKEQPVYYLTFKIQGRKVEAEVISSPYDYILVSPSDIPWLMKKPLQLTTLVPLQEYEERLLKQTMLTGSYKEKLQSLFLKYDALWQHWENQVGHRRIKPHHIATGTVNPRPQKQYPINPKAKASIQTVINDLLKQGVLIQQNSIMNTPVYPVPKPDGKWRMVLDYREVNKTIPLIAAQNQHSAGILSSIFRGKYKTTLDLSNGFWAHSITPESYWLTAFTWLGQQYCWTRLPQGFLNSPALFNADVVDLLKEVPNVQVYVDDIYISHDDPREHLEQLEKVFSLLLNAGYVVSLKKSEIAQHEVEFLGFNITKEGRGLTETFKQKLLNITPPRDLKQLQSILGKLNFARNFIPNFSELVKPLYNIIATAPGKYITWTTDNSQQLQNIISMLNSAENLEERNPEVRLIMKVNTSPSAGYIRFYNEFAKRPIMYLNYVYTKAEVKFTNTEKLLTTIHKGLIKALDLGMGQEILVYSPIVSMTKIQKTPLPERKALPIRWITWMSYLEDPRIQFHYDKTLPELQQVPTVTDDIIAKIKHPSEFSMVFYTDGSAIKHPNVNKSHNAGMGIAQVQFKPEFTVINTWSIPLGDHTAQLAEVAAVEFACKKALKIDGPVLIVTDSFYVAESVNKELPYWQSNGFFNNKKKPLKHVSKWKSIADCIQLKPDIIIIHEKGHQPTASTFHTEGNNLADKLATQGSYVVNAGKRTADGSEFEKRTADGSEFESPKKKAKVE

SEQ ID NO: 683 - protein, 2174 aa, synthetic construct
MPAAKRVKLDGGDKKYSIGLDIGTNSVGWAVITDEYKVPSKKFKVLGNTDRHSIKKNLIGALLFDSGETAEATRLKRTARRRYTRRKNRICYLQEIFSNEMAKVDDSFFHRLEESFLVEEDKKHERHPIFGNIVDEVAYHEKYPTIYHLRKKLVDSTDKADLRLIYLALAHMIKFRGHFLIEGDLNPDNSDVDKLFIQLVQTYNQLFEENPINASGVDAKAILSARLSKSRRLENLIAQLPGEKKNGLFGNLIALSLGLTPNFKSNFDLAEDAKLQLSKDTYDDDLDNLLAQIGDQYADLFLAAKNLSDAILLSDILRVNTEITKAPLSASMIKRYDEHHQDLTLLKALVRQQLPEKYKEIFFDQSKNGYAGYIDGGASQEEFYKFIKPILEKMDGTEELLVKLNREDLLRKQRTFDNGSIPHQIHLGELHAILRRQEDFYPFLKDNREKIEKILTFRIPYYVGPLARGNSRFAWMTRKSEETITPWNFEEVVDKGASAQSFIERMTNFDKNLPNEKVLPKHSLLYEYFTVYNELTKVKYVTEGMRKPAFLSGEQKKAIVDLLFKTNRKVTVKQLKEDYFKKIECFDSVEISGVEDRFNASLGTYHDLLKIIKDKDFLDNEENEDILEDIVLTLTLFEDREMIEERLKTYAHLFDDKVMKQLKRRRYTGWGRLSRKLINGIRDKQSGKTILDFLKSDGFANRNFMQLIHDDSLTFKEDIQKAQVSGQGDSLHEHIANLAGSPAIKKGILQTVKVVDELVKVMGRHKPENIVIEMARENQTTQKGQKNSRERMKRIEEGIKELGSQILKEHPVENTQLQNEKLYLYYLQNGRDMYVDQELDINRLSDYDVDHIVPQSFLKDDSIDNKVLTRSDKARGKSDNVPSEEVVKKMKNYWRQLLNAKLITQRKFDNLTKAERGGLSELDKAGFIKRQLVETRQITKHVAQILDSRMNTKYDENDKLIREVKVITLKSKLVSDFRKDFQFYKVREINNYHHAHDAYLNAVVGTALIKKYPKLESEFVYGDYKVYDVRKMIAKSEQEIGKATAKYFFYSNIMNFFKTEITLANGEIRKRPLIETNGETGEIVWDKGRDFATVRKVLSMPQVNIVKKTEVQTGGFSKESILPKRNSDKLIARKKDWDPKKYGGFDSPTVAYSVLVVAKVEKGKSKKLKSVKELLGITIMERSSFEKNPIDFLEAKGYKEVKKDLIIKLPKYSLFELENGRKRMLASAGELQKGNELALPSKYVNFLYLASHYEKLKGSPEDNEQKQLFVEQHKHYLDEIIEQISEFSKRVILADANLDKVLSAYNKHRDKPIREQAENIIHLFTLTNLGAPAAFKYFDTTIDRKRYTSTKEVLDATLIHQSITGLYETRIDLSQLGGDGGGSSGGSPAPGGMDPLQLLQPLEAEIKGTKLKAHWNSGATITCVPQAFLEEEVPIKNIWIKTIHGEKEQPVYYLTFKIQGRKVEAEVISSPYDYILVSPSDIPWLMKKPLQLTTLVPLQEYEERLLKQTMLTGSYKEKLQSLFLKYDALWQHWENQVGHRRIKPHHIATGTVNPRPQKQYPINPKAKASIQTVINDLLKQGVLIQQNSIMNTPVYPVPKPDGKWRMVLDYREVNKTIPLIAAQNQHSAGILSSIFRGKYKTTLDLSNGFWAHSITPESYWLTAFTWLGQQYCWTRLPQGFLNSPALFNADVVDLLKEVPNVQVYVDDIYISHDDPREHLEQLEKVFSLLLNAGYVVSLKKSEIAQHEVEFLGFNITKEGRGLTETFKQKLLNITPPRDLKQLQSILGKLNFARNFIPNFSELVKPLYNIIATAPGKYITWTTDNSQQLQNIISMLNSAENLEERNPEVRLIMKVNTSPSAGYIRFYNEFAKRPIMYLNYVYTKAEVKFTNTEKLLTTIHKGLIKALDLGMGQEILVYSPIVSMTKIQKTPLPERKALPIRWITWMSYLEDPRIQFHYDKTLPELQQVPTVTDDIIAKIKHPSEFSMVFYTDGSAIKHPNVNKSHNAGMGIAQVQFKPEFTVINTWSIPLGDHTAQLAEVAAVEFACKKALKIDGPVLIVTDSFYVAESVNKELPYWQSNGFFNNKKKPLKHVSKWKSIADCIQLKPDIIIIHEKGHQPTASTFHTEGNNLADKLATQGSYVVNAGKRTADGSEFEKRTADGSEFESPKKKAKVE

SEQ ID NO: 684 - protein, 2176 aa, synthetic construct
MPAAKRVKLDGGDKKYSIGLDIGTNSVGWAVITDEYKVPSKKFKVLGNTDRHSIKKNLIGALLFDSGETAEATRLKRTARRRYTRRKNRICYLQEIFSNEMAKVDDSFFHRLEESFLVEEDKKHERHPIFGNIVDEVAYHEKYPTIYHLRKKLVDSTDKADLRLIYLALAHMIKFRGHFLIEGDLNPDNSDVDKLFIQLVQTYNQLFEENPINASGVDAKAILSARLSKSRRLENLIAQLPGEKKNGLFGNLIALSLGLTPNFKSNFDLAEDAKLQLSKDTYDDDLDNLLAQIGDQYADLFLAAKNLSDAILLSDILRVNTEITKAPLSASMIKRYDEHHQDLTLLKALVRQQLPEKYKEIFFDQSKNGYAGYIDGGASQEEFYKFIKPILEKMDGTEELLVKLNREDLLRKQRTFDNGSIPHQIHLGELHAILRRQEDFYPFLKDNREKIEKILTFRIPYYVGPLARGNSRFAWMTRKSEETITPWNFEEVVDKGASAQSFIERMTNFDKNLPNEKVLPKHSLLYEYFTVYNELTKVKYVTEGMRKPAFLSGEQKKAIVDLLFKTNRKVTVKQLKEDYFKKIECFDSVEISGVEDRFNASLGTYHDLLKIIKDKDFLDNEENEDILEDIVLTLTLFEDREMIEERLKTYAHLFDDKVMKQLKRRRYTGWGRLSRKLINGIRDKQSGKTILDFLKSDGFANRNFMQLIHDDSLTFKEDIQKAQVSGQGDSLHEHIANLAGSPAIKKGILQTVKVVDELVKVMGRHKPENIVIEMARENQTTQKGQKNSRERMKRIEEGIKELGSQILKEHPVENTQLQNEKLYLYYLQNGRDMYVDQELDINRLSDYDVDHIVPQSFLKDDSIDNKVLTRSDKARGKSDNVPSEEVVKKMKNYWRQLLNAKLITQRKFDNLTKAERGGLSELDKAGFIKRQLVETRQITKHVAQILDSRMNTKYDENDKLIREVKVITLKSKLVSDFRKDFQFYKVREINNYHHAHDAYLNAVVGTALIKKYPKLESEFVYGDYKVYDVRKMIAKSEQEIGKATAKYFFYSNIMNFFKTEITLANGEIRKRPLIETNGETGEIVWDKGRDFATVRKVLSMPQVNIVKKTEVQTGGFSKESILPKRNSDKLIARKKDWDPKKYGGFDSPTVAYSVLVVAKVEKGKSKKLKSVKELLGITIMERSSFEKNPIDFLEAKGYKEVKKDLIIKLPKYSLFELENGRKRMLASAGELQKGNELALPSKYVNFLYLASHYEKLKGSPEDNEQKQLFVEQHKHYLDEIIEQISEFSKRVILADANLDKVLSAYNKHRDKPIREQAENIIHLFTLTNLGAPAAFKYFDTTIDRKRYTSTKEVLDATLIHQSITGLYETRIDLSQLGGDGGGGSEAAAKGSSGGMDPLQLLQPLEAEIKGTKLKAHWNSGATITCVPQAFLEEEVPIKNIWIKTIHGEKEQPVYYLTFKIQGRKVEAEVISSPYDYILVSPSDIPWLMKKPLQLTTLVPLQEYEERLLKQTMLTGSYKEKLQSLFLKYDALWQHWENQVGHRRIKPHHIATGTVNPRPQKQYPINPKAKASIQTVINDLLKQGVLIQQNSIMNTPVYPVPKPDGKWRMVLDYREVNKTIPLIAAQNQHSAGILSSIFRGKYKTTLDLSNGFWAHSITPESYWLTAFTWLGQQYCWTRLPQGFLNSPALFNADVVDLLKEVPNVQVYVDDIYISHDDPREHLEQLEKVFSLLLNAGYVVSLKKSEIAQHEVEFLGFNITKEGRGLTETFKQKLLNITPPRDLKQLQSILGKLNFARNFIPNFSELVKPLYNIIATAPGKYITWTTDNSQQLQNIISMLNSAENLEERNPEVRLIMKVNTSPSAGYIRFYNEFAKRPIMYLNYVYTKAEVKFTNTEKLLTTIHKGLIKALDLGMGQEILVYSPIVSMTKIQKTPLPERKALPIRWITWMSYLEDPRIQFHYDKTLPELQQVPTVTDDIIAKIKHPSEFSMVFYTDGSAIKHPNVNKSHNAGMGIAQVQFKPEFTVINTWSIPLGDHTAQLAEVAAVEFACKKALKIDGPVLIVTDSFYVAESVNKELPYWQSNGFFNNKKKPLKHVSKWKSIADCIQLKPDIIIIHEKGHQPTASTFHTEGNNLADKLATQGSYVVNAGKRTADGSEFEKRTADGSEFESPKKKAKVE

SEQ ID NO: 685 - protein, 2176 aa, synthetic construct
MPAAKRVKLDGGDKKYSIGLDIGTNSVGWAVITDEYKVPSKKFKVLGNTDRHSIKKNLIGALLFDSGETAEATRLKRTARRRYTRRKNRICYLQEIFSNEMAKVDDSFFHRLEESFLVEEDKKHERHPIFGNIVDEVAYHEKYPTIYHLRKKLVDSTDKADLRLIYLALAHMIKFRGHFLIEGDLNPDNSDVDKLFIQLVQTYNQLFEENPINASGVDAKAILSARLSKSRRLENLIAQLPGEKKNGLFGNLIALSLGLTPNFKSNFDLAEDAKLQLSKDTYDDDLDNLLAQIGDQYADLFLAAKNLSDAILLSDILRVNTEITKAPLSASMIKRYDEHHQDLTLLKALVRQQLPEKYKEIFFDQSKNGYAGYIDGGASQEEFYKFIKPILEKMDGTEELLVKLNREDLLRKQRTFDNGSIPHQIHLGELHAILRRQEDFYPFLKDNREKIEKILTFRIPYYVGPLARGNSRFAWMTRKSEETITPWNFEEVVDKGASAQSFIERMTNFDKNLPNEKVLPKHSLLYEYFTVYNELTKVKYVTEGMRKPAFLSGEQKKAIVDLLFKTNRKVTVKQLKEDYFKKIECFDSVEISGVEDRFNASLGTYHDLLKIIKDKDFLDNEENEDILEDIVLTLTLFEDREMIEERLKTYAHLFDDKVMKQLKRRRYTGWGRLSRKLINGIRDKQSGKTILDFLKSDGFANRNFMQLIHDDSLTFKEDIQKAQVSGQGDSLHEHIANLAGSPAIKKGILQTVKVVDELVKVMGRHKPENIVIEMARENQTTQKGQKNSRERMKRIEEGIKELGSQILKEHPVENTQLQNEKLYLYYLQNGRDMYVDQELDINRLSDYDVDHIVPQSFLKDDSIDNKVLTRSDKARGKSDNVPSEEVVKKMKNYWRQLLNAKLITQRKFDNLTKAERGGLSELDKAGFIKRQLVETRQITKHVAQILDSRMNTKYDENDKLIREVKVITLKSKLVSDFRKDFQFYKVREINNYHHAHDAYLNAVVGTALIKKYPKLESEFVYGDYKVYDVRKMIAKSEQEIGKATAKYFFYSNIMNFFKTEITLANGEIRKRPLIETNGETGEIVWDKGRDFATVRKVLSMPQVNIVKKTEVQTGGFSKESILPKRNSDKLIARKKDWDPKKYGGFDSPTVAYSVLVVAKVEKGKSKKLKSVKELLGITIMERSSFEKNPIDFLEAKGYKEVKKDLIIKLPKYSLFELENGRKRMLASAGELQKGNELALPSKYVNFLYLASHYEKLKGSPEDNEQKQLFVEQHKHYLDEIIEQISEFSKRVILADANLDKVLSAYNKHRDKPIREQAENIIHLFTLTNLGAPAAFKYFDTTIDRKRYTSTKEVLDATLIHQSITGLYETRIDLSQLGGDGGGGGEAAAKGSSGGMDPLQLLQPLEAEIKGTKLKAHWNSGATITCVPQAFLEEEVPIKNIWIKTIHGEKEQPVYYLTFKIQGRKVEAEVISSPYDYILVSPSDIPWLMKKPLQLTTLVPLQEYEERLLKQTMLTGSYKEKLQSLFLKYDALWQHWENQVGHRRIKPHHIATGTVNPRPQKQYPINPKAKASIQTVINDLLKQGVLIQQNSIMNTPVYPVPKPDGKWRMVLDYREVNKTIPLIAAQNQHSAGILSSIFRGKYKTTLDLSNGFWAHSITPESYWLTAFTWLGQQYCWTRLPQGFLNSPALFNADVVDLLKEVPNVQVYVDDIYISHDDPREHLEQLEKVFSLLLNAGYVVSLKKSEIAQHEVEFLGFNITKEGRGLTETFKQKLLNITPPRDLKQLQSILGKLNFARNFIPNFSELVKPLYNIIATAPGKYITWTTDNSQQLQNIISMLNSAENLEERNPEVRLIMKVNTSPSAGYIRFYNEFAKRPIMYLNYVYTKAEVKFTNTEKLLTTIHKGLIKALDLGMGQEILVYSPIVSMTKIQKTPLPERKALPIRWITWMSYLEDPRIQFHYDKTLPELQQVPTVTDDIIAKIKHPSEFSMVFYTDGSAIKHPNVNKSHNAGMGIAQVQFKPEFTVINTWSIPLGDHTAQLAEVAAVEFACKKALKIDGPVLIVTDSFYVAESVNKELPYWQSNGFFNNKKKPLKHVSKWKSIADCIQLKPDIIIIHEKGHQPTASTFHTEGNNLADKLATQGSYVVNAGKRTADGSEFEKRTADGSEFESPKKKAKVE

SEQ ID NO: 686 - protein, 2176 aa, synthetic construct
MPAAKRVKLDGGDKKYSIGLDIGTNSVGWAVITDEYKVPSKKFKVLGNTDRHSIKKNLIGALLFDSGETAEATRLKRTARRRYTRRKNRICYLQEIFSNEMAKVDDSFFHRLEESFLVEEDKKHERHPIFGNIVDEVAYHEKYPTIYHLRKKLVDSTDKADLRLIYLALAHMIKFRGHFLIEGDLNPDNSDVDKLFIQLVQTYNQLFEENPINASGVDAKAILSARLSKSRRLENLIAQLPGEKKNGLFGNLIALSLGLTPNFKSNFDLAEDAKLQLSKDTYDDDLDNLLAQIGDQYADLFLAAKNLSDAILLSDILRVNTEITKAPLSASMIKRYDEHHQDLTLLKALVRQQLPEKYKEIFFDQSKNGYAGYIDGGASQEEFYKFIKPILEKMDGTEELLVKLNREDLLRKQRTFDNGSIPHQIHLGELHAILRRQEDFYPFLKDNREKIEKILTFRIPYYVGPLARGNSRFAWMTRKSEETITPWNFEEVVDKGASAQSFIERMTNFDKNLPNEKVLPKHSLLYEYFTVYNELTKVKYVTEGMRKPAFLSGEQKKAIVDLLFKTNRKVTVKQLKEDYFKKIECFDSVEISGVEDRFNASLGTYHDLLKIIKDKDFLDNEENEDILEDIVLTLTLFEDREMIEERLKTYAHLFDDKVMKQLKRRRYTGWGRLSRKLINGIRDKQSGKTILDFLKSDGFANRNFMQLIHDDSLTFKEDIQKAQVSGQGDSLHEHIANLAGSPAIKKGILQTVKVVDELVKVMGRHKPENIVIEMARENQTTQKGQKNSRERMKRIEEGIKELGSQILKEHPVENTQLQNEKLYLYYLQNGRDMYVDQELDINRLSDYDVDHIVPQSFLKDDSIDNKVLTRSDKARGKSDNVPSEEVVKKMKNYWRQLLNAKLITQRKFDNLTKAERGGLSELDKAGFIKRQLVETRQITKHVAQILDSRMNTKYDENDKLIREVKVITLKSKLVSDFRKDFQFYKVREINNYHHAHDAYLNAVVGTALIKKYPKLESEFVYGDYKVYDVRKMIAKSEQEIGKATAKYFFYSNIMNFFKTEITLANGEIRKRPLIETNGETGEIVWDKGRDFATVRKVLSMPQVNIVKKTEVQTGGFSKESILPKRNSDKLIARKKDWDPKKYGGFDSPTVAYSVLVVAKVEKGKSKKLKSVKELLGITIMERSSFEKNPIDFLEAKGYKEVKKDLIIKLPKYSLFELENGRKRMLASAGELQKGNELALPSKYVNFLYLASHYEKLKGSPEDNEQKQLFVEQHKHYLDEIIEQISEFSKRVILADANLDKVLSAYNKHRDKPIREQAENIIHLFTLTNLGAPAAFKYFDTTIDRKRYTSTKEVLDATLIHQSITGLYETRIDLSQLGGDGGEAAAKPAPGSSGGMDPLQLLQPLEAEIKGTKLKAHWNSGATITCVPQAFLEEEVPIKNIWIKTIHGEKEQPVYYLTFKIQGRKVEAEVISSPYDYILVSPSDIPWLMKKPLQLTTLVPLQEYEERLLKQTMLTGSYKEKLQSLFLKYDALWQHWENQVGHRRIKPHHIATGTVNPRPQKQYPINPKAKASIQTVINDLLKQGVLIQQNSIMNTPVYPVPKPDGKWRMVLDYREVNKTIPLIAAQNQHSAGILSSIFRGKYKTTLDLSNGFWAHSITPESYWLTAFTWLGQQYCWTRLPQGFLNSPALFNADVVDLLKEVPNVQVYVDDIYISHDDPREHLEQLEKVFSLLLNAGYVVSLKKSEIAQHEVEFLGFNITKEGRGLTETFKQKLLNITPPRDLKQLQSILGKLNFARNFIPNFSELVKPLYNIIATAPGKYITWTTDNSQQLQNIISMLNSAENLEERNPEVRLIMKVNTSPSAGYIRFYNEFAKRPIMYLNYVYTKAEVKFTNTEKLLTTIHKGLIKALDLGMGQEILVYSPIVSMTKIQKTPLPERKALPIRWITWMSYLEDPRIQFHYDKTLPELQQVPTVTDDIIAKIKHPSEFSMVFYTDGSAIKHPNVNKSHNAGMGIAQVQFKPEFTVINTWSIPLGDHTAQLAEVAAVEFACKKALKIDGPVLIVTDSFYVAESVNKELPYWQSNGFFNNKKKPLKHVSKWKSIADCIQLKPDIIIIHEKGHQPTASTFHTEGNNLADKLATQGSYVVNAGKRTADGSEFEKRTADGSEFESPKKKAKVE

SEQ ID NO: 687 - protein, 2174 aa, synthetic construct
MPAAKRVKLDGGDKKYSIGLDIGTNSVGWAVITDEYKVPSKKFKVLGNTDRHSIKKNLIGALLFDSGETAEATRLKRTARRRYTRRKNRICYLQEIFSNEMAKVDDSFFHRLEESFLVEEDKKHERHPIFGNIVDEVAYHEKYPTIYHLRKKLVDSTDKADLRLIYLALAHMIKFRGHFLIEGDLNPDNSDVDKLFIQLVQTYNQLFEENPINASGVDAKAILSARLSKSRRLENLIAQLPGEKKNGLFGNLIALSLGLTPNFKSNFDLAEDAKLQLSKDTYDDDLDNLLAQIGDQYADLFLAAKNLSDAILLSDILRVNTEITKAPLSASMIKRYDEHHQDLTLLKALVRQQLPEKYKEIFFDQSKNGYAGYIDGGASQEEFYKFIKPILEKMDGTEELLVKLNREDLLRKQRTFDNGSIPHQIHLGELHAILRRQEDFYPFLKDNREKIEKILTFRIPYYVGPLARGNSRFAWMTRKSEETITPWNFEEVVDKGASAQSFIERMTNFDKNLPNEKVLPKHSLLYEYFTVYNELTKVKYVTEGMRKPAFLSGEQKKAIVDLLFKTNRKVTVKQLKEDYFKKIECFDSVEISGVEDRFNASLGTYHDLLKIIKDKDFLDNEENEDILEDIVLTLTLFEDREMIEERLKTYAHLFDDKVMKQLKRRRYTGWGRLSRKLINGIRDKQSGKTILDFLKSDGFANRNFMQLIHDDSLTFKEDIQKAQVSGQGDSLHEHIANLAGSPAIKKGILQTVKVVDELVKVMGRHKPENIVIEMARENQTTQKGQKNSRERMKRIEEGIKELGSQILKEHPVENTQLQNEKLYLYYLQNGRDMYVDQELDINRLSDYDVDHIVPQSFLKDDSIDNKVLTRSDKARGKSDNVPSEEVVKKMKNYWRQLLNAKLITQRKFDNLTKAERGGLSELDKAGFIKRQLVETRQITKHVAQILDSRMNTKYDENDKLIREVKVITLKSKLVSDFRKDFQFYKVREINNYHHAHDAYLNAVVGTALIKKYPKLESEFVYGDYKVYDVRKMIAKSEQEIGKATAKYFFYSNIMNFFKTEITLANGEIRKRPLIETNGETGEIVWDKGRDFATVRKVLSMPQVNIVKKTEVQTGGFSKESILPKRNSDKLIARKKDWDPKKYGGFDSPTVAYSVLVVAKVEKGKSKKLKSVKELLGITIMERSSFEKNPIDFLEAKGYKEVKKDLIIKLPKYSLFELENGRKRMLASAGELQKGNELALPSKYVNFLYLASHYEKLKGSPEDNEQKQLFVEQHKHYLDEIIEQISEFSKRVILADANLDKVLSAYNKHRDKPIREQAENIIHLFTLTNLGAPAAFKYFDTTIDRKRYTSTKEVLDATLIHQSITGLYETRIDLSQLGGDGGGGGPAPGSSGGMDPLQLLQPLEAEIKGTKLKAHWNSGATITCVPQAFLEEEVPIKNIWIKTIHGEKEQPVYYLTFKIQGRKVEAEVISSPYDYILVSPSDIPWLMKKPLQLTTLVPLQEYEERLLKQTMLTGSYKEKLQSLFLKYDALWQHWENQVGHRRIKPHHIATGTVNPRPQKQYPINPKAKASIQTVINDLLKQGVLIQQNSIMNTPVYPVPKPDGKWRMVLDYREVNKTIPLIAAQNQHSAGILSSIFRGKYKTTLDLSNGFWAHSITPESYWLTAFTWLGQQYCWTRLPQGFLNSPALFNADVVDLLKEVPNVQVYVDDIYISHDDPREHLEQLEKVFSLLLNAGYVVSLKKSEIAQHEVEFLGFNITKEGRGLTETFKQKLLNITPPRDLKQLQSILGKLNFARNFIPNFSELVKPLYNIIATAPGKYITWTTDNSQQLQNIISMLNSAENLEERNPEVRLIMKVNTSPSAGYIRFYNEFAKRPIMYLNYVYTKAEVKFTNTEKLLTTIHKGLIKALDLGMGQEILVYSPIVSMTKIQKTPLPERKALPIRWITWMSYLEDPRIQFHYDKTLPELQQVPTVTDDIIAKIKHPSEFSMVFYTDGSAIKHPNVNKSHNAGMGIAQVQFKPEFTVINTWSIPLGDHTAQLAEVAAVEFACKKALKIDGPVLIVTDSFYVAESVNKELPYWQSNGFFNNKKKPLKHVSKWKSIADCIQLKPDIIIIHEKGHQPTASTFHTEGNNLADKLATQGSYVVNAGKRTADGSEFEKRTADGSEFESPKKKAKVE

SEQ ID NO: 688 - protein, 2173 aa, synthetic construct
MPAAKRVKLDGGDKKYSIGLDIGTNSVGWAVITDEYKVPSKKFKVLGNTDRHSIKKNLIGALLFDSGETAEATRLKRTARRRYTRRKNRICYLQEIFSNEMAKVDDSFFHRLEESFLVEEDKKHERHPIFGNIVDEVAYHEKYPTIYHLRKKLVDSTDKADLRLIYLALAHMIKFRGHFLIEGDLNPDNSDVDKLFIQLVQTYNQLFEENPINASGVDAKAILSARLSKSRRLENLIAQLPGEKKNGLFGNLIALSLGLTPNFKSNFDLAEDAKLQLSKDTYDDDLDNLLAQIGDQYADLFLAAKNLSDAILLSDILRVNTEITKAPLSASMIKRYDEHHQDLTLLKALVRQQLPEKYKEIFFDQSKNGYAGYIDGGASQEEFYKFIKPILEKMDGTEELLVKLNREDLLRKQRTFDNGSIPHQIHLGELHAILRRQEDFYPFLKDNREKIEKILTFRIPYYVGPLARGNSRFAWMTRKSEETITPWNFEEVVDKGASAQSFIERMTNFDKNLPNEKVLPKHSLLYEYFTVYNELTKVKYVTEGMRKPAFLSGEQKKAIVDLLFKTNRKVTVKQLKEDYFKKIECFDSVEISGVEDRFNASLGTYHDLLKIIKDKDFLDNEENEDILEDIVLTLTLFEDREMIEERLKTYAHLFDDKVMKQLKRRRYTGWGRLSRKLINGIRDKQSGKTILDFLKSDGFANRNFMQLIHDDSLTFKEDIQKAQVSGQGDSLHEHIANLAGSPAIKKGILQTVKVVDELVKVMGRHKPENIVIEMARENQTTQKGQKNSRERMKRIEEGIKELGSQILKEHPVENTQLQNEKLYLYYLQNGRDMYVDQELDINRLSDYDVDHIVPQSFLKDDSIDNKVLTRSDKARGKSDNVPSEEVVKKMKNYWRQLLNAKLITQRKFDNLTKAERGGLSELDKAGFIKRQLVETRQITKHVAQILDSRMNTKYDENDKLIREVKVITLKSKLVSDFRKDFQFYKVREINNYHHAHDAYLNAVVGTALIKKYPKLESEFVYGDYKVYDVRKMIAKSEQEIGKATAKYFFYSNIMNFFKTEITLANGEIRKRPLIETNGETGEIVWDKGRDFATVRKVLSMPQVNIVKKTEVQTGGFSKESILPKRNSDKLIARKKDWDPKKYGGFDSPTVAYSVLVVAKVEKGKSKKLKSVKELLGITIMERSSFEKNPIDFLEAKGYKEVKKDLIIKLPKYSLFELENGRKRMLASAGELQKGNELALPSKYVNFLYLASHYEKLKGSPEDNEQKQLFVEQHKHYLDEIIEQISEFSKRVILADANLDKVLSAYNKHRDKPIREQAENIIHLFTLTNLGAPAAFKYFDTTIDRKRYTSTKEVLDATLIHQSITGLYETRIDLSQLGGDGGEAAAKGSSGGMDPLQLLQPLEAEIKGTKLKAHWNSGATITCVPQAFLEEEVPIKNIWIKTIHGEKEQPVYYLTFKIQGRKVEAEVISSPYDYILVSPSDIPWLMKKPLQLTTLVPLQEYEERLLKQTMLTGSYKEKLQSLFLKYDALWQHWENQVGHRRIKPHHIATGTVNPRPQKQYPINPKAKASIQTVINDLLKQGVLIQQNSIMNTPVYPVPKPDGKWRMVLDYREVNKTIPLIAAQNQHSAGILSSIFRGKYKTTLDLSNGFWAHSITPESYWLTAFTWLGQQYCWTRLPQGFLNSPALFNADVVDLLKEVPNVQVYVDDIYISHDDPREHLEQLEKVFSLLLNAGYVVSLKKSEIAQHEVEFLGFNITKEGRGLTETFKQKLLNITPPRDLKQLQSILGKLNFARNFIPNFSELVKPLYNIIATAPGKYITWTTDNSQQLQNIISMLNSAENLEERNPEVRLIMKVNTSPSAGYIRFYNEFAKRPIMYLNYVYTKAEVKFTNTEKLLTTIHKGLIKALDLGMGQEILVYSPIVSMTKIQKTPLPERKALPIRWITWMSYLEDPRIQFHYDKTLPELQQVPTVTDDIIAKIKHPSEFSMVFYTDGSAIKHPNVNKSHNAGMGIAQVQFKPEFTVINTWSIPLGDHTAQLAEVAAVEFACKKALKIDGPVLIVTDSFYVAESVNKELPYWQSNGFFNNKKKPLKHVSKWKSIADCIQLKPDIIIIHEKGHQPTASTFHTEGNNLADKLATQGSYVVNAGKRTADGSEFEKRTADGSEFESPKKKAKVE

SEQ ID NO: 689 - protein, 2176 aa, synthetic construct
MPAAKRVKLDGGDKKYSIGLDIGTNSVGWAVITDEYKVPSKKFKVLGNTDRHSIKKNLIGALLFDSGETAEATRLKRTARRRYTRRKNRICYLQEIFSNEMAKVDDSFFHRLEESFLVEEDKKHERHPIFGNIVDEVAYHEKYPTIYHLRKKLVDSTDKADLRLIYLALAHMIKFRGHFLIEGDLNPDNSDVDKLFIQLVQTYNQLFEENPINASGVDAKAILSARLSKSRRLENLIAQLPGEKKNGLFGNLIALSLGLTPNFKSNFDLAEDAKLQLSKDTYDDDLDNLLAQIGDQYADLFLAAKNLSDAILLSDILRVNTEITKAPLSASMIKRYDEHHQDLTLLKALVRQQLPEKYKEIFFDQSKNGYAGYIDGGASQEEFYKFIKPILEKMDGTEELLVKLNREDLLRKQRTFDNGSIPHQIHLGELHAILRRQEDFYPFLKDNREKIEKILTFRIPYYVGPLARGNSRFAWMTRKSEETITPWNFEEVVDKGASAQSFIERMTNFDKNLPNEKVLPKHSLLYEYFTVYNELTKVKYVTEGMRKPAFLSGEQKKAIVDLLFKTNRKVTVKQLKEDYFKKIECFDSVEISGVEDRFNASLGTYHDLLKIIKDKDFLDNEENEDILEDIVLTLTLFEDREMIEERLKTYAHLFDDKVMKQLKRRRYTGWGRLSRKLINGIRDKQSGKTILDFLKSDGFANRNFMQLIHDDSLTFKEDIQKAQVSGQGDSLHEHIANLAGSPAIKKGILQTVKVVDELVKVMGRHKPENIVIEMARENQTTQKGQKNSRERMKRIEEGIKELGSQILKEHPVENTQLQNEKLYLYYLQNGRDMYVDQELDINRLSDYDVDHIVPQSFLKDDSIDNKVLTRSDKARGKSDNVPSEEVVKKMKNYWRQLLNAKLITQRKFDNLTKAERGGLSELDKAGFIKRQLVETRQITKHVAQILDSRMNTKYDENDKLIREVKVITLKSKLVSDFRKDFQFYKVREINNYHHAHDAYLNAVVGTALIKKYPKLESEFVYGDYKVYDVRKMIAKSEQEIGKATAKYFFYSNIMNFFKTEITLANGEIRKRPLIETNGETGEIVWDKGRDFATVRKVLSMPQVNIVKKTEVQTGGFSKESILPKRNSDKLIARKKDWDPKKYGGFDSPTVAYSVLVVAKVEKGKSKKLKSVKELLGITIMERSSFEKNPIDFLEAKGYKEVKKDLIIKLPKYSLFELENGRKRMLASAGELQKGNELALPSKYVNFLYLASHYEKLKGSPEDNEQKQLFVEQHKHYLDEIIEQISEFSKRVILADANLDKVLSAYNKHRDKPIREQAENIIHLFTLTNLGAPAAFKYFDTTIDRKRYTSTKEVLDATLIHQSITGLYETRIDLSQLGGDGGEAAAKPAPGGSGGMNPLQLLQPLPAEVKGTKLLAHWNSGATITCIPESFLEDEQPIKQTLIKTIHGEKQQNVYYLTFKVKGRKVEAEVIASPYEYILLSPTDVPWLTQQPLQLTILVPLQEYQDRILNKTALPEEQKQQLKALFTKYDNLWQHWENQVGHRKIRPHNIATGDYPPRPQKQYPINPKAKPSIQIVIDDLLKQGVLTPQNSTMNTPVYPVPKPDGRWRMVLDYREVNKTIPLTAAQNQHSAGILATIVRQKYKTTLDLANGFWAHPITPDSYWLTAFTWQGKQYCWTRLPQGFLNSPALFTADAVDLLKEVPNVQVYVDDIYLSHDNPHEHIQQLEKVFQILLQAGYVVSLKKSEIGQRTVEFLGFNITKEGRGLTDTFKTKLLNVTPPKDLKQLQSILGLLNFARNFIPNFAELVQTLYNLIASSKGKYIEWTEDNTKQLNKVIEALNTASNLEERLPDQRLVIKVNTSPSAGYVRYYNESGKKPIMYLNYVFSKAELKFSMLEKLLTTMHKALIKAMDLAMGQEILVYSPIVSMTKIQKTPLPERKALPIRWITWMTYLEDPRIQFHYDKTLPELKHIPDVYTSSIPPLKHPSQYEGVFCTDGSAIKSPDPTKSNNAGMGIVHAIYNPEYKILNQWSIPLGHHTAQMAEIAAVEFACKKALKVPGPVLVITDSFYVAESANKELPYWKSNGFVNNKKEPLKHISKWKSIAECLSIKPDITIQHEKGHQPINTSIHTEGNALADKLATQGSYVVNAGKRTADGSEFEKRTADGSEFESPKKKAKVE

SEQ ID NO: 690 - protein, 2176 aa, synthetic construct
MPAAKRVKLDGGDKKYSIGLDIGTNSVGWAVITDEYKVPSKKFKVLGNTDRHSIKKNLIGALLFDSGETAEATRLKRTARRRYTRRKNRICYLQEIFSNEMAKVDDSFFHRLEESFLVEEDKKHERHPIFGNIVDEVAYHEKYPTIYHLRKKLVDSTDKADLRLIYLALAHMIKFRGHFLIEGDLNPDNSDVDKLFIQLVQTYNQLFEENPINASGVDAKAILSARLSKSRRLENLIAQLPGEKKNGLFGNLIALSLGLTPNFKSNFDLAEDAKLQLSKDTYDDDLDNLLAQIGDQYADLFLAAKNLSDAILLSDILRVNTEITKAPLSASMIKRYDEHHQDLTLLKALVRQQLPEKYKEIFFDQSKNGYAGYIDGGASQEEFYKFIKPILEKMDGTEELLVKLNREDLLRKQRTFDNGSIPHQIHLGELHAILRRQEDFYPFLKDNREKIEKILTFRIPYYVGPLARGNSRFAWMTRKSEETITPWNFEEVVDKGASAQSFIERMTNFDKNLPNEKVLPKHSLLYEYFTVYNELTKVKYVTEGMRKPAFLSGEQKKAIVDLLFKTNRKVTVKQLKEDYFKKIECFDSVEISGVEDRFNASLGTYHDLLKIIKDKDFLDNEENEDILEDIVLTLTLFEDREMIEERLKTYAHLFDDKVMKQLKRRRYTGWGRLSRKLINGIRDKQSGKTILDFLKSDGFANRNFMQLIHDDSLTFKEDIQKAQVSGQGDSLHEHIANLAGSPAIKKGILQTVKVVDELVKVMGRHKPENIVIEMARENQTTQKGQKNSRERMKRIEEGIKELGSQILKEHPVENTQLQNEKLYLYYLQNGRDMYVDQELDINRLSDYDVDHIVPQSFLKDDSIDNKVLTRSDKARGKSDNVPSEEVVKKMKNYWRQLLNAKLITQRKFDNLTKAERGGLSELDKAGFIKRQLVETRQITKHVAQILDSRMNTKYDENDKLIREVKVITLKSKLVSDFRKDFQFYKVREINNYHHAHDAYLNAVVGTALIKKYPKLESEFVYGDYKVYDVRKMIAKSEQEIGKATAKYFFYSNIMNFFKTEITLANGEIRKRPLIETNGETGEIVWDKGRDFATVRKVLSMPQVNIVKKTEVQTGGFSKESILPKRNSDKLIARKKDWDPKKYGGFDSPTVAYSVLVVAKVEKGKSKKLKSVKELLGITIMERSSFEKNPIDFLEAKGYKEVKKDLIIKLPKYSLFELENGRKRMLASAGELQKGNELALPSKYVNFLYLASHYEKLKGSPEDNEQKQLFVEQHKHYLDEIIEQISEFSKRVILADANLDKVLSAYNKHRDKPIREQAENIIHLFTLTNLGAPAAFKYFDTTIDRKRYTSTKEVLDATLIHQSITGLYETRIDLSQLGGDGGGGSEAAAKPAPGGMNPLQLLQPLPAEVKGTKLLAHWNSGATITCIPESFLEDEQPIKQTLIKTIHGEKQQNVYYLTFKVKGRKVEAEVIASPYEYILLSPTDVPWLTQQPLQLTILVPLQEYQDRILNKTALPEEQKQQLKALFTKYDNLWQHWENQVGHRKIRPHNIATGDYPPRPQKQYPINPKAKPSIQIVIDDLLKQGVLTPQNSTMNTPVYPVPKPDGRWRMVLDYREVNKTIPLTAAQNQHSAGILATIVRQKYKTTLDLANGFWAHPITPDSYWLTAFTWQGKQYCWTRLPQGFLNSPALFTADAVDLLKEVPNVQVYVDDIYLSHDNPHEHIQQLEKVFQILLQAGYVVSLKKSEIGQRTVEFLGFNITKEGRGLTDTFKTKLLNVTPPKDLKQLQSILGLLNFARNFIPNFAELVQTLYNLIASSKGKYIEWTEDNTKQLNKVIEALNTASNLEERLPDQRLVIKVNTSPSAGYVRYYNESGKKPIMYLNYVFSKAELKFSMLEKLLTTMHKALIKAMDLAMGQEILVYSPIVSMTKIQKTPLPERKALPIRWITWMTYLEDPRIQFHYDKTLPELKHIPDVYTSSIPPLKHPSQYEGVFCTDGSAIKSPDPTKSNNAGMGIVHAIYNPEYKILNQWSIPLGHHTAQMAEIAAVEFACKKALKVPGPVLVITDSFYVAESANKELPYWKSNGFVNNKKEPLKHISKWKSIAECLSIKPDITIQHEKGHQPINTSIHTEGNALADKLATQGSYVVNAGKRTADGSEFEKRTADGSEFESPKKKAKVE

SEQ ID NO: 691 - protein, 2173 aa, synthetic construct
MPAAKRVKLDGGDKKYSIGLDIGTNSVGWAVITDEYKVPSKKFKVLGNTDRHSIKKNLIGALLFDSGETAEATRLKRTARRRYTRRKNRICYLQEIFSNEMAKVDDSFFHRLEESFLVEEDKKHERHPIFGNIVDEVAYHEKYPTIYHLRKKLVDSTDKADLRLIYLALAHMIKFRGHFLIEGDLNPDNSDVDKLFIQLVQTYNQLFEENPINASGVDAKAILSARLSKSRRLENLIAQLPGEKKNGLFGNLIALSLGLTPNFKSNFDLAEDAKLQLSKDTYDDDLDNLLAQIGDQYADLFLAAKNLSDAILLSDILRVNTEITKAPLSASMIKRYDEHHQDLTLLKALVRQQLPEKYKEIFFDQSKNGYAGYIDGGASQEEFYKFIKPILEKMDGTEELLVKLNREDLLRKQRTFDNGSIPHQIHLGELHAILRRQEDFYPFLKDNREKIEKILTFRIPYYVGPLARGNSRFAWMTRKSEETITPWNFEEVVDKGASAQSFIERMTNFDKNLPNEKVLPKHSLLYEYFTVYNELTKVKYVTEGMRKPAFLSGEQKKAIVDLLFKTNRKVTVKQLKEDYFKKIECFDSVEISGVEDRFNASLGTYHDLLKIIKDKDFLDNEENEDILEDIVLTLTLFEDREMIEERLKTYAHLFDDKVMKQLKRRRYTGWGRLSRKLINGIRDKQSGKTILDFLKSDGFANRNFMQLIHDDSLTFKEDIQKAQVSGQGDSLHEHIANLAGSPAIKKGILQTVKVVDELVKVMGRHKPENIVIEMARENQTTQKGQKNSRERMKRIEEGIKELGSQILKEHPVENTQLQNEKLYLYYLQNGRDMYVDQELDINRLSDYDVDHIVPQSFLKDDSIDNKVLTRSDKARGKSDNVPSEEVVKKMKNYWRQLLNAKLITQRKFDNLTKAERGGLSELDKAGFIKRQLVETRQITKHVAQILDSRMNTKYDENDKLIREVKVITLKSKLVSDFRKDFQFYKVREINNYHHAHDAYLNAVVGTALIKKYPKLESEFVYGDYKVYDVRKMIAKSEQEIGKATAKYFFYSNIMNFFKTEITLANGEIRKRPLIETNGETGEIVWDKGRDFATVRKVLSMPQVNIVKKTEVQTGGFSKESILPKRNSDKLIARKKDWDPKKYGGFDSPTVAYSVLVVAKVEKGKSKKLKSVKELLGITIMERSSFEKNPIDFLEAKGYKEVKKDLIIKLPKYSLFELENGRKRMLASAGELQKGNELALPSKYVNFLYLASHYEKLKGSPEDNEQKQLFVEQHKHYLDEIIEQISEFSKRVILADANLDKVLSAYNKHRDKPIREQAENIIHLFTLTNLGAPAAFKYFDTTIDRKRYTSTKEVLDATLIHQSITGLYETRIDLSQLGGDGGGSSEAAAKGGMNPLQLLQPLPAEVKGTKLLAHWNSGATITCIPESFLEDEQPIKQTLIKTIHGEKQQNVYYLTFKVKGRKVEAEVIASPYEYILLSPTDVPWLTQQPLQLTILVPLQEYQDRILNKTALPEEQKQQLKALFTKYDNLWQHWENQVGHRKIRPHNIATGDYPPRPQKQYPINPKAKPSIQIVIDDLLKQGVLTPQNSTMNTPVYPVPKPDGRWRMVLDYREVNKTIPLTAAQNQHSAGILATIVRQKYKTTLDLANGFWAHPITPDSYWLTAFTWQGKQYCWTRLPQGFLNSPALFTADAVDLLKEVPNVQVYVDDIYLSHDNPHEHIQQLEKVFQILLQAGYVVSLKKSEIGQRTVEFLGFNITKEGRGLTDTFKTKLLNVTPPKDLKQLQSILGLLNFARNFIPNFAELVQTLYNLIASSKGKYIEWTEDNTKQLNKVIEALNTASNLEERLPDQRLVIKVNTSPSAGYVRYYNESGKKPIMYLNYVFSKAELKFSMLEKLLTTMHKALIKAMDLAMGQEILVYSPIVSMTKIQKTPLPERKALPIRWITWMTYLEDPRIQFHYDKTLPELKHIPDVYTSSIPPLKHPSQYEGVFCTDGSAIKSPDPTKSNNAGMGIVHAIYNPEYKILNQWSIPLGHHTAQMAEIAAVEFACKKALKVPGPVLVITDSFYVAESANKELPYWKSNGFVNNKKEPLKHISKWKSIAECLSIKPDITIQHEKGHQPINTSIHTEGNALADKLATQGSYVVNAGKRTADGSEFEKRTADGSEFESPKKKAKVE

SEQ ID NO: 692 - protein, 2180 aa, synthetic construct
MPAAKRVKLDGGDKKYSIGLDIGTNSVGWAVITDEYKVPSKKFKVLGNTDRHSIKKNLIGALLFDSGETAEATRLKRTARRRYTRRKNRICYLQEIFSNEMAKVDDSFFHRLEESFLVEEDKKHERHPIFGNIVDEVAYHEKYPTIYHLRKKLVDSTDKADLRLIYLALAHMIKFRGHFLIEGDLNPDNSDVDKLFIQLVQTYNQLFEENPINASGVDAKAILSARLSKSRRLENLIAQLPGEKKNGLFGNLIALSLGLTPNFKSNFDLAEDAKLQLSKDTYDDDLDNLLAQIGDQYADLFLAAKNLSDAILLSDILRVNTEITKAPLSASMIKRYDEHHQDLTLLKALVRQQLPEKYKEIFFDQSKNGYAGYIDGGASQEEFYKFIKPILEKMDGTEELLVKLNREDLLRKQRTFDNGSIPHQIHLGELHAILRRQEDFYPFLKDNREKIEKILTFRIPYYVGPLARGNSRFAWMTRKSEETITPWNFEEVVDKGASAQSFIERMTNFDKNLPNEKVLPKHSLLYEYFTVYNELTKVKYVTEGMRKPAFLSGEQKKAIVDLLFKTNRKVTVKQLKEDYFKKIECFDSVEISGVEDRFNASLGTYHDLLKIIKDKDFLDNEENEDILEDIVLTLTLFEDREMIEERLKTYAHLFDDKVMKQLKRRRYTGWGRLSRKLINGIRDKQSGKTILDFLKSDGFANRNFMQLIHDDSLTFKEDIQKAQVSGQGDSLHEHIANLAGSPAIKKGILQTVKVVDELVKVMGRHKPENIVIEMARENQTTQKGQKNSRERMKRIEEGIKELGSQILKEHPVENTQLQNEKLYLYYLQNGRDMYVDQELDINRLSDYDVDHIVPQSFLKDDSIDNKVLTRSDKARGKSDNVPSEEVVKKMKNYWRQLLNAKLITQRKFDNLTKAERGGLSELDKAGFIKRQLVETRQITKHVAQILDSRMNTKYDENDKLIREVKVITLKSKLVSDFRKDFQFYKVREINNYHHAHDAYLNAVVGTALIKKYPKLESEFVYGDYKVYDVRKMIAKSEQEIGKATAKYFFYSNIMNFFKTEITLANGEIRKRPLIETNGETGEIVWDKGRDFATVRKVLSMPQVNIVKKTEVQTGGFSKESILPKRNSDKLIARKKDWDPKKYGGFDSPTVAYSVLVVAKVEKGKSKKLKSVKELLGITIMERSSFEKNPIDFLEAKGYKEVKKDLIIKLPKYSLFELENGRKRMLASAGELQKGNELALPSKYVNFLYLASHYEKLKGSPEDNEQKQLFVEQHKHYLDEIIEQISEFSKRVILADANLDKVLSAYNKHRDKPIREQAENIIHLFTLTNLGAPAAFKYFDTTIDRKRYTSTKEVLDATLIHQSITGLYETRIDLSQLGGDGGEAAAKGGGGSEAAAKGGMNPLQLLQPLPAEVKGTKLLAHWNSGATITCIPESFLEDEQPIKQTLIKTIHGEKQQNVYYLTFKVKGRKVEAEVIASPYEYILLSPTDVPWLTQQPLQLTILVPLQEYQDRILNKTALPEEQKQQLKALFTKYDNLWQHWENQVGHRKIRPHNIATGDYPPRPQKQYPINPKAKPSIQIVIDDLLKQGVLTPQNSTMNTPVYPVPKPDGRWRMVLDYREVNKTIPLTAAQNQHSAGILATIVRQKYKTTLDLANGFWAHPITPDSYWLTAFTWQGKQYCWTRLPQGFLNSPALFTADAVDLLKEVPNVQVYVDDIYLSHDNPHEHIQQLEKVFQILLQAGYVVSLKKSEIGQRTVEFLGFNITKEGRGLTDTFKTKLLNVTPPKDLKQLQSILGLLNFARNFIPNFAELVQTLYNLIASSKGKYIEWTEDNTKQLNKVIEALNTASNLEERLPDQRLVIKVNTSPSAGYVRYYNESGKKPIMYLNYVFSKAELKFSMLEKLLTTMHKALIKAMDLAMGQEILVYSPIVSMTKIQKTPLPERKALPIRWITWMTYLEDPRIQFHYDKTLPELKHIPDVYTSSIPPLKHPSQYEGVFCTDGSAIKSPDPTKSNNAGMGIVHAIYNPEYKILNQWSIPLGHHTAQMAEIAAVEFACKKALKVPGPVLVITDSFYVAESANKELPYWKSNGFVNNKKEPLKHISKWKSIAECLSIKPDITIQHEKGHQPINTSIHTEGNALADKLATQGSYVVNAGKRTADGSEFEKRTADGSEFESPKKKAKVE

SEQ ID NO: 693 - protein, 2170 aa, synthetic construct
MPAAKRVKLDGGDKKYSIGLDIGTNSVGWAVITDEYKVPSKKFKVLGNTDRHSIKKNLIGALLFDSGETAEATRLKRTARRRYTRRKNRICYLQEIFSNEMAKVDDSFFHRLEESFLVEEDKKHERHPIFGNIVDEVAYHEKYPTIYHLRKKLVDSTDKADLRLIYLALAHMIKFRGHFLIEGDLNPDNSDVDKLFIQLVQTYNQLFEENPINASGVDAKAILSARLSKSRRLENLIAQLPGEKKNGLFGNLIALSLGLTPNFKSNFDLAEDAKLQLSKDTYDDDLDNLLAQIGDQYADLFLAAKNLSDAILLSDILRVNTEITKAPLSASMIKRYDEHHQDLTLLKALVRQQLPEKYKEIFFDQSKNGYAGYIDGGASQEEFYKFIKPILEKMDGTEELLVKLNREDLLRKQRTFDNGSIPHQIHLGELHAILRRQEDFYPFLKDNREKIEKILTFRIPYYVGPLARGNSRFAWMTRKSEETITPWNFEEVVDKGASAQSFIERMTNFDKNLPNEKVLPKHSLLYEYFTVYNELTKVKYVTEGMRKPAFLSGEQKKAIVDLLFKTNRKVTVKQLKEDYFKKIECFDSVEISGVEDRFNASLGTYHDLLKIIKDKDFLDNEENEDILEDIVLTLTLFEDREMIEERLKTYAHLFDDKVMKQLKRRRYTGWGRLSRKLINGIRDKQSGKTILDFLKSDGFANRNFMQLIHDDSLTFKEDIQKAQVSGQGDSLHEHIANLAGSPAIKKGILQTVKVVDELVKVMGRHKPENIVIEMARENQTTQKGQKNSRERMKRIEEGIKELGSQILKEHPVENTQLQNEKLYLYYLQNGRDMYVDQELDINRLSDYDVDHIVPQSFLKDDSIDNKVLTRSDKARGKSDNVPSEEVVKKMKNYWRQLLNAKLITQRKFDNLTKAERGGLSELDKAGFIKRQLVETRQITKHVAQILDSRMNTKYDENDKLIREVKVITLKSKLVSDFRKDFQFYKVREINNYHHAHDAYLNAVVGTALIKKYPKLESEFVYGDYKVYDVRKMIAKSEQEIGKATAKYFFYSNIMNFFKTEITLANGEIRKRPLIETNGETGEIVWDKGRDFATVRKVLSMPQVNIVKKTEVQTGGFSKESILPKRNSDKLIARKKDWDPKKYGGFDSPTVAYSVLVVAKVEKGKSKKLKSVKELLGITIMERSSFEKNPIDFLEAKGYKEVKKDLIIKLPKYSLFELENGRKRMLASAGELQKGNELALPSKYVNFLYLASHYEKLKGSPEDNEQKQLFVEQHKHYLDEIIEQISEFSKRVILADANLDKVLSAYNKHRDKPIREQAENIIHLFTLTNLGAPAAFKYFDTTIDRKRYTSTKEVLDATLIHQSITGLYETRIDLSQLGGDGGPAPAPGGMNPLQLLQPLPAEVKGTKLLAHWNSGATITCIPESFLEDEQPIKQTLIKTIHGEKQQNVYYLTFKVKGRKVEAEVIASPYEYILLSPTDVPWLTQQPLQLTILVPLQEYQDRILNKTALPEEQKQQLKALFTKYDNLWQHWENQVGHRKIRPHNIATGDYPPRPQKQYPINPKAKPSIQIVIDDLLKQGVLTPQNSTMNTPVYPVPKPDGRWRMVLDYREVNKTIPLTAAQNQHSAGILATIVRQKYKTTLDLANGFWAHPITPDSYWLTAFTWQGKQYCWTRLPQGFLNSPALFTADAVDLLKEVPNVQVYVDDIYLSHDNPHEHIQQLEKVFQILLQAGYVVSLKKSEIGQRTVEFLGFNITKEGRGLTDTFKTKLLNVTPPKDLKQLQSILGLLNFARNFIPNFAELVQTLYNLIASSKGKYIEWTEDNTKQLNKVIEALNTASNLEERLPDQRLVIKVNTSPSAGYVRYYNESGKKPIMYLNYVFSKAELKFSMLEKLLTTMHKALIKAMDLAMGQEILVYSPIVSMTKIQKTPLPERKALPIRWITWMTYLEDPRIQFHYDKTLPELKHIPDVYTSSIPPLKHPSQYEGVFCTDGSAIKSPDPTKSNNAGMGIVHAIYNPEYKILNQWSIPLGHHTAQMAEIAAVEFACKKALKVPGPVLVITDSFYVAESANKELPYWKSNGFVNNKKEPLKHISKWKSIAECLSIKPDITIQHEKGHQPINTSIHTEGNALADKLATQGSYVVNAGKRTADGSEFEKRTADGSEFESPKKKAKVE

SEQ ID NO: 694 - protein, 2185 aa, synthetic construct
MPAAKRVKLDGGDKKYSIGLDIGTNSVGWAVITDEYKVPSKKFKVLGNTDRHSIKKNLIGALLFDSGETAEATRLKRTARRRYTRRKNRICYLQEIFSNEMAKVDDSFFHRLEESFLVEEDKKHERHPIFGNIVDEVAYHEKYPTIYHLRKKLVDSTDKADLRLIYLALAHMIKFRGHFLIEGDLNPDNSDVDKLFIQLVQTYNQLFEENPINASGVDAKAILSARLSKSRRLENLIAQLPGEKKNGLFGNLIALSLGLTPNFKSNFDLAEDAKLQLSKDTYDDDLDNLLAQIGDQYADLFLAAKNLSDAILLSDILRVNTEITKAPLSASMIKRYDEHHQDLTLLKALVRQQLPEKYKEIFFDQSKNGYAGYIDGGASQEEFYKFIKPILEKMDGTEELLVKLNREDLLRKQRTFDNGSIPHQIHLGELHAILRRQEDFYPFLKDNREKIEKILTFRIPYYVGPLARGNSRFAWMTRKSEETITPWNFEEVVDKGASAQSFIERMTNFDKNLPNEKVLPKHSLLYEYFTVYNELTKVKYVTEGMRKPAFLSGEQKKAIVDLLFKTNRKVTVKQLKEDYFKKIECFDSVEISGVEDRFNASLGTYHDLLKIIKDKDFLDNEENEDILEDIVLTLTLFEDREMIEERLKTYAHLFDDKVMKQLKRRRYTGWGRLSRKLINGIRDKQSGKTILDFLKSDGFANRNFMQLIHDDSLTFKEDIQKAQVSGQGDSLHEHIANLAGSPAIKKGILQTVKVVDELVKVMGRHKPENIVIEMARENQTTQKGQKNSRERMKRIEEGIKELGSQILKEHPVENTQLQNEKLYLYYLQNGRDMYVDQELDINRLSDYDVDHIVPQSFLKDDSIDNKVLTRSDKARGKSDNVPSEEVVKKMKNYWRQLLNAKLITQRKFDNLTKAERGGLSELDKAGFIKRQLVETRQITKHVAQILDSRMNTKYDENDKLIREVKVITLKSKLVSDFRKDFQFYKVREINNYHHAHDAYLNAVVGTALIKKYPKLESEFVYGDYKVYDVRKMIAKSEQEIGKATAKYFFYSNIMNFFKTEITLANGEIRKRPLIETNGETGEIVWDKGRDFATVRKVLSMPQVNIVKKTEVQTGGFSKESILPKRNSDKLIARKKDWDPKKYGGFDSPTVAYSVLVVAKVEKGKSKKLKSVKELLGITIMERSSFEKNPIDFLEAKGYKEVKKDLIIKLPKYSLFELENGRKRMLASAGELQKGNELALPSKYVNFLYLASHYEKLKGSPEDNEQKQLFVEQHKHYLDEIIEQISEFSKRVILADANLDKVLSAYNKHRDKPIREQAENIIHLFTLTNLGAPAAFKYFDTTIDRKRYTSTKEVLDATLIHQSITGLYETRIDLSQLGGDGGEAAAKEAAAKEAAAKEAAAKGGMNPLQLLQPLPAEVKGTKLLAHWNSGATITCIPESFLEDEQPIKQTLIKTIHGEKQQNVYYLTFKVKGRKVEAEVIASPYEYILLSPTDVPWLTQQPLQLTILVPLQEYQDRILNKTALPEEQKQQLKALFTKYDNLWQHWENQVGHRKIRPHNIATGDYPPRPQKQYPINPKAKPSIQIVIDDLLKQGVLTPQNSTMNTPVYPVPKPDGRWRMVLDYREVNKTIPLTAAQNQHSAGILATIVRQKYKTTLDLANGFWAHPITPDSYWLTAFTWQGKQYCWTRLPQGFLNSPALFTADAVDLLKEVPNVQVYVDDIYLSHDNPHEHIQQLEKVFQILLQAGYVVSLKKSEIGQRTVEFLGFNITKEGRGLTDTFKTKLLNVTPPKDLKQLQSILGLLNFARNFIPNFAELVQTLYNLIASSKGKYIEWTEDNTKQLNKVIEALNTASNLEERLPDQRLVIKVNTSPSAGYVRYYNESGKKPIMYLNYVFSKAELKFSMLEKLLTTMHKALIKAMDLAMGQEILVYSPIVSMTKIQKTPLPERKALPIRWITWMTYLEDPRIQFHYDKTLPELKHIPDVYTSSIPPLKHPSQYEGVFCTDGSAIKSPDPTKSNNAGMGIVHAIYNPEYKILNQWSIPLGHHTAQMAEIAAVEFACKKALKVPGPVLVITDSFYVAESANKELPYWKSNGFVNNKKEPLKHISKWKSIAECLSIKPDITIQHEKGHQPINTSIHTEGNALADKLATQGSYVVNAGKRTADGSEFEKRTADGSEFESPKKKAKVE

SEQ ID NO: 695 - protein, 2081 aa, synthetic construct
MPAAKRVKLDGGDKKYSIGLDIGTNSVGWAVITDEYKVPSKKFKVLGNTDRHSIKKNLIGALLFDSGETAEATRLKRTARRRYTRRKNRICYLQEIFSNEMAKVDDSFFHRLEESFLVEEDKKHERHPIFGNIVDEVAYHEKYPTIYHLRKKLVDSTDKADLRLIYLALAHMIKFRGHFLIEGDLNPDNSDVDKLFIQLVQTYNQLFEENPINASGVDAKAILSARLSKSRRLENLIAQLPGEKKNGLFGNLIALSLGLTPNFKSNFDLAEDAKLQLSKDTYDDDLDNLLAQIGDQYADLFLAAKNLSDAILLSDILRVNTEITKAPLSASMIKRYDEHHQDLTLLKALVRQQLPEKYKEIFFDQSKNGYAGYIDGGASQEEFYKFIKPILEKMDGTEELLVKLNREDLLRKQRTFDNGSIPHQIHLGELHAILRRQEDFYPFLKDNREKIEKILTFRIPYYVGPLARGNSRFAWMTRKSEETITPWNFEEVVDKGASAQSFIERMTNFDKNLPNEKVLPKHSLLYEYFTVYNELTKVKYVTEGMRKPAFLSGEQKKAIVDLLFKTNRKVTVKQLKEDYFKKIECFDSVEISGVEDRFNASLGTYHDLLKIIKDKDFLDNEENEDILEDIVLTLTLFEDREMIEERLKTYAHLFDDKVMKQLKRRRYTGWGRLSRKLINGIRDKQSGKTILDFLKSDGFANRNFMQLIHDDSLTFKEDIQKAQVSGQGDSLHEHIANLAGSPAIKKGILQTVKVVDELVKVMGRHKPENIVIEMARENQTTQKGQKNSRERMKRIEEGIKELGSQILKEHPVENTQLQNEKLYLYYLQNGRDMYVDQELDINRLSDYDVDHIVPQSFLKDDSIDNKVLTRSDKARGKSDNVPSEEVVKKMKNYWRQLLNAKLITQRKFDNLTKAERGGLSELDKAGFIKRQLVETRQITKHVAQILDSRMNTKYDENDKLIREVKVITLKSKLVSDFRKDFQFYKVREINNYHHAHDAYLNAVVGTALIKKYPKLESEFVYGDYKVYDVRKMIAKSEQEIGKATAKYFFYSNIMNFFKTEITLANGEIRKRPLIETNGETGEIVWDKGRDFATVRKVLSMPQVNIVKKTEVQTGGFSKESILPKRNSDKLIARKKDWDPKKYGGFDSPTVAYSVLVVAKVEKGKSKKLKSVKELLGITIMERSSFEKNPIDFLEAKGYKEVKKDLIIKLPKYSLFELENGRKRMLASAGELQKGNELALPSKYVNFLYLASHYEKLKGSPEDNEQKQLFVEQHKHYLDEIIEQISEFSKRVILADANLDKVLSAYNKHRDKPIREQAENIIHLFTLTNLGAPAAFKYFDTTIDRKRYTSTKEVLDATLIHQSITGLYETRIDLSQLGGDGGPAPAPGGVPWLTQQPLQLTILVPLQEYQDRILNKTALPEEQKQQLKALFTKYDNLWQHWENQVGHRKIRPHNIATGDYPPRPQKQYPINPKAKPSIQIVIDDLLKQGVLTPQNSTMNTPVYPVPKPDGRWRMVLDYREVNKTIPLTAAQNQHSAGILATIVRQKYKTTLDLANGFWAHPITPDSYWLTAFTWQGKQYCWTRLPQGFLNSPALFTADAVDLLKEVPNVQVYVDDIYLSHDNPHEHIQQLEKVFQILLQAGYVVSLKKSEIGQRTVEFLGFNITKEGRGLTDTFKTKLLNVTPPKDLKQLQSILGLLNFARNFIPNFAELVQTLYNLIASSKGKYIEWTEDNTKQLNKVIEALNTASNLEERLPDQRLVIKVNTSPSAGYVRYYNESGKKPIMYLNYVFSKAELKFSMLEKLLTTMHKALIKAMDLAMGQEILVYSPIVSMTKIQKTPLPERKALPIRWITWMTYLEDPRIQFHYDKTLPELKHIPDVYTSSIPPLKHPSQYEGVFCTDGSAIKSPDPTKSNNAGMGIVHAIYNPEYKILNQWSIPLGHHTAQMAEIAAVEFACKKALKVPGPVLVITDSFYVAESANKELPYWKSNGFVNNKKEPLKHISKWKSIAECLSIKPDITIQHEKGHQPINTSIHTEGNALADKLATQGSYVVNAGKRTADGSEFEKRTADGSEFESPKKKAKVE

SEQ ID NO: 696 - protein, 2087 aa, synthetic construct
MPAAKRVKLDGGDKKYSIGLDIGTNSVGWAVITDEYKVPSKKFKVLGNTDRHSIKKNLIGALLFDSGETAEATRLKRTARRRYTRRKNRICYLQEIFSNEMAKVDDSFFHRLEESFLVEEDKKHERHPIFGNIVDEVAYHEKYPTIYHLRKKLVDSTDKADLRLIYLALAHMIKFRGHFLIEGDLNPDNSDVDKLFIQLVQTYNQLFEENPINASGVDAKAILSARLSKSRRLENLIAQLPGEKKNGLFGNLIALSLGLTPNFKSNFDLAEDAKLQLSKDTYDDDLDNLLAQIGDQYADLFLAAKNLSDAILLSDILRVNTEITKAPLSASMIKRYDEHHQDLTLLKALVRQQLPEKYKEIFFDQSKNGYAGYIDGGASQEEFYKFIKPILEKMDGTEELLVKLNREDLLRKQRTFDNGSIPHQIHLGELHAILRRQEDFYPFLKDNREKIEKILTFRIPYYVGPLARGNSRFAWMTRKSEETITPWNFEEVVDKGASAQSFIERMTNFDKNLPNEKVLPKHSLLYEYFTVYNELTKVKYVTEGMRKPAFLSGEQKKAIVDLLFKTNRKVTVKQLKEDYFKKIECFDSVEISGVEDRFNASLGTYHDLLKIIKDKDFLDNEENEDILEDIVLTLTLFEDREMIEERLKTYAHLFDDKVMKQLKRRRYTGWGRLSRKLINGIRDKQSGKTILDFLKSDGFANRNFMQLIHDDSLTFKEDIQKAQVSGQGDSLHEHIANLAGSPAIKKGILQTVKVVDELVKVMGRHKPENIVIEMARENQTTQKGQKNSRERMKRIEEGIKELGSQILKEHPVENTQLQNEKLYLYYLQNGRDMYVDQELDINRLSDYDVDHIVPQSFLKDDSIDNKVLTRSDKARGKSDNVPSEEVVKKMKNYWRQLLNAKLITQRKFDNLTKAERGGLSELDKAGFIKRQLVETRQITKHVAQILDSRMNTKYDENDKLIREVKVITLKSKLVSDFRKDFQFYKVREINNYHHAHDAYLNAVVGTALIKKYPKLESEFVYGDYKVYDVRKMIAKSEQEIGKATAKYFFYSNIMNFFKTEITLANGEIRKRPLIETNGETGEIVWDKGRDFATVRKVLSMPQVNIVKKTEVQTGGFSKESILPKRNSDKLIARKKDWDPKKYGGFDSPTVAYSVLVVAKVEKGKSKKLKSVKELLGITIMERSSFEKNPIDFLEAKGYKEVKKDLIIKLPKYSLFELENGRKRMLASAGELQKGNELALPSKYVNFLYLASHYEKLKGSPEDNEQKQLFVEQHKHYLDEIIEQISEFSKRVILADANLDKVLSAYNKHRDKPIREQAENIIHLFTLTNLGAPAAFKYFDTTIDRKRYTSTKEVLDATLIHQSITGLYETRIDLSQLGGDGGPAPGGGEAAAKGGVPWLTQQPLQLTILVPLQEYQDRILNKTALPEEQKQQLKALFTKYDNLWQHWENQVGHRKIRPHNIATGDYPPRPQKQYPINPKAKPSIQIVIDDLLKQGVLTPQNSTMNTPVYPVPKPDGRWRMVLDYREVNKTIPLTAAQNQHSAGILATIVRQKYKTTLDLANGFWAHPITPDSYWLTAFTWQGKQYCWTRLPQGFLNSPALFTADAVDLLKEVPNVQVYVDDIYLSHDNPHEHIQQLEKVFQILLQAGYVVSLKKSEIGQRTVEFLGFNITKEGRGLTDTFKTKLLNVTPPKDLKQLQSILGLLNFARNFIPNFAELVQTLYNLIASSKGKYIEWTEDNTKQLNKVIEALNTASNLEERLPDQRLVIKVNTSPSAGYVRYYNESGKKPIMYLNYVFSKAELKFSMLEKLLTTMHKALIKAMDLAMGQEILVYSPIVSMTKIQKTPLPERKALPIRWITWMTYLEDPRIQFHYDKTLPELKHIPDVYTSSIPPLKHPSQYEGVFCTDGSAIKSPDPTKSNNAGMGIVHAIYNPEYKILNQWSIPLGHHTAQMAEIAAVEFACKKALKVPGPVLVITDSFYVAESANKELPYWKSNGFVNNKKEPLKHISKWKSIAECLSIKPDITIQHEKGHQPINTSIHTEGNALADKLATQGSYVVNAGKRTADGSEFEKRTADGSEFESPKKKAKVE

SEQ ID NO: 697 - protein, 2087 aa, synthetic construct
MPAAKRVKLDGGDKKYSIGLDIGTNSVGWAVITDEYKVPSKKFKVLGNTDRHSIKKNLIGALLFDSGETAEATRLKRTARRRYTRRKNRICYLQEIFSNEMAKVDDSFFHRLEESFLVEEDKKHERHPIFGNIVDEVAYHEKYPTIYHLRKKLVDSTDKADLRLIYLALAHMIKFRGHFLIEGDLNPDNSDVDKLFIQLVQTYNQLFEENPINASGVDAKAILSARLSKSRRLENLIAQLPGEKKNGLFGNLIALSLGLTPNFKSNFDLAEDAKLQLSKDTYDDDLDNLLAQIGDQYADLFLAAKNLSDAILLSDILRVNTEITKAPLSASMIKRYDEHHQDLTLLKALVRQQLPEKYKEIFFDQSKNGYAGYIDGGASQEEFYKFIKPILEKMDGTEELLVKLNREDLLRKQRTFDNGSIPHQIHLGELHAILRRQEDFYPFLKDNREKIEKILTFRIPYYVGPLARGNSRFAWMTRKSEETITPWNFEEVVDKGASAQSFIERMTNFDKNLPNEKVLPKHSLLYEYFTVYNELTKVKYVTEGMRKPAFLSGEQKKAIVDLLFKTNRKVTVKQLKEDYFKKIECFDSVEISGVEDRFNASLGTYHDLLKIIKDKDFLDNEENEDILEDIVLTLTLFEDREMIEERLKTYAHLFDDKVMKQLKRRRYTGWGRLSRKLINGIRDKQSGKTILDFLKSDGFANRNFMQLIHDDSLTFKEDIQKAQVSGQGDSLHEHIANLAGSPAIKKGILQTVKVVDELVKVMGRHKPENIVIEMARENQTTQKGQKNSRERMKRIEEGIKELGSQILKEHPVENTQLQNEKLYLYYLQNGRDMYVDQELDINRLSDYDVDHIVPQSFLKDDSIDNKVLTRSDKARGKSDNVPSEEVVKKMKNYWRQLLNAKLITQRKFDNLTKAERGGLSELDKAGFIKRQLVETRQITKHVAQILDSRMNTKYDENDKLIREVKVITLKSKLVSDFRKDFQFYKVREINNYHHAHDAYLNAVVGTALIKKYPKLESEFVYGDYKVYDVRKMIAKSEQEIGKATAKYFFYSNIMNFFKTEITLANGEIRKRPLIETNGETGEIVWDKGRDFATVRKVLSMPQVNIVKKTEVQTGGFSKESILPKRNSDKLIARKKDWDPKKYGGFDSPTVAYSVLVVAKVEKGKSKKLKSVKELLGITIMERSSFEKNPIDFLEAKGYKEVKKDLIIKLPKYSLFELENGRKRMLASAGELQKGNELALPSKYVNFLYLASHYEKLKGSPEDNEQKQLFVEQHKHYLDEIIEQISEFSKRVILADANLDKVLSAYNKHRDKPIREQAENIIHLFTLTNLGAPAAFKYFDTTIDRKRYTSTKEVLDATLIHQSITGLYETRIDLSQLGGDGGGGGEAAAKGGSGGVPWLTQQPLQLTILVPLQEYQDRILNKTALPEEQKQQLKALFTKYDNLWQHWENQVGHRKIRPHNIATGDYPPRPQKQYPINPKAKPSIQIVIDDLLKQGVLTPQNSTMNTPVYPVPKPDGRWRMVLDYREVNKTIPLTAAQNQHSAGILATIVRQKYKTTLDLANGFWAHPITPDSYWLTAFTWQGKQYCWTRLPQGFLNSPALFTADAVDLLKEVPNVQVYVDDIYLSHDNPHEHIQQLEKVFQILLQAGYVVSLKKSEIGQRTVEFLGFNITKEGRGLTDTFKTKLLNVTPPKDLKQLQSILGLLNFARNFIPNFAELVQTLYNLIASSKGKYIEWTEDNTKQLNKVIEALNTASNLEERLPDQRLVIKVNTSPSAGYVRYYNESGKKPIMYLNYVFSKAELKFSMLEKLLTTMHKALIKAMDLAMGQEILVYSPIVSMTKIQKTPLPERKALPIRWITWMTYLEDPRIQFHYDKTLPELKHIPDVYTSSIPPLKHPSQYEGVFCTDGSAIKSPDPTKSNNAGMGIVHAIYNPEYKILNQWSIPLGHHTAQMAEIAAVEFACKKALKVPGPVLVITDSFYVAESANKELPYWKSNGFVNNKKEPLKHISKWKSIAECLSIKPDITIQHEKGHQPINTSIHTEGNALADKLATQGSYVVNAGKRTADGSEFEKRTADGSEFESPKKKAKVE

SEQ ID NO: 698 - protein, 2087 aa, synthetic construct
MPAAKRVKLDGGDKKYSIGLDIGTNSVGWAVITDEYKVPSKKFKVLGNTDRHSIKKNLIGALLFDSGETAEATRLKRTARRRYTRRKNRICYLQEIFSNEMAKVDDSFFHRLEESFLVEEDKKHERHPIFGNIVDEVAYHEKYPTIYHLRKKLVDSTDKADLRLIYLALAHMIKFRGHFLIEGDLNPDNSDVDKLFIQLVQTYNQLFEENPINASGVDAKAILSARLSKSRRLENLIAQLPGEKKNGLFGNLIALSLGLTPNFKSNFDLAEDAKLQLSKDTYDDDLDNLLAQIGDQYADLFLAAKNLSDAILLSDILRVNTEITKAPLSASMIKRYDEHHQDLTLLKALVRQQLPEKYKEIFFDQSKNGYAGYIDGGASQEEFYKFIKPILEKMDGTEELLVKLNREDLLRKQRTFDNGSIPHQIHLGELHAILRRQEDFYPFLKDNREKIEKILTFRIPYYVGPLARGNSRFAWMTRKSEETITPWNFEEVVDKGASAQSFIERMTNFDKNLPNEKVLPKHSLLYEYFTVYNELTKVKYVTEGMRKPAFLSGEQKKAIVDLLFKTNRKVTVKQLKEDYFKKIECFDSVEISGVEDRFNASLGTYHDLLKIIKDKDFLDNEENEDILEDIVLTLTLFEDREMIEERLKTYAHLFDDKVMKQLKRRRYTGWGRLSRKLINGIRDKQSGKTILDFLKSDGFANRNFMQLIHDDSLTFKEDIQKAQVSGQGDSLHEHIANLAGSPAIKKGILQTVKVVDELVKVMGRHKPENIVIEMARENQTTQKGQKNSRERMKRIEEGIKELGSQILKEHPVENTQLQNEKLYLYYLQNGRDMYVDQELDINRLSDYDVDHIVPQSFLKDDSIDNKVLTRSDKARGKSDNVPSEEVVKKMKNYWRQLLNAKLITQRKFDNLTKAERGGLSELDKAGFIKRQLVETRQITKHVAQILDSRMNTKYDENDKLIREVKVITLKSKLVSDFRKDFQFYKVREINNYHHAHDAYLNAVVGTALIKKYPKLESEFVYGDYKVYDVRKMIAKSEQEIGKATAKYFFYSNIMNFFKTEITLANGEIRKRPLIETNGETGEIVWDKGRDFATVRKVLSMPQVNIVKKTEVQTGGFSKESILPKRNSDKLIARKKDWDPKKYGGFDSPTVAYSVLVVAKVEKGKSKKLKSVKELLGITIMERSSFEKNPIDFLEAKGYKEVKKDLIIKLPKYSLFELENGRKRMLASAGELQKGNELALPSKYVNFLYLASHYEKLKGSPEDNEQKQLFVEQHKHYLDEIIEQISEFSKRVILADANLDKVLSAYNKHRDKPIREQAENIIHLFTLTNLGAPAAFKYFDTTIDRKRYTSTKEVLDATLIHQSITGLYETRIDLSQLGGDGGGGGEAAAKGSSGGVPWLTQQPLQLTILVPLQEYQDRILNKTALPEEQKQQLKALFTKYDNLWQHWENQVGHRKIRPHNIATGDYPPRPQKQYPINPKAKPSIQIVIDDLLKQGVLTPQNSTMNTPVYPVPKPDGRWRMVLDYREVNKTIPLTAAQNQHSAGILATIVRQKYKTTLDLANGFWAHPITPDSYWLTAFTWQGKQYCWTRLPQGFLNSPALFTADAVDLLKEVPNVQVYVDDIYLSHDNPHEHIQQLEKVFQILLQAGYVVSLKKSEIGQRTVEFLGFNITKEGRGLTDTFKTKLLNVTPPKDLKQLQSILGLLNFARNFIPNFAELVQTLYNLIASSKGKYIEWTEDNTKQLNKVIEALNTASNLEERLPDQRLVIKVNTSPSAGYVRYYNESGKKPIMYLNYVFSKAELKFSMLEKLLTTMHKALIKAMDLAMGQEILVYSPIVSMTKIQKTPLPERKALPIRWITWMTYLEDPRIQFHYDKTLPELKHIPDVYTSSIPPLKHPSQYEGVFCTDGSAIKSPDPTKSNNAGMGIVHAIYNPEYKILNQWSIPLGHHTAQMAEIAAVEFACKKALKVPGPVLVITDSFYVAESANKELPYWKSNGFVNNKKEPLKHISKWKSIAECLSIKPDITIQHEKGHQPINTSIHTEGNALADKLATQGSYVVNAGKRTADGSEFEKRTADGSEFESPKKKAKVE

SEQ ID NO: 699 - protein, 2087 aa, synthetic construct
MPAAKRVKLDGGDKKYSIGLDIGTNSVGWAVITDEYKVPSKKFKVLGNTDRHSIKKNLIGALLFDSGETAEATRLKRTARRRYTRRKNRICYLQEIFSNEMAKVDDSFFHRLEESFLVEEDKKHERHPIFGNIVDEVAYHEKYPTIYHLRKKLVDSTDKADLRLIYLALAHMIKFRGHFLIEGDLNPDNSDVDKLFIQLVQTYNQLFEENPINASGVDAKAILSARLSKSRRLENLIAQLPGEKKNGLFGNLIALSLGLTPNFKSNFDLAEDAKLQLSKDTYDDDLDNLLAQIGDQYADLFLAAKNLSDAILLSDILRVNTEITKAPLSASMIKRYDEHHQDLTLLKALVRQQLPEKYKEIFFDQSKNGYAGYIDGGASQEEFYKFIKPILEKMDGTEELLVKLNREDLLRKQRTFDNGSIPHQIHLGELHAILRRQEDFYPFLKDNREKIEKILTFRIPYYVGPLARGNSRFAWMTRKSEETITPWNFEEVVDKGASAQSFIERMTNFDKNLPNEKVLPKHSLLYEYFTVYNELTKVKYVTEGMRKPAFLSGEQKKAIVDLLFKTNRKVTVKQLKEDYFKKIECFDSVEISGVEDRFNASLGTYHDLLKIIKDKDFLDNEENEDILEDIVLTLTLFEDREMIEERLKTYAHLFDDKVMKQLKRRRYTGWGRLSRKLINGIRDKQSGKTILDFLKSDGFANRNFMQLIHDDSLTFKEDIQKAQVSGQGDSLHEHIANLAGSPAIKKGILQTVKVVDELVKVMGRHKPENIVIEMARENQTTQKGQKNSRERMKRIEEGIKELGSQILKEHPVENTQLQNEKLYLYYLQNGRDMYVDQELDINRLSDYDVDHIVPQSFLKDDSIDNKVLTRSDKARGKSDNVPSEEVVKKMKNYWRQLLNAKLITQRKFDNLTKAERGGLSELDKAGFIKRQLVETRQITKHVAQILDSRMNTKYDENDKLIREVKVITLKSKLVSDFRKDFQFYKVREINNYHHAHDAYLNAVVGTALIKKYPKLESEFVYGDYKVYDVRKMIAKSEQEIGKATAKYFFYSNIMNFFKTEITLANGEIRKRPLIETNGETGEIVWDKGRDFATVRKVLSMPQVNIVKKTEVQTGGFSKESILPKRNSDKLIARKKDWDPKKYGGFDSPTVAYSVLVVAKVEKGKSKKLKSVKELLGITIMERSSFEKNPIDFLEAKGYKEVKKDLIIKLPKYSLFELENGRKRMLASAGELQKGNELALPSKYVNFLYLASHYEKLKGSPEDNEQKQLFVEQHKHYLDEIIEQISEFSKRVILADANLDKVLSAYNKHRDKPIREQAENIIHLFTLTNLGAPAAFKYFDTTIDRKRYTSTKEVLDATLIHQSITGLYETRIDLSQLGGDGGGSSGGGEAAAKGGVPWLTQQPLQLTILVPLQEYQDRILNKTALPEEQKQQLKALFTKYDNLWQHWENQVGHRKIRPHNIATGDYPPRPQKQYPINPKAKPSIQIVIDDLLKQGVLTPQNSTMNTPVYPVPKPDGRWRMVLDYREVNKTIPLTAAQNQHSAGILATIVRQKYKTTLDLANGFWAHPITPDSYWLTAFTWQGKQYCWTRLPQGFLNSPALFTADAVDLLKEVPNVQVYVDDIYLSHDNPHEHIQQLEKVFQILLQAGYVVSLKKSEIGQRTVEFLGFNITKEGRGLTDTFKTKLLNVTPPKDLKQLQSILGLLNFARNFIPNFAELVQTLYNLIASSKGKYIEWTEDNTKQLNKVIEALNTASNLEERLPDQRLVIKVNTSPSAGYVRYYNESGKKPIMYLNYVFSKAELKFSMLEKLLTTMHKALIKAMDLAMGQEILVYSPIVSMTKIQKTPLPERKALPIRWITWMTYLEDPRIQFHYDKTLPELKHIPDVYTSSIPPLKHPSQYEGVFCTDGSAIKSPDPTKSNNAGMGIVHAIYNPEYKILNQWSIPLGHHTAQMAEIAAVEFACKKALKVPGPVLVITDSFYVAESANKELPYWKSNGFVNNKKEPLKHISKWKSIAECLSIKPDITIQHEKGHQPINTSIHTEGNALADKLATQGSYVVNAGKRTADGSEFEKRTADGSEFESPKKKAKVE

SEQ ID NO: 700 - protein, 2094 aa, synthetic construct
MPAAKRVKLDGGDKKYSIGLDIGTNSVGWAVITDEYKVPSKKFKVLGNTDRHSIKKNLIGALLFDSGETAEATRLKRTARRRYTRRKNRICYLQEIFSNEMAKVDDSFFHRLEESFLVEEDKKHERHPIFGNIVDEVAYHEKYPTIYHLRKKLVDSTDKADLRLIYLALAHMIKFRGHFLIEGDLNPDNSDVDKLFIQLVQTYNQLFEENPINASGVDAKAILSARLSKSRRLENLIAQLPGEKKNGLFGNLIALSLGLTPNFKSNFDLAEDAKLQLSKDTYDDDLDNLLAQIGDQYADLFLAAKNLSDAILLSDILRVNTEITKAPLSASMIKRYDEHHQDLTLLKALVRQQLPEKYKEIFFDQSKNGYAGYIDGGASQEEFYKFIKPILEKMDGTEELLVKLNREDLLRKQRTFDNGSIPHQIHLGELHAILRRQEDFYPFLKDNREKIEKILTFRIPYYVGPLARGNSRFAWMTRKSEETITPWNFEEVVDKGASAQSFIERMTNFDKNLPNEKVLPKHSLLYEYFTVYNELTKVKYVTEGMRKPAFLSGEQKKAIVDLLFKTNRKVTVKQLKEDYFKKIECFDSVEISGVEDRFNASLGTYHDLLKIIKDKDFLDNEENEDILEDIVLTLTLFEDREMIEERLKTYAHLFDDKVMKQLKRRRYTGWGRLSRKLINGIRDKQSGKTILDFLKSDGFANRNFMQLIHDDSLTFKEDIQKAQVSGQGDSLHEHIANLAGSPAIKKGILQTVKVVDELVKVMGRHKPENIVIEMARENQTTQKGQKNSRERMKRIEEGIKELGSQILKEHPVENTQLQNEKLYLYYLQNGRDMYVDQELDINRLSDYDVDHIVPQSFLKDDSIDNKVLTRSDKARGKSDNVPSEEVVKKMKNYWRQLLNAKLITQRKFDNLTKAERGGLSELDKAGFIKRQLVETRQITKHVAQILDSRMNTKYDENDKLIREVKVITLKSKLVSDFRKDFQFYKVREINNYHHAHDAYLNAVVGTALIKKYPKLESEFVYGDYKVYDVRKMIAKSEQEIGKATAKYFFYSNIMNFFKTEITLANGEIRKRPLIETNGETGEIVWDKGRDFATVRKVLSMPQVNIVKKTEVQTGGFSKESILPKRNSDKLIARKKDWDPKKYGGFDSPTVAYSVLVVAKVEKGKSKKLKSVKELLGITIMERSSFEKNPIDFLEAKGYKEVKKDLIIKLPKYSLFELENGRKRMLASAGELQKGNELALPSKYVNFLYLASHYEKLKGSPEDNEQKQLFVEQHKHYLDEIIEQISEFSKRVILADANLDKVLSAYNKHRDKPIREQAENIIHLFTLTNLGAPAAFKYFDTTIDRKRYTSTKEVLDATLIHQSITGLYETRIDLSQLGGDGGGGSGGSGGSGGSGGSGGSGGVPWLTQQPLQLTILVPLQEYQDRILNKTALPEEQKQQLKALFTKYDNLWQHWENQVGHRKIRPHNIATGDYPPRPQKQYPINPKAKPSIQIVIDDLLKQGVLTPQNSTMNTPVYPVPKPDGRWRMVLDYREVNKTIPLTAAQNQHSAGILATIVRQKYKTTLDLANGFWAHPITPDSYWLTAFTWQGKQYCWTRLPQGFLNSPALFNADAVDLLKEVPNVQVYVDDIYLSHDNPHEHIQQLEKVFQILLQAGYVVSLKKSEIGQRTVEFLGFNITKEGRGLTDTFKTKLLNVTPPKDLKQLQSILGLLNFARNFIPNFAELVQTLYNLIASSPGKYIEWTEDNTKQLNKVIEALNTASNLEERLPDQRLVIKVNTSPSAGYVRYYNESGKKPIMYLNYVFSKAELKFSMLEKLLTTMHKALIKAMDLAMGQEILVYSPIVSMTKIQKTPLPERKALPIRWITWMTYLEDPRIQFHYDKTLPELKHIPDVYTSSIPPLKHPSQYEGVFCTDGSAIKSPDPTKSNNAGMGIVHAIYNPEYKILNQWSIPLGHHTAQMAEIAAVEFACKKALKVPGPVLVITDSFYVAESANKELPYWKSNGFVNNKKEPLKHISKWKSIAECLSIKPDITIQHEKGHQPINTSIHTEGNALADKLATQGSYVVNAGKRTADGSEFEKRTADGSEFESPKKKAKVE

SEQ ID NO: 701 - protein, 2091 aa, synthetic construct
MPAAKRVKLDGGDKKYSIGLDIGTNSVGWAVITDEYKVPSKKFKVLGNTDRHSIKKNLIGALLFDSGETAEATRLKRTARRRYTRRKNRICYLQEIFSNEMAKVDDSFFHRLEESFLVEEDKKHERHPIFGNIVDEVAYHEKYPTIYHLRKKLVDSTDKADLRLIYLALAHMIKFRGHFLIEGDLNPDNSDVDKLFIQLVQTYNQLFEENPINASGVDAKAILSARLSKSRRLENLIAQLPGEKKNGLFGNLIALSLGLTPNFKSNFDLAEDAKLQLSKDTYDDDLDNLLAQIGDQYADLFLAAKNLSDAILLSDILRVNTEITKAPLSASMIKRYDEHHQDLTLLKALVRQQLPEKYKEIFFDQSKNGYAGYIDGGASQEEFYKFIKPILEKMDGTEELLVKLNREDLLRKQRTFDNGSIPHQIHLGELHAILRRQEDFYPFLKDNREKIEKILTFRIPYYVGPLARGNSRFAWMTRKSEETITPWNFEEVVDKGASAQSFIERMTNFDKNLPNEKVLPKHSLLYEYFTVYNELTKVKYVTEGMRKPAFLSGEQKKAIVDLLFKTNRKVTVKQLKEDYFKKIECFDSVEISGVEDRFNASLGTYHDLLKIIKDKDFLDNEENEDILEDIVLTLTLFEDREMIEERLKTYAHLFDDKVMKQLKRRRYTGWGRLSRKLINGIRDKQSGKTILDFLKSDGFANRNFMQLIHDDSLTFKEDIQKAQVSGQGDSLHEHIANLAGSPAIKKGILQTVKVVDELVKVMGRHKPENIVIEMARENQTTQKGQKNSRERMKRIEEGIKELGSQILKEHPVENTQLQNEKLYLYYLQNGRDMYVDQELDINRLSDYDVDHIVPQSFLKDDSIDNKVLTRSDKARGKSDNVPSEEVVKKMKNYWRQLLNAKLITQRKFDNLTKAERGGLSELDKAGFIKRQLVETRQITKHVAQILDSRMNTKYDENDKLIREVKVITLKSKLVSDFRKDFQFYKVREINNYHHAHDAYLNAVVGTALIKKYPKLESEFVYGDYKVYDVRKMIAKSEQEIGKATAKYFFYSNIMNFFKTEITLANGEIRKRPLIETNGETGEIVWDKGRDFATVRKVLSMPQVNIVKKTEVQTGGFSKESILPKRNSDKLIARKKDWDPKKYGGFDSPTVAYSVLVVAKVEKGKSKKLKSVKELLGITIMERSSFEKNPIDFLEAKGYKEVKKDLIIKLPKYSLFELENGRKRMLASAGELQKGNELALPSKYVNFLYLASHYEKLKGSPEDNEQKQLFVEQHKHYLDEIIEQISEFSKRVILADANLDKVLSAYNKHRDKPIREQAENIIHLFTLTNLGAPAAFKYFDTTIDRKRYTSTKEVLDATLIHQSITGLYETRIDLSQLGGDGGEAAAKGGGGSEAAAKGGVPWLTQQPLQLTILVPLQEYQDRILNKTALPEEQKQQLKALFTKYDNLWQHWENQVGHRKIRPHNIATGDYPPRPQKQYPINPKAKPSIQIVIDDLLKQGVLTPQNSTMNTPVYPVPKPDGRWRMVLDYREVNKTIPLTAAQNQHSAGILATIVRQKYKTTLDLANGFWAHPITPDSYWLTAFTWQGKQYCWTRLPQGFLNSPALFNADAVDLLKEVPNVQVYVDDIYLSHDNPHEHIQQLEKVFQILLQAGYVVSLKKSEIGQRTVEFLGFNITKEGRGLTDTFKTKLLNVTPPKDLKQLQSILGLLNFARNFIPNFAELVQTLYNLIASSPGKYIEWTEDNTKQLNKVIEALNTASNLEERLPDQRLVIKVNTSPSAGYVRYYNESGKKPIMYLNYVFSKAELKFSMLEKLLTTMHKALIKAMDLAMGQEILVYSPIVSMTKIQKTPLPERKALPIRWITWMTYLEDPRIQFHYDKTLPELKHIPDVYTSSIPPLKHPSQYEGVFCTDGSAIKSPDPTKSNNAGMGIVHAIYNPEYKILNQWSIPLGHHTAQMAEIAAVEFACKKALKVPGPVLVITDSFYVAESANKELPYWKSNGFVNNKKEPLKHISKWKSIAECLSIKPDITIQHEKGHQPINTSIHTEGNALADKLATQGSYVVNAGKRTADGSEFEKRTADGSEFESPKKKAKVE

SEQ ID NO: 702 - protein, 2091 aa, synthetic construct
MPAAKRVKLDGGDKKYSIGLDIGTNSVGWAVITDEYKVPSKKFKVLGNTDRHSIKKNLIGALLFDSGETAEATRLKRTARRRYTRRKNRICYLQEIFSNEMAKVDDSFFHRLEESFLVEEDKKHERHPIFGNIVDEVAYHEKYPTIYHLRKKLVDSTDKADLRLIYLALAHMIKFRGHFLIEGDLNPDNSDVDKLFIQLVQTYNQLFEENPINASGVDAKAILSARLSKSRRLENLIAQLPGEKKNGLFGNLIALSLGLTPNFKSNFDLAEDAKLQLSKDTYDDDLDNLLAQIGDQYADLFLAAKNLSDAILLSDILRVNTEITKAPLSASMIKRYDEHHQDLTLLKALVRQQLPEKYKEIFFDQSKNGYAGYIDGGASQEEFYKFIKPILEKMDGTEELLVKLNREDLLRKQRTFDNGSIPHQIHLGELHAILRRQEDFYPFLKDNREKIEKILTFRIPYYVGPLARGNSRFAWMTRKSEETITPWNFEEVVDKGASAQSFIERMTNFDKNLPNEKVLPKHSLLYEYFTVYNELTKVKYVTEGMRKPAFLSGEQKKAIVDLLFKTNRKVTVKQLKEDYFKKIECFDSVEISGVEDRFNASLGTYHDLLKIIKDKDFLDNEENEDILEDIVLTLTLFEDREMIEERLKTYAHLFDDKVMKQLKRRRYTGWGRLSRKLINGIRDKQSGKTILDFLKSDGFANRNFMQLIHDDSLTFKEDIQKAQVSGQGDSLHEHIANLAGSPAIKKGILQTVKVVDELVKVMGRHKPENIVIEMARENQTTQKGQKNSRERMKRIEEGIKELGSQILKEHPVENTQLQNEKLYLYYLQNGRDMYVDQELDINRLSDYDVDHIVPQSFLKDDSIDNKVLTRSDKARGKSDNVPSEEVVKKMKNYWRQLLNAKLITQRKFDNLTKAERGGLSELDKAGFIKRQLVETRQITKHVAQILDSRMNTKYDENDKLIREVKVITLKSKLVSDFRKDFQFYKVREINNYHHAHDAYLNAVVGTALIKKYPKLESEFVYGDYKVYDVRKMIAKSEQEIGKATAKYFFYSNIMNFFKTEITLANGEIRKRPLIETNGETGEIVWDKGRDFATVRKVLSMPQVNIVKKTEVQTGGFSKESILPKRNSDKLIARKKDWDPKKYGGFDSPTVAYSVLVVAKVEKGKSKKLKSVKELLGITIMERSSFEKNPIDFLEAKGYKEVKKDLIIKLPKYSLFELENGRKRMLASAGELQKGNELALPSKYVNFLYLASHYEKLKGSPEDNEQKQLFVEQHKHYLDEIIEQISEFSKRVILADANLDKVLSAYNKHRDKPIREQAENIIHLFTLTNLGAPAAFKYFDTTIDRKRYTSTKEVLDATLIHQSITGLYETRIDLSQLGGDGGGGSGGSGGSGGSGGSGGVPWLTQQPLQLTILVPLQEYQDRILNKTALPEEQKQQLKALFTKYDNLWQHWENQVGHRKIRPHNIATGDYPPRPQKQYPINPKAKPSIQIVIDDLLKQGVLTPQNSTMNTPVYPVPKPDGRWRMVLDYREVNKTIPLTAAQNQHSAGILATIVRQKYKTTLDLANGFWAHPITPDSYWLTAFTWQGKQYCWTRLPQGFLNSPALFNADAVDLLKEVPNVQVYVDDIYLSHDNPHEHIQQLEKVFQILLQAGYVVSLKKSEIGQRTVEFLGFNITKEGRGLTDTFKTKLLNVTPPKDLKQLQSILGLLNFARNFIPNFAELVQTLYNLIASSPGKYIEWTEDNTKQLNKVIEALNTASNLEERLPDQRLVIKVNTSPSAGYVRYYNESGKKPIMYLNYVFSKAELKFSMLEKLLTTMHKALIKAMDLAMGQEILVYSPIVSMTKIQKTPLPERKALPIRWITWMTYLEDPRIQFHYDKTLPELKHIPDVYTSSIPPLKHPSQYEGVFCTDGSAIKSPDPTKSNNAGMGIVHAIYNPEYKILNQWSIPLGHHTAQMAEIAAVEFACKKALKVPGPVLVITDSFYVAESANKELPYWKSNGFVNNKKEPLKHISKWKSIAECLSIKPDITIQHEKGHQPINTSIHTEGNALADKLATQGSYVVNAGKRTADGSEFEKRTADGSEFESPKKKAKVE

SEQ ID NO: 703 - protein, 2082 aa, synthetic construct
MPAAKRVKLDGGDKKYSIGLDIGTNSVGWAVITDEYKVPSKKFKVLGNTDRHSIKKNLIGALLFDSGETAEATRLKRTARRRYTRRKNRICYLQEIFSNEMAKVDDSFFHRLEESFLVEEDKKHERHPIFGNIVDEVAYHEKYPTIYHLRKKLVDSTDKADLRLIYLALAHMIKFRGHFLIEGDLNPDNSDVDKLFIQLVQTYNQLFEENPINASGVDAKAILSARLSKSRRLENLIAQLPGEKKNGLFGNLIALSLGLTPNFKSNFDLAEDAKLQLSKDTYDDDLDNLLAQIGDQYADLFLAAKNLSDAILLSDILRVNTEITKAPLSASMIKRYDEHHQDLTLLKALVRQQLPEKYKEIFFDQSKNGYAGYIDGGASQEEFYKFIKPILEKMDGTEELLVKLNREDLLRKQRTFDNGSIPHQIHLGELHAILRRQEDFYPFLKDNREKIEKILTFRIPYYVGPLARGNSRFAWMTRKSEETITPWNFEEVVDKGASAQSFIERMTNFDKNLPNEKVLPKHSLLYEYFTVYNELTKVKYVTEGMRKPAFLSGEQKKAIVDLLFKTNRKVTVKQLKEDYFKKIECFDSVEISGVEDRFNASLGTYHDLLKIIKDKDFLDNEENEDILEDIVLTLTLFEDREMIEERLKTYAHLFDDKVMKQLKRRRYTGWGRLSRKLINGIRDKQSGKTILDFLKSDGFANRNFMQLIHDDSLTFKEDIQKAQVSGQGDSLHEHIANLAGSPAIKKGILQTVKVVDELVKVMGRHKPENIVIEMARENQTTQKGQKNSRERMKRIEEGIKELGSQILKEHPVENTQLQNEKLYLYYLQNGRDMYVDQELDINRLSDYDVDHIVPQSFLKDDSIDNKVLTRSDKARGKSDNVPSEEVVKKMKNYWRQLLNAKLITQRKFDNLTKAERGGLSELDKAGFIKRQLVETRQITKHVAQILDSRMNTKYDENDKLIREVKVITLKSKLVSDFRKDFQFYKVREINNYHHAHDAYLNAVVGTALIKKYPKLESEFVYGDYKVYDVRKMIAKSEQEIGKATAKYFFYSNIMNFFKTEITLANGEIRKRPLIETNGETGEIVWDKGRDFATVRKVLSMPQVNIVKKTEVQTGGFSKESILPKRNSDKLIARKKDWDPKKYGGFDSPTVAYSVLVVAKVEKGKSKKLKSVKELLGITIMERSSFEKNPIDFLEAKGYKEVKKDLIIKLPKYSLFELENGRKRMLASAGELQKGNELALPSKYVNFLYLASHYEKLKGSPEDNEQKQLFVEQHKHYLDEIIEQISEFSKRVILADANLDKVLSAYNKHRDKPIREQAENIIHLFTLTNLGAPAAFKYFDTTIDRKRYTSTKEVLDATLIHQSITGLYETRIDLSQLGGDGGGSSGGSGGVPWLTQQPLQLTILVPLQEYQDRILNKTALPEEQKQQLKALFTKYDNLWQHWENQVGHRKIRPHNIATGDYPPRPQKQYPINPKAKPSIQIVIDDLLKQGVLTPQNSTMNTPVYPVPKPDGRWRMVLDYREVNKTIPLTAAQNQHSAGILATIVRQKYKTTLDLANGFWAHPITPDSYWLTAFTWQGKQYCWTRLPQGFLNSPALFNADAVDLLKEVPNVQVYVDDIYLSHDNPHEHIQQLEKVFQILLQAGYVVSLKKSEIGQRTVEFLGFNITKEGRGLTDTFKTKLLNVTPPKDLKQLQSILGLLNFARNFIPNFAELVQTLYNLIASSPGKYIEWTEDNTKQLNKVIEALNTASNLEERLPDQRLVIKVNTSPSAGYVRYYNESGKKPIMYLNYVFSKAELKFSMLEKLLTTMHKALIKAMDLAMGQEILVYSPIVSMTKIQKTPLPERKALPIRWITWMTYLEDPRIQFHYDKTLPELKHIPDVYTSSIPPLKHPSQYEGVFCTDGSAIKSPDPTKSNNAGMGIVHAIYNPEYKILNQWSIPLGHHTAQMAEIAAVEFACKKALKVPGPVLVITDSFYVAESANKELPYWKSNGFVNNKKEPLKHISKWKSIAECLSIKPDITIQHEKGHQPINTSIHTEGNALADKLATQGSYVVNAGKRTADGSEFEKRTADGSEFESPKKKAKVE

SEQ ID NO: 704 - protein, 2092 aa, synthetic construct
MPAAKRVKLDGGDKKYSIGLDIGTNSVGWAVITDEYKVPSKKFKVLGNTDRHSIKKNLIGALLFDSGETAEATRLKRTARRRYTRRKNRICYLQEIFSNEMAKVDDSFFHRLEESFLVEEDKKHERHPIFGNIVDEVAYHEKYPTIYHLRKKLVDSTDKADLRLIYLALAHMIKFRGHFLIEGDLNPDNSDVDKLFIQLVQTYNQLFEENPINASGVDAKAILSARLSKSRRLENLIAQLPGEKKNGLFGNLIALSLGLTPNFKSNFDLAEDAKLQLSKDTYDDDLDNLLAQIGDQYADLFLAAKNLSDAILLSDILRVNTEITKAPLSASMIKRYDEHHQDLTLLKALVRQQLPEKYKEIFFDQSKNGYAGYIDGGASQEEFYKFIKPILEKMDGTEELLVKLNREDLLRKQRTFDNGSIPHQIHLGELHAILRRQEDFYPFLKDNREKIEKILTFRIPYYVGPLARGNSRFAWMTRKSEETITPWNFEEVVDKGASAQSFIERMTNFDKNLPNEKVLPKHSLLYEYFTVYNELTKVKYVTEGMRKPAFLSGEQKKAIVDLLFKTNRKVTVKQLKEDYFKKIECFDSVEISGVEDRFNASLGTYHDLLKIIKDKDFLDNEENEDILEDIVLTLTLFEDREMIEERLKTYAHLFDDKVMKQLKRRRYTGWGRLSRKLINGIRDKQSGKTILDFLKSDGFANRNFMQLIHDDSLTFKEDIQKAQVSGQGDSLHEHIANLAGSPAIKKGILQTVKVVDELVKVMGRHKPENIVIEMARENQTTQKGQKNSRERMKRIEEGIKELGSQILKEHPVENTQLQNEKLYLYYLQNGRDMYVDQELDINRLSDYDVDHIVPQSFLKDDSIDNKVLTRSDKARGKSDNVPSEEVVKKMKNYWRQLLNAKLITQRKFDNLTKAERGGLSELDKAGFIKRQLVETRQITKHVAQILDSRMNTKYDENDKLIREVKVITLKSKLVSDFRKDFQFYKVREINNYHHAHDAYLNAVVGTALIKKYPKLESEFVYGDYKVYDVRKMIAKSEQEIGKATAKYFFYSNIMNFFKTEITLANGEIRKRPLIETNGETGEIVWDKGRDFATVRKVLSMPQVNIVKKTEVQTGGFSKESILPKRNSDKLIARKKDWDPKKYGGFDSPTVAYSVLVVAKVEKGKSKKLKSVKELLGITIMERSSFEKNPIDFLEAKGYKEVKKDLIIKLPKYSLFELENGRKRMLASAGELQKGNELALPSKYVNFLYLASHYEKLKGSPEDNEQKQLFVEQHKHYLDEIIEQISEFSKRVILADANLDKVLSAYNKHRDKPIREQAENIIHLFTLTNLGAPAAFKYFDTTIDRKRYTSTKEVLDATLIHQSITGLYETRIDLSQLGGDGGSGSETPGTSESATPESGGVPWLTQQPLQLTILVPLQEYQDRILNKTALPEEQKQQLKALFTKYDNLWQHWENQVGHRKIRPHNIATGDYPPRPQKQYPINPKAKPSIQIVIDDLLKQGVLTPQNSTMNTPVYPVPKPDGRWRMVLDYREVNKTIPLTAAQNQHSAGILATIVRQKYKTTLDLANGFWAHPITPDSYWLTAFTWQGKQYCWTRLPQGFLNSPALFNADAVDLLKEVPNVQVYVDDIYLSHDNPHEHIQQLEKVFQILLQAGYVVSLKKSEIGQRTVEFLGFNITKEGRGLTDTFKTKLLNVTPPKDLKQLQSILGKLNFARNFIPNFAELVQTLYNLIASSPGKYIEWTEDNTKQLNKVIEALNTASNLEERLPDQRLVIKVNTSPSAGYVRYYNESGKKPIMYLNYVFSKAELKFSMLEKLLTTMHKALIKAMDLAMGQEILVYSPIVSMTKIQKTPLPERKALPIRWITWMTYLEDPRIQFHYDKTLPELKHIPDVYTSSIPPLKHPSQYEGVFCTDGSAIKSPDPTKSNNAGMGIVHAIYNPEYKILNQWSIPLGHHTAQMAEIAAVEFACKKALKVPGPVLVITDSFYVAESANKELPYWKSNGFVNNKKEPLKHISKWKSIAECLSIKPDITIQHEKGHQPINTSIHTEGNALADKLATQGSYVVNAGKRTADGSEFEKRTADGSEFESPKKKAKVE

SEQ ID NO: 705 - protein, 2087 aa, synthetic construct
MPAAKRVKLDGGDKKYSIGLDIGTNSVGWAVITDEYKVPSKKFKVLGNTDRHSIKKNLIGALLFDSGETAEATRLKRTARRRYTRRKNRICYLQEIFSNEMAKVDDSFFHRLEESFLVEEDKKHERHPIFGNIVDEVAYHEKYPTIYHLRKKLVDSTDKADLRLIYLALAHMIKFRGHFLIEGDLNPDNSDVDKLFIQLVQTYNQLFEENPINASGVDAKAILSARLSKSRRLENLIAQLPGEKKNGLFGNLIALSLGLTPNFKSNFDLAEDAKLQLSKDTYDDDLDNLLAQIGDQYADLFLAAKNLSDAILLSDILRVNTEITKAPLSASMIKRYDEHHQDLTLLKALVRQQLPEKYKEIFFDQSKNGYAGYIDGGASQEEFYKFIKPILEKMDGTEELLVKLNREDLLRKQRTFDNGSIPHQIHLGELHAILRRQEDFYPFLKDNREKIEKILTFRIPYYVGPLARGNSRFAWMTRKSEETITPWNFEEVVDKGASAQSFIERMTNFDKNLPNEKVLPKHSLLYEYFTVYNELTKVKYVTEGMRKPAFLSGEQKKAIVDLLFKTNRKVTVKQLKEDYFKKIECFDSVEISGVEDRFNASLGTYHDLLKIIKDKDFLDNEENEDILEDIVLTLTLFEDREMIEERLKTYAHLFDDKVMKQLKRRRYTGWGRLSRKLINGIRDKQSGKTILDFLKSDGFANRNFMQLIHDDSLTFKEDIQKAQVSGQGDSLHEHIANLAGSPAIKKGILQTVKVVDELVKVMGRHKPENIVIEMARENQTTQKGQKNSRERMKRIEEGIKELGSQILKEHPVENTQLQNEKLYLYYLQNGRDMYVDQELDINRLSDYDVDHIVPQSFLKDDSIDNKVLTRSDKARGKSDNVPSEEVVKKMKNYWRQLLNAKLITQRKFDNLTKAERGGLSELDKAGFIKRQLVETRQITKHVAQILDSRMNTKYDENDKLIREVKVITLKSKLVSDFRKDFQFYKVREINNYHHAHDAYLNAVVGTALIKKYPKLESEFVYGDYKVYDVRKMIAKSEQEIGKATAKYFFYSNIMNFFKTEITLANGEIRKRPLIETNGETGEIVWDKGRDFATVRKVLSMPQVNIVKKTEVQTGGFSKESILPKRNSDKLIARKKDWDPKKYGGFDSPTVAYSVLVVAKVEKGKSKKLKSVKELLGITIMERSSFEKNPIDFLEAKGYKEVKKDLIIKLPKYSLFELENGRKRMLASAGELQKGNELALPSKYVNFLYLASHYEKLKGSPEDNEQKQLFVEQHKHYLDEIIEQISEFSKRVILADANLDKVLSAYNKHRDKPIREQAENIIHLFTLTNLGAPAAFKYFDTTIDRKRYTSTKEVLDATLIHQSITGLYETRIDLSQLGGDGGPAPAPAPAPAPGGVPWLTQQPLQLTILVPLQEYQDRILNKTALPEEQKQQLKALFTKYDNLWQHWENQVGHRKIRPHNIATGDYPPRPQKQYPINPKAKPSIQIVIDDLLKQGVLTPQNSTMNTPVYPVPKPDGRWRMVLDYREVNKTIPLTAAQNQHSAGILATIVRQKYKTTLDLANGFWAHPITPDSYWLTAFTWQGKQYCWTRLPQGFLNSPALFNADAVDLLKEVPNVQVYVDDIYLSHDNPHEHIQQLEKVFQILLQAGYVVSLKKSEIGQRTVEFLGFNITKEGRGLTDTFKTKLLNVTPPKDLKQLQSILGKLNFARNFIPNFAELVQTLYNLIASSPGKYIEWTEDNTKQLNKVIEALNTASNLEERLPDQRLVIKVNTSPSAGYVRYYNESGKKPIMYLNYVFSKAELKFSMLEKLLTTMHKALIKAMDLAMGQEILVYSPIVSMTKIQKTPLPERKALPIRWITWMTYLEDPRIQFHYDKTLPELKHIPDVYTSSIPPLKHPSQYEGVFCTDGSAIKSPDPTKSNNAGMGIVHAIYNPEYKILNQWSIPLGHHTAQMAEIAAVEFACKKALKVPGPVLVITDSFYVAESANKELPYWKSNGFVNNKKEPLKHISKWKSIAECLSIKPDITIQHEKGHQPINTSIHTEGNALADKLATQGSYVVNAGKRTADGSEFEKRTADGSEFESPKKKAKVE

SEQ ID NO: 706 - protein, 2085 aa, synthetic construct
MPAAKRVKLDGGDKKYSIGLDIGTNSVGWAVITDEYKVPSKKFKVLGNTDRHSIKKNLIGALLFDSGETAEATRLKRTARRRYTRRKNRICYLQEIFSNEMAKVDDSFFHRLEESFLVEEDKKHERHPIFGNIVDEVAYHEKYPTIYHLRKKLVDSTDKADLRLIYLALAHMIKFRGHFLIEGDLNPDNSDVDKLFIQLVQTYNQLFEENPINASGVDAKAILSARLSKSRRLENLIAQLPGEKKNGLFGNLIALSLGLTPNFKSNFDLAEDAKLQLSKDTYDDDLDNLLAQIGDQYADLFLAAKNLSDAILLSDILRVNTEITKAPLSASMIKRYDEHHQDLTLLKALVRQQLPEKYKEIFFDQSKNGYAGYIDGGASQEEFYKFIKPILEKMDGTEELLVKLNREDLLRKQRTFDNGSIPHQIHLGELHAILRRQEDFYPFLKDNREKIEKILTFRIPYYVGPLARGNSRFAWMTRKSEETITPWNFEEVVDKGASAQSFIERMTNFDKNLPNEKVLPKHSLLYEYFTVYNELTKVKYVTEGMRKPAFLSGEQKKAIVDLLFKTNRKVTVKQLKEDYFKKIECFDSVEISGVEDRFNASLGTYHDLLKIIKDKDFLDNEENEDILEDIVLTLTLFEDREMIEERLKTYAHLFDDKVMKQLKRRRYTGWGRLSRKLINGIRDKQSGKTILDFLKSDGFANRNFMQLIHDDSLTFKEDIQKAQVSGQGDSLHEHIANLAGSPAIKKGILQTVKVVDELVKVMGRHKPENIVIEMARENQTTQKGQKNSRERMKRIEEGIKELGSQILKEHPVENTQLQNEKLYLYYLQNGRDMYVDQELDINRLSDYDVDHIVPQSFLKDDSIDNKVLTRSDKARGKSDNVPSEEVVKKMKNYWRQLLNAKLITQRKFDNLTKAERGGLSELDKAGFIKRQLVETRQITKHVAQILDSRMNTKYDENDKLIREVKVITLKSKLVSDFRKDFQFYKVREINNYHHAHDAYLNAVVGTALIKKYPKLESEFVYGDYKVYDVRKMIAKSEQEIGKATAKYFFYSNIMNFFKTEITLANGEIRKRPLIETNGETGEIVWDKGRDFATVRKVLSMPQVNIVKKTEVQTGGFSKESILPKRNSDKLIARKKDWDPKKYGGFDSPTVAYSVLVVAKVEKGKSKKLKSVKELLGITIMERSSFEKNPIDFLEAKGYKEVKKDLIIKLPKYSLFELENGRKRMLASAGELQKGNELALPSKYVNFLYLASHYEKLKGSPEDNEQKQLFVEQHKHYLDEIIEQISEFSKRVILADANLDKVLSAYNKHRDKPIREQAENIIHLFTLTNLGAPAAFKYFDTTIDRKRYTSTKEVLDATLIHQSITGLYETRIDLSQLGGDGGPAPGGGGSSGGVPWLTQQPLQLTILVPLQEYQDRILNKTALPEEQKQQLKALFTKYDNLWQHWENQVGHRKIRPHNIATGDYPPRPQKQYPINPKAKPSIQIVIDDLLKQGVLTPQNSTMNTPVYPVPKPDGRWRMVLDYREVNKTIPLTAAQNQHSAGILATIVRQKYKTTLDLANGFWAHPITPDSYWLTAFTWQGKQYCWTRLPQGFLNSPALFNADAVDLLKEVPNVQVYVDDIYLSHDNPHEHIQQLEKVFQILLQAGYVVSLKKSEIGQRTVEFLGFNITKEGRGLTDTFKTKLLNVTPPKDLKQLQSILGKLNFARNFIPNFAELVQTLYNLIASSPGKYIEWTEDNTKQLNKVIEALNTASNLEERLPDQRLVIKVNTSPSAGYVRYYNESGKKPIMYLNYVFSKAELKFSMLEKLLTTMHKALIKAMDLAMGQEILVYSPIVSMTKIQKTPLPERKALPIRWITWMTYLEDPRIQFHYDKTLPELKHIPDVYTSSIPPLKHPSQYEGVFCTDGSAIKSPDPTKSNNAGMGIVHAIYNPEYKILNQWSIPLGHHTAQMAEIAAVEFACKKALKVPGPVLVITDSFYVAESANKELPYWKSNGFVNNKKEPLKHISKWKSIAECLSIKPDITIQHEKGHQPINTSIHTEGNALADKLATQGSYVVNAGKRTADGSEFEKRTADGSEFESPKKKAKVE

SEQ ID NO: 707 - protein, 2168 aa, synthetic construct
MPAAKRVKLDGGDKKYSIGLDIGTNSVGWAVITDEYKVPSKKFKVLGNTDRHSIKKNLIGALLFDSGETAEATRLKRTARRRYTRRKNRICYLQEIFSNEMAKVDDSFFHRLEESFLVEEDKKHERHPIFGNIVDEVAYHEKYPTIYHLRKKLVDSTDKADLRLIYLALAHMIKFRGHFLIEGDLNPDNSDVDKLFIQLVQTYNQLFEENPINASGVDAKAILSARLSKSRRLENLIAQLPGEKKNGLFGNLIALSLGLTPNFKSNFDLAEDAKLQLSKDTYDDDLDNLLAQIGDQYADLFLAAKNLSDAILLSDILRVNTEITKAPLSASMIKRYDEHHQDLTLLKALVRQQLPEKYKEIFFDQSKNGYAGYIDGGASQEEFYKFIKPILEKMDGTEELLVKLNREDLLRKQRTFDNGSIPHQIHLGELHAILRRQEDFYPFLKDNREKIEKILTFRIPYYVGPLARGNSRFAWMTRKSEETITPWNFEEVVDKGASAQSFIERMTNFDKNLPNEKVLPKHSLLYEYFTVYNELTKVKYVTEGMRKPAFLSGEQKKAIVDLLFKTNRKVTVKQLKEDYFKKIECFDSVEISGVEDRFNASLGTYHDLLKIIKDKDFLDNEENEDILEDIVLTLTLFEDREMIEERLKTYAHLFDDKVMKQLKRRRYTGWGRLSRKLINGIRDKQSGKTILDFLKSDGFANRNFMQLIHDDSLTFKEDIQKAQVSGQGDSLHEHIANLAGSPAIKKGILQTVKVVDELVKVMGRHKPENIVIEMARENQTTQKGQKNSRERMKRIEEGIKELGSQILKEHPVENTQLQNEKLYLYYLQNGRDMYVDQELDINRLSDYDVDHIVPQSFLKDDSIDNKVLTRSDKARGKSDNVPSEEVVKKMKNYWRQLLNAKLITQRKFDNLTKAERGGLSELDKAGFIKRQLVETRQITKHVAQILDSRMNTKYDENDKLIREVKVITLKSKLVSDFRKDFQFYKVREINNYHHAHDAYLNAVVGTALIKKYPKLESEFVYGDYKVYDVRKMIAKSEQEIGKATAKYFFYSNIMNFFKTEITLANGEIRKRPLIETNGETGEIVWDKGRDFATVRKVLSMPQVNIVKKTEVQTGGFSKESILPKRNSDKLIARKKDWDPKKYGGFDSPTVAYSVLVVAKVEKGKSKKLKSVKELLGITIMERSSFEKNPIDFLEAKGYKEVKKDLIIKLPKYSLFELENGRKRMLASAGELQKGNELALPSKYVNFLYLASHYEKLKGSPEDNEQKQLFVEQHKHYLDEIIEQISEFSKRVILADANLDKVLSAYNKHRDKPIREQAENIIHLFTLTNLGAPAAFKYFDTTIDRKRYTSTKEVLDATLIHQSITGLYETRIDLSQLGGDGGGSSGGMNPLQLLQPLPAEVKGTKLLAHWNSGATITCIPESFLEDEQPIKQTLIKTIHGEKQQNVYYLTFKVKGRKVEAEVIASPYEYILLSPTDVPWLTQQPLQLTILVPLQEYQDRILNKTALPEEQKQQLKALFTKYDNLWQHWENQVGHRKIRPHNIATGDYPPRPQKQYPINPKAKPSIQIVIDDLLKQGVLTPQNSTMNTPVYPVPKPDGRWRMVLDYREVNKTIPLTAAQNQHSAGILATIVRQKYKTTLDLANGFWAHPITPDSYWLTAFTWQGKQYCWTRLPQGFLNSPALFNADAVDLLKEVPNVQVYVDDIYLSHDNPHEHIQQLEKVFQILLQAGYVVSLKKSEIGQRTVEFLGFNITKEGRGLTDTFKTKLLNVTPPKDLKQLQSILGLLNFARNFIPNFAELVQTLYNLIASSPGKYIEWTEDNTKQLNKVIEALNTASNLEERLPDQRLVIKVNTSPSAGYVRYYNESGKKPIMYLNYVFSKAELKFSMLEKLLTTMHKALIKAMDLAMGQEILVYSPIVSMTKIQKTPLPERKALPIRWITWMTYLEDPRIQFHYDKTLPELKHIPDVYTSSIPPLKHPSQYEGVFCTDGSAIKSPDPTKSNNAGMGIVHAIYNPEYKILNQWSIPLGHHTAQMAEIAAVEFACKKALKVPGPVLVITDSFYVAESANKELPYWKSNGFVNNKKEPLKHISKWKSIAECLSIKPDITIQHEKGHQPINTSIHTEGNALADKLATQGSYVVNAGKRTADGSEFEKRTADGSEFESPKKKAKVE

SEQ ID NO: 708 - protein, 2174 aa, synthetic construct
MPAAKRVKLDGGDKKYSIGLDIGTNSVGWAVITDEYKVPSKKFKVLGNTDRHSIKKNLIGALLFDSGETAEATRLKRTARRRYTRRKNRICYLQEIFSNEMAKVDDSFFHRLEESFLVEEDKKHERHPIFGNIVDEVAYHEKYPTIYHLRKKLVDSTDKADLRLIYLALAHMIKFRGHFLIEGDLNPDNSDVDKLFIQLVQTYNQLFEENPINASGVDAKAILSARLSKSRRLENLIAQLPGEKKNGLFGNLIALSLGLTPNFKSNFDLAEDAKLQLSKDTYDDDLDNLLAQIGDQYADLFLAAKNLSDAILLSDILRVNTEITKAPLSASMIKRYDEHHQDLTLLKALVRQQLPEKYKEIFFDQSKNGYAGYIDGGASQEEFYKFIKPILEKMDGTEELLVKLNREDLLRKQRTFDNGSIPHQIHLGELHAILRRQEDFYPFLKDNREKIEKILTFRIPYYVGPLARGNSRFAWMTRKSEETITPWNFEEVVDKGASAQSFIERMTNFDKNLPNEKVLPKHSLLYEYFTVYNELTKVKYVTEGMRKPAFLSGEQKKAIVDLLFKTNRKVTVKQLKEDYFKKIECFDSVEISGVEDRFNASLGTYHDLLKIIKDKDFLDNEENEDILEDIVLTLTLFEDREMIEERLKTYAHLFDDKVMKQLKRRRYTGWGRLSRKLINGIRDKQSGKTILDFLKSDGFANRNFMQLIHDDSLTFKEDIQKAQVSGQGDSLHEHIANLAGSPAIKKGILQTVKVVDELVKVMGRHKPENIVIEMARENQTTQKGQKNSRERMKRIEEGIKELGSQILKEHPVENTQLQNEKLYLYYLQNGRDMYVDQELDINRLSDYDVDHIVPQSFLKDDSIDNKVLTRSDKARGKSDNVPSEEVVKKMKNYWRQLLNAKLITQRKFDNLTKAERGGLSELDKAGFIKRQLVETRQITKHVAQILDSRMNTKYDENDKLIREVKVITLKSKLVSDFRKDFQFYKVREINNYHHAHDAYLNAVVGTALIKKYPKLESEFVYGDYKVYDVRKMIAKSEQEIGKATAKYFFYSNIMNFFKTEITLANGEIRKRPLIETNGETGEIVWDKGRDFATVRKVLSMPQVNIVKKTEVQTGGFSKESILPKRNSDKLIARKKDWDPKKYGGFDSPTVAYSVLVVAKVEKGKSKKLKSVKELLGITIMERSSFEKNPIDFLEAKGYKEVKKDLIIKLPKYSLFELENGRKRMLASAGELQKGNELALPSKYVNFLYLASHYEKLKGSPEDNEQKQLFVEQHKHYLDEIIEQISEFSKRVILADANLDKVLSAYNKHRDKPIREQAENIIHLFTLTNLGAPAAFKYFDTTIDRKRYTSTKEVLDATLIHQSITGLYETRIDLSQLGGDGGGGGPAPGSSGGMNPLQLLQPLPAEVKGTKLLAHWNSGATITCIPESFLEDEQPIKQTLIKTIHGEKQQNVYYLTFKVKGRKVEAEVIASPYEYILLSPTDVPWLTQQPLQLTILVPLQEYQDRILNKTALPEEQKQQLKALFTKYDNLWQHWENQVGHRKIRPHNIATGDYPPRPQKQYPINPKAKPSIQIVIDDLLKQGVLTPQNSTMNTPVYPVPKPDGRWRMVLDYREVNKTIPLTAAQNQHSAGILATIVRQKYKTTLDLANGFWAHPITPDSYWLTAFTWQGKQYCWTRLPQGFLNSPALFNADAVDLLKEVPNVQVYVDDIYLSHDNPHEHIQQLEKVFQILLQAGYVVSLKKSEIGQRTVEFLGFNITKEGRGLTDTFKTKLLNVTPPKDLKQLQSILGLLNFARNFIPNFAELVQTLYNLIASSPGKYIEWTEDNTKQLNKVIEALNTASNLEERLPDQRLVIKVNTSPSAGYVRYYNESGKKPIMYLNYVFSKAELKFSMLEKLLTTMHKALIKAMDLAMGQEILVYSPIVSMTKIQKTPLPERKALPIRWITWMTYLEDPRIQFHYDKTLPELKHIPDVYTSSIPPLKHPSQYEGVFCTDGSAIKSPDPTKSNNAGMGIVHAIYNPEYKILNQWSIPLGHHTAQMAEIAAVEFACKKALKVPGPVLVITDSFYVAESANKELPYWKSNGFVNNKKEPLKHISKWKSIAECLSIKPDITIQHEKGHQPINTSIHTEGNALADKLATQGSYVVNAGKRTADGSEFEKRTADGSEFESPKKKAKVE

SEQ ID NO: 709 - protein, 2176 aa, synthetic construct
MPAAKRVKLDGGDKKYSIGLDIGTNSVGWAVITDEYKVPSKKFKVLGNTDRHSIKKNLIGALLFDSGETAEATRLKRTARRRYTRRKNRICYLQEIFSNEMAKVDDSFFHRLEESFLVEEDKKHERHPIFGNIVDEVAYHEKYPTIYHLRKKLVDSTDKADLRLIYLALAHMIKFRGHFLIEGDLNPDNSDVDKLFIQLVQTYNQLFEENPINASGVDAKAILSARLSKSRRLENLIAQLPGEKKNGLFGNLIALSLGLTPNFKSNFDLAEDAKLQLSKDTYDDDLDNLLAQIGDQYADLFLAAKNLSDAILLSDILRVNTEITKAPLSASMIKRYDEHHQDLTLLKALVRQQLPEKYKEIFFDQSKNGYAGYIDGGASQEEFYKFIKPILEKMDGTEELLVKLNREDLLRKQRTFDNGSIPHQIHLGELHAILRRQEDFYPFLKDNREKIEKILTFRIPYYVGPLARGNSRFAWMTRKSEETITPWNFEEVVDKGASAQSFIERMTNFDKNLPNEKVLPKHSLLYEYFTVYNELTKVKYVTEGMRKPAFLSGEQKKAIVDLLFKTNRKVTVKQLKEDYFKKIECFDSVEISGVEDRFNASLGTYHDLLKIIKDKDFLDNEENEDILEDIVLTLTLFEDREMIEERLKTYAHLFDDKVMKQLKRRRYTGWGRLSRKLINGIRDKQSGKTILDFLKSDGFANRNFMQLIHDDSLTFKEDIQKAQVSGQGDSLHEHIANLAGSPAIKKGILQTVKVVDELVKVMGRHKPENIVIEMARENQTTQKGQKNSRERMKRIEEGIKELGSQILKEHPVENTQLQNEKLYLYYLQNGRDMYVDQELDINRLSDYDVDHIVPQSFLKDDSIDNKVLTRSDKARGKSDNVPSEEVVKKMKNYWRQLLNAKLITQRKFDNLTKAERGGLSELDKAGFIKRQLVETRQITKHVAQILDSRMNTKYDENDKLIREVKVITLKSKLVSDFRKDFQFYKVREINNYHHAHDAYLNAVVGTALIKKYPKLESEFVYGDYKVYDVRKMIAKSEQEIGKATAKYFFYSNIMNFFKTEITLANGEIRKRPLIETNGETGEIVWDKGRDFATVRKVLSMPQVNIVKKTEVQTGGFSKESILPKRNSDKLIARKKDWDPKKYGGFDSPTVAYSVLVVAKVEKGKSKKLKSVKELLGITIMERSSFEKNPIDFLEAKGYKEVKKDLIIKLPKYSLFELENGRKRMLASAGELQKGNELALPSKYVNFLYLASHYEKLKGSPEDNEQKQLFVEQHKHYLDEIIEQISEFSKRVILADANLDKVLSAYNKHRDKPIREQAENIIHLFTLTNLGAPAAFKYFDTTIDRKRYTSTKEVLDATLIHQSITGLYETRIDLSQLGGDGGPAPEAAAKGSSGGMNPLQLLQPLPAEVKGTKLLAHWNSGATITCIPESFLEDEQPIKQTLIKTIHGEKQQNVYYLTFKVKGRKVEAEVIASPYEYILLSPTDVPWLTQQPLQLTILVPLQEYQDRILNKTALPEEQKQQLKALFTKYDNLWQHWENQVGHRKIRPHNIATGDYPPRPQKQYPINPKAKPSIQIVIDDLLKQGVLTPQNSTMNTPVYPVPKPDGRWRMVLDYREVNKTIPLTAAQNQHSAGILATIVRQKYKTTLDLANGFWAHPITPDSYWLTAFTWQGKQYCWTRLPQGFLNSPALFNADAVDLLKEVPNVQVYVDDIYLSHDNPHEHIQQLEKVFQILLQAGYVVSLKKSEIGQRTVEFLGFNITKEGRGLTDTFKTKLLNVTPPKDLKQLQSILGLLNFARNFIPNFAELVQTLYNLIASSPGKYIEWTEDNTKQLNKVIEALNTASNLEERLPDQRLVIKVNTSPSAGYVRYYNESGKKPIMYLNYVFSKAELKFSMLEKLLTTMHKALIKAMDLAMGQEILVYSPIVSMTKIQKTPLPERKALPIRWITWMTYLEDPRIQFHYDKTLPELKHIPDVYTSSIPPLKHPSQYEGVFCTDGSAIKSPDPTKSNNAGMGIVHAIYNPEYKILNQWSIPLGHHTAQMAEIAAVEFACKKALKVPGPVLVITDSFYVAESANKELPYWKSNGFVNNKKEPLKHISKWKSIAECLSIKPDITIQHEKGHQPINTSIHTEGNALADKLATQGSYVVNAGKRTADGSEFEKRTADGSEFESPKKKAKVE

SEQ ID NO: 710 - protein, 2171 aa, synthetic construct
MPAAKRVKLDGGDKKYSIGLDIGTNSVGWAVITDEYKVPSKKFKVLGNTDRHSIKKNLIGALLFDSGETAEATRLKRTARRRYTRRKNRICYLQEIFSNEMAKVDDSFFHRLEESFLVEEDKKHERHPIFGNIVDEVAYHEKYPTIYHLRKKLVDSTDKADLRLIYLALAHMIKFRGHFLIEGDLNPDNSDVDKLFIQLVQTYNQLFEENPINASGVDAKAILSARLSKSRRLENLIAQLPGEKKNGLFGNLIALSLGLTPNFKSNFDLAEDAKLQLSKDTYDDDLDNLLAQIGDQYADLFLAAKNLSDAILLSDILRVNTEITKAPLSASMIKRYDEHHQDLTLLKALVRQQLPEKYKEIFFDQSKNGYAGYIDGGASQEEFYKFIKPILEKMDGTEELLVKLNREDLLRKQRTFDNGSIPHQIHLGELHAILRRQEDFYPFLKDNREKIEKILTFRIPYYVGPLARGNSRFAWMTRKSEETITPWNFEEVVDKGASAQSFIERMTNFDKNLPNEKVLPKHSLLYEYFTVYNELTKVKYVTEGMRKPAFLSGEQKKAIVDLLFKTNRKVTVKQLKEDYFKKIECFDSVEISGVEDRFNASLGTYHDLLKIIKDKDFLDNEENEDILEDIVLTLTLFEDREMIEERLKTYAHLFDDKVMKQLKRRRYTGWGRLSRKLINGIRDKQSGKTILDFLKSDGFANRNFMQLIHDDSLTFKEDIQKAQVSGQGDSLHEHIANLAGSPAIKKGILQTVKVVDELVKVMGRHKPENIVIEMARENQTTQKGQKNSRERMKRIEEGIKELGSQILKEHPVENTQLQNEKLYLYYLQNGRDMYVDQELDINRLSDYDVDHIVPQSFLKDDSIDNKVLTRSDKARGKSDNVPSEEVVKKMKNYWRQLLNAKLITQRKFDNLTKAERGGLSELDKAGFIKRQLVETRQITKHVAQILDSRMNTKYDENDKLIREVKVITLKSKLVSDFRKDFQFYKVREINNYHHAHDAYLNAVVGTALIKKYPKLESEFVYGDYKVYDVRKMIAKSEQEIGKATAKYFFYSNIMNFFKTEITLANGEIRKRPLIETNGETGEIVWDKGRDFATVRKVLSMPQVNIVKKTEVQTGGFSKESILPKRNSDKLIARKKDWDPKKYGGFDSPTVAYSVLVVAKVEKGKSKKLKSVKELLGITIMERSSFEKNPIDFLEAKGYKEVKKDLIIKLPKYSLFELENGRKRMLASAGELQKGNELALPSKYVNFLYLASHYEKLKGSPEDNEQKQLFVEQHKHYLDEIIEQISEFSKRVILADANLDKVLSAYNKHRDKPIREQAENIIHLFTLTNLGAPAAFKYFDTTIDRKRYTSTKEVLDATLIHQSITGLYETRIDLSQLGGDGGGGGGSSGGMNPLQLLQPLPAEVKGTKLLAHWNSGATITCIPESFLEDEQPIKQTLIKTIHGEKQQNVYYLTFKVKGRKVEAEVIASPYEYILLSPTDVPWLTQQPLQLTILVPLQEYQDRILNKTALPEEQKQQLKALFTKYDNLWQHWENQVGHRKIRPHNIATGDYPPRPQKQYPINPKAKPSIQIVIDDLLKQGVLTPQNSTMNTPVYPVPKPDGRWRMVLDYREVNKTIPLTAAQNQHSAGILATIVRQKYKTTLDLANGFWAHPITPDSYWLTAFTWQGKQYCWTRLPQGFLNSPALFNADAVDLLKEVPNVQVYVDDIYLSHDNPHEHIQQLEKVFQILLQAGYVVSLKKSEIGQRTVEFLGFNITKEGRGLTDTFKTKLLNVTPPKDLKQLQSILGLLNFARNFIPNFAELVQTLYNLIASSPGKYIEWTEDNTKQLNKVIEALNTASNLEERLPDQRLVIKVNTSPSAGYVRYYNESGKKPIMYLNYVFSKAELKFSMLEKLLTTMHKALIKAMDLAMGQEILVYSPIVSMTKIQKTPLPERKALPIRWITWMTYLEDPRIQFHYDKTLPELKHIPDVYTSSIPPLKHPSQYEGVFCTDGSAIKSPDPTKSNNAGMGIVHAIYNPEYKILNQWSIPLGHHTAQMAEIAAVEFACKKALKVPGPVLVITDSFYVAESANKELPYWKSNGFVNNKKEPLKHISKWKSIAECLSIKPDITIQHEKGHQPINTSIHTEGNALADKLATQGSYVVNAGKRTADGSEFEKRTADGSEFESPKKKAKVE

SEQ ID NO: 711 - protein, 2174 aa, synthetic construct
MPAAKRVKLDGGDKKYSIGLDIGTNSVGWAVITDEYKVPSKKFKVLGNTDRHSIKKNLIGALLFDSGETAEATRLKRTARRRYTRRKNRICYLQEIFSNEMAKVDDSFFHRLEESFLVEEDKKHERHPIFGNIVDEVAYHEKYPTIYHLRKKLVDSTDKADLRLIYLALAHMIKFRGHFLIEGDLNPDNSDVDKLFIQLVQTYNQLFEENPINASGVDAKAILSARLSKSRRLENLIAQLPGEKKNGLFGNLIALSLGLTPNFKSNFDLAEDAKLQLSKDTYDDDLDNLLAQIGDQYADLFLAAKNLSDAILLSDILRVNTEITKAPLSASMIKRYDEHHQDLTLLKALVRQQLPEKYKEIFFDQSKNGYAGYIDGGASQEEFYKFIKPILEKMDGTEELLVKLNREDLLRKQRTFDNGSIPHQIHLGELHAILRRQEDFYPFLKDNREKIEKILTFRIPYYVGPLARGNSRFAWMTRKSEETITPWNFEEVVDKGASAQSFIERMTNFDKNLPNEKVLPKHSLLYEYFTVYNELTKVKYVTEGMRKPAFLSGEQKKAIVDLLFKTNRKVTVKQLKEDYFKKIECFDSVEISGVEDRFNASLGTYHDLLKIIKDKDFLDNEENEDILEDIVLTLTLFEDREMIEERLKTYAHLFDDKVMKQLKRRRYTGWGRLSRKLINGIRDKQSGKTILDFLKSDGFANRNFMQLIHDDSLTFKEDIQKAQVSGQGDSLHEHIANLAGSPAIKKGILQTVKVVDELVKVMGRHKPENIVIEMARENQTTQKGQKNSRERMKRIEEGIKELGSQILKEHPVENTQLQNEKLYLYYLQNGRDMYVDQELDINRLSDYDVDHIVPQSFLKDDSIDNKVLTRSDKARGKSDNVPSEEVVKKMKNYWRQLLNAKLITQRKFDNLTKAERGGLSELDKAGFIKRQLVETRQITKHVAQILDSRMNTKYDENDKLIREVKVITLKSKLVSDFRKDFQFYKVREINNYHHAHDAYLNAVVGTALIKKYPKLESEFVYGDYKVYDVRKMIAKSEQEIGKATAKYFFYSNIMNFFKTEITLANGEIRKRPLIETNGETGEIVWDKGRDFATVRKVLSMPQVNIVKKTEVQTGGFSKESILPKRNSDKLIARKKDWDPKKYGGFDSPTVAYSVLVVAKVEKGKSKKLKSVKELLGITIMERSSFEKNPIDFLEAKGYKEVKKDLIIKLPKYSLFELENGRKRMLASAGELQKGNELALPSKYVNFLYLASHYEKLKGSPEDNEQKQLFVEQHKHYLDEIIEQISEFSKRVILADANLDKVLSAYNKHRDKPIREQAENIIHLFTLTNLGAPAAFKYFDTTIDRKRYTSTKEVLDATLIHQSITGLYETRIDLSQLGGDGGGSSGGGGGSGGMNPLQLLQPLPAEVKGTKLLAHWNSGATITCIPESFLEDEQPIKQTLIKTIHGEKQQNVYYLTFKVKGRKVEAEVIASPYEYILLSPTDVPWLTQQPLQLTILVPLQEYQDRILNKTALPEEQKQQLKALFTKYDNLWQHWENQVGHRKIRPHNIATGDYPPRPQKQYPINPKAKPSIQIVIDDLLKQGVLTPQNSTMNTPVYPVPKPDGRWRMVLDYREVNKTIPLTAAQNQHSAGILATIVRQKYKTTLDLANGFWAHPITPDSYWLTAFTWQGKQYCWTRLPQGFLNSPALFNADAVDLLKEVPNVQVYVDDIYLSHDNPHEHIQQLEKVFQILLQAGYVVSLKKSEIGQRTVEFLGFNITKEGRGLTDTFKTKLLNVTPPKDLKQLQSILGLLNFARNFIPNFAELVQTLYNLIASSPGKYIEWTEDNTKQLNKVIEALNTASNLEERLPDQRLVIKVNTSPSAGYVRYYNESGKKPIMYLNYVFSKAELKFSMLEKLLTTMHKALIKAMDLAMGQEILVYSPIVSMTKIQKTPLPERKALPIRWITWMTYLEDPRIQFHYDKTLPELKHIPDVYTSSIPPLKHPSQYEGVFCTDGSAIKSPDPTKSNNAGMGIVHAIYNPEYKILNQWSIPLGHHTAQMAEIAAVEFACKKALKVPGPVLVITDSFYVAESANKELPYWKSNGFVNNKKEPLKHISKWKSIAECLSIKPDITIQHEKGHQPINTSIHTEGNALADKLATQGSYVVNAGKRTADGSEFEKRTADGSEFESPKKKAKVE

SEQ ID NO: 712 - protein, 2176 aa, synthetic construct
MPAAKRVKLDGGDKKYSIGLDIGTNSVGWAVITDEYKVPSKKFKVLGNTDRHSIKKNLIGALLFDSGETAEATRLKRTARRRYTRRKNRICYLQEIFSNEMAKVDDSFFHRLEESFLVEEDKKHERHPIFGNIVDEVAYHEKYPTIYHLRKKLVDSTDKADLRLIYLALAHMIKFRGHFLIEGDLNPDNSDVDKLFIQLVQTYNQLFEENPINASGVDAKAILSARLSKSRRLENLIAQLPGEKKNGLFGNLIALSLGLTPNFKSNFDLAEDAKLQLSKDTYDDDLDNLLAQIGDQYADLFLAAKNLSDAILLSDILRVNTEITKAPLSASMIKRYDEHHQDLTLLKALVRQQLPEKYKEIFFDQSKNGYAGYIDGGASQEEFYKFIKPILEKMDGTEELLVKLNREDLLRKQRTFDNGSIPHQIHLGELHAILRRQEDFYPFLKDNREKIEKILTFRIPYYVGPLARGNSRFAWMTRKSEETITPWNFEEVVDKGASAQSFIERMTNFDKNLPNEKVLPKHSLLYEYFTVYNELTKVKYVTEGMRKPAFLSGEQKKAIVDLLFKTNRKVTVKQLKEDYFKKIECFDSVEISGVEDRFNASLGTYHDLLKIIKDKDFLDNEENEDILEDIVLTLTLFEDREMIEERLKTYAHLFDDKVMKQLKRRRYTGWGRLSRKLINGIRDKQSGKTILDFLKSDGFANRNFMQLIHDDSLTFKEDIQKAQVSGQGDSLHEHIANLAGSPAIKKGILQTVKVVDELVKVMGRHKPENIVIEMARENQTTQKGQKNSRERMKRIEEGIKELGSQILKEHPVENTQLQNEKLYLYYLQNGRDMYVDQELDINRLSDYDVDHIVPQSFLKDDSIDNKVLTRSDKARGKSDNVPSEEVVKKMKNYWRQLLNAKLITQRKFDNLTKAERGGLSELDKAGFIKRQLVETRQITKHVAQILDSRMNTKYDENDKLIREVKVITLKSKLVSDFRKDFQFYKVREINNYHHAHDAYLNAVVGTALIKKYPKLESEFVYGDYKVYDVRKMIAKSEQEIGKATAKYFFYSNIMNFFKTEITLANGEIRKRPLIETNGETGEIVWDKGRDFATVRKVLSMPQVNIVKKTEVQTGGFSKESILPKRNSDKLIARKKDWDPKKYGGFDSPTVAYSVLVVAKVEKGKSKKLKSVKELLGITIMERSSFEKNPIDFLEAKGYKEVKKDLIIKLPKYSLFELENGRKRMLASAGELQKGNELALPSKYVNFLYLASHYEKLKGSPEDNEQKQLFVEQHKHYLDEIIEQISEFSKRVILADANLDKVLSAYNKHRDKPIREQAENIIHLFTLTNLGAPAAFKYFDTTIDRKRYTSTKEVLDATLIHQSITGLYETRIDLSQLGGDGGGSSGGSEAAAKGGMNPLQLLQPLPAEVKGTKLLAHWNSGATITCIPESFLEDEQPIKQTLIKTIHGEKQQNVYYLTFKVKGRKVEAEVIASPYEYILLSPTDVPWLTQQPLQLTILVPLQEYQDRILNKTALPEEQKQQLKALFTKYDNLWQHWENQVGHRKIRPHNIATGDYPPRPQKQYPINPKAKPSIQIVIDDLLKQGVLTPQNSTMNTPVYPVPKPDGRWRMVLDYREVNKTIPLTAAQNQHSAGILATIVRQKYKTTLDLANGFWAHPITPDSYWLTAFTWQGKQYCWTRLPQGFLNSPALFNADAVDLLKEVPNVQVYVDDIYLSHDNPHEHIQQLEKVFQILLQAGYVVSLKKSEIGQRTVEFLGFNITKEGRGLTDTFKTKLLNVTPPKDLKQLQSILGLLNFARNFIPNFAELVQTLYNLIASSPGKYIEWTEDNTKQLNKVIEALNTASNLEERLPDQRLVIKVNTSPSAGYVRYYNESGKKPIMYLNYVFSKAELKFSMLEKLLTTMHKALIKAMDLAMGQEILVYSPIVSMTKIQKTPLPERKALPIRWITWMTYLEDPRIQFHYDKTLPELKHIPDVYTSSIPPLKHPSQYEGVFCTDGSAIKSPDPTKSNNAGMGIVHAIYNPEYKILNQWSIPLGHHTAQMAEIAAVEFACKKALKVPGPVLVITDSFYVAESANKELPYWKSNGFVNNKKEPLKHISKWKSIAECLSIKPDITIQHEKGHQPINTSIHTEGNALADKLATQGSYVVNAGKRTADGSEFEKRTADGSEFESPKKKAKVE

SEQ ID NO: 713 - protein, 2181 aa, synthetic construct
MPAAKRVKLDGGDKKYSIGLDIGTNSVGWAVITDEYKVPSKKFKVLGNTDRHSIKKNLIGALLFDSGETAEATRLKRTARRRYTRRKNRICYLQEIFSNEMAKVDDSFFHRLEESFLVEEDKKHERHPIFGNIVDEVAYHEKYPTIYHLRKKLVDSTDKADLRLIYLALAHMIKFRGHFLIEGDLNPDNSDVDKLFIQLVQTYNQLFEENPINASGVDAKAILSARLSKSRRLENLIAQLPGEKKNGLFGNLIALSLGLTPNFKSNFDLAEDAKLQLSKDTYDDDLDNLLAQIGDQYADLFLAAKNLSDAILLSDILRVNTEITKAPLSASMIKRYDEHHQDLTLLKALVRQQLPEKYKEIFFDQSKNGYAGYIDGGASQEEFYKFIKPILEKMDGTEELLVKLNREDLLRKQRTFDNGSIPHQIHLGELHAILRRQEDFYPFLKDNREKIEKILTFRIPYYVGPLARGNSRFAWMTRKSEETITPWNFEEVVDKGASAQSFIERMTNFDKNLPNEKVLPKHSLLYEYFTVYNELTKVKYVTEGMRKPAFLSGEQKKAIVDLLFKTNRKVTVKQLKEDYFKKIECFDSVEISGVEDRFNASLGTYHDLLKIIKDKDFLDNEENEDILEDIVLTLTLFEDREMIEERLKTYAHLFDDKVMKQLKRRRYTGWGRLSRKLINGIRDKQSGKTILDFLKSDGFANRNFMQLIHDDSLTFKEDIQKAQVSGQGDSLHEHIANLAGSPAIKKGILQTVKVVDELVKVMGRHKPENIVIEMARENQTTQKGQKNSRERMKRIEEGIKELGSQILKEHPVENTQLQNEKLYLYYLQNGRDMYVDQELDINRLSDYDVDHIVPQSFLKDDSIDNKVLTRSDKARGKSDNVPSEEVVKKMKNYWRQLLNAKLITQRKFDNLTKAERGGLSELDKAGFIKRQLVETRQITKHVAQILDSRMNTKYDENDKLIREVKVITLKSKLVSDFRKDFQFYKVREINNYHHAHDAYLNAVVGTALIKKYPKLESEFVYGDYKVYDVRKMIAKSEQEIGKATAKYFFYSNIMNFFKTEITLANGEIRKRPLIETNGETGEIVWDKGRDFATVRKVLSMPQVNIVKKTEVQTGGFSKESILPKRNSDKLIARKKDWDPKKYGGFDSPTVAYSVLVVAKVEKGKSKKLKSVKELLGITIMERSSFEKNPIDFLEAKGYKEVKKDLIIKLPKYSLFELENGRKRMLASAGELQKGNELALPSKYVNFLYLASHYEKLKGSPEDNEQKQLFVEQHKHYLDEIIEQISEFSKRVILADANLDKVLSAYNKHRDKPIREQAENIIHLFTLTNLGAPAAFKYFDTTIDRKRYTSTKEVLDATLIHQSITGLYETRIDLSQLGGDGGSGSETPGTSESATPESGGMNPLQLLQPLPAEVKGTKLLAHWNSGATITCIPESFLEDEQPIKQTLIKTIHGEKQQNVYYLTFKVKGRKVEAEVIASPYEYILLSPTDVPWLTQQPLQLTILVPLQEYQDRILNKTALPEEQKQQLKALFTKYDNLWQHWENQVGHRKIRPHNIATGDYPPRPQKQYPINPKAKPSIQIVIDDLLKQGVLTPQNSTMNTPVYPVPKPDGRWRMVLDYREVNKTIPLTAAQNQHSAGILATIVRQKYKTTLDLANGFWAHPITPDSYWLTAFTWQGKQYCWTRLPQGFLNSPALFNADAVDLLKEVPNVQVYVDDIYLSHDNPHEHIQQLEKVFQILLQAGYVVSLKKSEIGQRTVEFLGFNITKEGRGLTDTFKTKLLNVTPPKDLKQLQSILGLLNFARNFIPNFAELVQTLYNLIASSPGKYIEWTEDNTKQLNKVIEALNTASNLEERLPDQRLVIKVNTSPSAGYVRYYNESGKKPIMYLNYVFSKAELKFSMLEKLLTTMHKALIKAMDLAMGQEILVYSPIVSMTKIQKTPLPERKALPIRWITWMTYLEDPRIQFHYDKTLPELKHIPDVYTSSIPPLKHPSQYEGVFCTDGSAIKSPDPTKSNNAGMGIVHAIYNPEYKILNQWSIPLGHHTAQMAEIAAVEFACKKALKVPGPVLVITDSFYVAESANKELPYWKSNGFVNNKKEPLKHISKWKSIAECLSIKPDITIQHEKGHQPINTSIHTEGNALADKLATQGSYVVNAGKRTADGSEFEKRTADGSEFESPKKKAKVE

SEQ ID NO: 714 - protein, 2176 aa, synthetic construct
MPAAKRVKLDGGDKKYSIGLDIGTNSVGWAVITDEYKVPSKKFKVLGNTDRHSIKKNLIGALLFDSGETAEATRLKRTARRRYTRRKNRICYLQEIFSNEMAKVDDSFFHRLEESFLVEEDKKHERHPIFGNIVDEVAYHEKYPTIYHLRKKLVDSTDKADLRLIYLALAHMIKFRGHFLIEGDLNPDNSDVDKLFIQLVQTYNQLFEENPINASGVDAKAILSARLSKSRRLENLIAQLPGEKKNGLFGNLIALSLGLTPNFKSNFDLAEDAKLQLSKDTYDDDLDNLLAQIGDQYADLFLAAKNLSDAILLSDILRVNTEITKAPLSASMIKRYDEHHQDLTLLKALVRQQLPEKYKEIFFDQSKNGYAGYIDGGASQEEFYKFIKPILEKMDGTEELLVKLNREDLLRKQRTFDNGSIPHQIHLGELHAILRRQEDFYPFLKDNREKIEKILTFRIPYYVGPLARGNSRFAWMTRKSEETITPWNFEEVVDKGASAQSFIERMTNFDKNLPNEKVLPKHSLLYEYFTVYNELTKVKYVTEGMRKPAFLSGEQKKAIVDLLFKTNRKVTVKQLKEDYFKKIECFDSVEISGVEDRFNASLGTYHDLLKIIKDKDFLDNEENEDILEDIVLTLTLFEDREMIEERLKTYAHLFDDKVMKQLKRRRYTGWGRLSRKLINGIRDKQSGKTILDFLKSDGFANRNFMQLIHDDSLTFKEDIQKAQVSGQGDSLHEHIANLAGSPAIKKGILQTVKVVDELVKVMGRHKPENIVIEMARENQTTQKGQKNSRERMKRIEEGIKELGSQILKEHPVENTQLQNEKLYLYYLQNGRDMYVDQELDINRLSDYDVDHIVPQSFLKDDSIDNKVLTRSDKARGKSDNVPSEEVVKKMKNYWRQLLNAKLITQRKFDNLTKAERGGLSELDKAGFIKRQLVETRQITKHVAQILDSRMNTKYDENDKLIREVKVITLKSKLVSDFRKDFQFYKVREINNYHHAHDAYLNAVVGTALIKKYPKLESEFVYGDYKVYDVRKMIAKSEQEIGKATAKYFFYSNIMNFFKTEITLANGEIRKRPLIETNGETGEIVWDKGRDFATVRKVLSMPQVNIVKKTEVQTGGFSKESILPKRNSDKLIARKKDWDPKKYGGFDSPTVAYSVLVVAKVEKGKSKKLKSVKELLGITIMERSSFEKNPIDFLEAKGYKEVKKDLIIKLPKYSLFELENGRKRMLASAGELQKGNELALPSKYVNFLYLASHYEKLKGSPEDNEQKQLFVEQHKHYLDEIIEQISEFSKRVILADANLDKVLSAYNKHRDKPIREQAENIIHLFTLTNLGAPAAFKYFDTTIDRKRYTSTKEVLDATLIHQSITGLYETRIDLSQLGGDGGGGSEAAAKPAPGGMNPLQLLQPLPAEVKGTKLLAHWNSGATITCIPESFLEDEQPIKQTLIKTIHGEKQQNVYYLTFKVKGRKVEAEVIASPYEYILLSPTDVPWLTQQPLQLTILVPLQEYQDRILNKTALPEEQKQQLKALFTKYDNLWQHWENQVGHRKIRPHNIATGDYPPRPQKQYPINPKAKPSIQIVIDDLLKQGVLTPQNSTMNTPVYPVPKPDGRWRMVLDYREVNKTIPLTAAQNQHSAGILATIVRQKYKTTLDLANGFWAHPITPDSYWLTAFTWQGKQYCWTRLPQGFLNSPALFNADAVDLLKEVPNVQVYVDDIYLSHDNPHEHIQQLEKVFQILLQAGYVVSLKKSEIGQRTVEFLGFNITKEGRGLTDTFKTKLLNVTPPKDLKQLQSILGLLNFARNFIPNFAELVQTLYNLIASSPGKYIEWTEDNTKQLNKVIEALNTASNLEERLPDQRLVIKVNTSPSAGYVRYYNESGKKPIMYLNYVFSKAELKFSMLEKLLTTMHKALIKAMDLAMGQEILVYSPIVSMTKIQKTPLPERKALPIRWITWMTYLEDPRIQFHYDKTLPELKHIPDVYTSSIPPLKHPSQYEGVFCTDGSAIKSPDPTKSNNAGMGIVHAIYNPEYKILNQWSIPLGHHTAQMAEIAAVEFACKKALKVPGPVLVITDSFYVAESANKELPYWKSNGFVNNKKEPLKHISKWKSIAECLSIKPDITIQHEKGHQPINTSIHTEGNALADKLATQGSYVVNAGKRTADGSEFEKRTADGSEFESPKKKAKVE

SEQ ID NO: 715 - protein, 2208 aa, synthetic construct
MPAAKRVKLDGGDKKYSIGLDIGTNSVGWAVITDEYKVPSKKFKVLGNTDRHSIKKNLIGALLFDSGETAEATRLKRTARRRYTRRKNRICYLQEIFSNEMAKVDDSFFHRLEESFLVEEDKKHERHPIFGNIVDEVAYHEKYPTIYHLRKKLVDSTDKADLRLIYLALAHMIKFRGHFLIEGDLNPDNSDVDKLFIQLVQTYNQLFEENPINASGVDAKAILSARLSKSRRLENLIAQLPGEKKNGLFGNLIALSLGLTPNFKSNFDLAEDAKLQLSKDTYDDDLDNLLAQIGDQYADLFLAAKNLSDAILLSDILRVNTEITKAPLSASMIKRYDEHHQDLTLLKALVRQQLPEKYKEIFFDQSKNGYAGYIDGGASQEEFYKFIKPILEKMDGTEELLVKLNREDLLRKQRTFDNGSIPHQIHLGELHAILRRQEDFYPFLKDNREKIEKILTFRIPYYVGPLARGNSRFAWMTRKSEETITPWNFEEVVDKGASAQSFIERMTNFDKNLPNEKVLPKHSLLYEYFTVYNELTKVKYVTEGMRKPAFLSGEQKKAIVDLLFKTNRKVTVKQLKEDYFKKIECFDSVEISGVEDRFNASLGTYHDLLKIIKDKDFLDNEENEDILEDIVLTLTLFEDREMIEERLKTYAHLFDDKVMKQLKRRRYTGWGRLSRKLINGIRDKQSGKTILDFLKSDGFANRNFMQLIHDDSLTFKEDIQKAQVSGQGDSLHEHIANLAGSPAIKKGILQTVKVVDELVKVMGRHKPENIVIEMARENQTTQKGQKNSRERMKRIEEGIKELGSQILKEHPVENTQLQNEKLYLYYLQNGRDMYVDQELDINRLSDYDVDHIVPQSFLKDDSIDNKVLTRSDKARGKSDNVPSEEVVKKMKNYWRQLLNAKLITQRKFDNLTKAERGGLSELDKAGFIKRQLVETRQITKHVAQILDSRMNTKYDENDKLIREVKVITLKSKLVSDFRKDFQFYKVREINNYHHAHDAYLNAVVGTALIKKYPKLESEFVYGDYKVYDVRKMIAKSEQEIGKATAKYFFYSNIMNFFKTEITLANGEIRKRPLIETNGETGEIVWDKGRDFATVRKVLSMPQVNIVKKTEVQTGGFSKESILPKRNSDKLIARKKDWDPKKYGGFDSPTVAYSVLVVAKVEKGKSKKLKSVKELLGITIMERSSFEKNPIDFLEAKGYKEVKKDLIIKLPKYSLFELENGRKRMLASAGELQKGNELALPSKYVNFLYLASHYEKLKGSPEDNEQKQLFVEQHKHYLDEIIEQISEFSKRVILADANLDKVLSAYNKHRDKPIREQAENIIHLFTLTNLGAPAAFKYFDTTIDRKRYTSTKEVLDATLIHQSITGLYETRIDLSQLGGDGGAEAAAKEAAAKEAAAKEAAAKALEAEAAAKEAAAKEAAAKEAAAKAGGMDLLKPLTVERKGVKIKGYWNSQADITCVPKDLLQGEEPVRQQNVTTIHGTQEGDVYYVNLKIDGRRINTEVIGTTLDYAIITPGDVPWILKKPLELTIKLDLEEQQGTLLNNSILSKKGKEELKQLFEKYSALWQSWENQVGHRRIRPHKIATGTVKPTPQKQYHINPKAKPDIQIVINDLLKQGVLIQKESTMNTPVYPVPKPNGRWRMVLDYRAVNKVTPLIAVQNQHSYGILGSLFKGRYKTTIDLSNGFWAHPIVPEDYWITAFTWQGKQYCWTVLPQGFLNSPGLFTGDVVDLLQGIPNVEVYVDDVYISHDSEKEHLEYLDILFNRLKEAGYIISLKKSNIANSIVDFLGFQITNEGRGLTDTFKEKLENITAPTTLKQLQSILGLLNFARNFIPDFTELIAPLYALIPKSTKNYVPWQIEHSTTLETLITKLNGAEYLQGRKGDKTLIMKVNASYTTGYIRYYNEGEKKPISYVSIVFSKTELKFTELEKLLTTVHKGLLKALDLSMGQNIHVYSPIVSMQNIQKTPQTAKKALASRWLSWLSYLEDPRIRFFYDPQMPALKDLPAVDTGKDNKKHPSNFQHIFYTDGSAITSPTKEGHLNAGMGIVYFINKDGNLQKQQEWSISLGNHTAQFAEIAAFEFALKKCLPLGGNILVVTDSNYVAKAYNEELDVWASNGFVNNRKKPLKHISKWKSVADLKRLRPDVVVTHEPGHQKLDSSPHAYGNNLADQLATQASFKVHAGKRTADGSEFEKRTADGSEFESPKKKAKVE

SEQ ID NO: 716 - protein, 2192 aa, synthetic construct
MPAAKRVKLDGGDKKYSIGLDIGTNSVGWAVITDEYKVPSKKFKVLGNTDRHSIKKNLIGALLFDSGETAEATRLKRTARRRYTRRKNRICYLQEIFSNEMAKVDDSFFHRLEESFLVEEDKKHERHPIFGNIVDEVAYHEKYPTIYHLRKKLVDSTDKADLRLIYLALAHMIKFRGHFLIEGDLNPDNSDVDKLFIQLVQTYNQLFEENPINASGVDAKAILSARLSKSRRLENLIAQLPGEKKNGLFGNLIALSLGLTPNFKSNFDLAEDAKLQLSKDTYDDDLDNLLAQIGDQYADLFLAAKNLSDAILLSDILRVNTEITKAPLSASMIKRYDEHHQDLTLLKALVRQQLPEKYKEIFFDQSKNGYAGYIDGGASQEEFYKFIKPILEKMDGTEELLVKLNREDLLRKQRTFDNGSIPHQIHLGELHAILRRQEDFYPFLKDNREKIEKILTFRIPYYVGPLARGNSRFAWMTRKSEETITPWNFEEVVDKGASAQSFIERMTNFDKNLPNEKVLPKHSLLYEYFTVYNELTKVKYVTEGMRKPAFLSGEQKKAIVDLLFKTNRKVTVKQLKEDYFKKIECFDSVEISGVEDRFNASLGTYHDLLKIIKDKDFLDNEENEDILEDIVLTLTLFEDREMIEERLKTYAHLFDDKVMKQLKRRRYTGWGRLSRKLINGIRDKQSGKTILDFLKSDGFANRNFMQLIHDDSLTFKEDIQKAQVSGQGDSLHEHIANLAGSPAIKKGILQTVKVVDELVKVMGRHKPENIVIEMARENQTTQKGQKNSRERMKRIEEGIKELGSQILKEHPVENTQLQNEKLYLYYLQNGRDMYVDQELDINRLSDYDVDHIVPQSFLKDDSIDNKVLTRSDKARGKSDNVPSEEVVKKMKNYWRQLLNAKLITQRKFDNLTKAERGGLSELDKAGFIKRQLVETRQITKHVAQILDSRMNTKYDENDKLIREVKVITLKSKLVSDFRKDFQFYKVREINNYHHAHDAYLNAVVGTALIKKYPKLESEFVYGDYKVYDVRKMIAKSEQEIGKATAKYFFYSNIMNFFKTEITLANGEIRKRPLIETNGETGEIVWDKGRDFATVRKVLSMPQVNIVKKTEVQTGGFSKESILPKRNSDKLIARKKDWDPKKYGGFDSPTVAYSVLVVAKVEKGKSKKLKSVKELLGITIMERSSFEKNPIDFLEAKGYKEVKKDLIIKLPKYSLFELENGRKRMLASAGELQKGNELALPSKYVNFLYLASHYEKLKGSPEDNEQKQLFVEQHKHYLDEIIEQISEFSKRVILADANLDKVLSAYNKHRDKPIREQAENIIHLFTLTNLGAPAAFKYFDTTIDRKRYTSTKEVLDATLIHQSITGLYETRIDLSQLGGDGGGGGGSGGGGSGGGGSGGGGSGGGGSGGGGSGGMDLLKPLTVERKGVKIKGYWNSQADITCVPKDLLQGEEPVRQQNVTTIHGTQEGDVYYVNLKIDGRRINTEVIGTTLDYAIITPGDVPWILKKPLELTIKLDLEEQQGTLLNNSILSKKGKEELKQLFEKYSALWQSWENQVGHRRIRPHKIATGTVKPTPQKQYHINPKAKPDIQIVINDLLKQGVLIQKESTMNTPVYPVPKPNGRWRMVLDYRAVNKVTPLIAVQNQHSYGILGSLFKGRYKTTIDLSNGFWAHPIVPEDYWITAFTWQGKQYCWTVLPQGFLNSPGLFTGDVVDLLQGIPNVEVYVDDVYISHDSEKEHLEYLDILFNRLKEAGYIISLKKSNIANSIVDFLGFQITNEGRGLTDTFKEKLENITAPTTLKQLQSILGLLNFARNFIPDFTELIAPLYALIPKSTKNYVPWQIEHSTTLETLITKLNGAEYLQGRKGDKTLIMKVNASYTTGYIRYYNEGEKKPISYVSIVFSKTELKFTELEKLLTTVHKGLLKALDLSMGQNIHVYSPIVSMQNIQKTPQTAKKALASRWLSWLSYLEDPRIRFFYDPQMPALKDLPAVDTGKDNKKHPSNFQHIFYTDGSAITSPTKEGHLNAGMGIVYFINKDGNLQKQQEWSISLGNHTAQFAEIAAFEFALKKCLPLGGNILVVTDSNYVAKAYNEELDVWASNGFVNNRKKPLKHISKWKSVADLKRLRPDVVVTHEPGHQKLDSSPHAYGNNLADQLATQASFKVHAGKRTADGSEFEKRTADGSEFESPKKKAKVE

SEQ ID NO: 717 - protein, 2171 aa, synthetic construct
MPAAKRVKLDGGDKKYSIGLDIGTNSVGWAVITDEYKVPSKKFKVLGNTDRHSIKKNLIGALLFDSGETAEATRLKRTARRRYTRRKNRICYLQEIFSNEMAKVDDSFFHRLEESFLVEEDKKHERHPIFGNIVDEVAYHEKYPTIYHLRKKLVDSTDKADLRLIYLALAHMIKFRGHFLIEGDLNPDNSDVDKLFIQLVQTYNQLFEENPINASGVDAKAILSARLSKSRRLENLIAQLPGEKKNGLFGNLIALSLGLTPNFKSNFDLAEDAKLQLSKDTYDDDLDNLLAQIGDQYADLFLAAKNLSDAILLSDILRVNTEITKAPLSASMIKRYDEHHQDLTLLKALVRQQLPEKYKEIFFDQSKNGYAGYIDGGASQEEFYKFIKPILEKMDGTEELLVKLNREDLLRKQRTFDNGSIPHQIHLGELHAILRRQEDFYPFLKDNREKIEKILTFRIPYYVGPLARGNSRFAWMTRKSEETITPWNFEEVVDKGASAQSFIERMTNFDKNLPNEKVLPKHSLLYEYFTVYNELTKVKYVTEGMRKPAFLSGEQKKAIVDLLFKTNRKVTVKQLKEDYFKKIECFDSVEISGVEDRFNASLGTYHDLLKIIKDKDFLDNEENEDILEDIVLTLTLFEDREMIEERLKTYAHLFDDKVMKQLKRRRYTGWGRLSRKLINGIRDKQSGKTILDFLKSDGFANRNFMQLIHDDSLTFKEDIQKAQVSGQGDSLHEHIANLAGSPAIKKGILQTVKVVDELVKVMGRHKPENIVIEMARENQTTQKGQKNSRERMKRIEEGIKELGSQILKEHPVENTQLQNEKLYLYYLQNGRDMYVDQELDINRLSDYDVDHIVPQSFLKDDSIDNKVLTRSDKARGKSDNVPSEEVVKKMKNYWRQLLNAKLITQRKFDNLTKAERGGLSELDKAGFIKRQLVETRQITKHVAQILDSRMNTKYDENDKLIREVKVITLKSKLVSDFRKDFQFYKVREINNYHHAHDAYLNAVVGTALIKKYPKLESEFVYGDYKVYDVRKMIAKSEQEIGKATAKYFFYSNIMNFFKTEITLANGEIRKRPLIETNGETGEIVWDKGRDFATVRKVLSMPQVNIVKKTEVQTGGFSKESILPKRNSDKLIARKKDWDPKKYGGFDSPTVAYSVLVVAKVEKGKSKKLKSVKELLGITIMERSSFEKNPIDFLEAKGYKEVKKDLIIKLPKYSLFELENGRKRMLASAGELQKGNELALPSKYVNFLYLASHYEKLKGSPEDNEQKQLFVEQHKHYLDEIIEQISEFSKRVILADANLDKVLSAYNKHRDKPIREQAENIIHLFTLTNLGAPAAFKYFDTTIDRKRYTSTKEVLDATLIHQSITGLYETRIDLSQLGGDGGGSSGGSPAPGGMDLLKPLTVERKGVKIKGYWNSQADITCVPKDLLQGEEPVRQQNVTTIHGTQEGDVYYVNLKIDGRRINTEVIGTTLDYAIITPGDVPWILKKPLELTIKLDLEEQQGTLLNNSILSKKGKEELKQLFEKYSALWQSWENQVGHRRIRPHKIATGTVKPTPQKQYHINPKAKPDIQIVINDLLKQGVLIQKESTMNTPVYPVPKPNGRWRMVLDYRAVNKVTPLIAVQNQHSYGILGSLFKGRYKTTIDLSNGFWAHPIVPEDYWITAFTWQGKQYCWTVLPQGFLNSPGLFTGDVVDLLQGIPNVEVYVDDVYISHDSEKEHLEYLDILFNRLKEAGYIISLKKSNIANSIVDFLGFQITNEGRGLTDTFKEKLENITAPTTLKQLQSILGLLNFARNFIPDFTELIAPLYALIPKSTKNYVPWQIEHSTTLETLITKLNGAEYLQGRKGDKTLIMKVNASYTTGYIRYYNEGEKKPISYVSIVFSKTELKFTELEKLLTTVHKGLLKALDLSMGQNIHVYSPIVSMQNIQKTPQTAKKALASRWLSWLSYLEDPRIRFFYDPQMPALKDLPAVDTGKDNKKHPSNFQHIFYTDGSAITSPTKEGHLNAGMGIVYFINKDGNLQKQQEWSISLGNHTAQFAEIAAFEFALKKCLPLGGNILVVTDSNYVAKAYNEELDVWASNGFVNNRKKPLKHISKWKSVADLKRLRPDVVVTHEPGHQKLDSSPHAYGNNLADQLATQASFKVHAGKRTADGSEFEKRTADGSEFESPKKKAKVE

SEQ ID NO: 718 - protein, 2177 aa, synthetic construct
MPAAKRVKLDGGDKKYSIGLDIGTNSVGWAVITDEYKVPSKKFKVLGNTDRHSIKKNLIGALLFDSGETAEATRLKRTARRRYTRRKNRICYLQEIFSNEMAKVDDSFFHRLEESFLVEEDKKHERHPIFGNIVDEVAYHEKYPTIYHLRKKLVDSTDKADLRLIYLALAHMIKFRGHFLIEGDLNPDNSDVDKLFIQLVQTYNQLFEENPINASGVDAKAILSARLSKSRRLENLIAQLPGEKKNGLFGNLIALSLGLTPNFKSNFDLAEDAKLQLSKDTYDDDLDNLLAQIGDQYADLFLAAKNLSDAILLSDILRVNTEITKAPLSASMIKRYDEHHQDLTLLKALVRQQLPEKYKEIFFDQSKNGYAGYIDGGASQEEFYKFIKPILEKMDGTEELLVKLNREDLLRKQRTFDNGSIPHQIHLGELHAILRRQEDFYPFLKDNREKIEKILTFRIPYYVGPLARGNSRFAWMTRKSEETITPWNFEEVVDKGASAQSFIERMTNFDKNLPNEKVLPKHSLLYEYFTVYNELTKVKYVTEGMRKPAFLSGEQKKAIVDLLFKTNRKVTVKQLKEDYFKKIECFDSVEISGVEDRFNASLGTYHDLLKIIKDKDFLDNEENEDILEDIVLTLTLFEDREMIEERLKTYAHLFDDKVMKQLKRRRYTGWGRLSRKLINGIRDKQSGKTILDFLKSDGFANRNFMQLIHDDSLTFKEDIQKAQVSGQGDSLHEHIANLAGSPAIKKGILQTVKVVDELVKVMGRHKPENIVIEMARENQTTQKGQKNSRERMKRIEEGIKELGSQILKEHPVENTQLQNEKLYLYYLQNGRDMYVDQELDINRLSDYDVDHIVPQSFLKDDSIDNKVLTRSDKARGKSDNVPSEEVVKKMKNYWRQLLNAKLITQRKFDNLTKAERGGLSELDKAGFIKRQLVETRQITKHVAQILDSRMNTKYDENDKLIREVKVITLKSKLVSDFRKDFQFYKVREINNYHHAHDAYLNAVVGTALIKKYPKLESEFVYGDYKVYDVRKMIAKSEQEIGKATAKYFFYSNIMNFFKTEITLANGEIRKRPLIETNGETGEIVWDKGRDFATVRKVLSMPQVNIVKKTEVQTGGFSKESILPKRNSDKLIARKKDWDPKKYGGFDSPTVAYSVLVVAKVEKGKSKKLKSVKELLGITIMERSSFEKNPIDFLEAKGYKEVKKDLIIKLPKYSLFELENGRKRMLASAGELQKGNELALPSKYVNFLYLASHYEKLKGSPEDNEQKQLFVEQHKHYLDEIIEQISEFSKRVILADANLDKVLSAYNKHRDKPIREQAENIIHLFTLTNLGAPAAFKYFDTTIDRKRYTSTKEVLDATLIHQSITGLYETRIDLSQLGGDGGEAAAKEAAAKEAAAKGGMDLLKPLTVERKGVKIKGYWNSQADITCVPKDLLQGEEPVRQQNVTTIHGTQEGDVYYVNLKIDGRRINTEVIGTTLDYAIITPGDVPWILKKPLELTIKLDLEEQQGTLLNNSILSKKGKEELKQLFEKYSALWQSWENQVGHRRIRPHKIATGTVKPTPQKQYHINPKAKPDIQIVINDLLKQGVLIQKESTMNTPVYPVPKPNGRWRMVLDYRAVNKVTPLIAVQNQHSYGILGSLFKGRYKTTIDLSNGFWAHPIVPEDYWITAFTWQGKQYCWTVLPQGFLNSPGLFTGDVVDLLQGIPNVEVYVDDVYISHDSEKEHLEYLDILFNRLKEAGYIISLKKSNIANSIVDFLGFQITNEGRGLTDTFKEKLENITAPTTLKQLQSILGLLNFARNFIPDFTELIAPLYALIPKSTKNYVPWQIEHSTTLETLITKLNGAEYLQGRKGDKTLIMKVNASYTTGYIRYYNEGEKKPISYVSIVFSKTELKFTELEKLLTTVHKGLLKALDLSMGQNIHVYSPIVSMQNIQKTPQTAKKALASRWLSWLSYLEDPRIRFFYDPQMPALKDLPAVDTGKDNKKHPSNFQHIFYTDGSAITSPTKEGHLNAGMGIVYFINKDGNLQKQQEWSISLGNHTAQFAEIAAFEFALKKCLPLGGNILVVTDSNYVAKAYNEELDVWASNGFVNNRKKPLKHISKWKSVADLKRLRPDVVVTHEPGHQKLDSSPHAYGNNLADQLATQASFKVHAGKRTADGSEFEKRTADGSEFESPKKKAKVE

SEQ ID NO: 719 - protein, 2177 aa, synthetic construct
MPAAKRVKLDGGDKKYSIGLDIGTNSVGWAVITDEYKVPSKKFKVLGNTDRHSIKKNLIGALLFDSGETAEATRLKRTARRRYTRRKNRICYLQEIFSNEMAKVDDSFFHRLEESFLVEEDKKHERHPIFGNIVDEVAYHEKYPTIYHLRKKLVDSTDKADLRLIYLALAHMIKFRGHFLIEGDLNPDNSDVDKLFIQLVQTYNQLFEENPINASGVDAKAILSARLSKSRRLENLIAQLPGEKKNGLFGNLIALSLGLTPNFKSNFDLAEDAKLQLSKDTYDDDLDNLLAQIGDQYADLFLAAKNLSDAILLSDILRVNTEITKAPLSASMIKRYDEHHQDLTLLKALVRQQLPEKYKEIFFDQSKNGYAGYIDGGASQEEFYKFIKPILEKMDGTEELLVKLNREDLLRKQRTFDNGSIPHQIHLGELHAILRRQEDFYPFLKDNREKIEKILTFRIPYYVGPLARGNSRFAWMTRKSEETITPWNFEEVVDKGASAQSFIERMTNFDKNLPNEKVLPKHSLLYEYFTVYNELTKVKYVTEGMRKPAFLSGEQKKAIVDLLFKTNRKVTVKQLKEDYFKKIECFDSVEISGVEDRFNASLGTYHDLLKIIKDKDFLDNEENEDILEDIVLTLTLFEDREMIEERLKTYAHLFDDKVMKQLKRRRYTGWGRLSRKLINGIRDKQSGKTILDFLKSDGFANRNFMQLIHDDSLTFKEDIQKAQVSGQGDSLHEHIANLAGSPAIKKGILQTVKVVDELVKVMGRHKPENIVIEMARENQTTQKGQKNSRERMKRIEEGIKELGSQILKEHPVENTQLQNEKLYLYYLQNGRDMYVDQELDINRLSDYDVDHIVPQSFLKDDSIDNKVLTRSDKARGKSDNVPSEEVVKKMKNYWRQLLNAKLITQRKFDNLTKAERGGLSELDKAGFIKRQLVETRQITKHVAQILDSRMNTKYDENDKLIREVKVITLKSKLVSDFRKDFQFYKVREINNYHHAHDAYLNAVVGTALIKKYPKLESEFVYGDYKVYDVRKMIAKSEQEIGKATAKYFFYSNIMNFFKTEITLANGEIRKRPLIETNGETGEIVWDKGRDFATVRKVLSMPQVNIVKKTEVQTGGFSKESILPKRNSDKLIARKKDWDPKKYGGFDSPTVAYSVLVVAKVEKGKSKKLKSVKELLGITIMERSSFEKNPIDFLEAKGYKEVKKDLIIKLPKYSLFELENGRKRMLASAGELQKGNELALPSKYVNFLYLASHYEKLKGSPEDNEQKQLFVEQHKHYLDEIIEQISEFSKRVILADANLDKVLSAYNKHRDKPIREQAENIIHLFTLTNLGAPAAFKYFDTTIDRKRYTSTKEVLDATLIHQSITGLYETRIDLSQLGGDGGGSSGSSGSSGSSGSSGGMDLLKPLTVERKGVKIKGYWNSQADITCVPKDLLQGEEPVRQQNVTTIHGTQEGDVYYVNLKIDGRRINTEVIGTTLDYAIITPGDVPWILKKPLELTIKLDLEEQQGTLLNNSILSKKGKEELKQLFEKYSALWQSWENQVGHRRIRPHKIATGTVKPTPQKQYHINPKAKPDIQIVINDLLKQGVLIQKESTMNTPVYPVPKPNGRWRMVLDYRAVNKVTPLIAVQNQHSYGILGSLFKGRYKTTIDLSNGFWAHPIVPEDYWITAFTWQGKQYCWTVLPQGFLNSPGLFTGDVVDLLQGIPNVEVYVDDVYISHDSEKEHLEYLDILFNRLKEAGYIISLKKSNIANSIVDFLGFQITNEGRGLTDTFKEKLENITAPTTLKQLQSILGLLNFARNFIPDFTELIAPLYALIPKSTKNYVPWQIEHSTTLETLITKLNGAEYLQGRKGDKTLIMKVNASYTTGYIRYYNEGEKKPISYVSIVFSKTELKFTELEKLLTTVHKGLLKALDLSMGQNIHVYSPIVSMQNIQKTPQTAKKALASRWLSWLSYLEDPRIRFFYDPQMPALKDLPAVDTGKDNKKHPSNFQHIFYTDGSAITSPTKEGHLNAGMGIVYFINKDGNLQKQQEWSISLGNHTAQFAEIAAFEFALKKCLPLGGNILVVTDSNYVAKAYNEELDVWASNGFVNNRKKPLKHISKWKSVADLKRLRPDVVVTHEPGHQKLDSSPHAYGNNLADQLATQASFKVHAGKRTADGSEFEKRTADGSEFESPKKKAKVE

SEQ ID NO: 720 - protein, 2171 aa, synthetic construct
MPAAKRVKLDGGDKKYSIGLDIGTNSVGWAVITDEYKVPSKKFKVLGNTDRHSIKKNLIGALLFDSGETAEATRLKRTARRRYTRRKNRICYLQEIFSNEMAKVDDSFFHRLEESFLVEEDKKHERHPIFGNIVDEVAYHEKYPTIYHLRKKLVDSTDKADLRLIYLALAHMIKFRGHFLIEGDLNPDNSDVDKLFIQLVQTYNQLFEENPINASGVDAKAILSARLSKSRRLENLIAQLPGEKKNGLFGNLIALSLGLTPNFKSNFDLAEDAKLQLSKDTYDDDLDNLLAQIGDQYADLFLAAKNLSDAILLSDILRVNTEITKAPLSASMIKRYDEHHQDLTLLKALVRQQLPEKYKEIFFDQSKNGYAGYIDGGASQEEFYKFIKPILEKMDGTEELLVKLNREDLLRKQRTFDNGSIPHQIHLGELHAILRRQEDFYPFLKDNREKIEKILTFRIPYYVGPLARGNSRFAWMTRKSEETITPWNFEEVVDKGASAQSFIERMTNFDKNLPNEKVLPKHSLLYEYFTVYNELTKVKYVTEGMRKPAFLSGEQKKAIVDLLFKTNRKVTVKQLKEDYFKKIECFDSVEISGVEDRFNASLGTYHDLLKIIKDKDFLDNEENEDILEDIVLTLTLFEDREMIEERLKTYAHLFDDKVMKQLKRRRYTGWGRLSRKLINGIRDKQSGKTILDFLKSDGFANRNFMQLIHDDSLTFKEDIQKAQVSGQGDSLHEHIANLAGSPAIKKGILQTVKVVDELVKVMGRHKPENIVIEMARENQTTQKGQKNSRERMKRIEEGIKELGSQILKEHPVENTQLQNEKLYLYYLQNGRDMYVDQELDINRLSDYDVDHIVPQSFLKDDSIDNKVLTRSDKARGKSDNVPSEEVVKKMKNYWRQLLNAKLITQRKFDNLTKAERGGLSELDKAGFIKRQLVETRQITKHVAQILDSRMNTKYDENDKLIREVKVITLKSKLVSDFRKDFQFYKVREINNYHHAHDAYLNAVVGTALIKKYPKLESEFVYGDYKVYDVRKMIAKSEQEIGKATAKYFFYSNIMNFFKTEITLANGEIRKRPLIETNGETGEIVWDKGRDFATVRKVLSMPQVNIVKKTEVQTGGFSKESILPKRNSDKLIARKKDWDPKKYGGFDSPTVAYSVLVVAKVEKGKSKKLKSVKELLGITIMERSSFEKNPIDFLEAKGYKEVKKDLIIKLPKYSLFELENGRKRMLASAGELQKGNELALPSKYVNFLYLASHYEKLKGSPEDNEQKQLFVEQHKHYLDEIIEQISEFSKRVILADANLDKVLSAYNKHRDKPIREQAENIIHLFTLTNLGAPAAFKYFDTTIDRKRYTSTKEVLDATLIHQSITGLYETRIDLSQLGGDGGGGGGSSPAPGGMDLLKPLTVERKGVKIKGYWNSQADITCVPKDLLQGEEPVRQQNVTTIHGTQEGDVYYVNLKIDGRRINTEVIGTTLDYAIITPGDVPWILKKPLELTIKLDLEEQQGTLLNNSILSKKGKEELKQLFEKYSALWQSWENQVGHRRIRPHKIATGTVKPTPQKQYHINPKAKPDIQIVINDLLKQGVLIQKESTMNTPVYPVPKPNGRWRMVLDYRAVNKVTPLIAVQNQHSYGILGSLFKGRYKTTIDLSNGFWAHPIVPEDYWITAFTWQGKQYCWTVLPQGFLNSPGLFTGDVVDLLQGIPNVEVYVDDVYISHDSEKEHLEYLDILFNRLKEAGYIISLKKSNIANSIVDFLGFQITNEGRGLTDTFKEKLENITAPTTLKQLQSILGLLNFARNFIPDFTELIAPLYALIPKSTKNYVPWQIEHSTTLETLITKLNGAEYLQGRKGDKTLIMKVNASYTTGYIRYYNEGEKKPISYVSIVFSKTELKFTELEKLLTTVHKGLLKALDLSMGQNIHVYSPIVSMQNIQKTPQTAKKALASRWLSWLSYLEDPRIRFFYDPQMPALKDLPAVDTGKDNKKHPSNFQHIFYTDGSAITSPTKEGHLNAGMGIVYFINKDGNLQKQQEWSISLGNHTAQFAEIAAFEFALKKCLPLGGNILVVTDSNYVAKAYNEELDVWASNGFVNNRKKPLKHISKWKSVADLKRLRPDVVVTHEPGHQKLDSSPHAYGNNLADQLATQASFKVHAGKRTADGSEFEKRTADGSEFESPKKKAKVE

SEQ ID NO: 721 - protein, 2173 aa, synthetic construct
MPAAKRVKLDGGDKKYSIGLDIGTNSVGWAVITDEYKVPSKKFKVLGNTDRHSIKKNLIGALLFDSGETAEATRLKRTARRRYTRRKNRICYLQEIFSNEMAKVDDSFFHRLEESFLVEEDKKHERHPIFGNIVDEVAYHEKYPTIYHLRKKLVDSTDKADLRLIYLALAHMIKFRGHFLIEGDLNPDNSDVDKLFIQLVQTYNQLFEENPINASGVDAKAILSARLSKSRRLENLIAQLPGEKKNGLFGNLIALSLGLTPNFKSNFDLAEDAKLQLSKDTYDDDLDNLLAQIGDQYADLFLAAKNLSDAILLSDILRVNTEITKAPLSASMIKRYDEHHQDLTLLKALVRQQLPEKYKEIFFDQSKNGYAGYIDGGASQEEFYKFIKPILEKMDGTEELLVKLNREDLLRKQRTFDNGSIPHQIHLGELHAILRRQEDFYPFLKDNREKIEKILTFRIPYYVGPLARGNSRFAWMTRKSEETITPWNFEEVVDKGASAQSFIERMTNFDKNLPNEKVLPKHSLLYEYFTVYNELTKVKYVTEGMRKPAFLSGEQKKAIVDLLFKTNRKVTVKQLKEDYFKKIECFDSVEISGVEDRFNASLGTYHDLLKIIKDKDFLDNEENEDILEDIVLTLTLFEDREMIEERLKTYAHLFDDKVMKQLKRRRYTGWGRLSRKLINGIRDKQSGKTILDFLKSDGFANRNFMQLIHDDSLTFKEDIQKAQVSGQGDSLHEHIANLAGSPAIKKGILQTVKVVDELVKVMGRHKPENIVIEMARENQTTQKGQKNSRERMKRIEEGIKELGSQILKEHPVENTQLQNEKLYLYYLQNGRDMYVDQELDINRLSDYDVDHIVPQSFLKDDSIDNKVLTRSDKARGKSDNVPSEEVVKKMKNYWRQLLNAKLITQRKFDNLTKAERGGLSELDKAGFIKRQLVETRQITKHVAQILDSRMNTKYDENDKLIREVKVITLKSKLVSDFRKDFQFYKVREINNYHHAHDAYLNAVVGTALIKKYPKLESEFVYGDYKVYDVRKMIAKSEQEIGKATAKYFFYSNIMNFFKTEITLANGEIRKRPLIETNGETGEIVWDKGRDFATVRKVLSMPQVNIVKKTEVQTGGFSKESILPKRNSDKLIARKKDWDPKKYGGFDSPTVAYSVLVVAKVEKGKSKKLKSVKELLGITIMERSSFEKNPIDFLEAKGYKEVKKDLIIKLPKYSLFELENGRKRMLASAGELQKGNELALPSKYVNFLYLASHYEKLKGSPEDNEQKQLFVEQHKHYLDEIIEQISEFSKRVILADANLDKVLSAYNKHRDKPIREQAENIIHLFTLTNLGAPAAFKYFDTTIDRKRYTSTKEVLDATLIHQSITGLYETRIDLSQLGGDGGEAAAKGSSPAPGGMDLLKPLTVERKGVKIKGYWNSQADITCVPKDLLQGEEPVRQQNVTTIHGTQEGDVYYVNLKIDGRRINTEVIGTTLDYAIITPGDVPWILKKPLELTIKLDLEEQQGTLLNNSILSKKGKEELKQLFEKYSALWQSWENQVGHRRIRPHKIATGTVKPTPQKQYHINPKAKPDIQIVINDLLKQGVLIQKESTMNTPVYPVPKPNGRWRMVLDYRAVNKVTPLIAVQNQHSYGILGSLFKGRYKTTIDLSNGFWAHPIVPEDYWITAFTWQGKQYCWTVLPQGFLNSPGLFTGDVVDLLQGIPNVEVYVDDVYISHDSEKEHLEYLDILFNRLKEAGYIISLKKSNIANSIVDFLGFQITNEGRGLTDTFKEKLENITAPTTLKQLQSILGLLNFARNFIPDFTELIAPLYALIPKSTKNYVPWQIEHSTTLETLITKLNGAEYLQGRKGDKTLIMKVNASYTTGYIRYYNEGEKKPISYVSIVFSKTELKFTELEKLLTTVHKGLLKALDLSMGQNIHVYSPIVSMQNIQKTPQTAKKALASRWLSWLSYLEDPRIRFFYDPQMPALKDLPAVDTGKDNKKHPSNFQHIFYTDGSAITSPTKEGHLNAGMGIVYFINKDGNLQKQQEWSISLGNHTAQFAEIAAFEFALKKCLPLGGNILVVTDSNYVAKAYNEELDVWASNGFVNNRKKPLKHISKWKSVADLKRLRPDVVVTHEPGHQKLDSSPHAYGNNLADQLATQASFKVHAGKRTADGSEFEKRTADGSEFESPKKKAKVE

SEQ ID NO: 722 - protein, 2180 aa, synthetic construct
MPAAKRVKLDGGDKKYSIGLDIGTNSVGWAVITDEYKVPSKKFKVLGNTDRHSIKKNLIGALLFDSGETAEATRLKRTARRRYTRRKNRICYLQEIFSNEMAKVDDSFFHRLEESFLVEEDKKHERHPIFGNIVDEVAYHEKYPTIYHLRKKLVDSTDKADLRLIYLALAHMIKFRGHFLIEGDLNPDNSDVDKLFIQLVQTYNQLFEENPINASGVDAKAILSARLSKSRRLENLIAQLPGEKKNGLFGNLIALSLGLTPNFKSNFDLAEDAKLQLSKDTYDDDLDNLLAQIGDQYADLFLAAKNLSDAILLSDILRVNTEITKAPLSASMIKRYDEHHQDLTLLKALVRQQLPEKYKEIFFDQSKNGYAGYIDGGASQEEFYKFIKPILEKMDGTEELLVKLNREDLLRKQRTFDNGSIPHQIHLGELHAILRRQEDFYPFLKDNREKIEKILTFRIPYYVGPLARGNSRFAWMTRKSEETITPWNFEEVVDKGASAQSFIERMTNFDKNLPNEKVLPKHSLLYEYFTVYNELTKVKYVTEGMRKPAFLSGEQKKAIVDLLFKTNRKVTVKQLKEDYFKKIECFDSVEISGVEDRFNASLGTYHDLLKIIKDKDFLDNEENEDILEDIVLTLTLFEDREMIEERLKTYAHLFDDKVMKQLKRRRYTGWGRLSRKLINGIRDKQSGKTILDFLKSDGFANRNFMQLIHDDSLTFKEDIQKAQVSGQGDSLHEHIANLAGSPAIKKGILQTVKVVDELVKVMGRHKPENIVIEMARENQTTQKGQKNSRERMKRIEEGIKELGSQILKEHPVENTQLQNEKLYLYYLQNGRDMYVDQELDINRLSDYDVDHIVPQSFLKDDSIDNKVLTRSDKARGKSDNVPSEEVVKKMKNYWRQLLNAKLITQRKFDNLTKAERGGLSELDKAGFIKRQLVETRQITKHVAQILDSRMNTKYDENDKLIREVKVITLKSKLVSDFRKDFQFYKVREINNYHHAHDAYLNAVVGTALIKKYPKLESEFVYGDYKVYDVRKMIAKSEQEIGKATAKYFFYSNIMNFFKTEITLANGEIRKRPLIETNGETGEIVWDKGRDFATVRKVLSMPQVNIVKKTEVQTGGFSKESILPKRNSDKLIARKKDWDPKKYGGFDSPTVAYSVLVVAKVEKGKSKKLKSVKELLGITIMERSSFEKNPIDFLEAKGYKEVKKDLIIKLPKYSLFELENGRKRMLASAGELQKGNELALPSKYVNFLYLASHYEKLKGSPEDNEQKQLFVEQHKHYLDEIIEQISEFSKRVILADANLDKVLSAYNKHRDKPIREQAENIIHLFTLTNLGAPAAFKYFDTTIDRKRYTSTKEVLDATLIHQSITGLYETRIDLSQLGGDGGGSSGSSGSSGSSGSSGSSGGMDLLKPLTVERKGVKIKGYWNSQADITCVPKDLLQGEEPVRQQNVTTIHGTQEGDVYYVNLKIDGRRINTEVIGTTLDYAIITPGDVPWILKKPLELTIKLDLEEQQGTLLNNSILSKKGKEELKQLFEKYSALWQSWENQVGHRRIRPHKIATGTVKPTPQKQYHINPKAKPDIQIVINDLLKQGVLIQKESTMNTPVYPVPKPNGRWRMVLDYRAVNKVTPLIAVQNQHSYGILGSLFKGRYKTTIDLSNGFWAHPIVPEDYWITAFTWQGKQYCWTVLPQGFLNSPGLFTGDVVDLLQGIPNVEVYVDDVYISHDSEKEHLEYLDILFNRLKEAGYIISLKKSNIANSIVDFLGFQITNEGRGLTDTFKEKLENITAPTTLKQLQSILGLLNFARNFIPDFTELIAPLYALIPKSTKNYVPWQIEHSTTLETLITKLNGAEYLQGRKGDKTLIMKVNASYTTGYIRYYNEGEKKPISYVSIVFSKTELKFTELEKLLTTVHKGLLKALDLSMGQNIHVYSPIVSMQNIQKTPQTAKKALASRWLSWLSYLEDPRIRFFYDPQMPALKDLPAVDTGKDNKKHPSNFQHIFYTDGSAITSPTKEGHLNAGMGIVYFINKDGNLQKQQEWSISLGNHTAQFAEIAAFEFALKKCLPLGGNILVVTDSNYVAKAYNEELDVWASNGFVNNRKKPLKHISKWKSVADLKRLRPDVVVTHEPGHQKLDSSPHAYGNNLADQLATQASFKVHAGKRTADGSEFEKRTADGSEFESPKKKAKVE

SEQ ID NO: 723 - protein, 2171 aa, synthetic construct
MPAAKRVKLDGGDKKYSIGLDIGTNSVGWAVITDEYKVPSKKFKVLGNTDRHSIKKNLIGALLFDSGETAEATRLKRTARRRYTRRKNRICYLQEIFSNEMAKVDDSFFHRLEESFLVEEDKKHERHPIFGNIVDEVAYHEKYPTIYHLRKKLVDSTDKADLRLIYLALAHMIKFRGHFLIEGDLNPDNSDVDKLFIQLVQTYNQLFEENPINASGVDAKAILSARLSKSRRLENLIAQLPGEKKNGLFGNLIALSLGLTPNFKSNFDLAEDAKLQLSKDTYDDDLDNLLAQIGDQYADLFLAAKNLSDAILLSDILRVNTEITKAPLSASMIKRYDEHHQDLTLLKALVRQQLPEKYKEIFFDQSKNGYAGYIDGGASQEEFYKFIKPILEKMDGTEELLVKLNREDLLRKQRTFDNGSIPHQIHLGELHAILRRQEDFYPFLKDNREKIEKILTFRIPYYVGPLARGNSRFAWMTRKSEETITPWNFEEVVDKGASAQSFIERMTNFDKNLPNEKVLPKHSLLYEYFTVYNELTKVKYVTEGMRKPAFLSGEQKKAIVDLLFKTNRKVTVKQLKEDYFKKIECFDSVEISGVEDRFNASLGTYHDLLKIIKDKDFLDNEENEDILEDIVLTLTLFEDREMIEERLKTYAHLFDDKVMKQLKRRRYTGWGRLSRKLINGIRDKQSGKTILDFLKSDGFANRNFMQLIHDDSLTFKEDIQKAQVSGQGDSLHEHIANLAGSPAIKKGILQTVKVVDELVKVMGRHKPENIVIEMARENQTTQKGQKNSRERMKRIEEGIKELGSQILKEHPVENTQLQNEKLYLYYLQNGRDMYVDQELDINRLSDYDVDHIVPQSFLKDDSIDNKVLTRSDKARGKSDNVPSEEVVKKMKNYWRQLLNAKLITQRKFDNLTKAERGGLSELDKAGFIKRQLVETRQITKHVAQILDSRMNTKYDENDKLIREVKVITLKSKLVSDFRKDFQFYKVREINNYHHAHDAYLNAVVGTALIKKYPKLESEFVYGDYKVYDVRKMIAKSEQEIGKATAKYFFYSNIMNFFKTEITLANGEIRKRPLIETNGETGEIVWDKGRDFATVRKVLSMPQVNIVKKTEVQTGGFSKESILPKRNSDKLIARKKDWDPKKYGGFDSPTVAYSVLVVAKVEKGKSKKLKSVKELLGITIMERSSFEKNPIDFLEAKGYKEVKKDLIIKLPKYSLFELENGRKRMLASAGELQKGNELALPSKYVNFLYLASHYEKLKGSPEDNEQKQLFVEQHKHYLDEIIEQISEFSKRVILADANLDKVLSAYNKHRDKPIREQAENIIHLFTLTNLGAPAAFKYFDTTIDRKRYTSTKEVLDATLIHQSITGLYETRIDLSQLGGDGGPAPAPAPAPGGMDLLKPLTVERKGVKIKGYWNSQADITCVPKDLLQGEEPVRQQNVTTIHGTQEGDVYYVNLKIDGRRINTEVIGTTLDYAIITPGDVPWILKKPLELTIKLDLEEQQGTLLNNSILSKKGKEELKQLFEKYSALWQSWENQVGHRRIRPHKIATGTVKPTPQKQYHINPKAKPDIQIVINDLLKQGVLIQKESTMNTPVYPVPKPNGRWRMVLDYRAVNKVTPLIAVQNQHSYGILGSLFKGRYKTTIDLSNGFWAHPIVPEDYWITAFTWQGKQYCWTVLPQGFLNSPGLFTGDVVDLLQGIPNVEVYVDDVYISHDSEKEHLEYLDILFNRLKEAGYIISLKKSNIANSIVDFLGFQITNEGRGLTDTFKEKLENITAPTTLKQLQSILGLLNFARNFIPDFTELIAPLYALIPKSTKNYVPWQIEHSTTLETLITKLNGAEYLQGRKGDKTLIMKVNASYTTGYIRYYNEGEKKPISYVSIVFSKTELKFTELEKLLTTVHKGLLKALDLSMGQNIHVYSPIVSMQNIQKTPQTAKKALASRWLSWLSYLEDPRIRFFYDPQMPALKDLPAVDTGKDNKKHPSNFQHIFYTDGSAITSPTKEGHLNAGMGIVYFINKDGNLQKQQEWSISLGNHTAQFAEIAAFEFALKKCLPLGGNILVVTDSNYVAKAYNEELDVWASNGFVNNRKKPLKHISKWKSVADLKRLRPDVVVTHEPGHQKLDSSPHAYGNNLADQLATQASFKVHAGKRTADGSEFEKRTADGSEFESPKKKAKVE

SEQ ID NO: 724 - protein, 2170 aa, synthetic construct
MPAAKRVKLDGGDKKYSIGLDIGTNSVGWAVITDEYKVPSKKFKVLGNTDRHSIKKNLIGALLFDSGETAEATRLKRTARRRYTRRKNRICYLQEIFSNEMAKVDDSFFHRLEESFLVEEDKKHERHPIFGNIVDEVAYHEKYPTIYHLRKKLVDSTDKADLRLIYLALAHMIKFRGHFLIEGDLNPDNSDVDKLFIQLVQTYNQLFEENPINASGVDAKAILSARLSKSRRLENLIAQLPGEKKNGLFGNLIALSLGLTPNFKSNFDLAEDAKLQLSKDTYDDDLDNLLAQIGDQYADLFLAAKNLSDAILLSDILRVNTEITKAPLSASMIKRYDEHHQDLTLLKALVRQQLPEKYKEIFFDQSKNGYAGYIDGGASQEEFYKFIKPILEKMDGTEELLVKLNREDLLRKQRTFDNGSIPHQIHLGELHAILRRQEDFYPFLKDNREKIEKILTFRIPYYVGPLARGNSRFAWMTRKSEETITPWNFEEVVDKGASAQSFIERMTNFDKNLPNEKVLPKHSLLYEYFTVYNELTKVKYVTEGMRKPAFLSGEQKKAIVDLLFKTNRKVTVKQLKEDYFKKIECFDSVEISGVEDRFNASLGTYHDLLKIIKDKDFLDNEENEDILEDIVLTLTLFEDREMIEERLKTYAHLFDDKVMKQLKRRRYTGWGRLSRKLINGIRDKQSGKTILDFLKSDGFANRNFMQLIHDDSLTFKEDIQKAQVSGQGDSLHEHIANLAGSPAIKKGILQTVKVVDELVKVMGRHKPENIVIEMARENQTTQKGQKNSRERMKRIEEGIKELGSQILKEHPVENTQLQNEKLYLYYLQNGRDMYVDQELDINRLSDYDVDHIVPQSFLKDDSIDNKVLTRSDKARGKSDNVPSEEVVKKMKNYWRQLLNAKLITQRKFDNLTKAERGGLSELDKAGFIKRQLVETRQITKHVAQILDSRMNTKYDENDKLIREVKVITLKSKLVSDFRKDFQFYKVREINNYHHAHDAYLNAVVGTALIKKYPKLESEFVYGDYKVYDVRKMIAKSEQEIGKATAKYFFYSNIMNFFKTEITLANGEIRKRPLIETNGETGEIVWDKGRDFATVRKVLSMPQVNIVKKTEVQTGGFSKESILPKRNSDKLIARKKDWDPKKYGGFDSPTVAYSVLVVAKVEKGKSKKLKSVKELLGITIMERSSFEKNPIDFLEAKGYKEVKKDLIIKLPKYSLFELENGRKRMLASAGELQKGNELALPSKYVNFLYLASHYEKLKGSPEDNEQKQLFVEQHKHYLDEIIEQISEFSKRVILADANLDKVLSAYNKHRDKPIREQAENIIHLFTLTNLGAPAAFKYFDTTIDRKRYTSTKEVLDATLIHQSITGLYETRIDLSQLGGDGGGSSEAAAKGGMDLLKPLTVERKGVKIKGYWNSQADITCVPKDLLQGEEPVRQQNVTTIHGTQEGDVYYVNLKIDGRRINTEVIGTTLDYAIITPGDVPWILKKPLELTIKLDLEEQQGTLLNNSILSKKGKEELKQLFEKYSALWQSWENQVGHRRIRPHKIATGTVKPTPQKQYHINPKAKPDIQIVINDLLKQGVLIQKESTMNTPVYPVPKPNGRWRMVLDYRAVNKVTPLIAVQNQHSYGILGSLFKGRYKTTIDLSNGFWAHPIVPEDYWITAFTWQGKQYCWTVLPQGFLNSPGLFTGDVVDLLQGIPNVEVYVDDVYISHDSEKEHLEYLDILFNRLKEAGYIISLKKSNIANSIVDFLGFQITNEGRGLTDTFKEKLENITAPTTLKQLQSILGLLNFARNFIPDFTELIAPLYALIPKSTKNYVPWQIEHSTTLETLITKLNGAEYLQGRKGDKTLIMKVNASYTTGYIRYYNEGEKKPISYVSIVFSKTELKFTELEKLLTTVHKGLLKALDLSMGQNIHVYSPIVSMQNIQKTPQTAKKALASRWLSWLSYLEDPRIRFFYDPQMPALKDLPAVDTGKDNKKHPSNFQHIFYTDGSAITSPTKEGHLNAGMGIVYFINKDGNLQKQQEWSISLGNHTAQFAEIAAFEFALKKCLPLGGNILVVTDSNYVAKAYNEELDVWASNGFVNNRKKPLKHISKWKSVADLKRLRPDVVVTHEPGHQKLDSSPHAYGNNLADQLATQASFKVHAGKRTADGSEFEKRTADGSEFESPKKKAKVE

SEQ ID NO: 725 - protein, 2165 aa, synthetic construct
MPAAKRVKLDGGDKKYSIGLDIGTNSVGWAVITDEYKVPSKKFKVLGNTDRHSIKKNLIGALLFDSGETAEATRLKRTARRRYTRRKNRICYLQEIFSNEMAKVDDSFFHRLEESFLVEEDKKHERHPIFGNIVDEVAYHEKYPTIYHLRKKLVDSTDKADLRLIYLALAHMIKFRGHFLIEGDLNPDNSDVDKLFIQLVQTYNQLFEENPINASGVDAKAILSARLSKSRRLENLIAQLPGEKKNGLFGNLIALSLGLTPNFKSNFDLAEDAKLQLSKDTYDDDLDNLLAQIGDQYADLFLAAKNLSDAILLSDILRVNTEITKAPLSASMIKRYDEHHQDLTLLKALVRQQLPEKYKEIFFDQSKNGYAGYIDGGASQEEFYKFIKPILEKMDGTEELLVKLNREDLLRKQRTFDNGSIPHQIHLGELHAILRRQEDFYPFLKDNREKIEKILTFRIPYYVGPLARGNSRFAWMTRKSEETITPWNFEEVVDKGASAQSFIERMTNFDKNLPNEKVLPKHSLLYEYFTVYNELTKVKYVTEGMRKPAFLSGEQKKAIVDLLFKTNRKVTVKQLKEDYFKKIECFDSVEISGVEDRFNASLGTYHDLLKIIKDKDFLDNEENEDILEDIVLTLTLFEDREMIEERLKTYAHLFDDKVMKQLKRRRYTGWGRLSRKLINGIRDKQSGKTILDFLKSDGFANRNFMQLIHDDSLTFKEDIQKAQVSGQGDSLHEHIANLAGSPAIKKGILQTVKVVDELVKVMGRHKPENIVIEMARENQTTQKGQKNSRERMKRIEEGIKELGSQILKEHPVENTQLQNEKLYLYYLQNGRDMYVDQELDINRLSDYDVDHIVPQSFLKDDSIDNKVLTRSDKARGKSDNVPSEEVVKKMKNYWRQLLNAKLITQRKFDNLTKAERGGLSELDKAGFIKRQLVETRQITKHVAQILDSRMNTKYDENDKLIREVKVITLKSKLVSDFRKDFQFYKVREINNYHHAHDAYLNAVVGTALIKKYPKLESEFVYGDYKVYDVRKMIAKSEQEIGKATAKYFFYSNIMNFFKTEITLANGEIRKRPLIETNGETGEIVWDKGRDFATVRKVLSMPQVNIVKKTEVQTGGFSKESILPKRNSDKLIARKKDWDPKKYGGFDSPTVAYSVLVVAKVEKGKSKKLKSVKELLGITIMERSSFEKNPIDFLEAKGYKEVKKDLIIKLPKYSLFELENGRKRMLASAGELQKGNELALPSKYVNFLYLASHYEKLKGSPEDNEQKQLFVEQHKHYLDEIIEQISEFSKRVILADANLDKVLSAYNKHRDKPIREQAENIIHLFTLTNLGAPAAFKYFDTTIDRKRYTSTKEVLDATLIHQSITGLYETRIDLSQLGGDGGGSSGGMDLLKPLTVERKGVKIKGYWNSQADITCVPKDLLQGEEPVRQQNVTTIHGTQEGDVYYVNLKIDGRRINTEVIGTTLDYAIITPGDVPWILKKPLELTIKLDLEEQQGTLLNNSILSKKGKEELKQLFEKYSALWQSWENQVGHRRIRPHKIATGTVKPTPQKQYHINPKAKPDIQIVINDLLKQGVLIQKESTMNTPVYPVPKPNGRWRMVLDYRAVNKVTPLIAVQNQHSYGILGSLFKGRYKTTIDLSNGFWAHPIVPEDYWITAFTWQGKQYCWTVLPQGFLNSPGLFTGDVVDLLQGIPNVEVYVDDVYISHDSEKEHLEYLDILFNRLKEAGYIISLKKSNIANSIVDFLGFQITNEGRGLTDTFKEKLENITAPTTLKQLQSILGLLNFARNFIPDFTELIAPLYALIPKSTKNYVPWQIEHSTTLETLITKLNGAEYLQGRKGDKTLIMKVNASYTTGYIRYYNEGEKKPISYVSIVFSKTELKFTELEKLLTTVHKGLLKALDLSMGQNIHVYSPIVSMQNIQKTPQTAKKALASRWLSWLSYLEDPRIRFFYDPQMPALKDLPAVDTGKDNKKHPSNFQHIFYTDGSAITSPTKEGHLNAGMGIVYFINKDGNLQKQQEWSISLGNHTAQFAEIAAFEFALKKCLPLGGNILVVTDSNYVAKAYNEELDVWASNGFVNNRKKPLKHISKWKSVADLKRLRPDVVVTHEPGHQKLDSSPHAYGNNLADQLATQASFKVHAGKRTADGSEFEKRTADGSEFESPKKKAKVE

SEQ ID NO: 726 - protein, 2173 aa, synthetic construct
MPAAKRVKLDGGDKKYSIGLDIGTNSVGWAVITDEYKVPSKKFKVLGNTDRHSIKKNLIGALLFDSGETAEATRLKRTARRRYTRRKNRICYLQEIFSNEMAKVDDSFFHRLEESFLVEEDKKHERHPIFGNIVDEVAYHEKYPTIYHLRKKLVDSTDKADLRLIYLALAHMIKFRGHFLIEGDLNPDNSDVDKLFIQLVQTYNQLFEENPINASGVDAKAILSARLSKSRRLENLIAQLPGEKKNGLFGNLIALSLGLTPNFKSNFDLAEDAKLQLSKDTYDDDLDNLLAQIGDQYADLFLAAKNLSDAILLSDILRVNTEITKAPLSASMIKRYDEHHQDLTLLKALVRQQLPEKYKEIFFDQSKNGYAGYIDGGASQEEFYKFIKPILEKMDGTEELLVKLNREDLLRKQRTFDNGSIPHQIHLGELHAILRRQEDFYPFLKDNREKIEKILTFRIPYYVGPLARGNSRFAWMTRKSEETITPWNFEEVVDKGASAQSFIERMTNFDKNLPNEKVLPKHSLLYEYFTVYNELTKVKYVTEGMRKPAFLSGEQKKAIVDLLFKTNRKVTVKQLKEDYFKKIECFDSVEISGVEDRFNASLGTYHDLLKIIKDKDFLDNEENEDILEDIVLTLTLFEDREMIEERLKTYAHLFDDKVMKQLKRRRYTGWGRLSRKLINGIRDKQSGKTILDFLKSDGFANRNFMQLIHDDSLTFKEDIQKAQVSGQGDSLHEHIANLAGSPAIKKGILQTVKVVDELVKVMGRHKPENIVIEMARENQTTQKGQKNSRERMKRIEEGIKELGSQILKEHPVENTQLQNEKLYLYYLQNGRDMYVDQELDINRLSDYDVDHIVPQSFLKDDSIDNKVLTRSDKARGKSDNVPSEEVVKKMKNYWRQLLNAKLITQRKFDNLTKAERGGLSELDKAGFIKRQLVETRQITKHVAQILDSRMNTKYDENDKLIREVKVITLKSKLVSDFRKDFQFYKVREINNYHHAHDAYLNAVVGTALIKKYPKLESEFVYGDYKVYDVRKMIAKSEQEIGKATAKYFFYSNIMNFFKTEITLANGEIRKRPLIETNGETGEIVWDKGRDFATVRKVLSMPQVNIVKKTEVQTGGFSKESILPKRNSDKLIARKKDWDPKKYGGFDSPTVAYSVLVVAKVEKGKSKKLKSVKELLGITIMERSSFEKNPIDFLEAKGYKEVKKDLIIKLPKYSLFELENGRKRMLASAGELQKGNELALPSKYVNFLYLASHYEKLKGSPEDNEQKQLFVEQHKHYLDEIIEQISEFSKRVILADANLDKVLSAYNKHRDKPIREQAENIIHLFTLTNLGAPAAFKYFDTTIDRKRYTSTKEVLDATLIHQSITGLYETRIDLSQLGGDGGEAAAKGGSGGGGGMDLLKPLTVERKGVKIKGYWNSQADITCVPKDLLQGEEPVRQQNVTTIHGTQEGDVYYVNLKIDGRRINTEVIGTTLDYAIITPGDVPWILKKPLELTIKLDLEEQQGTLLNNSILSKKGKEELKQLFEKYSALWQSWENQVGHRRIRPHKIATGTVKPTPQKQYHINPKAKPDIQIVINDLLKQGVLIQKESTMNTPVYPVPKPNGRWRMVLDYRAVNKVTPLIAVQNQHSYGILGSLFKGRYKTTIDLSNGFWAHPIVPEDYWITAFTWQGKQYCWTVLPQGFLNSPGLFTGDVVDLLQGIPNVEVYVDDVYISHDSEKEHLEYLDILFNRLKEAGYIISLKKSNIANSIVDFLGFQITNEGRGLTDTFKEKLENITAPTTLKQLQSILGLLNFARNFIPDFTELIAPLYALIPKSTKNYVPWQIEHSTTLETLITKLNGAEYLQGRKGDKTLIMKVNASYTTGYIRYYNEGEKKPISYVSIVFSKTELKFTELEKLLTTVHKGLLKALDLSMGQNIHVYSPIVSMQNIQKTPQTAKKALASRWLSWLSYLEDPRIRFFYDPQMPALKDLPAVDTGKDNKKHPSNFQHIFYTDGSAITSPTKEGHLNAGMGIVYFINKDGNLQKQQEWSISLGNHTAQFAEIAAFEFALKKCLPLGGNILVVTDSNYVAKAYNEELDVWASNGFVNNRKKPLKHISKWKSVADLKRLRPDVVVTHEPGHQKLDSSPHAYGNNLADQLATQASFKVHAGKRTADGSEFEKRTADGSEFESPKKKAKVE

SEQ ID NO: 727 - protein, 2173 aa, synthetic construct
MPAAKRVKLDGGDKKYSIGLDIGTNSVGWAVITDEYKVPSKKFKVLGNTDRHSIKKNLIGALLFDSGETAEATRLKRTARRRYTRRKNRICYLQEIFSNEMAKVDDSFFHRLEESFLVEEDKKHERHPIFGNIVDEVAYHEKYPTIYHLRKKLVDSTDKADLRLIYLALAHMIKFRGHFLIEGDLNPDNSDVDKLFIQLVQTYNQLFEENPINASGVDAKAILSARLSKSRRLENLIAQLPGEKKNGLFGNLIALSLGLTPNFKSNFDLAEDAKLQLSKDTYDDDLDNLLAQIGDQYADLFLAAKNLSDAILLSDILRVNTEITKAPLSASMIKRYDEHHQDLTLLKALVRQQLPEKYKEIFFDQSKNGYAGYIDGGASQEEFYKFIKPILEKMDGTEELLVKLNREDLLRKQRTFDNGSIPHQIHLGELHAILRRQEDFYPFLKDNREKIEKILTFRIPYYVGPLARGNSRFAWMTRKSEETITPWNFEEVVDKGASAQSFIERMTNFDKNLPNEKVLPKHSLLYEYFTVYNELTKVKYVTEGMRKPAFLSGEQKKAIVDLLFKTNRKVTVKQLKEDYFKKIECFDSVEISGVEDRFNASLGTYHDLLKIIKDKDFLDNEENEDILEDIVLTLTLFEDREMIEERLKTYAHLFDDKVMKQLKRRRYTGWGRLSRKLINGIRDKQSGKTILDFLKSDGFANRNFMQLIHDDSLTFKEDIQKAQVSGQGDSLHEHIANLAGSPAIKKGILQTVKVVDELVKVMGRHKPENIVIEMARENQTTQKGQKNSRERMKRIEEGIKELGSQILKEHPVENTQLQNEKLYLYYLQNGRDMYVDQELDINRLSDYDVDHIVPQSFLKDDSIDNKVLTRSDKARGKSDNVPSEEVVKKMKNYWRQLLNAKLITQRKFDNLTKAERGGLSELDKAGFIKRQLVETRQITKHVAQILDSRMNTKYDENDKLIREVKVITLKSKLVSDFRKDFQFYKVREINNYHHAHDAYLNAVVGTALIKKYPKLESEFVYGDYKVYDVRKMIAKSEQEIGKATAKYFFYSNIMNFFKTEITLANGEIRKRPLIETNGETGEIVWDKGRDFATVRKVLSMPQVNIVKKTEVQTGGFSKESILPKRNSDKLIARKKDWDPKKYGGFDSPTVAYSVLVVAKVEKGKSKKLKSVKELLGITIMERSSFEKNPIDFLEAKGYKEVKKDLIIKLPKYSLFELENGRKRMLASAGELQKGNELALPSKYVNFLYLASHYEKLKGSPEDNEQKQLFVEQHKHYLDEIIEQISEFSKRVILADANLDKVLSAYNKHRDKPIREQAENIIHLFTLTNLGAPAAFKYFDTTIDRKRYTSTKEVLDATLIHQSITGLYETRIDLSQLGGDGGGSSEAAAKPAPGGMDLLKPLTVERKGVKIKGYWNSQADITCVPKDLLQGEEPVRQQNVTTIHGTQEGDVYYVNLKIDGRRINTEVIGTTLDYAIITPGDVPWILKKPLELTIKLDLEEQQGTLLNNSILSKKGKEELKQLFEKYSALWQSWENQVGHRRIRPHKIATGTVKPTPQKQYHINPKAKPDIQIVINDLLKQGVLIQKESTMNTPVYPVPKPNGRWRMVLDYRAVNKVTPLIAVQNQHSYGILGSLFKGRYKTTIDLSNGFWAHPIVPEDYWITAFTWQGKQYCWTVLPQGFLNSPGLFTGDVVDLLQGIPNVEVYVDDVYISHDSEKEHLEYLDILFNRLKEAGYIISLKKSNIANSIVDFLGFQITNEGRGLTDTFKEKLENITAPTTLKQLQSILGLLNFARNFIPDFTELIAPLYALIPKSTKNYVPWQIEHSTTLETLITKLNGAEYLQGRKGDKTLIMKVNASYTTGYIRYYNEGEKKPISYVSIVFSKTELKFTELEKLLTTVHKGLLKALDLSMGQNIHVYSPIVSMQNIQKTPQTAKKALASRWLSWLSYLEDPRIRFFYDPQMPALKDLPAVDTGKDNKKHPSNFQHIFYTDGSAITSPTKEGHLNAGMGIVYFINKDGNLQKQQEWSISLGNHTAQFAEIAAFEFALKKCLPLGGNILVVTDSNYVAKAYNEELDVWASNGFVNNRKKPLKHISKWKSVADLKRLRPDVVVTHEPGHQKLDSSPHAYGNNLADQLATQASFKVHAGKRTADGSEFEKRTADGSEFESPKKKAKVE

SEQ ID NO: 728 - protein, 2173 aa, synthetic construct
MPAAKRVKLDGGDKKYSIGLDIGTNSVGWAVITDEYKVPSKKFKVLGNTDRHSIKKNLIGALLFDSGETAEATRLKRTARRRYTRRKNRICYLQEIFSNEMAKVDDSFFHRLEESFLVEEDKKHERHPIFGNIVDEVAYHEKYPTIYHLRKKLVDSTDKADLRLIYLALAHMIKFRGHFLIEGDLNPDNSDVDKLFIQLVQTYNQLFEENPINASGVDAKAILSARLSKSRRLENLIAQLPGEKKNGLFGNLIALSLGLTPNFKSNFDLAEDAKLQLSKDTYDDDLDNLLAQIGDQYADLFLAAKNLSDAILLSDILRVNTEITKAPLSASMIKRYDEHHQDLTLLKALVRQQLPEKYKEIFFDQSKNGYAGYIDGGASQEEFYKFIKPILEKMDGTEELLVKLNREDLLRKQRTFDNGSIPHQIHLGELHAILRRQEDFYPFLKDNREKIEKILTFRIPYYVGPLARGNSRFAWMTRKSEETITPWNFEEVVDKGASAQSFIERMTNFDKNLPNEKVLPKHSLLYEYFTVYNELTKVKYVTEGMRKPAFLSGEQKKAIVDLLFKTNRKVTVKQLKEDYFKKIECFDSVEISGVEDRFNASLGTYHDLLKIIKDKDFLDNEENEDILEDIVLTLTLFEDREMIEERLKTYAHLFDDKVMKQLKRRRYTGWGRLSRKLINGIRDKQSGKTILDFLKSDGFANRNFMQLIHDDSLTFKEDIQKAQVSGQGDSLHEHIANLAGSPAIKKGILQTVKVVDELVKVMGRHKPENIVIEMARENQTTQKGQKNSRERMKRIEEGIKELGSQILKEHPVENTQLQNEKLYLYYLQNGRDMYVDQELDINRLSDYDVDHIVPQSFLKDDSIDNKVLTRSDKARGKSDNVPSEEVVKKMKNYWRQLLNAKLITQRKFDNLTKAERGGLSELDKAGFIKRQLVETRQITKHVAQILDSRMNTKYDENDKLIREVKVITLKSKLVSDFRKDFQFYKVREINNYHHAHDAYLNAVVGTALIKKYPKLESEFVYGDYKVYDVRKMIAKSEQEIGKATAKYFFYSNIMNFFKTEITLANGEIRKRPLIETNGETGEIVWDKGRDFATVRKVLSMPQVNIVKKTEVQTGGFSKESILPKRNSDKLIARKKDWDPKKYGGFDSPTVAYSVLVVAKVEKGKSKKLKSVKELLGITIMERSSFEKNPIDFLEAKGYKEVKKDLIIKLPKYSLFELENGRKRMLASAGELQKGNELALPSKYVNFLYLASHYEKLKGSPEDNEQKQLFVEQHKHYLDEIIEQISEFSKRVILADANLDKVLSAYNKHRDKPIREQAENIIHLFTLTNLGAPAAFKYFDTTIDRKRYTSTKEVLDATLIHQSITGLYETRIDLSQLGGDGGGSSGGGEAAAKGGMDLLKPLTVERKGVKIKGYWNSQADITCVPKDLLQGEEPVRQQNVTTIHGTQEGDVYYVNLKIDGRRINTEVIGTTLDYAIITPGDVPWILKKPLELTIKLDLEEQQGTLLNNSILSKKGKEELKQLFEKYSALWQSWENQVGHRRIRPHKIATGTVKPTPQKQYHINPKAKPDIQIVINDLLKQGVLIQKESTMNTPVYPVPKPNGRWRMVLDYRAVNKVTPLIAVQNQHSYGILGSLFKGRYKTTIDLSNGFWAHPIVPEDYWITAFTWQGKQYCWTVLPQGFLNSPGLFTGDVVDLLQGIPNVEVYVDDVYISHDSEKEHLEYLDILFNRLKEAGYIISLKKSNIANSIVDFLGFQITNEGRGLTDTFKEKLENITAPTTLKQLQSILGLLNFARNFIPDFTELIAPLYALIPKSTKNYVPWQIEHSTTLETLITKLNGAEYLQGRKGDKTLIMKVNASYTTGYIRYYNEGEKKPISYVSIVFSKTELKFTELEKLLTTVHKGLLKALDLSMGQNIHVYSPIVSMQNIQKTPQTAKKALASRWLSWLSYLEDPRIRFFYDPQMPALKDLPAVDTGKDNKKHPSNFQHIFYTDGSAITSPTKEGHLNAGMGIVYFINKDGNLQKQQEWSISLGNHTAQFAEIAAFEFALKKCLPLGGNILVVTDSNYVAKAYNEELDVWASNGFVNNRKKPLKHISKWKSVADLKRLRPDVVVTHEPGHQKLDSSPHAYGNNLADQLATQASFKVHAGKRTADGSEFEKRTADGSEFESPKKKAKVE

SEQ ID NO: 729 - protein, 2171 aa, synthetic construct
MPAAKRVKLDGGDKKYSIGLDIGTNSVGWAVITDEYKVPSKKFKVLGNTDRHSIKKNLIGALLFDSGETAEATRLKRTARRRYTRRKNRICYLQEIFSNEMAKVDDSFFHRLEESFLVEEDKKHERHPIFGNIVDEVAYHEKYPTIYHLRKKLVDSTDKADLRLIYLALAHMIKFRGHFLIEGDLNPDNSDVDKLFIQLVQTYNQLFEENPINASGVDAKAILSARLSKSRRLENLIAQLPGEKKNGLFGNLIALSLGLTPNFKSNFDLAEDAKLQLSKDTYDDDLDNLLAQIGDQYADLFLAAKNLSDAILLSDILRVNTEITKAPLSASMIKRYDEHHQDLTLLKALVRQQLPEKYKEIFFDQSKNGYAGYIDGGASQEEFYKFIKPILEKMDGTEELLVKLNREDLLRKQRTFDNGSIPHQIHLGELHAILRRQEDFYPFLKDNREKIEKILTFRIPYYVGPLARGNSRFAWMTRKSEETITPWNFEEVVDKGASAQSFIERMTNFDKNLPNEKVLPKHSLLYEYFTVYNELTKVKYVTEGMRKPAFLSGEQKKAIVDLLFKTNRKVTVKQLKEDYFKKIECFDSVEISGVEDRFNASLGTYHDLLKIIKDKDFLDNEENEDILEDIVLTLTLFEDREMIEERLKTYAHLFDDKVMKQLKRRRYTGWGRLSRKLINGIRDKQSGKTILDFLKSDGFANRNFMQLIHDDSLTFKEDIQKAQVSGQGDSLHEHIANLAGSPAIKKGILQTVKVVDELVKVMGRHKPENIVIEMARENQTTQKGQKNSRERMKRIEEGIKELGSQILKEHPVENTQLQNEKLYLYYLQNGRDMYVDQELDINRLSDYDVDHIVPQSFLKDDSIDNKVLTRSDKARGKSDNVPSEEVVKKMKNYWRQLLNAKLITQRKFDNLTKAERGGLSELDKAGFIKRQLVETRQITKHVAQILDSRMNTKYDENDKLIREVKVITLKSKLVSDFRKDFQFYKVREINNYHHAHDAYLNAVVGTALIKKYPKLESEFVYGDYKVYDVRKMIAKSEQEIGKATAKYFFYSNIMNFFKTEITLANGEIRKRPLIETNGETGEIVWDKGRDFATVRKVLSMPQVNIVKKTEVQTGGFSKESILPKRNSDKLIARKKDWDPKKYGGFDSPTVAYSVLVVAKVEKGKSKKLKSVKELLGITIMERSSFEKNPIDFLEAKGYKEVKKDLIIKLPKYSLFELENGRKRMLASAGELQKGNELALPSKYVNFLYLASHYEKLKGSPEDNEQKQLFVEQHKHYLDEIIEQISEFSKRVILADANLDKVLSAYNKHRDKPIREQAENIIHLFTLTNLGAPAAFKYFDTTIDRKRYTSTKEVLDATLIHQSITGLYETRIDLSQLGGDGGGGSGSSGGGGGMDLLKPLTVERKGVKIKGYWNSQADITCVPKDLLQGEEPVRQQNVTTIHGTQEGDVYYVNLKIDGRRINTEVIGTTLDYAIITPGDVPWILKKPLELTIKLDLEEQQGTLLNNSILSKKGKEELKQLFEKYSALWQSWENQVGHRRIRPHKIATGTVKPTPQKQYHINPKAKPDIQIVINDLLKQGVLIQKESTMNTPVYPVPKPNGRWRMVLDYRAVNKVTPLIAVQNQHSYGILGSLFKGRYKTTIDLSNGFWAHPIVPEDYWITAFTWQGKQYCWTVLPQGFLNSPGLFTGDVVDLLQGIPNVEVYVDDVYISHDSEKEHLEYLDILFNRLKEAGYIISLKKSNIANSIVDFLGFQITNEGRGLTDTFKEKLENITAPTTLKQLQSILGLLNFARNFIPDFTELIAPLYALIPKSTKNYVPWQIEHSTTLETLITKLNGAEYLQGRKGDKTLIMKVNASYTTGYIRYYNEGEKKPISYVSIVFSKTELKFTELEKLLTTVHKGLLKALDLSMGQNIHVYSPIVSMQNIQKTPQTAKKALASRWLSWLSYLEDPRIRFFYDPQMPALKDLPAVDTGKDNKKHPSNFQHIFYTDGSAITSPTKEGHLNAGMGIVYFINKDGNLQKQQEWSISLGNHTAQFAEIAAFEFALKKCLPLGGNILVVTDSNYVAKAYNEELDVWASNGFVNNRKKPLKHISKWKSVADLKRLRPDVVVTHEPGHQKLDSSPHAYGNNLADQLATQASFKVHAGKRTADGSEFEKRTADGSEFESPKKKAKVE

SEQ ID NO: 730 - protein, 2173 aa, synthetic construct
MPAAKRVKLDGGDKKYSIGLDIGTNSVGWAVITDEYKVPSKKFKVLGNTDRHSIKKNLIGALLFDSGETAEATRLKRTARRRYTRRKNRICYLQEIFSNEMAKVDDSFFHRLEESFLVEEDKKHERHPIFGNIVDEVAYHEKYPTIYHLRKKLVDSTDKADLRLIYLALAHMIKFRGHFLIEGDLNPDNSDVDKLFIQLVQTYNQLFEENPINASGVDAKAILSARLSKSRRLENLIAQLPGEKKNGLFGNLIALSLGLTPNFKSNFDLAEDAKLQLSKDTYDDDLDNLLAQIGDQYADLFLAAKNLSDAILLSDILRVNTEITKAPLSASMIKRYDEHHQDLTLLKALVRQQLPEKYKEIFFDQSKNGYAGYIDGGASQEEFYKFIKPILEKMDGTEELLVKLNREDLLRKQRTFDNGSIPHQIHLGELHAILRRQEDFYPFLKDNREKIEKILTFRIPYYVGPLARGNSRFAWMTRKSEETITPWNFEEVVDKGASAQSFIERMTNFDKNLPNEKVLPKHSLLYEYFTVYNELTKVKYVTEGMRKPAFLSGEQKKAIVDLLFKTNRKVTVKQLKEDYFKKIECFDSVEISGVEDRFNASLGTYHDLLKIIKDKDFLDNEENEDILEDIVLTLTLFEDREMIEERLKTYAHLFDDKVMKQLKRRRYTGWGRLSRKLINGIRDKQSGKTILDFLKSDGFANRNFMQLIHDDSLTFKEDIQKAQVSGQGDSLHEHIANLAGSPAIKKGILQTVKVVDELVKVMGRHKPENIVIEMARENQTTQKGQKNSRERMKRIEEGIKELGSQILKEHPVENTQLQNEKLYLYYLQNGRDMYVDQELDINRLSDYDVDHIVPQSFLKDDSIDNKVLTRSDKARGKSDNVPSEEVVKKMKNYWRQLLNAKLITQRKFDNLTKAERGGLSELDKAGFIKRQLVETRQITKHVAQILDSRMNTKYDENDKLIREVKVITLKSKLVSDFRKDFQFYKVREINNYHHAHDAYLNAVVGTALIKKYPKLESEFVYGDYKVYDVRKMIAKSEQEIGKATAKYFFYSNIMNFFKTEITLANGEIRKRPLIETNGETGEIVWDKGRDFATVRKVLSMPQVNIVKKTEVQTGGFSKESILPKRNSDKLIARKKDWDPKKYGGFDSPTVAYSVLVVAKVEKGKSKKLKSVKELLGITIMERSSFEKNPIDFLEAKGYKEVKKDLIIKLPKYSLFELENGRKRMLASAGELQKGNELALPSKYVNFLYLASHYEKLKGSPEDNEQKQLFVEQHKHYLDEIIEQISEFSKRVILADANLDKVLSAYNKHRDKPIREQAENIIHLFTLTNLGAPAAFKYFDTTIDRKRYTSTKEVLDATLIHQSITGLYETRIDLSQLGGDGGGSSGGSEAAAKGGMDLLKPLTVERKGVKIKGYWNSQADITCVPKDLLQGEEPVRQQNVTTIHGTQEGDVYYVNLKIDGRRINTEVIGTTLDYAIITPGDVPWILKKPLELTIKLDLEEQQGTLLNNSILSKKGKEELKQLFEKYSALWQSWENQVGHRRIRPHKIATGTVKPTPQKQYHINPKAKPDIQIVINDLLKQGVLIQKESTMNTPVYPVPKPNGRWRMVLDYRAVNKVTPLIAVQNQHSYGILGSLFKGRYKTTIDLSNGFWAHPIVPEDYWITAFTWQGKQYCWTVLPQGFLNSPGLFTGDVVDLLQGIPNVEVYVDDVYISHDSEKEHLEYLDILFNRLKEAGYIISLKKSNIANSIVDFLGFQITNEGRGLTDTFKEKLENITAPTTLKQLQSILGLLNFARNFIPDFTELIAPLYALIPKSTKNYVPWQIEHSTTLETLITKLNGAEYLQGRKGDKTLIMKVNASYTTGYIRYYNEGEKKPISYVSIVFSKTELKFTELEKLLTTVHKGLLKALDLSMGQNIHVYSPIVSMQNIQKTPQTAKKALASRWLSWLSYLEDPRIRFFYDPQMPALKDLPAVDTGKDNKKHPSNFQHIFYTDGSAITSPTKEGHLNAGMGIVYFINKDGNLQKQQEWSISLGNHTAQFAEIAAFEFALKKCLPLGGNILVVTDSNYVAKAYNEELDVWASNGFVNNRKKPLKHISKWKSVADLKRLRPDVVVTHEPGHQKLDSSPHAYGNNLADQLATQASFKVHAGKRTADGSEFEKRTADGSEFESPKKKAKVE

SEQ ID NO: 731 - protein, 2171 aa, synthetic construct
MPAAKRVKLDGGDKKYSIGLDIGTNSVGWAVITDEYKVPSKKFKVLGNTDRHSIKKNLIGALLFDSGETAEATRLKRTARRRYTRRKNRICYLQEIFSNEMAKVDDSFFHRLEESFLVEEDKKHERHPIFGNIVDEVAYHEKYPTIYHLRKKLVDSTDKADLRLIYLALAHMIKFRGHFLIEGDLNPDNSDVDKLFIQLVQTYNQLFEENPINASGVDAKAILSARLSKSRRLENLIAQLPGEKKNGLFGNLIALSLGLTPNFKSNFDLAEDAKLQLSKDTYDDDLDNLLAQIGDQYADLFLAAKNLSDAILLSDILRVNTEITKAPLSASMIKRYDEHHQDLTLLKALVRQQLPEKYKEIFFDQSKNGYAGYIDGGASQEEFYKFIKPILEKMDGTEELLVKLNREDLLRKQRTFDNGSIPHQIHLGELHAILRRQEDFYPFLKDNREKIEKILTFRIPYYVGPLARGNSRFAWMTRKSEETITPWNFEEVVDKGASAQSFIERMTNFDKNLPNEKVLPKHSLLYEYFTVYNELTKVKYVTEGMRKPAFLSGEQKKAIVDLLFKTNRKVTVKQLKEDYFKKIECFDSVEISGVEDRFNASLGTYHDLLKIIKDKDFLDNEENEDILEDIVLTLTLFEDREMIEERLKTYAHLFDDKVMKQLKRRRYTGWGRLSRKLINGIRDKQSGKTILDFLKSDGFANRNFMQLIHDDSLTFKEDIQKAQVSGQGDSLHEHIANLAGSPAIKKGILQTVKVVDELVKVMGRHKPENIVIEMARENQTTQKGQKNSRERMKRIEEGIKELGSQILKEHPVENTQLQNEKLYLYYLQNGRDMYVDQELDINRLSDYDVDHIVPQSFLKDDSIDNKVLTRSDKARGKSDNVPSEEVVKKMKNYWRQLLNAKLITQRKFDNLTKAERGGLSELDKAGFIKRQLVETRQITKHVAQILDSRMNTKYDENDKLIREVKVITLKSKLVSDFRKDFQFYKVREINNYHHAHDAYLNAVVGTALIKKYPKLESEFVYGDYKVYDVRKMIAKSEQEIGKATAKYFFYSNIMNFFKTEITLANGEIRKRPLIETNGETGEIVWDKGRDFATVRKVLSMPQVNIVKKTEVQTGGFSKESILPKRNSDKLIARKKDWDPKKYGGFDSPTVAYSVLVVAKVEKGKSKKLKSVKELLGITIMERSSFEKNPIDFLEAKGYKEVKKDLIIKLPKYSLFELENGRKRMLASAGELQKGNELALPSKYVNFLYLASHYEKLKGSPEDNEQKQLFVEQHKHYLDEIIEQISEFSKRVILADANLDKVLSAYNKHRDKPIREQAENIIHLFTLTNLGAPAAFKYFDTTIDRKRYTSTKEVLDATLIHQSITGLYETRIDLSQLGGDGGGGSGGGPAPGGMDLLKPLTVERKGVKIKGYWNSQADITCVPKDLLQGEEPVRQQNVTTIHGTQEGDVYYVNLKIDGRRINTEVIGTTLDYAIITPGDVPWILKKPLELTIKLDLEEQQGTLLNNSILSKKGKEELKQLFEKYSALWQSWENQVGHRRIRPHKIATGTVKPTPQKQYHINPKAKPDIQIVINDLLKQGVLIQKESTMNTPVYPVPKPNGRWRMVLDYRAVNKVTPLIAVQNQHSYGILGSLFKGRYKTTIDLSNGFWAHPIVPEDYWITAFTWQGKQYCWTVLPQGFLNSPGLFTGDVVDLLQGIPNVEVYVDDVYISHDSEKEHLEYLDILFNRLKEAGYIISLKKSNIANSIVDFLGFQITNEGRGLTDTFKEKLENITAPTTLKQLQSILGLLNFARNFIPDFTELIAPLYALIPKSTKNYVPWQIEHSTTLETLITKLNGAEYLQGRKGDKTLIMKVNASYTTGYIRYYNEGEKKPISYVSIVFSKTELKFTELEKLLTTVHKGLLKALDLSMGQNIHVYSPIVSMQNIQKTPQTAKKALASRWLSWLSYLEDPRIRFFYDPQMPALKDLPAVDTGKDNKKHPSNFQHIFYTDGSAITSPTKEGHLNAGMGIVYFINKDGNLQKQQEWSISLGNHTAQFAEIAAFEFALKKCLPLGGNILVVTDSNYVAKAYNEELDVWASNGFVNNRKKPLKHISKWKSVADLKRLRPDVVVTHEPGHQKLDSSPHAYGNNLADQLATQASFKVHAGKRTADGSEFEKRTADGSEFESPKKKAKVE

SEQ ID NO: 732 - protein, 2173 aa, synthetic construct
MPAAKRVKLDGGDKKYSIGLDIGTNSVGWAVITDEYKVPSKKFKVLGNTDRHSIKKNLIGALLFDSGETAEATRLKRTARRRYTRRKNRICYLQEIFSNEMAKVDDSFFHRLEESFLVEEDKKHERHPIFGNIVDEVAYHEKYPTIYHLRKKLVDSTDKADLRLIYLALAHMIKFRGHFLIEGDLNPDNSDVDKLFIQLVQTYNQLFEENPINASGVDAKAILSARLSKSRRLENLIAQLPGEKKNGLFGNLIALSLGLTPNFKSNFDLAEDAKLQLSKDTYDDDLDNLLAQIGDQYADLFLAAKNLSDAILLSDILRVNTEITKAPLSASMIKRYDEHHQDLTLLKALVRQQLPEKYKEIFFDQSKNGYAGYIDGGASQEEFYKFIKPILEKMDGTEELLVKLNREDLLRKQRTFDNGSIPHQIHLGELHAILRRQEDFYPFLKDNREKIEKILTFRIPYYVGPLARGNSRFAWMTRKSEETITPWNFEEVVDKGASAQSFIERMTNFDKNLPNEKVLPKHSLLYEYFTVYNELTKVKYVTEGMRKPAFLSGEQKKAIVDLLFKTNRKVTVKQLKEDYFKKIECFDSVEISGVEDRFNASLGTYHDLLKIIKDKDFLDNEENEDILEDIVLTLTLFEDREMIEERLKTYAHLFDDKVMKQLKRRRYTGWGRLSRKLINGIRDKQSGKTILDFLKSDGFANRNFMQLIHDDSLTFKEDIQKAQVSGQGDSLHEHIANLAGSPAIKKGILQTVKVVDELVKVMGRHKPENIVIEMARENQTTQKGQKNSRERMKRIEEGIKELGSQILKEHPVENTQLQNEKLYLYYLQNGRDMYVDQELDINRLSDYDVDHIVPQSFLKDDSIDNKVLTRSDKARGKSDNVPSEEVVKKMKNYWRQLLNAKLITQRKFDNLTKAERGGLSELDKAGFIKRQLVETRQITKHVAQILDSRMNTKYDENDKLIREVKVITLKSKLVSDFRKDFQFYKVREINNYHHAHDAYLNAVVGTALIKKYPKLESEFVYGDYKVYDVRKMIAKSEQEIGKATAKYFFYSNIMNFFKTEITLANGEIRKRPLIETNGETGEIVWDKGRDFATVRKVLSMPQVNIVKKTEVQTGGFSKESILPKRNSDKLIARKKDWDPKKYGGFDSPTVAYSVLVVAKVEKGKSKKLKSVKELLGITIMERSSFEKNPIDFLEAKGYKEVKKDLIIKLPKYSLFELENGRKRMLASAGELQKGNELALPSKYVNFLYLASHYEKLKGSPEDNEQKQLFVEQHKHYLDEIIEQISEFSKRVILADANLDKVLSAYNKHRDKPIREQAENIIHLFTLTNLGAPAAFKYFDTTIDRKRYTSTKEVLDATLIHQSITGLYETRIDLSQLGGDGGGGGEAAAKPAPGGMDLLKPLTVERKGVKIKGYWNSQADITCVPKDLLQGEEPVRQQNVTTIHGTQEGDVYYVNLKIDGRRINTEVIGTTLDYAIITPGDVPWILKKPLELTIKLDLEEQQGTLLNNSILSKKGKEELKQLFEKYSALWQSWENQVGHRRIRPHKIATGTVKPTPQKQYHINPKAKPDIQIVINDLLKQGVLIQKESTMNTPVYPVPKPNGRWRMVLDYRAVNKVTPLIAVQNQHSYGILGSLFKGRYKTTIDLSNGFWAHPIVPEDYWITAFTWQGKQYCWTVLPQGFLNSPGLFTGDVVDLLQGIPNVEVYVDDVYISHDSEKEHLEYLDILFNRLKEAGYIISLKKSNIANSIVDFLGFQITNEGRGLTDTFKEKLENITAPTTLKQLQSILGLLNFARNFIPDFTELIAPLYALIPKSTKNYVPWQIEHSTTLETLITKLNGAEYLQGRKGDKTLIMKVNASYTTGYIRYYNEGEKKPISYVSIVFSKTELKFTELEKLLTTVHKGLLKALDLSMGQNIHVYSPIVSMQNIQKTPQTAKKALASRWLSWLSYLEDPRIRFFYDPQMPALKDLPAVDTGKDNKKHPSNFQHIFYTDGSAITSPTKEGHLNAGMGIVYFINKDGNLQKQQEWSISLGNHTAQFAEIAAFEFALKKCLPLGGNILVVTDSNYVAKAYNEELDVWASNGFVNNRKKPLKHISKWKSVADLKRLRPDVVVTHEPGHQKLDSSPHAYGNNLADQLATQASFKVHAGKRTADGSEFEKRTADGSEFESPKKKAKVE

SEQ ID NO: 733 - protein, 2167 aa, synthetic construct
MPAAKRVKLDGGDKKYSIGLDIGTNSVGWAVITDEYKVPSKKFKVLGNTDRHSIKKNLIGALLFDSGETAEATRLKRTARRRYTRRKNRICYLQEIFSNEMAKVDDSFFHRLEESFLVEEDKKHERHPIFGNIVDEVAYHEKYPTIYHLRKKLVDSTDKADLRLIYLALAHMIKFRGHFLIEGDLNPDNSDVDKLFIQLVQTYNQLFEENPINASGVDAKAILSARLSKSRRLENLIAQLPGEKKNGLFGNLIALSLGLTPNFKSNFDLAEDAKLQLSKDTYDDDLDNLLAQIGDQYADLFLAAKNLSDAILLSDILRVNTEITKAPLSASMIKRYDEHHQDLTLLKALVRQQLPEKYKEIFFDQSKNGYAGYIDGGASQEEFYKFIKPILEKMDGTEELLVKLNREDLLRKQRTFDNGSIPHQIHLGELHAILRRQEDFYPFLKDNREKIEKILTFRIPYYVGPLARGNSRFAWMTRKSEETITPWNFEEVVDKGASAQSFIERMTNFDKNLPNEKVLPKHSLLYEYFTVYNELTKVKYVTEGMRKPAFLSGEQKKAIVDLLFKTNRKVTVKQLKEDYFKKIECFDSVEISGVEDRFNASLGTYHDLLKIIKDKDFLDNEENEDILEDIVLTLTLFEDREMIEERLKTYAHLFDDKVMKQLKRRRYTGWGRLSRKLINGIRDKQSGKTILDFLKSDGFANRNFMQLIHDDSLTFKEDIQKAQVSGQGDSLHEHIANLAGSPAIKKGILQTVKVVDELVKVMGRHKPENIVIEMARENQTTQKGQKNSRERMKRIEEGIKELGSQILKEHPVENTQLQNEKLYLYYLQNGRDMYVDQELDINRLSDYDVDHIVPQSFLKDDSIDNKVLTRSDKARGKSDNVPSEEVVKKMKNYWRQLLNAKLITQRKFDNLTKAERGGLSELDKAGFIKRQLVETRQITKHVAQILDSRMNTKYDENDKLIREVKVITLKSKLVSDFRKDFQFYKVREINNYHHAHDAYLNAVVGTALIKKYPKLESEFVYGDYKVYDVRKMIAKSEQEIGKATAKYFFYSNIMNFFKTEITLANGEIRKRPLIETNGETGEIVWDKGRDFATVRKVLSMPQVNIVKKTEVQTGGFSKESILPKRNSDKLIARKKDWDPKKYGGFDSPTVAYSVLVVAKVEKGKSKKLKSVKELLGITIMERSSFEKNPIDFLEAKGYKEVKKDLIIKLPKYSLFELENGRKRMLASAGELQKGNELALPSKYVNFLYLASHYEKLKGSPEDNEQKQLFVEQHKHYLDEIIEQISEFSKRVILADANLDKVLSAYNKHRDKPIREQAENIIHLFTLTNLGAPAAFKYFDTTIDRKRYTSTKEVLDATLIHQSITGLYETRIDLSQLGGDGGGGGGGGGMDLLKPLTVERKGVKIKGYWNSQADITCVPKDLLQGEEPVRQQNVTTIHGTQEGDVYYVNLKIDGRRINTEVIGTTLDYAIITPGDVPWILKKPLELTIKLDLEEQQGTLLNNSILSKKGKEELKQLFEKYSALWQSWENQVGHRRIRPHKIATGTVKPTPQKQYHINPKAKPDIQIVINDLLKQGVLIQKESTMNTPVYPVPKPNGRWRMVLDYRAVNKVTPLIAVQNQHSYGILGSLFKGRYKTTIDLSNGFWAHPIVPEDYWITAFTWQGKQYCWTVLPQGFLNSPGLFTGDVVDLLQGIPNVEVYVDDVYISHDSEKEHLEYLDILFNRLKEAGYIISLKKSNIANSIVDFLGFQITNEGRGLTDTFKEKLENITAPTTLKQLQSILGLLNFARNFIPDFTELIAPLYALIPKSTKNYVPWQIEHSTTLETLITKLNGAEYLQGRKGDKTLIMKVNASYTTGYIRYYNEGEKKPISYVSIVFSKTELKFTELEKLLTTVHKGLLKALDLSMGQNIHVYSPIVSMQNIQKTPQTAKKALASRWLSWLSYLEDPRIRFFYDPQMPALKDLPAVDTGKDNKKHPSNFQHIFYTDGSAITSPTKEGHLNAGMGIVYFINKDGNLQKQQEWSISLGNHTAQFAEIAAFEFALKKCLPLGGNILVVTDSNYVAKAYNEELDVWASNGFVNNRKKPLKHISKWKSVADLKRLRPDVVVTHEPGHQKLDSSPHAYGNNLADQLATQASFKVHAGKRTADGSEFEKRTADGSEFESPKKKAKVE

SEQ ID NO: 734 - protein, 2165 aa, synthetic construct
MPAAKRVKLDGGDKKYSIGLDIGTNSVGWAVITDEYKVPSKKFKVLGNTDRHSIKKNLIGALLFDSGETAEATRLKRTARRRYTRRKNRICYLQEIFSNEMAKVDDSFFHRLEESFLVEEDKKHERHPIFGNIVDEVAYHEKYPTIYHLRKKLVDSTDKADLRLIYLALAHMIKFRGHFLIEGDLNPDNSDVDKLFIQLVQTYNQLFEENPINASGVDAKAILSARLSKSRRLENLIAQLPGEKKNGLFGNLIALSLGLTPNFKSNFDLAEDAKLQLSKDTYDDDLDNLLAQIGDQYADLFLAAKNLSDAILLSDILRVNTEITKAPLSASMIKRYDEHHQDLTLLKALVRQQLPEKYKEIFFDQSKNGYAGYIDGGASQEEFYKFIKPILEKMDGTEELLVKLNREDLLRKQRTFDNGSIPHQIHLGELHAILRRQEDFYPFLKDNREKIEKILTFRIPYYVGPLARGNSRFAWMTRKSEETITPWNFEEVVDKGASAQSFIERMTNFDKNLPNEKVLPKHSLLYEYFTVYNELTKVKYVTEGMRKPAFLSGEQKKAIVDLLFKTNRKVTVKQLKEDYFKKIECFDSVEISGVEDRFNASLGTYHDLLKIIKDKDFLDNEENEDILEDIVLTLTLFEDREMIEERLKTYAHLFDDKVMKQLKRRRYTGWGRLSRKLINGIRDKQSGKTILDFLKSDGFANRNFMQLIHDDSLTFKEDIQKAQVSGQGDSLHEHIANLAGSPAIKKGILQTVKVVDELVKVMGRHKPENIVIEMARENQTTQKGQKNSRERMKRIEEGIKELGSQILKEHPVENTQLQNEKLYLYYLQNGRDMYVDQELDINRLSDYDVDHIVPQSFLKDDSIDNKVLTRSDKARGKSDNVPSEEVVKKMKNYWRQLLNAKLITQRKFDNLTKAERGGLSELDKAGFIKRQLVETRQITKHVAQILDSRMNTKYDENDKLIREVKVITLKSKLVSDFRKDFQFYKVREINNYHHAHDAYLNAVVGTALIKKYPKLESEFVYGDYKVYDVRKMIAKSEQEIGKATAKYFFYSNIMNFFKTEITLANGEIRKRPLIETNGETGEIVWDKGRDFATVRKVLSMPQVNIVKKTEVQTGGFSKESILPKRNSDKLIARKKDWDPKKYGGFDSPTVAYSVLVVAKVEKGKSKKLKSVKELLGITIMERSSFEKNPIDFLEAKGYKEVKKDLIIKLPKYSLFELENGRKRMLASAGELQKGNELALPSKYVNFLYLASHYEKLKGSPEDNEQKQLFVEQHKHYLDEIIEQISEFSKRVILADANLDKVLSAYNKHRDKPIREQAENIIHLFTLTNLGAPAAFKYFDTTIDRKRYTSTKEVLDATLIHQSITGLYETRIDLSQLGGDGGGGGGGMDLLKPLTVERKGVKIKGYWNSQADITCVPKDLLQGEEPVRQQNVTTIHGTQEGDVYYVNLKIDGRRINTEVIGTTLDYAIITPGDVPWILKKPLELTIKLDLEEQQGTLLNNSILSKKGKEELKQLFEKYSALWQSWENQVGHRRIRPHKIATGTVKPTPQKQYHINPKAKPDIQIVINDLLKQGVLIQKESTMNTPVYPVPKPNGRWRMVLDYRAVNKVTPLIAVQNQHSYGILGSLFKGRYKTTIDLSNGFWAHPIVPEDYWITAFTWQGKQYCWTVLPQGFLNSPGLFTGDVVDLLQGIPNVEVYVDDVYISHDSEKEHLEYLDILFNRLKEAGYIISLKKSNIANSIVDFLGFQITNEGRGLTDTFKEKLENITAPTTLKQLQSILGLLNFARNFIPDFTELIAPLYALIPKSTKNYVPWQIEHSTTLETLITKLNGAEYLQGRKGDKTLIMKVNASYTTGYIRYYNEGEKKPISYVSIVFSKTELKFTELEKLLTTVHKGLLKALDLSMGQNIHVYSPIVSMQNIQKTPQTAKKALASRWLSWLSYLEDPRIRFFYDPQMPALKDLPAVDTGKDNKKHPSNFQHIFYTDGSAITSPTKEGHLNAGMGIVYFINKDGNLQKQQEWSISLGNHTAQFAEIAAFEFALKKCLPLGGNILVVTDSNYVAKAYNEELDVWASNGFVNNRKKPLKHISKWKSVADLKRLRPDVVVTHEPGHQKLDSSPHAYGNNLADQLATQASFKVHAGKRTADGSEFEKRTADGSEFESPKKKAKVE

SEQ ID NO: 735 - protein, 2167 aa, synthetic construct
MPAAKRVKLDGGDKKYSIGLDIGTNSVGWAVITDEYKVPSKKFKVLGNTDRHSIKKNLIGALLFDSGETAEATRLKRTARRRYTRRKNRICYLQEIFSNEMAKVDDSFFHRLEESFLVEEDKKHERHPIFGNIVDEVAYHEKYPTIYHLRKKLVDSTDKADLRLIYLALAHMIKFRGHFLIEGDLNPDNSDVDKLFIQLVQTYNQLFEENPINASGVDAKAILSARLSKSRRLENLIAQLPGEKKNGLFGNLIALSLGLTPNFKSNFDLAEDAKLQLSKDTYDDDLDNLLAQIGDQYADLFLAAKNLSDAILLSDILRVNTEITKAPLSASMIKRYDEHHQDLTLLKALVRQQLPEKYKEIFFDQSKNGYAGYIDGGASQEEFYKFIKPILEKMDGTEELLVKLNREDLLRKQRTFDNGSIPHQIHLGELHAILRRQEDFYPFLKDNREKIEKILTFRIPYYVGPLARGNSRFAWMTRKSEETITPWNFEEVVDKGASAQSFIERMTNFDKNLPNEKVLPKHSLLYEYFTVYNELTKVKYVTEGMRKPAFLSGEQKKAIVDLLFKTNRKVTVKQLKEDYFKKIECFDSVEISGVEDRFNASLGTYHDLLKIIKDKDFLDNEENEDILEDIVLTLTLFEDREMIEERLKTYAHLFDDKVMKQLKRRRYTGWGRLSRKLINGIRDKQSGKTILDFLKSDGFANRNFMQLIHDDSLTFKEDIQKAQVSGQGDSLHEHIANLAGSPAIKKGILQTVKVVDELVKVMGRHKPENIVIEMARENQTTQKGQKNSRERMKRIEEGIKELGSQILKEHPVENTQLQNEKLYLYYLQNGRDMYVDQELDINRLSDYDVDHIVPQSFLKDDSIDNKVLTRSDKARGKSDNVPSEEVVKKMKNYWRQLLNAKLITQRKFDNLTKAERGGLSELDKAGFIKRQLVETRQITKHVAQILDSRMNTKYDENDKLIREVKVITLKSKLVSDFRKDFQFYKVREINNYHHAHDAYLNAVVGTALIKKYPKLESEFVYGDYKVYDVRKMIAKSEQEIGKATAKYFFYSNIMNFFKTEITLANGEIRKRPLIETNGETGEIVWDKGRDFATVRKVLSMPQVNIVKKTEVQTGGFSKESILPKRNSDKLIARKKDWDPKKYGGFDSPTVAYSVLVVAKVEKGKSKKLKSVKELLGITIMERSSFEKNPIDFLEAKGYKEVKKDLIIKLPKYSLFELENGRKRMLASAGELQKGNELALPSKYVNFLYLASHYEKLKGSPEDNEQKQLFVEQHKHYLDEIIEQISEFSKRVILADANLDKVLSAYNKHRDKPIREQAENIIHLFTLTNLGAPAAFKYFDTTIDRKRYTSTKEVLDATLIHQSITGLYETRIDLSQLGGDGGPAPAPGGMDLLKPLTVERKGVKIKGYWNSQADITCVPKDLLQGEEPVRQQNVTTIHGTQEGDVYYVNLKIDGRRINTEVIGTTLDYAIITPGDVPWILKKPLELTIKLDLEEQQGTLLNNSILSKKGKEELKQLFEKYSALWQSWENQVGHRRIRPHKIATGTVKPTPQKQYHINPKAKPDIQIVINDLLKQGVLIQKESTMNTPVYPVPKPNGRWRMVLDYRAVNKVTPLIAVQNQHSYGILGSLFKGRYKTTIDLSNGFWAHPIVPEDYWITAFTWQGKQYCWTVLPQGFLNSPGLFTGDVVDLLQGIPNVEVYVDDVYISHDSEKEHLEYLDILFNRLKEAGYIISLKKSNIANSIVDFLGFQITNEGRGLTDTFKEKLENITAPTTLKQLQSILGLLNFARNFIPDFTELIAPLYALIPKSTKNYVPWQIEHSTTLETLITKLNGAEYLQGRKGDKTLIMKVNASYTTGYIRYYNEGEKKPISYVSIVFSKTELKFTELEKLLTTVHKGLLKALDLSMGQNIHVYSPIVSMQNIQKTPQTAKKALASRWLSWLSYLEDPRIRFFYDPQMPALKDLPAVDTGKDNKKHPSNFQHIFYTDGSAITSPTKEGHLNAGMGIVYFINKDGNLQKQQEWSISLGNHTAQFAEIAAFEFALKKCLPLGGNILVVTDSNYVAKAYNEELDVWASNGFVNNRKKPLKHISKWKSVADLKRLRPDVVVTHEPGHQKLDSSPHAYGNNLADQLATQASFKVHAGKRTADGSEFEKRTADGSEFESPKKKAKVE

SEQ ID NO: 736 - protein, 2171 aa, synthetic construct
MPAAKRVKLDGGDKKYSIGLDIGTNSVGWAVITDEYKVPSKKFKVLGNTDRHSIKKNLIGALLFDSGETAEATRLKRTARRRYTRRKNRICYLQEIFSNEMAKVDDSFFHRLEESFLVEEDKKHERHPIFGNIVDEVAYHEKYPTIYHLRKKLVDSTDKADLRLIYLALAHMIKFRGHFLIEGDLNPDNSDVDKLFIQLVQTYNQLFEENPINASGVDAKAILSARLSKSRRLENLIAQLPGEKKNGLFGNLIALSLGLTPNFKSNFDLAEDAKLQLSKDTYDDDLDNLLAQIGDQYADLFLAAKNLSDAILLSDILRVNTEITKAPLSASMIKRYDEHHQDLTLLKALVRQQLPEKYKEIFFDQSKNGYAGYIDGGASQEEFYKFIKPILEKMDGTEELLVKLNREDLLRKQRTFDNGSIPHQIHLGELHAILRRQEDFYPFLKDNREKIEKILTFRIPYYVGPLARGNSRFAWMTRKSEETITPWNFEEVVDKGASAQSFIERMTNFDKNLPNEKVLPKHSLLYEYFTVYNELTKVKYVTEGMRKPAFLSGEQKKAIVDLLFKTNRKVTVKQLKEDYFKKIECFDSVEISGVEDRFNASLGTYHDLLKIIKDKDFLDNEENEDILEDIVLTLTLFEDREMIEERLKTYAHLFDDKVMKQLKRRRYTGWGRLSRKLINGIRDKQSGKTILDFLKSDGFANRNFMQLIHDDSLTFKEDIQKAQVSGQGDSLHEHIANLAGSPAIKKGILQTVKVVDELVKVMGRHKPENIVIEMARENQTTQKGQKNSRERMKRIEEGIKELGSQILKEHPVENTQLQNEKLYLYYLQNGRDMYVDQELDINRLSDYDVDHIVPQSFLKDDSIDNKVLTRSDKARGKSDNVPSEEVVKKMKNYWRQLLNAKLITQRKFDNLTKAERGGLSELDKAGFIKRQLVETRQITKHVAQILDSRMNTKYDENDKLIREVKVITLKSKLVSDFRKDFQFYKVREINNYHHAHDAYLNAVVGTALIKKYPKLESEFVYGDYKVYDVRKMIAKSEQEIGKATAKYFFYSNIMNFFKTEITLANGEIRKRPLIETNGETGEIVWDKGRDFATVRKVLSMPQVNIVKKTEVQTGGFSKESILPKRNSDKLIARKKDWDPKKYGGFDSPTVAYSVLVVAKVEKGKSKKLKSVKELLGITIMERSSFEKNPIDFLEAKGYKEVKKDLIIKLPKYSLFELENGRKRMLASAGELQKGNELALPSKYVNFLYLASHYEKLKGSPEDNEQKQLFVEQHKHYLDEIIEQISEFSKRVILADANLDKVLSAYNKHRDKPIREQAENIIHLFTLTNLGAPAAFKYFDTTIDRKRYTSTKEVLDATLIHQSITGLYETRIDLSQLGGDGGGSSGGGGGSGGMDLLKPLTVERKGVKIKGYWNSQADITCVPKDLLQGEEPVRQQNVTTIHGTQEGDVYYVNLKIDGRRINTEVIGTTLDYAIITPGDVPWILKKPLELTIKLDLEEQQGTLLNNSILSKKGKEELKQLFEKYSALWQSWENQVGHRRIRPHKIATGTVKPTPQKQYHINPKAKPDIQIVINDLLKQGVLIQKESTMNTPVYPVPKPNGRWRMVLDYRAVNKVTPLIAVQNQHSYGILGSLFKGRYKTTIDLSNGFWAHPIVPEDYWITAFTWQGKQYCWTVLPQGFLNSPGLFTGDVVDLLQGIPNVEVYVDDVYISHDSEKEHLEYLDILFNRLKEAGYIISLKKSNIANSIVDFLGFQITNEGRGLTDTFKEKLENITAPTTLKQLQSILGLLNFARNFIPDFTELIAPLYALIPKSTKNYVPWQIEHSTTLETLITKLNGAEYLQGRKGDKTLIMKVNASYTTGYIRYYNEGEKKPISYVSIVFSKTELKFTELEKLLTTVHKGLLKALDLSMGQNIHVYSPIVSMQNIQKTPQTAKKALASRWLSWLSYLEDPRIRFFYDPQMPALKDLPAVDTGKDNKKHPSNFQHIFYTDGSAITSPTKEGHLNAGMGIVYFINKDGNLQKQQEWSISLGNHTAQFAEIAAFEFALKKCLPLGGNILVVTDSNYVAKAYNEELDVWASNGFVNNRKKPLKHISKWKSVADLKRLRPDVVVTHEPGHQKLDSSPHAYGNNLADQLATQASFKVHAGKRTADGSEFEKRTADGSEFESPKKKAKVE

SEQ ID NO: 737 - protein, 2171 aa, synthetic construct
MPAAKRVKLDGGDKKYSIGLDIGTNSVGWAVITDEYKVPSKKFKVLGNTDRHSIKKNLIGALLFDSGETAEATRLKRTARRRYTRRKNRICYLQEIFSNEMAKVDDSFFHRLEESFLVEEDKKHERHPIFGNIVDEVAYHEKYPTIYHLRKKLVDSTDKADLRLIYLALAHMIKFRGHFLIEGDLNPDNSDVDKLFIQLVQTYNQLFEENPINASGVDAKAILSARLSKSRRLENLIAQLPGEKKNGLFGNLIALSLGLTPNFKSNFDLAEDAKLQLSKDTYDDDLDNLLAQIGDQYADLFLAAKNLSDAILLSDILRVNTEITKAPLSASMIKRYDEHHQDLTLLKALVRQQLPEKYKEIFFDQSKNGYAGYIDGGASQEEFYKFIKPILEKMDGTEELLVKLNREDLLRKQRTFDNGSIPHQIHLGELHAILRRQEDFYPFLKDNREKIEKILTFRIPYYVGPLARGNSRFAWMTRKSEETITPWNFEEVVDKGASAQSFIERMTNFDKNLPNEKVLPKHSLLYEYFTVYNELTKVKYVTEGMRKPAFLSGEQKKAIVDLLFKTNRKVTVKQLKEDYFKKIECFDSVEISGVEDRFNASLGTYHDLLKIIKDKDFLDNEENEDILEDIVLTLTLFEDREMIEERLKTYAHLFDDKVMKQLKRRRYTGWGRLSRKLINGIRDKQSGKTILDFLKSDGFANRNFMQLIHDDSLTFKEDIQKAQVSGQGDSLHEHIANLAGSPAIKKGILQTVKVVDELVKVMGRHKPENIVIEMARENQTTQKGQKNSRERMKRIEEGIKELGSQILKEHPVENTQLQNEKLYLYYLQNGRDMYVDQELDINRLSDYDVDHIVPQSFLKDDSIDNKVLTRSDKARGKSDNVPSEEVVKKMKNYWRQLLNAKLITQRKFDNLTKAERGGLSELDKAGFIKRQLVETRQITKHVAQILDSRMNTKYDENDKLIREVKVITLKSKLVSDFRKDFQFYKVREINNYHHAHDAYLNAVVGTALIKKYPKLESEFVYGDYKVYDVRKMIAKSEQEIGKATAKYFFYSNIMNFFKTEITLANGEIRKRPLIETNGETGEIVWDKGRDFATVRKVLSMPQVNIVKKTEVQTGGFSKESILPKRNSDKLIARKKDWDPKKYGGFDSPTVAYSVLVVAKVEKGKSKKLKSVKELLGITIMERSSFEKNPIDFLEAKGYKEVKKDLIIKLPKYSLFELENGRKRMLASAGELQKGNELALPSKYVNFLYLASHYEKLKGSPEDNEQKQLFVEQHKHYLDEIIEQISEFSKRVILADANLDKVLSAYNKHRDKPIREQAENIIHLFTLTNLGAPAAFKYFDTTIDRKRYTSTKEVLDATLIHQSITGLYETRIDLSQLGGDGGPAPGGSGSSGGMDLLKPLTVERKGVKIKGYWNSQADITCVPKDLLQGEEPVRQQNVTTIHGTQEGDVYYVNLKIDGRRINTEVIGTTLDYAIITPGDVPWILKKPLELTIKLDLEEQQGTLLNNSILSKKGKEELKQLFEKYSALWQSWENQVGHRRIRPHKIATGTVKPTPQKQYHINPKAKPDIQIVINDLLKQGVLIQKESTMNTPVYPVPKPNGRWRMVLDYRAVNKVTPLIAVQNQHSYGILGSLFKGRYKTTIDLSNGFWAHPIVPEDYWITAFTWQGKQYCWTVLPQGFLNSPGLFTGDVVDLLQGIPNVEVYVDDVYISHDSEKEHLEYLDILFNRLKEAGYIISLKKSNIANSIVDFLGFQITNEGRGLTDTFKEKLENITAPTTLKQLQSILGLLNFARNFIPDFTELIAPLYALIPKSTKNYVPWQIEHSTTLETLITKLNGAEYLQGRKGDKTLIMKVNASYTTGYIRYYNEGEKKPISYVSIVFSKTELKFTELEKLLTTVHKGLLKALDLSMGQNIHVYSPIVSMQNIQKTPQTAKKALASRWLSWLSYLEDPRIRFFYDPQMPALKDLPAVDTGKDNKKHPSNFQHIFYTDGSAITSPTKEGHLNAGMGIVYFINKDGNLQKQQEWSISLGNHTAQFAEIAAFEFALKKCLPLGGNILVVTDSNYVAKAYNEELDVWASNGFVNNRKKPLKHISKWKSVADLKRLRPDVVVTHEPGHQKLDSSPHAYGNNLADQLATQASFKVHAGKRTADGSEFEKRTADGSEFESPKKKAKVE

SEQ ID NO: 738 - protein, 2185 aa, synthetic construct
MPAAKRVKLDGGDKKYSIGLDIGTNSVGWAVITDEYKVPSKKFKVLGNTDRHSIKKNLIGALLFDSGETAEATRLKRTARRRYTRRKNRICYLQEIFSNEMAKVDDSFFHRLEESFLVEEDKKHERHPIFGNIVDEVAYHEKYPTIYHLRKKLVDSTDKADLRLIYLALAHMIKFRGHFLIEGDLNPDNSDVDKLFIQLVQTYNQLFEENPINASGVDAKAILSARLSKSRRLENLIAQLPGEKKNGLFGNLIALSLGLTPNFKSNFDLAEDAKLQLSKDTYDDDLDNLLAQIGDQYADLFLAAKNLSDAILLSDILRVNTEITKAPLSASMIKRYDEHHQDLTLLKALVRQQLPEKYKEIFFDQSKNGYAGYIDGGASQEEFYKFIKPILEKMDGTEELLVKLNREDLLRKQRTFDNGSIPHQIHLGELHAILRRQEDFYPFLKDNREKIEKILTFRIPYYVGPLARGNSRFAWMTRKSEETITPWNFEEVVDKGASAQSFIERMTNFDKNLPNEKVLPKHSLLYEYFTVYNELTKVKYVTEGMRKPAFLSGEQKKAIVDLLFKTNRKVTVKQLKEDYFKKIECFDSVEISGVEDRFNASLGTYHDLLKIIKDKDFLDNEENEDILEDIVLTLTLFEDREMIEERLKTYAHLFDDKVMKQLKRRRYTGWGRLSRKLINGIRDKQSGKTILDFLKSDGFANRNFMQLIHDDSLTFKEDIQKAQVSGQGDSLHEHIANLAGSPAIKKGILQTVKVVDELVKVMGRHKPENIVIEMARENQTTQKGQKNSRERMKRIEEGIKELGSQILKEHPVENTQLQNEKLYLYYLQNGRDMYVDQELDINRLSDYDVDHIVPQSFLKDDSIDNKVLTRSDKARGKSDNVPSEEVVKKMKNYWRQLLNAKLITQRKFDNLTKAERGGLSELDKAGFIKRQLVETRQITKHVAQILDSRMNTKYDENDKLIREVKVITLKSKLVSDFRKDFQFYKVREINNYHHAHDAYLNAVVGTALIKKYPKLESEFVYGDYKVYDVRKMIAKSEQEIGKATAKYFFYSNIMNFFKTEITLANGEIRKRPLIETNGETGEIVWDKGRDFATVRKVLSMPQVNIVKKTEVQTGGFSKESILPKRNSDKLIARKKDWDPKKYGGFDSPTVAYSVLVVAKVEKGKSKKLKSVKELLGITIMERSSFEKNPIDFLEAKGYKEVKKDLIIKLPKYSLFELENGRKRMLASAGELQKGNELALPSKYVNFLYLASHYEKLKGSPEDNEQKQLFVEQHKHYLDEIIEQISEFSKRVILADANLDKVLSAYNKHRDKPIREQAENIIHLFTLTNLGAPAAFKYFDTTIDRKRYTSTKEVLDATLIHQSITGLYETRIDLSQLGGDGGGGGGSGGGGSGGGGSGGGGSGGMNPLQLLQPLPAEVKGTKLLAHWNSGATITCIPESFLEDEQPIKQTLIKTIHGEKQQNVYYLTFKVKGRKVEAEVIASPYEYILLSPTDVPWLTQQPLQLTILVPLQEYQDRILNKTALPEEQKQQLKALFTKYDNLWQHWENQVGHRKIRPHNIATGDYPPRPQKQYPINPKAKPSIQIVIDDLLKQGVLTPQNSTMNTPVYPVPKPDGRWRMVLDYREVNKTIPLTAAQNQHSAGILATIVRQKYKTTLDLANGFWAHPITPDSYWLTAFTWQGKQYCWTRLPQGFLNSPALFNADAVDLLKEVPNVQVYVDDIYLSHDNPHEHIQQLEKVFQILLQAGYVVSLKKSEIGQRTVEFLGFNITKEGRGLTDTFKTKLLNVTPPKDLKQLQSILGKLNFARNFIPNFAELVQTLYNLIASSPGKYIEWTEDNTKQLNKVIEALNTASNLEERLPDQRLVIKVNTSPSAGYVRYYNESGKKPIMYLNYVFSKAELKFSMLEKLLTTMHKALIKAMDLAMGQEILVYSPIVSMTKIQKTPLPERKALPIRWITWMTYLEDPRIQFHYDKTLPELKHIPDVYTSSIPPLKHPSQYEGVFCTDGSAIKSPDPTKSNNAGMGIVHAIYNPEYKILNQWSIPLGHHTAQMAEIAAVEFACKKALKVPGPVLVITDSFYVAESANKELPYWKSNGFVNNKKEPLKHISKWKSIAECLSIKPDITIQHEKGHQPINTSIHTEGNALADKLATQGSYVVNAGKRTADGSEFEKRTADGSEFESPKKKAKVE

SEQ ID NO: 739 - protein, 2175 aa, synthetic construct
MPAAKRVKLDGGDKKYSIGLDIGTNSVGWAVITDEYKVPSKKFKVLGNTDRHSIKKNLIGALLFDSGETAEATRLKRTARRRYTRRKNRICYLQEIFSNEMAKVDDSFFHRLEESFLVEEDKKHERHPIFGNIVDEVAYHEKYPTIYHLRKKLVDSTDKADLRLIYLALAHMIKFRGHFLIEGDLNPDNSDVDKLFIQLVQTYNQLFEENPINASGVDAKAILSARLSKSRRLENLIAQLPGEKKNGLFGNLIALSLGLTPNFKSNFDLAEDAKLQLSKDTYDDDLDNLLAQIGDQYADLFLAAKNLSDAILLSDILRVNTEITKAPLSASMIKRYDEHHQDLTLLKALVRQQLPEKYKEIFFDQSKNGYAGYIDGGASQEEFYKFIKPILEKMDGTEELLVKLNREDLLRKQRTFDNGSIPHQIHLGELHAILRRQEDFYPFLKDNREKIEKILTFRIPYYVGPLARGNSRFAWMTRKSEETITPWNFEEVVDKGASAQSFIERMTNFDKNLPNEKVLPKHSLLYEYFTVYNELTKVKYVTEGMRKPAFLSGEQKKAIVDLLFKTNRKVTVKQLKEDYFKKIECFDSVEISGVEDRFNASLGTYHDLLKIIKDKDFLDNEENEDILEDIVLTLTLFEDREMIEERLKTYAHLFDDKVMKQLKRRRYTGWGRLSRKLINGIRDKQSGKTILDFLKSDGFANRNFMQLIHDDSLTFKEDIQKAQVSGQGDSLHEHIANLAGSPAIKKGILQTVKVVDELVKVMGRHKPENIVIEMARENQTTQKGQKNSRERMKRIEEGIKELGSQILKEHPVENTQLQNEKLYLYYLQNGRDMYVDQELDINRLSDYDVDHIVPQSFLKDDSIDNKVLTRSDKARGKSDNVPSEEVVKKMKNYWRQLLNAKLITQRKFDNLTKAERGGLSELDKAGFIKRQLVETRQITKHVAQILDSRMNTKYDENDKLIREVKVITLKSKLVSDFRKDFQFYKVREINNYHHAHDAYLNAVVGTALIKKYPKLESEFVYGDYKVYDVRKMIAKSEQEIGKATAKYFFYSNIMNFFKTEITLANGEIRKRPLIETNGETGEIVWDKGRDFATVRKVLSMPQVNIVKKTEVQTGGFSKESILPKRNSDKLIARKKDWDPKKYGGFDSPTVAYSVLVVAKVEKGKSKKLKSVKELLGITIMERSSFEKNPIDFLEAKGYKEVKKDLIIKLPKYSLFELENGRKRMLASAGELQKGNELALPSKYVNFLYLASHYEKLKGSPEDNEQKQLFVEQHKHYLDEIIEQISEFSKRVILADANLDKVLSAYNKHRDKPIREQAENIIHLFTLTNLGAPAAFKYFDTTIDRKRYTSTKEVLDATLIHQSITGLYETRIDLSQLGGDGGGGGGSGGGGSGGMNPLQLLQPLPAEVKGTKLLAHWNSGATITCIPESFLEDEQPIKQTLIKTIHGEKQQNVYYLTFKVKGRKVEAEVIASPYEYILLSPTDVPWLTQQPLQLTILVPLQEYQDRILNKTALPEEQKQQLKALFTKYDNLWQHWENQVGHRKIRPHNIATGDYPPRPQKQYPINPKAKPSIQIVIDDLLKQGVLTPQNSTMNTPVYPVPKPDGRWRMVLDYREVNKTIPLTAAQNQHSAGILATIVRQKYKTTLDLANGFWAHPITPDSYWLTAFTWQGKQYCWTRLPQGFLNSPALFNADAVDLLKEVPNVQVYVDDIYLSHDNPHEHIQQLEKVFQILLQAGYVVSLKKSEIGQRTVEFLGFNITKEGRGLTDTFKTKLLNVTPPKDLKQLQSILGKLNFARNFIPNFAELVQTLYNLIASSPGKYIEWTEDNTKQLNKVIEALNTASNLEERLPDQRLVIKVNTSPSAGYVRYYNESGKKPIMYLNYVFSKAELKFSMLEKLLTTMHKALIKAMDLAMGQEILVYSPIVSMTKIQKTPLPERKALPIRWITWMTYLEDPRIQFHYDKTLPELKHIPDVYTSSIPPLKHPSQYEGVFCTDGSAIKSPDPTKSNNAGMGIVHAIYNPEYKILNQWSIPLGHHTAQMAEIAAVEFACKKALKVPGPVLVITDSFYVAESANKELPYWKSNGFVNNKKEPLKHISKWKSIAECLSIKPDITIQHEKGHQPINTSIHTEGNALADKLATQGSYVVNAGKRTADGSEFEKRTADGSEFESPKKKAKVE

SEQ ID NO: 740 - protein, 2176 aa, synthetic construct
MPAAKRVKLDGGDKKYSIGLDIGTNSVGWAVITDEYKVPSKKFKVLGNTDRHSIKKNLIGALLFDSGETAEATRLKRTARRRYTRRKNRICYLQEIFSNEMAKVDDSFFHRLEESFLVEEDKKHERHPIFGNIVDEVAYHEKYPTIYHLRKKLVDSTDKADLRLIYLALAHMIKFRGHFLIEGDLNPDNSDVDKLFIQLVQTYNQLFEENPINASGVDAKAILSARLSKSRRLENLIAQLPGEKKNGLFGNLIALSLGLTPNFKSNFDLAEDAKLQLSKDTYDDDLDNLLAQIGDQYADLFLAAKNLSDAILLSDILRVNTEITKAPLSASMIKRYDEHHQDLTLLKALVRQQLPEKYKEIFFDQSKNGYAGYIDGGASQEEFYKFIKPILEKMDGTEELLVKLNREDLLRKQRTFDNGSIPHQIHLGELHAILRRQEDFYPFLKDNREKIEKILTFRIPYYVGPLARGNSRFAWMTRKSEETITPWNFEEVVDKGASAQSFIERMTNFDKNLPNEKVLPKHSLLYEYFTVYNELTKVKYVTEGMRKPAFLSGEQKKAIVDLLFKTNRKVTVKQLKEDYFKKIECFDSVEISGVEDRFNASLGTYHDLLKIIKDKDFLDNEENEDILEDIVLTLTLFEDREMIEERLKTYAHLFDDKVMKQLKRRRYTGWGRLSRKLINGIRDKQSGKTILDFLKSDGFANRNFMQLIHDDSLTFKEDIQKAQVSGQGDSLHEHIANLAGSPAIKKGILQTVKVVDELVKVMGRHKPENIVIEMARENQTTQKGQKNSRERMKRIEEGIKELGSQILKEHPVENTQLQNEKLYLYYLQNGRDMYVDQELDINRLSDYDVDHIVPQSFLKDDSIDNKVLTRSDKARGKSDNVPSEEVVKKMKNYWRQLLNAKLITQRKFDNLTKAERGGLSELDKAGFIKRQLVETRQITKHVAQILDSRMNTKYDENDKLIREVKVITLKSKLVSDFRKDFQFYKVREINNYHHAHDAYLNAVVGTALIKKYPKLESEFVYGDYKVYDVRKMIAKSEQEIGKATAKYFFYSNIMNFFKTEITLANGEIRKRPLIETNGETGEIVWDKGRDFATVRKVLSMPQVNIVKKTEVQTGGFSKESILPKRNSDKLIARKKDWDPKKYGGFDSPTVAYSVLVVAKVEKGKSKKLKSVKELLGITIMERSSFEKNPIDFLEAKGYKEVKKDLIIKLPKYSLFELENGRKRMLASAGELQKGNELALPSKYVNFLYLASHYEKLKGSPEDNEQKQLFVEQHKHYLDEIIEQISEFSKRVILADANLDKVLSAYNKHRDKPIREQAENIIHLFTLTNLGAPAAFKYFDTTIDRKRYTSTKEVLDATLIHQSITGLYETRIDLSQLGGDGGGGGEAAAKGGSGGMNPLQLLQPLPAEVKGTKLLAHWNSGATITCIPESFLEDEQPIKQTLIKTIHGEKQQNVYYLTFKVKGRKVEAEVIASPYEYILLSPTDVPWLTQQPLQLTILVPLQEYQDRILNKTALPEEQKQQLKALFTKYDNLWQHWENQVGHRKIRPHNIATGDYPPRPQKQYPINPKAKPSIQIVIDDLLKQGVLTPQNSTMNTPVYPVPKPDGRWRMVLDYREVNKTIPLTAAQNQHSAGILATIVRQKYKTTLDLANGFWAHPITPDSYWLTAFTWQGKQYCWTRLPQGFLNSPALFNADAVDLLKEVPNVQVYVDDIYLSHDNPHEHIQQLEKVFQILLQAGYVVSLKKSEIGQRTVEFLGFNITKEGRGLTDTFKTKLLNVTPPKDLKQLQSILGKLNFARNFIPNFAELVQTLYNLIASSPGKYIEWTEDNTKQLNKVIEALNTASNLEERLPDQRLVIKVNTSPSAGYVRYYNESGKKPIMYLNYVFSKAELKFSMLEKLLTTMHKALIKAMDLAMGQEILVYSPIVSMTKIQKTPLPERKALPIRWITWMTYLEDPRIQFHYDKTLPELKHIPDVYTSSIPPLKHPSQYEGVFCTDGSAIKSPDPTKSNNAGMGIVHAIYNPEYKILNQWSIPLGHHTAQMAEIAAVEFACKKALKVPGPVLVITDSFYVAESANKELPYWKSNGFVNNKKEPLKHISKWKSIAECLSIKPDITIQHEKGHQPINTSIHTEGNALADKLATQGSYVVNAGKRTADGSEFEKRTADGSEFESPKKKAKVE

SEQ ID NO: 741 - protein, 2012 aa, synthetic construct
MPAAKRVKLDGGDKKYSIGLDIGTNSVGWAVITDEYKVPSKKFKVLGNTDRHSIKKNLIGALLFDSGETAEATRLKRTARRRYTRRKNRICYLQEIFSNEMAKVDDSFFHRLEESFLVEEDKKHERHPIFGNIVDEVAYHEKYPTIYHLRKKLVDSTDKADLRLIYLALAHMIKFRGHFLIEGDLNPDNSDVDKLFIQLVQTYNQLFEENPINASGVDAKAILSARLSKSRRLENLIAQLPGEKKNGLFGNLIALSLGLTPNFKSNFDLAEDAKLQLSKDTYDDDLDNLLAQIGDQYADLFLAAKNLSDAILLSDILRVNTEITKAPLSASMIKRYDEHHQDLTLLKALVRQQLPEKYKEIFFDQSKNGYAGYIDGGASQEEFYKFIKPILEKMDGTEELLVKLNREDLLRKQRTFDNGSIPHQIHLGELHAILRRQEDFYPFLKDNREKIEKILTFRIPYYVGPLARGNSRFAWMTRKSEETITPWNFEEVVDKGASAQSFIERMTNFDKNLPNEKVLPKHSLLYEYFTVYNELTKVKYVTEGMRKPAFLSGEQKKAIVDLLFKTNRKVTVKQLKEDYFKKIECFDSVEISGVEDRFNASLGTYHDLLKIIKDKDFLDNEENEDILEDIVLTLTLFEDREMIEERLKTYAHLFDDKVMKQLKRRRYTGWGRLSRKLINGIRDKQSGKTILDFLKSDGFANRNFMQLIHDDSLTFKEDIQKAQVSGQGDSLHEHIANLAGSPAIKKGILQTVKVVDELVKVMGRHKPENIVIEMARENQTTQKGQKNSRERMKRIEEGIKELGSQILKEHPVENTQLQNEKLYLYYLQNGRDMYVDQELDINRLSDYDVDHIVPQSFLKDDSIDNKVLTRSDKARGKSDNVPSEEVVKKMKNYWRQLLNAKLITQRKFDNLTKAERGGLSELDKAGFIKRQLVETRQITKHVAQILDSRMNTKYDENDKLIREVKVITLKSKLVSDFRKDFQFYKVREINNYHHAHDAYLNAVVGTALIKKYPKLESEFVYGDYKVYDVRKMIAKSEQEIGKATAKYFFYSNIMNFFKTEITLANGEIRKRPLIETNGETGEIVWDKGRDFATVRKVLSMPQVNIVKKTEVQTGGFSKESILPKRNSDKLIARKKDWDPKKYGGFDSPTVAYSVLVVAKVEKGKSKKLKSVKELLGITIMERSSFEKNPIDFLEAKGYKEVKKDLIIKLPKYSLFELENGRKRMLASAGELQKGNELALPSKYVNFLYLASHYEKLKGSPEDNEQKQLFVEQHKHYLDEIIEQISEFSKRVILADANLDKVLSAYNKHRDKPIREQAENIIHLFTLTNLGAPAAFKYFDTTIDRKRYTSTKEVLDATLIHQSITGLYETRIDLSQLGGDGGPAPGGGGGPRSRAIDIPVPHADKISWKITDPVWVDQWPLTYEKTLAAIALVQEQLAAGHIEPTNSPWNTPIFIIKKKSGSWRLLQDLRAVNKVMVPMGALQPGLPSPVAIPLNYHKIVIDLKDCFFTIPLHPEDRPYFAFSVPQINFQSPMPRYQWKVLPQGMANSPTLCQKFVAAAIAPVRSQWPEAYILHYMDDILLACDSAEAAKACYAHIISCLTSYGLKIAPDKVQVSEPFSYLGFELHHQQVFTPRVCLKTDHLKTLNDFQKLLGDIQWLRPYLKLPTSALVPLNNILKGDPNPLSVRALTPEAKQSLALINKAIQNQSVQQISYNLPLVLLLLPTPHTPTAVFWQPNGTDPTKNGSPLLWLHLPASPSKVLLTYPSLLAMLIIKGRYTGRQLFGRDPHSIIIPYTQDQLTWLLQTSDEWAIALSSFTGDIDNHYPSDPVIQFAKLHQFIFPKITKCAPIPQATLVFTDGSSNGIAAYVIDNQPISIKSPYLSAQLVELYAILQVFTVLAHQPFNLYTDSAYIAQSVPLLETVPFIKSSTNATPLFSKLQQLILNRQHPFFIGHLRAHLNLPGPLAEGNALADAATQIFPIISDAGKRTADGSEFEKRTADGSEFESPKKKAKVE

SEQ ID NO: 742 - protein, 2012 aa, synthetic construct
MPAAKRVKLDGGDKKYSIGLDIGTNSVGWAVITDEYKVPSKKFKVLGNTDRHSIKKNLIGALLFDSGETAEATRLKRTARRRYTRRKNRICYLQEIFSNEMAKVDDSFFHRLEESFLVEEDKKHERHPIFGNIVDEVAYHEKYPTIYHLRKKLVDSTDKADLRLIYLALAHMIKFRGHFLIEGDLNPDNSDVDKLFIQLVQTYNQLFEENPINASGVDAKAILSARLSKSRRLENLIAQLPGEKKNGLFGNLIALSLGLTPNFKSNFDLAEDAKLQLSKDTYDDDLDNLLAQIGDQYADLFLAAKNLSDAILLSDILRVNTEITKAPLSASMIKRYDEHHQDLTLLKALVRQQLPEKYKEIFFDQSKNGYAGYIDGGASQEEFYKFIKPILEKMDGTEELLVKLNREDLLRKQRTFDNGSIPHQIHLGELHAILRRQEDFYPFLKDNREKIEKILTFRIPYYVGPLARGNSRFAWMTRKSEETITPWNFEEVVDKGASAQSFIERMTNFDKNLPNEKVLPKHSLLYEYFTVYNELTKVKYVTEGMRKPAFLSGEQKKAIVDLLFKTNRKVTVKQLKEDYFKKIECFDSVEISGVEDRFNASLGTYHDLLKIIKDKDFLDNEENEDILEDIVLTLTLFEDREMIEERLKTYAHLFDDKVMKQLKRRRYTGWGRLSRKLINGIRDKQSGKTILDFLKSDGFANRNFMQLIHDDSLTFKEDIQKAQVSGQGDSLHEHIANLAGSPAIKKGILQTVKVVDELVKVMGRHKPENIVIEMARENQTTQKGQKNSRERMKRIEEGIKELGSQILKEHPVENTQLQNEKLYLYYLQNGRDMYVDQELDINRLSDYDVDHIVPQSFLKDDSIDNKVLTRSDKARGKSDNVPSEEVVKKMKNYWRQLLNAKLITQRKFDNLTKAERGGLSELDKAGFIKRQLVETRQITKHVAQILDSRMNTKYDENDKLIREVKVITLKSKLVSDFRKDFQFYKVREINNYHHAHDAYLNAVVGTALIKKYPKLESEFVYGDYKVYDVRKMIAKSEQEIGKATAKYFFYSNIMNFFKTEITLANGEIRKRPLIETNGETGEIVWDKGRDFATVRKVLSMPQVNIVKKTEVQTGGFSKESILPKRNSDKLIARKKDWDPKKYGGFDSPTVAYSVLVVAKVEKGKSKKLKSVKELLGITIMERSSFEKNPIDFLEAKGYKEVKKDLIIKLPKYSLFELENGRKRMLASAGELQKGNELALPSKYVNFLYLASHYEKLKGSPEDNEQKQLFVEQHKHYLDEIIEQISEFSKRVILADANLDKVLSAYNKHRDKPIREQAENIIHLFTLTNLGAPAAFKYFDTTIDRKRYTSTKEVLDATLIHQSITGLYETRIDLSQLGGDGGGGGGGGGGPRSRAIDIPVPHADKISWKITDPVWVDQWPLTYEKTLAAIALVQEQLAAGHIEPTNSPWNTPIFIIKKKSGSWRLLQDLRAVNKVMVPMGALQPGLPSPVAIPLNYHKIVIDLKDCFFTIPLHPEDRPYFAFSVPQINFQSPMPRYQWKVLPQGMANSPTLCQKFVAAAIAPVRSQWPEAYILHYMDDILLACDSAEAAKACYAHIISCLTSYGLKIAPDKVQVSEPFSYLGFELHHQQVFTPRVCLKTDHLKTLNDFQKLLGDIQWLRPYLKLPTSALVPLNNILKPDPNPLSVRALTPEAKQSLALINKAIQNQSVQQISYNLPLVLLLLPTPHTPTAVFWQPNGTDPTKNGSPLLWLHLPASPSKVLLTYPSLLAMLIIKGRYTGRQLFGRDPHSIIIPYTQDQLTWLLQTSDEWAIALSSFTGDIDNHYPSDPVIQFAKLHQFIFPKITKCAPIPQATLVFTDGSSNGIAAYVIDNQPISIKSPYLSAQLVELYAILQVFTVLAHQPFNLYTDSAYIAQSVPLLETVPFIKSSTNATPLFSKLQQLILNRQHPFFIGHLRAHLNLPGPLAEGNALADAATQIFPIISDAGKRTADGSEFEKRTADGSEFESPKKKAKVE

SEQ ID NO: 743 - protein, 2021 aa, synthetic construct
MPAAKRVKLDGGDKKYSIGLDIGTNSVGWAVITDEYKVPSKKFKVLGNTDRHSIKKNLIGALLFDSGETAEATRLKRTARRRYTRRKNRICYLQEIFSNEMAKVDDSFFHRLEESFLVEEDKKHERHPIFGNIVDEVAYHEKYPTIYHLRKKLVDSTDKADLRLIYLALAHMIKFRGHFLIEGDLNPDNSDVDKLFIQLVQTYNQLFEENPINASGVDAKAILSARLSKSRRLENLIAQLPGEKKNGLFGNLIALSLGLTPNFKSNFDLAEDAKLQLSKDTYDDDLDNLLAQIGDQYADLFLAAKNLSDAILLSDILRVNTEITKAPLSASMIKRYDEHHQDLTLLKALVRQQLPEKYKEIFFDQSKNGYAGYIDGGASQEEFYKFIKPILEKMDGTEELLVKLNREDLLRKQRTFDNGSIPHQIHLGELHAILRRQEDFYPFLKDNREKIEKILTFRIPYYVGPLARGNSRFAWMTRKSEETITPWNFEEVVDKGASAQSFIERMTNFDKNLPNEKVLPKHSLLYEYFTVYNELTKVKYVTEGMRKPAFLSGEQKKAIVDLLFKTNRKVTVKQLKEDYFKKIECFDSVEISGVEDRFNASLGTYHDLLKIIKDKDFLDNEENEDILEDIVLTLTLFEDREMIEERLKTYAHLFDDKVMKQLKRRRYTGWGRLSRKLINGIRDKQSGKTILDFLKSDGFANRNFMQLIHDDSLTFKEDIQKAQVSGQGDSLHEHIANLAGSPAIKKGILQTVKVVDELVKVMGRHKPENIVIEMARENQTTQKGQKNSRERMKRIEEGIKELGSQILKEHPVENTQLQNEKLYLYYLQNGRDMYVDQELDINRLSDYDVDHIVPQSFLKDDSIDNKVLTRSDKARGKSDNVPSEEVVKKMKNYWRQLLNAKLITQRKFDNLTKAERGGLSELDKAGFIKRQLVETRQITKHVAQILDSRMNTKYDENDKLIREVKVITLKSKLVSDFRKDFQFYKVREINNYHHAHDAYLNAVVGTALIKKYPKLESEFVYGDYKVYDVRKMIAKSEQEIGKATAKYFFYSNIMNFFKTEITLANGEIRKRPLIETNGETGEIVWDKGRDFATVRKVLSMPQVNIVKKTEVQTGGFSKESILPKRNSDKLIARKKDWDPKKYGGFDSPTVAYSVLVVAKVEKGKSKKLKSVKELLGITIMERSSFEKNPIDFLEAKGYKEVKKDLIIKLPKYSLFELENGRKRMLASAGELQKGNELALPSKYVNFLYLASHYEKLKGSPEDNEQKQLFVEQHKHYLDEIIEQISEFSKRVILADANLDKVLSAYNKHRDKPIREQAENIIHLFTLTNLGAPAAFKYFDTTIDRKRYTSTKEVLDATLIHQSITGLYETRIDLSQLGGDGGGGSGGSGGSGGSGGSGGPRSRAIDIPVPHADKISWKITDPVWVDQWPLTYEKTLAAIALVQEQLAAGHIEPTNSPWNTPIFIIKKKSGSWRLLQDLRAVNKVMVPMGALQPGLPSPVAPPLNYHKIVIDLKDCFFTIPLHPEDRPYFAFSVPQINFQSPMPRYQWKVLPQGMANSPTLCQKFVAAAIAPVRSQWPEAYILHYMDDILLACDSAEAAKACYAHIISCLTSYGLKIAPDKVQVSEPFSYLGFELHHQQVFTPRVCLKTDHLKTLNDFQKLLGDIQWLRPYLKLPTSALVPLNNILKPDPNPLSVRALTPEAKQSLALINKAIQNQSVQQISYNLPLVLLLLPTPHTPTAVFWQPNGTDPTKNGSPLLWLHLPASPSKVLLTYPSLLAMLIIKGRYTGRQLFGRDPHSIIIPYTQDQLTWLLQTSDEWAIALSSFTGDIDNHYPSDPVIQFAKLHQFIFPKITKCAPIPQATLVFTDGSSNGIAAYVIDNQPISIKSPYLSAQLVELYAILQVFTVLAHQPFNLYTDSAYIAQSVPLLETVPFIKSSTNATPLFSKLQQLILNRQHPFFIGHLRAHLNLPGPLAEGNALADAATQIFPIISDAGKRTADGSEFEKRTADGSEFESPKKKAKVE

SEQ ID NO: 744 - protein, 2017 aa, synthetic construct
MPAAKRVKLDGGDKKYSIGLDIGTNSVGWAVITDEYKVPSKKFKVLGNTDRHSIKKNLIGALLFDSGETAEATRLKRTARRRYTRRKNRICYLQEIFSNEMAKVDDSFFHRLEESFLVEEDKKHERHPIFGNIVDEVAYHEKYPTIYHLRKKLVDSTDKADLRLIYLALAHMIKFRGHFLIEGDLNPDNSDVDKLFIQLVQTYNQLFEENPINASGVDAKAILSARLSKSRRLENLIAQLPGEKKNGLFGNLIALSLGLTPNFKSNFDLAEDAKLQLSKDTYDDDLDNLLAQIGDQYADLFLAAKNLSDAILLSDILRVNTEITKAPLSASMIKRYDEHHQDLTLLKALVRQQLPEKYKEIFFDQSKNGYAGYIDGGASQEEFYKFIKPILEKMDGTEELLVKLNREDLLRKQRTFDNGSIPHQIHLGELHAILRRQEDFYPFLKDNREKIEKILTFRIPYYVGPLARGNSRFAWMTRKSEETITPWNFEEVVDKGASAQSFIERMTNFDKNLPNEKVLPKHSLLYEYFTVYNELTKVKYVTEGMRKPAFLSGEQKKAIVDLLFKTNRKVTVKQLKEDYFKKIECFDSVEISGVEDRFNASLGTYHDLLKIIKDKDFLDNEENEDILEDIVLTLTLFEDREMIEERLKTYAHLFDDKVMKQLKRRRYTGWGRLSRKLINGIRDKQSGKTILDFLKSDGFANRNFMQLIHDDSLTFKEDIQKAQVSGQGDSLHEHIANLAGSPAIKKGILQTVKVVDELVKVMGRHKPENIVIEMARENQTTQKGQKNSRERMKRIEEGIKELGSQILKEHPVENTQLQNEKLYLYYLQNGRDMYVDQELDINRLSDYDVDHIVPQSFLKDDSIDNKVLTRSDKARGKSDNVPSEEVVKKMKNYWRQLLNAKLITQRKFDNLTKAERGGLSELDKAGFIKRQLVETRQITKHVAQILDSRMNTKYDENDKLIREVKVITLKSKLVSDFRKDFQFYKVREINNYHHAHDAYLNAVVGTALIKKYPKLESEFVYGDYKVYDVRKMIAKSEQEIGKATAKYFFYSNIMNFFKTEITLANGEIRKRPLIETNGETGEIVWDKGRDFATVRKVLSMPQVNIVKKTEVQTGGFSKESILPKRNSDKLIARKKDWDPKKYGGFDSPTVAYSVLVVAKVEKGKSKKLKSVKELLGITIMERSSFEKNPIDFLEAKGYKEVKKDLIIKLPKYSLFELENGRKRMLASAGELQKGNELALPSKYVNFLYLASHYEKLKGSPEDNEQKQLFVEQHKHYLDEIIEQISEFSKRVILADANLDKVLSAYNKHRDKPIREQAENIIHLFTLTNLGAPAAFKYFDTTIDRKRYTSTKEVLDATLIHQSITGLYETRIDLSQLGGDGGGSSPAPEAAAKGGPRSRAIDIPVPHADKISWKITDPVWVDQWPLTYEKTLAAIALVQEQLAAGHIEPTNSPWNTPIFIIKKKSGSWRLLQDLRAVNKVMVPMGALQPGLPSPVAPPLNYHKIVIDLKDCFFTIPLHPEDRPYFAFSVPQINFQSPMPRYQWKVLPQGMANSPTLCQKFVAAAIAPVRSQWPEAYILHYMDDILLACDSAEAAKACYAHIISCLTSYGLKIAPDKVQVSEPFSYLGFELHHQQVFTPRVCLKTDHLKTLNDFQKLLGDIQWLRPYLKLPTSALVPLNNILKPDPNPLSVRALTPEAKQSLALINKAIQNQSVQQISYNLPLVLLLLPTPHTPTAVFWQPNGTDPTKNGSPLLWLHLPASPSKVLLTYPSLLAMLIIKGRYTGRQLFGRDPHSIIIPYTQDQLTWLLQTSDEWAIALSSFTGDIDNHYPSDPVIQFAKLHQFIFPKITKCAPIPQATLVFTDGSSNGIAAYVIDNQPISIKSPYLSAQLVELYAILQVFTVLAHQPFNLYTDSAYIAQSVPLLETVPFIKSSTNATPLFSKLQQLILNRQHPFFIGHLRAHLNLPGPLAEGNALADAATQIFPIISDAGKRTADGSEFEKRTADGSEFESPKKKAKVE

SEQ ID NO: 745 - protein, 2032 aa, synthetic construct
MPAAKRVKLDGGDKKYSIGLDIGTNSVGWAVITDEYKVPSKKFKVLGNTDRHSIKKNLIGALLFDSGETAEATRLKRTARRRYTRRKNRICYLQEIFSNEMAKVDDSFFHRLEESFLVEEDKKHERHPIFGNIVDEVAYHEKYPTIYHLRKKLVDSTDKADLRLIYLALAHMIKFRGHFLIEGDLNPDNSDVDKLFIQLVQTYNQLFEENPINASGVDAKAILSARLSKSRRLENLIAQLPGEKKNGLFGNLIALSLGLTPNFKSNFDLAEDAKLQLSKDTYDDDLDNLLAQIGDQYADLFLAAKNLSDAILLSDILRVNTEITKAPLSASMIKRYDEHHQDLTLLKALVRQQLPEKYKEIFFDQSKNGYAGYIDGGASQEEFYKFIKPILEKMDGTEELLVKLNREDLLRKQRTFDNGSIPHQIHLGELHAILRRQEDFYPFLKDNREKIEKILTFRIPYYVGPLARGNSRFAWMTRKSEETITPWNFEEVVDKGASAQSFIERMTNFDKNLPNEKVLPKHSLLYEYFTVYNELTKVKYVTEGMRKPAFLSGEQKKAIVDLLFKTNRKVTVKQLKEDYFKKIECFDSVEISGVEDRFNASLGTYHDLLKIIKDKDFLDNEENEDILEDIVLTLTLFEDREMIEERLKTYAHLFDDKVMKQLKRRRYTGWGRLSRKLINGIRDKQSGKTILDFLKSDGFANRNFMQLIHDDSLTFKEDIQKAQVSGQGDSLHEHIANLAGSPAIKKGILQTVKVVDELVKVMGRHKPENIVIEMARENQTTQKGQKNSRERMKRIEEGIKELGSQILKEHPVENTQLQNEKLYLYYLQNGRDMYVDQELDINRLSDYDVDHIVPQSFLKDDSIDNKVLTRSDKARGKSDNVPSEEVVKKMKNYWRQLLNAKLITQRKFDNLTKAERGGLSELDKAGFIKRQLVETRQITKHVAQILDSRMNTKYDENDKLIREVKVITLKSKLVSDFRKDFQFYKVREINNYHHAHDAYLNAVVGTALIKKYPKLESEFVYGDYKVYDVRKMIAKSEQEIGKATAKYFFYSNIMNFFKTEITLANGEIRKRPLIETNGETGEIVWDKGRDFATVRKVLSMPQVNIVKKTEVQTGGFSKESILPKRNSDKLIARKKDWDPKKYGGFDSPTVAYSVLVVAKVEKGKSKKLKSVKELLGITIMERSSFEKNPIDFLEAKGYKEVKKDLIIKLPKYSLFELENGRKRMLASAGELQKGNELALPSKYVNFLYLASHYEKLKGSPEDNEQKQLFVEQHKHYLDEIIEQISEFSKRVILADANLDKVLSAYNKHRDKPIREQAENIIHLFTLTNLGAPAAFKYFDTTIDRKRYTSTKEVLDATLIHQSITGLYETRIDLSQLGGDGGSGGSSGGSSGSETPGTSESATPESSGGSSGGSSGGLATAVDILAPQRYADPITWKSDEPVWVDQWPLTQEKLAAAQQLVQEQLQAGHIIESNSPWNTPIFVIKKKSGKWRLLQDLRAVNATMVLMGALQPGLPSPVAIPQGYFKIVIDLKDCFFTIPLQPVDQKRFAFSLPSTNFKQPMKRYQWKVLPQGMANSPTLCQKYVAAAIEPVRKSWAQMYIIHYMDDILIAGKLGEQVLQCFAQLKQALTTTGLQIAPEKVQLQDPYTYLGFQINGPKITNQKAVIRRDKLQTLNDFQKLLGDINWLRPYLHLTTGDLKPLFDILKGDSNPNSPRSLSEAALASLQKVETAIAEQFVTQIDYTQPLTFLIFNTTLTPTGLFWQNNPVMWVHLPASPKKVLLPYYDAIADLIILGRDNSKKYFGLEPSTIIQPYSKSQIHWLMQNTETWPIACASYAGNIDNHYPPNKLIQFCKLHAVVFPRIISKTPLDNALLVFTDGSSTGIAAYTFEKTTVRFKTSHTSAQLVELQALIAVLSAFPHRALNVYTDSAYLAHSIPLLETVSHIKHISDTAKFFLQCQQLIYNRSIPFYLGHIRAHSGLPGPLSQGNHITDLATKVVATTLTTAGKRTADGSEFEKRTADGSEFESPKKKAKVE

SEQ ID NO: 746 - protein, 2045 aa, synthetic construct
MPAAKRVKLDGGDKKYSIGLDIGTNSVGWAVITDEYKVPSKKFKVLGNTDRHSIKKNLIGALLFDSGETAEATRLKRTARRRYTRRKNRICYLQEIFSNEMAKVDDSFFHRLEESFLVEEDKKHERHPIFGNIVDEVAYHEKYPTIYHLRKKLVDSTDKADLRLIYLALAHMIKFRGHFLIEGDLNPDNSDVDKLFIQLVQTYNQLFEENPINASGVDAKAILSARLSKSRRLENLIAQLPGEKKNGLFGNLIALSLGLTPNFKSNFDLAEDAKLQLSKDTYDDDLDNLLAQIGDQYADLFLAAKNLSDAILLSDILRVNTEITKAPLSASMIKRYDEHHQDLTLLKALVRQQLPEKYKEIFFDQSKNGYAGYIDGGASQEEFYKFIKPILEKMDGTEELLVKLNREDLLRKQRTFDNGSIPHQIHLGELHAILRRQEDFYPFLKDNREKIEKILTFRIPYYVGPLARGNSRFAWMTRKSEETITPWNFEEVVDKGASAQSFIERMTNFDKNLPNEKVLPKHSLLYEYFTVYNELTKVKYVTEGMRKPAFLSGEQKKAIVDLLFKTNRKVTVKQLKEDYFKKIECFDSVEISGVEDRFNASLGTYHDLLKIIKDKDFLDNEENEDILEDIVLTLTLFEDREMIEERLKTYAHLFDDKVMKQLKRRRYTGWGRLSRKLINGIRDKQSGKTILDFLKSDGFANRNFMQLIHDDSLTFKEDIQKAQVSGQGDSLHEHIANLAGSPAIKKGILQTVKVVDELVKVMGRHKPENIVIEMARENQTTQKGQKNSRERMKRIEEGIKELGSQILKEHPVENTQLQNEKLYLYYLQNGRDMYVDQELDINRLSDYDVDHIVPQSFLKDDSIDNKVLTRSDKARGKSDNVPSEEVVKKMKNYWRQLLNAKLITQRKFDNLTKAERGGLSELDKAGFIKRQLVETRQITKHVAQILDSRMNTKYDENDKLIREVKVITLKSKLVSDFRKDFQFYKVREINNYHHAHDAYLNAVVGTALIKKYPKLESEFVYGDYKVYDVRKMIAKSEQEIGKATAKYFFYSNIMNFFKTEITLANGEIRKRPLIETNGETGEIVWDKGRDFATVRKVLSMPQVNIVKKTEVQTGGFSKESILPKRNSDKLIARKKDWDPKKYGGFDSPTVAYSVLVVAKVEKGKSKKLKSVKELLGITIMERSSFEKNPIDFLEAKGYKEVKKDLIIKLPKYSLFELENGRKRMLASAGELQKGNELALPSKYVNFLYLASHYEKLKGSPEDNEQKQLFVEQHKHYLDEIIEQISEFSKRVILADANLDKVLSAYNKHRDKPIREQAENIIHLFTLTNLGAPAAFKYFDTTIDRKRYTSTKEVLDATLIHQSITGLYETRIDLSQLGGDGGAEAAAKEAAAKEAAAKEAAAKALEAEAAAKEAAAKEAAAKEAAAKAGGLATAVDILAPQRYADPITWKSDEPVWVDQWPLTQEKLAAAQQLVQEQLQAGHIIESNSPWNTPIFVIKKKSGKWRLLQDLRAVNATMVLMGALQPGLPSPVAIPQGYFKIVIDLKDCFFTIPLQPVDQKRFAFSLPSTNFKQPMKRYQWKVLPQGMANSPTLCQKYVAAAIEPVRKSWAQMYIIHYMDDILIAGKLGEQVLQCFAQLKQALTTTGLQIAPEKVQLQDPYTYLGFQINGPKITNQKAVIRRDKLQTLNDFQKLLGDINWLRPYLHLTTGDLKPLFDILKGDSNPNSPRSLSEAALASLQKVETAIAEQFVTQIDYTQPLTFLIFNTTLTPTGLFWQNNPVMWVHLPASPKKVLLPYYDAIADLIILGRDNSKKYFGLEPSTIIQPYSKSQIHWLMQNTETWPIACASYAGNIDNHYPPNKLIQFCKLHAVVFPRIISKTPLDNALLVFTDGSSTGIAAYTFEKTTVRFKTSHTSAQLVELQALIAVLSAFPHRALNVYTDSAYLAHSIPLLETVSHIKHISDTAKFFLQCQQLIYNRSIPFYLGHIRAHSGLPGPLSQGNHITDLATKVVATTLTTAGKRTADGSEFEKRTADGSEFESPKKKAKVE

SEQ ID NO: 747 - protein, 2029 aa, synthetic construct
MPAAKRVKLDGGDKKYSIGLDIGTNSVGWAVITDEYKVPSKKFKVLGNTDRHSIKKNLIGALLFDSGETAEATRLKRTARRRYTRRKNRICYLQEIFSNEMAKVDDSFFHRLEESFLVEEDKKHERHPIFGNIVDEVAYHEKYPTIYHLRKKLVDSTDKADLRLIYLALAHMIKFRGHFLIEGDLNPDNSDVDKLFIQLVQTYNQLFEENPINASGVDAKAILSARLSKSRRLENLIAQLPGEKKNGLFGNLIALSLGLTPNFKSNFDLAEDAKLQLSKDTYDDDLDNLLAQIGDQYADLFLAAKNLSDAILLSDILRVNTEITKAPLSASMIKRYDEHHQDLTLLKALVRQQLPEKYKEIFFDQSKNGYAGYIDGGASQEEFYKFIKPILEKMDGTEELLVKLNREDLLRKQRTFDNGSIPHQIHLGELHAILRRQEDFYPFLKDNREKIEKILTFRIPYYVGPLARGNSRFAWMTRKSEETITPWNFEEVVDKGASAQSFIERMTNFDKNLPNEKVLPKHSLLYEYFTVYNELTKVKYVTEGMRKPAFLSGEQKKAIVDLLFKTNRKVTVKQLKEDYFKKIECFDSVEISGVEDRFNASLGTYHDLLKIIKDKDFLDNEENEDILEDIVLTLTLFEDREMIEERLKTYAHLFDDKVMKQLKRRRYTGWGRLSRKLINGIRDKQSGKTILDFLKSDGFANRNFMQLIHDDSLTFKEDIQKAQVSGQGDSLHEHIANLAGSPAIKKGILQTVKVVDELVKVMGRHKPENIVIEMARENQTTQKGQKNSRERMKRIEEGIKELGSQILKEHPVENTQLQNEKLYLYYLQNGRDMYVDQELDINRLSDYDVDHIVPQSFLKDDSIDNKVLTRSDKARGKSDNVPSEEVVKKMKNYWRQLLNAKLITQRKFDNLTKAERGGLSELDKAGFIKRQLVETRQITKHVAQILDSRMNTKYDENDKLIREVKVITLKSKLVSDFRKDFQFYKVREINNYHHAHDAYLNAVVGTALIKKYPKLESEFVYGDYKVYDVRKMIAKSEQEIGKATAKYFFYSNIMNFFKTEITLANGEIRKRPLIETNGETGEIVWDKGRDFATVRKVLSMPQVNIVKKTEVQTGGFSKESILPKRNSDKLIARKKDWDPKKYGGFDSPTVAYSVLVVAKVEKGKSKKLKSVKELLGITIMERSSFEKNPIDFLEAKGYKEVKKDLIIKLPKYSLFELENGRKRMLASAGELQKGNELALPSKYVNFLYLASHYEKLKGSPEDNEQKQLFVEQHKHYLDEIIEQISEFSKRVILADANLDKVLSAYNKHRDKPIREQAENIIHLFTLTNLGAPAAFKYFDTTIDRKRYTSTKEVLDATLIHQSITGLYETRIDLSQLGGDGGEAAAKEAAAKEAAAKEAAAKEAAAKEAAAKGGLATAVDILAPQRYADPITWKSDEPVWVDQWPLTQEKLAAAQQLVQEQLQAGHIIESNSPWNTPIFVIKKKSGKWRLLQDLRAVNATMVLMGALQPGLPSPVAIPQGYFKIVIDLKDCFFTIPLQPVDQKRFAFSLPSTNFKQPMKRYQWKVLPQGMANSPTLCQKYVAAAIEPVRKSWAQMYIIHYMDDILIAGKLGEQVLQCFAQLKQALTTTGLQIAPEKVQLQDPYTYLGFQINGPKITNQKAVIRRDKLQTLNDFQKLLGDINWLRPYLHLTTGDLKPLFDILKGDSNPNSPRSLSEAALASLQKVETAIAEQFVTQIDYTQPLTFLIFNTTLTPTGLFWQNNPVMWVHLPASPKKVLLPYYDAIADLIILGRDNSKKYFGLEPSTIIQPYSKSQIHWLMQNTETWPIACASYAGNIDNHYPPNKLIQFCKLHAVVFPRIISKTPLDNALLVFTDGSSTGIAAYTFEKTTVRFKTSHTSAQLVELQALIAVLSAFPHRALNVYTDSAYLAHSIPLLETVSHIKHISDTAKFFLQCQQLIYNRSIPFYLGHIRAHSGLPGPLSQGNHITDLATKVVATTLTTAGKRTADGSEFEKRTADGSEFESPKKKAKVE

SEQ ID NO: 748 - protein, 2024 aa, synthetic construct
MPAAKRVKLDGGDKKYSIGLDIGTNSVGWAVITDEYKVPSKKFKVLGNTDRHSIKKNLIGALLFDSGETAEATRLKRTARRRYTRRKNRICYLQEIFSNEMAKVDDSFFHRLEESFLVEEDKKHERHPIFGNIVDEVAYHEKYPTIYHLRKKLVDSTDKADLRLIYLALAHMIKFRGHFLIEGDLNPDNSDVDKLFIQLVQTYNQLFEENPINASGVDAKAILSARLSKSRRLENLIAQLPGEKKNGLFGNLIALSLGLTPNFKSNFDLAEDAKLQLSKDTYDDDLDNLLAQIGDQYADLFLAAKNLSDAILLSDILRVNTEITKAPLSASMIKRYDEHHQDLTLLKALVRQQLPEKYKEIFFDQSKNGYAGYIDGGASQEEFYKFIKPILEKMDGTEELLVKLNREDLLRKQRTFDNGSIPHQIHLGELHAILRRQEDFYPFLKDNREKIEKILTFRIPYYVGPLARGNSRFAWMTRKSEETITPWNFEEVVDKGASAQSFIERMTNFDKNLPNEKVLPKHSLLYEYFTVYNELTKVKYVTEGMRKPAFLSGEQKKAIVDLLFKTNRKVTVKQLKEDYFKKIECFDSVEISGVEDRFNASLGTYHDLLKIIKDKDFLDNEENEDILEDIVLTLTLFEDREMIEERLKTYAHLFDDKVMKQLKRRRYTGWGRLSRKLINGIRDKQSGKTILDFLKSDGFANRNFMQLIHDDSLTFKEDIQKAQVSGQGDSLHEHIANLAGSPAIKKGILQTVKVVDELVKVMGRHKPENIVIEMARENQTTQKGQKNSRERMKRIEEGIKELGSQILKEHPVENTQLQNEKLYLYYLQNGRDMYVDQELDINRLSDYDVDHIVPQSFLKDDSIDNKVLTRSDKARGKSDNVPSEEVVKKMKNYWRQLLNAKLITQRKFDNLTKAERGGLSELDKAGFIKRQLVETRQITKHVAQILDSRMNTKYDENDKLIREVKVITLKSKLVSDFRKDFQFYKVREINNYHHAHDAYLNAVVGTALIKKYPKLESEFVYGDYKVYDVRKMIAKSEQEIGKATAKYFFYSNIMNFFKTEITLANGEIRKRPLIETNGETGEIVWDKGRDFATVRKVLSMPQVNIVKKTEVQTGGFSKESILPKRNSDKLIARKKDWDPKKYGGFDSPTVAYSVLVVAKVEKGKSKKLKSVKELLGITIMERSSFEKNPIDFLEAKGYKEVKKDLIIKLPKYSLFELENGRKRMLASAGELQKGNELALPSKYVNFLYLASHYEKLKGSPEDNEQKQLFVEQHKHYLDEIIEQISEFSKRVILADANLDKVLSAYNKHRDKPIREQAENIIHLFTLTNLGAPAAFKYFDTTIDRKRYTSTKEVLDATLIHQSITGLYETRIDLSQLGGDGGEAAAKEAAAKEAAAKEAAAKEAAAKGGLATAVDILAPQRYADPITWKSDEPVWVDQWPLTQEKLAAAQQLVQEQLQAGHIIESNSPWNTPIFVIKKKSGKWRLLQDLRAVNATMVLMGALQPGLPSPVAIPQGYFKIVIDLKDCFFTIPLQPVDQKRFAFSLPSTNFKQPMKRYQWKVLPQGMANSPTLCQKYVAAAIEPVRKSWAQMYIIHYMDDILIAGKLGEQVLQCFAQLKQALTTTGLQIAPEKVQLQDPYTYLGFQINGPKITNQKAVIRRDKLQTLNDFQKLLGDINWLRPYLHLTTGDLKPLFDILKGDSNPNSPRSLSEAALASLQKVETAIAEQFVTQIDYTQPLTFLIFNTTLTPTGLFWQNNPVMWVHLPASPKKVLLPYYDAIADLIILGRDNSKKYFGLEPSTIIQPYSKSQIHWLMQNTETWPIACASYAGNIDNHYPPNKLIQFCKLHAVVFPRIISKTPLDNALLVFTDGSSTGIAAYTFEKTTVRFKTSHTSAQLVELQALIAVLSAFPHRALNVYTDSAYLAHSIPLLETVSHIKHISDTAKFFLQCQQLIYNRSIPFYLGHIRAHSGLPGPLSQGNHITDLATKVVATTLTTAGKRTADGSEFEKRTADGSEFESPKKKAKVE

SEQ ID NO: 749 - protein, 2012 aa, synthetic construct
MPAAKRVKLDGGDKKYSIGLDIGTNSVGWAVITDEYKVPSKKFKVLGNTDRHSIKKNLIGALLFDSGETAEATRLKRTARRRYTRRKNRICYLQEIFSNEMAKVDDSFFHRLEESFLVEEDKKHERHPIFGNIVDEVAYHEKYPTIYHLRKKLVDSTDKADLRLIYLALAHMIKFRGHFLIEGDLNPDNSDVDKLFIQLVQTYNQLFEENPINASGVDAKAILSARLSKSRRLENLIAQLPGEKKNGLFGNLIALSLGLTPNFKSNFDLAEDAKLQLSKDTYDDDLDNLLAQIGDQYADLFLAAKNLSDAILLSDILRVNTEITKAPLSASMIKRYDEHHQDLTLLKALVRQQLPEKYKEIFFDQSKNGYAGYIDGGASQEEFYKFIKPILEKMDGTEELLVKLNREDLLRKQRTFDNGSIPHQIHLGELHAILRRQEDFYPFLKDNREKIEKILTFRIPYYVGPLARGNSRFAWMTRKSEETITPWNFEEVVDKGASAQSFIERMTNFDKNLPNEKVLPKHSLLYEYFTVYNELTKVKYVTEGMRKPAFLSGEQKKAIVDLLFKTNRKVTVKQLKEDYFKKIECFDSVEISGVEDRFNASLGTYHDLLKIIKDKDFLDNEENEDILEDIVLTLTLFEDREMIEERLKTYAHLFDDKVMKQLKRRRYTGWGRLSRKLINGIRDKQSGKTILDFLKSDGFANRNFMQLIHDDSLTFKEDIQKAQVSGQGDSLHEHIANLAGSPAIKKGILQTVKVVDELVKVMGRHKPENIVIEMARENQTTQKGQKNSRERMKRIEEGIKELGSQILKEHPVENTQLQNEKLYLYYLQNGRDMYVDQELDINRLSDYDVDHIVPQSFLKDDSIDNKVLTRSDKARGKSDNVPSEEVVKKMKNYWRQLLNAKLITQRKFDNLTKAERGGLSELDKAGFIKRQLVETRQITKHVAQILDSRMNTKYDENDKLIREVKVITLKSKLVSDFRKDFQFYKVREINNYHHAHDAYLNAVVGTALIKKYPKLESEFVYGDYKVYDVRKMIAKSEQEIGKATAKYFFYSNIMNFFKTEITLANGEIRKRPLIETNGETGEIVWDKGRDFATVRKVLSMPQVNIVKKTEVQTGGFSKESILPKRNSDKLIARKKDWDPKKYGGFDSPTVAYSVLVVAKVEKGKSKKLKSVKELLGITIMERSSFEKNPIDFLEAKGYKEVKKDLIIKLPKYSLFELENGRKRMLASAGELQKGNELALPSKYVNFLYLASHYEKLKGSPEDNEQKQLFVEQHKHYLDEIIEQISEFSKRVILADANLDKVLSAYNKHRDKPIREQAENIIHLFTLTNLGAPAAFKYFDTTIDRKRYTSTKEVLDATLIHQSITGLYETRIDLSQLGGDGGPAPAPAPAPAPAPGGLATAVDILAPQRYADPITWKSDEPVWVDQWPLTQEKLAAAQQLVQEQLQAGHIIESNSPWNTPIFVIKKKSGKWRLLQDLRAVNATMVLMGALQPGLPSPVAIPQGYFKIVIDLKDCFFTIPLQPVDQKRFAFSLPSTNFKQPMKRYQWKVLPQGMANSPTLCQKYVAAAIEPVRKSWAQMYIIHYMDDILIAGKLGEQVLQCFAQLKQALTTTGLQIAPEKVQLQDPYTYLGFQINGPKITNQKAVIRRDKLQTLNDFQKLLGDINWLRPYLHLTTGDLKPLFDILKGDSNPNSPRSLSEAALASLQKVETAIAEQFVTQIDYTQPLTFLIFNTTLTPTGLFWQNNPVMWVHLPASPKKVLLPYYDAIADLIILGRDNSKKYFGLEPSTIIQPYSKSQIHWLMQNTETWPIACASYAGNIDNHYPPNKLIQFCKLHAVVFPRIISKTPLDNALLVFTDGSSTGIAAYTFEKTTVRFKTSHTSAQLVELQALIAVLSAFPHRALNVYTDSAYLAHSIPLLETVSHIKHISDTAKFFLQCQQLIYNRSIPFYLGHIRAHSGLPGPLSQGNHITDLATKVVATTLTTAGKRTADGSEFEKRTADGSEFESPKKKAKVE

SEQ ID NO: 750 - protein, 2010 aa, synthetic construct
MPAAKRVKLDGGDKKYSIGLDIGTNSVGWAVITDEYKVPSKKFKVLGNTDRHSIKKNLIGALLFDSGETAEATRLKRTARRRYTRRKNRICYLQEIFSNEMAKVDDSFFHRLEESFLVEEDKKHERHPIFGNIVDEVAYHEKYPTIYHLRKKLVDSTDKADLRLIYLALAHMIKFRGHFLIEGDLNPDNSDVDKLFIQLVQTYNQLFEENPINASGVDAKAILSARLSKSRRLENLIAQLPGEKKNGLFGNLIALSLGLTPNFKSNFDLAEDAKLQLSKDTYDDDLDNLLAQIGDQYADLFLAAKNLSDAILLSDILRVNTEITKAPLSASMIKRYDEHHQDLTLLKALVRQQLPEKYKEIFFDQSKNGYAGYIDGGASQEEFYKFIKPILEKMDGTEELLVKLNREDLLRKQRTFDNGSIPHQIHLGELHAILRRQEDFYPFLKDNREKIEKILTFRIPYYVGPLARGNSRFAWMTRKSEETITPWNFEEVVDKGASAQSFIERMTNFDKNLPNEKVLPKHSLLYEYFTVYNELTKVKYVTEGMRKPAFLSGEQKKAIVDLLFKTNRKVTVKQLKEDYFKKIECFDSVEISGVEDRFNASLGTYHDLLKIIKDKDFLDNEENEDILEDIVLTLTLFEDREMIEERLKTYAHLFDDKVMKQLKRRRYTGWGRLSRKLINGIRDKQSGKTILDFLKSDGFANRNFMQLIHDDSLTFKEDIQKAQVSGQGDSLHEHIANLAGSPAIKKGILQTVKVVDELVKVMGRHKPENIVIEMARENQTTQKGQKNSRERMKRIEEGIKELGSQILKEHPVENTQLQNEKLYLYYLQNGRDMYVDQELDINRLSDYDVDHIVPQSFLKDDSIDNKVLTRSDKARGKSDNVPSEEVVKKMKNYWRQLLNAKLITQRKFDNLTKAERGGLSELDKAGFIKRQLVETRQITKHVAQILDSRMNTKYDENDKLIREVKVITLKSKLVSDFRKDFQFYKVREINNYHHAHDAYLNAVVGTALIKKYPKLESEFVYGDYKVYDVRKMIAKSEQEIGKATAKYFFYSNIMNFFKTEITLANGEIRKRPLIETNGETGEIVWDKGRDFATVRKVLSMPQVNIVKKTEVQTGGFSKESILPKRNSDKLIARKKDWDPKKYGGFDSPTVAYSVLVVAKVEKGKSKKLKSVKELLGITIMERSSFEKNPIDFLEAKGYKEVKKDLIIKLPKYSLFELENGRKRMLASAGELQKGNELALPSKYVNFLYLASHYEKLKGSPEDNEQKQLFVEQHKHYLDEIIEQISEFSKRVILADANLDKVLSAYNKHRDKPIREQAENIIHLFTLTNLGAPAAFKYFDTTIDRKRYTSTKEVLDATLIHQSITGLYETRIDLSQLGGDGGPAPAPAPAPAPGGLATAVDILAPQRYADPITWKSDEPVWVDQWPLTQEKLAAAQQLVQEQLQAGHIIESNSPWNTPIFVIKKKSGKWRLLQDLRAVNATMVLMGALQPGLPSPVAIPQGYFKIVIDLKDCFFTIPLQPVDQKRFAFSLPSTNFKQPMKRYQWKVLPQGMANSPTLCQKYVAAAIEPVRKSWAQMYIIHYMDDILIAGKLGEQVLQCFAQLKQALTTTGLQIAPEKVQLQDPYTYLGFQINGPKITNQKAVIRRDKLQTLNDFQKLLGDINWLRPYLHLTTGDLKPLFDILKGDSNPNSPRSLSEAALASLQKVETAIAEQFVTQIDYTQPLTFLIFNTTLTPTGLFWQNNPVMWVHLPASPKKVLLPYYDAIADLIILGRDNSKKYFGLEPSTIIQPYSKSQIHWLMQNTETWPIACASYAGNIDNHYPPNKLIQFCKLHAVVFPRIISKTPLDNALLVFTDGSSTGIAAYTFEKTTVRFKTSHTSAQLVELQALIAVLSAFPHRALNVYTDSAYLAHSIPLLETVSHIKHISDTAKFFLQCQQLIYNRSIPFYLGHIRAHSGLPGPLSQGNHITDLATKVVATTLTTAGKRTADGSEFEKRTADGSEFESPKKKAKVE

SEQ ID NO: 751 - protein, 2014 aa, synthetic construct
MPAAKRVKLDGGDKKYSIGLDIGTNSVGWAVITDEYKVPSKKFKVLGNTDRHSIKKNLIGALLFDSGETAEATRLKRTARRRYTRRKNRICYLQEIFSNEMAKVDDSFFHRLEESFLVEEDKKHERHPIFGNIVDEVAYHEKYPTIYHLRKKLVDSTDKADLRLIYLALAHMIKFRGHFLIEGDLNPDNSDVDKLFIQLVQTYNQLFEENPINASGVDAKAILSARLSKSRRLENLIAQLPGEKKNGLFGNLIALSLGLTPNFKSNFDLAEDAKLQLSKDTYDDDLDNLLAQIGDQYADLFLAAKNLSDAILLSDILRVNTEITKAPLSASMIKRYDEHHQDLTLLKALVRQQLPEKYKEIFFDQSKNGYAGYIDGGASQEEFYKFIKPILEKMDGTEELLVKLNREDLLRKQRTFDNGSIPHQIHLGELHAILRRQEDFYPFLKDNREKIEKILTFRIPYYVGPLARGNSRFAWMTRKSEETITPWNFEEVVDKGASAQSFIERMTNFDKNLPNEKVLPKHSLLYEYFTVYNELTKVKYVTEGMRKPAFLSGEQKKAIVDLLFKTNRKVTVKQLKEDYFKKIECFDSVEISGVEDRFNASLGTYHDLLKIIKDKDFLDNEENEDILEDIVLTLTLFEDREMIEERLKTYAHLFDDKVMKQLKRRRYTGWGRLSRKLINGIRDKQSGKTILDFLKSDGFANRNFMQLIHDDSLTFKEDIQKAQVSGQGDSLHEHIANLAGSPAIKKGILQTVKVVDELVKVMGRHKPENIVIEMARENQTTQKGQKNSRERMKRIEEGIKELGSQILKEHPVENTQLQNEKLYLYYLQNGRDMYVDQELDINRLSDYDVDHIVPQSFLKDDSIDNKVLTRSDKARGKSDNVPSEEVVKKMKNYWRQLLNAKLITQRKFDNLTKAERGGLSELDKAGFIKRQLVETRQITKHVAQILDSRMNTKYDENDKLIREVKVITLKSKLVSDFRKDFQFYKVREINNYHHAHDAYLNAVVGTALIKKYPKLESEFVYGDYKVYDVRKMIAKSEQEIGKATAKYFFYSNIMNFFKTEITLANGEIRKRPLIETNGETGEIVWDKGRDFATVRKVLSMPQVNIVKKTEVQTGGFSKESILPKRNSDKLIARKKDWDPKKYGGFDSPTVAYSVLVVAKVEKGKSKKLKSVKELLGITIMERSSFEKNPIDFLEAKGYKEVKKDLIIKLPKYSLFELENGRKRMLASAGELQKGNELALPSKYVNFLYLASHYEKLKGSPEDNEQKQLFVEQHKHYLDEIIEQISEFSKRVILADANLDKVLSAYNKHRDKPIREQAENIIHLFTLTNLGAPAAFKYFDTTIDRKRYTSTKEVLDATLIHQSITGLYETRIDLSQLGGDGGGSSGSSGSSGSSGSSGGLATAVDILAPQRYADPITWKSDEPVWVDQWPLTQEKLAAAQQLVQEQLQAGHIIESNSPWNTPIFVIKKKSGKWRLLQDLRAVNATMVLMGALQPGLPSPVAIPQGYFKIVIDLKDCFFTIPLQPVDQKRFAFSLPSTNFKQPMKRYQWKVLPQGMANSPTLCQKYVAAAIEPVRKSWAQMYIIHYMDDILIAGKLGEQVLQCFAQLKQALTTTGLQIAPEKVQLQDPYTYLGFQINGPKITNQKAVIRRDKLQTLNDFQKLLGDINWLRPYLHLTTGDLKPLFDILKGDSNPNSPRSLSEAALASLQKVETAIAEQFVTQIDYTQPLTFLIFNTTLTPTGLFWQNNPVMWVHLPASPKKVLLPYYDAIADLIILGRDNSKKYFGLEPSTIIQPYSKSQIHWLMQNTETWPIACASYAGNIDNHYPPNKLIQFCKLHAVVFPRIISKTPLDNALLVFTDGSSTGIAAYTFEKTTVRFKTSHTSAQLVELQALIAVLSAFPHRALNVYTDSAYLAHSIPLLETVSHIKHISDTAKFFLQCQQLIYNRSIPFYLGHIRAHSGLPGPLSQGNHITDLATKVVATTLTTAGKRTADGSEFEKRTADGSEFESPKKKAKVE

SEQ ID NO: 752 - protein, 2015 aa, synthetic construct
MPAAKRVKLDGGDKKYSIGLDIGTNSVGWAVITDEYKVPSKKFKVLGNTDRHSIKKNLIGALLFDSGETAEATRLKRTARRRYTRRKNRICYLQEIFSNEMAKVDDSFFHRLEESFLVEEDKKHERHPIFGNIVDEVAYHEKYPTIYHLRKKLVDSTDKADLRLIYLALAHMIKFRGHFLIEGDLNPDNSDVDKLFIQLVQTYNQLFEENPINASGVDAKAILSARLSKSRRLENLIAQLPGEKKNGLFGNLIALSLGLTPNFKSNFDLAEDAKLQLSKDTYDDDLDNLLAQIGDQYADLFLAAKNLSDAILLSDILRVNTEITKAPLSASMIKRYDEHHQDLTLLKALVRQQLPEKYKEIFFDQSKNGYAGYIDGGASQEEFYKFIKPILEKMDGTEELLVKLNREDLLRKQRTFDNGSIPHQIHLGELHAILRRQEDFYPFLKDNREKIEKILTFRIPYYVGPLARGNSRFAWMTRKSEETITPWNFEEVVDKGASAQSFIERMTNFDKNLPNEKVLPKHSLLYEYFTVYNELTKVKYVTEGMRKPAFLSGEQKKAIVDLLFKTNRKVTVKQLKEDYFKKIECFDSVEISGVEDRFNASLGTYHDLLKIIKDKDFLDNEENEDILEDIVLTLTLFEDREMIEERLKTYAHLFDDKVMKQLKRRRYTGWGRLSRKLINGIRDKQSGKTILDFLKSDGFANRNFMQLIHDDSLTFKEDIQKAQVSGQGDSLHEHIANLAGSPAIKKGILQTVKVVDELVKVMGRHKPENIVIEMARENQTTQKGQKNSRERMKRIEEGIKELGSQILKEHPVENTQLQNEKLYLYYLQNGRDMYVDQELDINRLSDYDVDHIVPQSFLKDDSIDNKVLTRSDKARGKSDNVPSEEVVKKMKNYWRQLLNAKLITQRKFDNLTKAERGGLSELDKAGFIKRQLVETRQITKHVAQILDSRMNTKYDENDKLIREVKVITLKSKLVSDFRKDFQFYKVREINNYHHAHDAYLNAVVGTALIKKYPKLESEFVYGDYKVYDVRKMIAKSEQEIGKATAKYFFYSNIMNFFKTEITLANGEIRKRPLIETNGETGEIVWDKGRDFATVRKVLSMPQVNIVKKTEVQTGGFSKESILPKRNSDKLIARKKDWDPKKYGGFDSPTVAYSVLVVAKVEKGKSKKLKSVKELLGITIMERSSFEKNPIDFLEAKGYKEVKKDLIIKLPKYSLFELENGRKRMLASAGELQKGNELALPSKYVNFLYLASHYEKLKGSPEDNEQKQLFVEQHKHYLDEIIEQISEFSKRVILADANLDKVLSAYNKHRDKPIREQAENIIHLFTLTNLGAPAAFKYFDTTIDRKRYTSTKEVLDATLIHQSITGLYETRIDLSQLGGDGGSGSETPGTSESATPESGGLATAVDILAPQRYADPITWKSDEPVWVDQWPLTQEKLAAAQQLVQEQLQAGHIIESNSPWNTPIFVIKKKSGKWRLLQDLRAVNATMVLMGALQPGLPSPVAIPQGYFKIVIDLKDCFFTIPLQPVDQKRFAFSLPSTNFKQPMKRYQWKVLPQGMANSPTLCQKYVAAAIEPVRKSWAQMYIIHYMDDILIAGKLGEQVLQCFAQLKQALTTTGLQIAPEKVQLQDPYTYLGFQINGPKITNQKAVIRRDKLQTLNDFQKLLGDINWLRPYLHLTTGDLKPLFDILKGDSNPNSPRSLSEAALASLQKVETAIAEQFVTQIDYTQPLTFLIFNTTLTPTGLFWQNNPVMWVHLPASPKKVLLPYYDAIADLIILGRDNSKKYFGLEPSTIIQPYSKSQIHWLMQNTETWPIACASYAGNIDNHYPPNKLIQFCKLHAVVFPRIISKTPLDNALLVFTDGSSTGIAAYTFEKTTVRFKTSHTSAQLVELQALIAVLSAFPHRALNVYTDSAYLAHSIPLLETVSHIKHISDTAKFFLQCQQLIYNRSIPFYLGHIRAHSGLPGPLSQGNHITDLATKVVATTLTTAGKRTADGSEFEKRTADGSEFESPKKKAKVE

SEQ ID NO: 753 - protein, 2010 aa, synthetic construct
MPAAKRVKLDGGDKKYSIGLDIGTNSVGWAVITDEYKVPSKKFKVLGNTDRHSIKKNLIGALLFDSGETAEATRLKRTARRRYTRRKNRICYLQEIFSNEMAKVDDSFFHRLEESFLVEEDKKHERHPIFGNIVDEVAYHEKYPTIYHLRKKLVDSTDKADLRLIYLALAHMIKFRGHFLIEGDLNPDNSDVDKLFIQLVQTYNQLFEENPINASGVDAKAILSARLSKSRRLENLIAQLPGEKKNGLFGNLIALSLGLTPNFKSNFDLAEDAKLQLSKDTYDDDLDNLLAQIGDQYADLFLAAKNLSDAILLSDILRVNTEITKAPLSASMIKRYDEHHQDLTLLKALVRQQLPEKYKEIFFDQSKNGYAGYIDGGASQEEFYKFIKPILEKMDGTEELLVKLNREDLLRKQRTFDNGSIPHQIHLGELHAILRRQEDFYPFLKDNREKIEKILTFRIPYYVGPLARGNSRFAWMTRKSEETITPWNFEEVVDKGASAQSFIERMTNFDKNLPNEKVLPKHSLLYEYFTVYNELTKVKYVTEGMRKPAFLSGEQKKAIVDLLFKTNRKVTVKQLKEDYFKKIECFDSVEISGVEDRFNASLGTYHDLLKIIKDKDFLDNEENEDILEDIVLTLTLFEDREMIEERLKTYAHLFDDKVMKQLKRRRYTGWGRLSRKLINGIRDKQSGKTILDFLKSDGFANRNFMQLIHDDSLTFKEDIQKAQVSGQGDSLHEHIANLAGSPAIKKGILQTVKVVDELVKVMGRHKPENIVIEMARENQTTQKGQKNSRERMKRIEEGIKELGSQILKEHPVENTQLQNEKLYLYYLQNGRDMYVDQELDINRLSDYDVDHIVPQSFLKDDSIDNKVLTRSDKARGKSDNVPSEEVVKKMKNYWRQLLNAKLITQRKFDNLTKAERGGLSELDKAGFIKRQLVETRQITKHVAQILDSRMNTKYDENDKLIREVKVITLKSKLVSDFRKDFQFYKVREINNYHHAHDAYLNAVVGTALIKKYPKLESEFVYGDYKVYDVRKMIAKSEQEIGKATAKYFFYSNIMNFFKTEITLANGEIRKRPLIETNGETGEIVWDKGRDFATVRKVLSMPQVNIVKKTEVQTGGFSKESILPKRNSDKLIARKKDWDPKKYGGFDSPTVAYSVLVVAKVEKGKSKKLKSVKELLGITIMERSSFEKNPIDFLEAKGYKEVKKDLIIKLPKYSLFELENGRKRMLASAGELQKGNELALPSKYVNFLYLASHYEKLKGSPEDNEQKQLFVEQHKHYLDEIIEQISEFSKRVILADANLDKVLSAYNKHRDKPIREQAENIIHLFTLTNLGAPAAFKYFDTTIDRKRYTSTKEVLDATLIHQSITGLYETRIDLSQLGGDGGGSSPAPEAAAKGGLATAVDILAPQRYADPITWKSDEPVWVDQWPLTQEKLAAAQQLVQEQLQAGHIIESNSPWNTPIFVIKKKSGKWRLLQDLRAVNATMVLMGALQPGLPSPVAIPQGYFKIVIDLKDCFFTIPLQPVDQKRFAFSLPSTNFKQPMKRYQWKVLPQGMANSPTLCQKYVAAAIEPVRKSWAQMYIIHYMDDILIAGKLGEQVLQCFAQLKQALTTTGLQIAPEKVQLQDPYTYLGFQINGPKITNQKAVIRRDKLQTLNDFQKLLGDINWLRPYLHLTTGDLKPLFDILKGDSNPNSPRSLSEAALASLQKVETAIAEQFVTQIDYTQPLTFLIFNTTLTPTGLFWQNNPVMWVHLPASPKKVLLPYYDAIADLIILGRDNSKKYFGLEPSTIIQPYSKSQIHWLMQNTETWPIACASYAGNIDNHYPPNKLIQFCKLHAVVFPRIISKTPLDNALLVFTDGSSTGIAAYTFEKTTVRFKTSHTSAQLVELQALIAVLSAFPHRALNVYTDSAYLAHSIPLLETVSHIKHISDTAKFFLQCQQLIYNRSIPFYLGHIRAHSGLPGPLSQGNHITDLATKVVATTLTTAGKRTADGSEFEKRTADGSEFESPKKKAKVE

SEQ ID NO: 754 - protein, 2010 aa, synthetic construct
MPAAKRVKLDGGDKKYSIGLDIGTNSVGWAVITDEYKVPSKKFKVLGNTDRHSIKKNLIGALLFDSGETAEATRLKRTARRRYTRRKNRICYLQEIFSNEMAKVDDSFFHRLEESFLVEEDKKHERHPIFGNIVDEVAYHEKYPTIYHLRKKLVDSTDKADLRLIYLALAHMIKFRGHFLIEGDLNPDNSDVDKLFIQLVQTYNQLFEENPINASGVDAKAILSARLSKSRRLENLIAQLPGEKKNGLFGNLIALSLGLTPNFKSNFDLAEDAKLQLSKDTYDDDLDNLLAQIGDQYADLFLAAKNLSDAILLSDILRVNTEITKAPLSASMIKRYDEHHQDLTLLKALVRQQLPEKYKEIFFDQSKNGYAGYIDGGASQEEFYKFIKPILEKMDGTEELLVKLNREDLLRKQRTFDNGSIPHQIHLGELHAILRRQEDFYPFLKDNREKIEKILTFRIPYYVGPLARGNSRFAWMTRKSEETITPWNFEEVVDKGASAQSFIERMTNFDKNLPNEKVLPKHSLLYEYFTVYNELTKVKYVTEGMRKPAFLSGEQKKAIVDLLFKTNRKVTVKQLKEDYFKKIECFDSVEISGVEDRFNASLGTYHDLLKIIKDKDFLDNEENEDILEDIVLTLTLFEDREMIEERLKTYAHLFDDKVMKQLKRRRYTGWGRLSRKLINGIRDKQSGKTILDFLKSDGFANRNFMQLIHDDSLTFKEDIQKAQVSGQGDSLHEHIANLAGSPAIKKGILQTVKVVDELVKVMGRHKPENIVIEMARENQTTQKGQKNSRERMKRIEEGIKELGSQILKEHPVENTQLQNEKLYLYYLQNGRDMYVDQELDINRLSDYDVDHIVPQSFLKDDSIDNKVLTRSDKARGKSDNVPSEEVVKKMKNYWRQLLNAKLITQRKFDNLTKAERGGLSELDKAGFIKRQLVETRQITKHVAQILDSRMNTKYDENDKLIREVKVITLKSKLVSDFRKDFQFYKVREINNYHHAHDAYLNAVVGTALIKKYPKLESEFVYGDYKVYDVRKMIAKSEQEIGKATAKYFFYSNIMNFFKTEITLANGEIRKRPLIETNGETGEIVWDKGRDFATVRKVLSMPQVNIVKKTEVQTGGFSKESILPKRNSDKLIARKKDWDPKKYGGFDSPTVAYSVLVVAKVEKGKSKKLKSVKELLGITIMERSSFEKNPIDFLEAKGYKEVKKDLIIKLPKYSLFELENGRKRMLASAGELQKGNELALPSKYVNFLYLASHYEKLKGSPEDNEQKQLFVEQHKHYLDEIIEQISEFSKRVILADANLDKVLSAYNKHRDKPIREQAENIIHLFTLTNLGAPAAFKYFDTTIDRKRYTSTKEVLDATLIHQSITGLYETRIDLSQLGGDGGGSSGGSEAAAKGGLATAVDILAPQRYADPITWKSDEPVWVDQWPLTQEKLAAAQQLVQEQLQAGHIIESNSPWNTPIFVIKKKSGKWRLLQDLRAVNATMVLMGALQPGLPSPVAIPQGYFKIVIDLKDCFFTIPLQPVDQKRFAFSLPSTNFKQPMKRYQWKVLPQGMANSPTLCQKYVAAAIEPVRKSWAQMYIIHYMDDILIAGKLGEQVLQCFAQLKQALTTTGLQIAPEKVQLQDPYTYLGFQINGPKITNQKAVIRRDKLQTLNDFQKLLGDINWLRPYLHLTTGDLKPLFDILKGDSNPNSPRSLSEAALASLQKVETAIAEQFVTQIDYTQPLTFLIFNTTLTPTGLFWQNNPVMWVHLPASPKKVLLPYYDAIADLIILGRDNSKKYFGLEPSTIIQPYSKSQIHWLMQNTETWPIACASYAGNIDNHYPPNKLIQFCKLHAVVFPRIISKTPLDNALLVFTDGSSTGIAAYTFEKTTVRFKTSHTSAQLVELQALIAVLSAFPHRALNVYTDSAYLAHSIPLLETVSHIKHISDTAKFFLQCQQLIYNRSIPFYLGHIRAHSGLPGPLSQGNHITDLATKVVATTLTTAGKRTADGSEFEKRTADGSEFESPKKKAKVE

SEQ ID NO: 755 - protein, 2008 aa, synthetic construct
MPAAKRVKLDGGDKKYSIGLDIGTNSVGWAVITDEYKVPSKKFKVLGNTDRHSIKKNLIGALLFDSGETAEATRLKRTARRRYTRRKNRICYLQEIFSNEMAKVDDSFFHRLEESFLVEEDKKHERHPIFGNIVDEVAYHEKYPTIYHLRKKLVDSTDKADLRLIYLALAHMIKFRGHFLIEGDLNPDNSDVDKLFIQLVQTYNQLFEENPINASGVDAKAILSARLSKSRRLENLIAQLPGEKKNGLFGNLIALSLGLTPNFKSNFDLAEDAKLQLSKDTYDDDLDNLLAQIGDQYADLFLAAKNLSDAILLSDILRVNTEITKAPLSASMIKRYDEHHQDLTLLKALVRQQLPEKYKEIFFDQSKNGYAGYIDGGASQEEFYKFIKPILEKMDGTEELLVKLNREDLLRKQRTFDNGSIPHQIHLGELHAILRRQEDFYPFLKDNREKIEKILTFRIPYYVGPLARGNSRFAWMTRKSEETITPWNFEEVVDKGASAQSFIERMTNFDKNLPNEKVLPKHSLLYEYFTVYNELTKVKYVTEGMRKPAFLSGEQKKAIVDLLFKTNRKVTVKQLKEDYFKKIECFDSVEISGVEDRFNASLGTYHDLLKIIKDKDFLDNEENEDILEDIVLTLTLFEDREMIEERLKTYAHLFDDKVMKQLKRRRYTGWGRLSRKLINGIRDKQSGKTILDFLKSDGFANRNFMQLIHDDSLTFKEDIQKAQVSGQGDSLHEHIANLAGSPAIKKGILQTVKVVDELVKVMGRHKPENIVIEMARENQTTQKGQKNSRERMKRIEEGIKELGSQILKEHPVENTQLQNEKLYLYYLQNGRDMYVDQELDINRLSDYDVDHIVPQSFLKDDSIDNKVLTRSDKARGKSDNVPSEEVVKKMKNYWRQLLNAKLITQRKFDNLTKAERGGLSELDKAGFIKRQLVETRQITKHVAQILDSRMNTKYDENDKLIREVKVITLKSKLVSDFRKDFQFYKVREINNYHHAHDAYLNAVVGTALIKKYPKLESEFVYGDYKVYDVRKMIAKSEQEIGKATAKYFFYSNIMNFFKTEITLANGEIRKRPLIETNGETGEIVWDKGRDFATVRKVLSMPQVNIVKKTEVQTGGFSKESILPKRNSDKLIARKKDWDPKKYGGFDSPTVAYSVLVVAKVEKGKSKKLKSVKELLGITIMERSSFEKNPIDFLEAKGYKEVKKDLIIKLPKYSLFELENGRKRMLASAGELQKGNELALPSKYVNFLYLASHYEKLKGSPEDNEQKQLFVEQHKHYLDEIIEQISEFSKRVILADANLDKVLSAYNKHRDKPIREQAENIIHLFTLTNLGAPAAFKYFDTTIDRKRYTSTKEVLDATLIHQSITGLYETRIDLSQLGGDGGPAPGGGGGSGGLATAVDILAPQRYADPITWKSDEPVWVDQWPLTQEKLAAAQQLVQEQLQAGHIIESNSPWNTPIFVIKKKSGKWRLLQDLRAVNATMVLMGALQPGLPSPVAIPQGYFKIVIDLKDCFFTIPLQPVDQKRFAFSLPSTNFKQPMKRYQWKVLPQGMANSPTLCQKYVAAAIEPVRKSWAQMYIIHYMDDILIAGKLGEQVLQCFAQLKQALTTTGLQIAPEKVQLQDPYTYLGFQINGPKITNQKAVIRRDKLQTLNDFQKLLGDINWLRPYLHLTTGDLKPLFDILKGDSNPNSPRSLSEAALASLQKVETAIAEQFVTQIDYTQPLTFLIFNTTLTPTGLFWQNNPVMWVHLPASPKKVLLPYYDAIADLIILGRDNSKKYFGLEPSTIIQPYSKSQIHWLMQNTETWPIACASYAGNIDNHYPPNKLIQFCKLHAVVFPRIISKTPLDNALLVFTDGSSTGIAAYTFEKTTVRFKTSHTSAQLVELQALIAVLSAFPHRALNVYTDSAYLAHSIPLLETVSHIKHISDTAKFFLQCQQLIYNRSIPFYLGHIRAHSGLPGPLSQGNHITDLATKVVATTLTTAGKRTADGSEFEKRTADGSEFESPKKKAKVE

SEQ ID NO: 756 - protein, 2005 aa, synthetic construct
MPAAKRVKLDGGDKKYSIGLDIGTNSVGWAVITDEYKVPSKKFKVLGNTDRHSIKKNLIGALLFDSGETAEATRLKRTARRRYTRRKNRICYLQEIFSNEMAKVDDSFFHRLEESFLVEEDKKHERHPIFGNIVDEVAYHEKYPTIYHLRKKLVDSTDKADLRLIYLALAHMIKFRGHFLIEGDLNPDNSDVDKLFIQLVQTYNQLFEENPINASGVDAKAILSARLSKSRRLENLIAQLPGEKKNGLFGNLIALSLGLTPNFKSNFDLAEDAKLQLSKDTYDDDLDNLLAQIGDQYADLFLAAKNLSDAILLSDILRVNTEITKAPLSASMIKRYDEHHQDLTLLKALVRQQLPEKYKEIFFDQSKNGYAGYIDGGASQEEFYKFIKPILEKMDGTEELLVKLNREDLLRKQRTFDNGSIPHQIHLGELHAILRRQEDFYPFLKDNREKIEKILTFRIPYYVGPLARGNSRFAWMTRKSEETITPWNFEEVVDKGASAQSFIERMTNFDKNLPNEKVLPKHSLLYEYFTVYNELTKVKYVTEGMRKPAFLSGEQKKAIVDLLFKTNRKVTVKQLKEDYFKKIECFDSVEISGVEDRFNASLGTYHDLLKIIKDKDFLDNEENEDILEDIVLTLTLFEDREMIEERLKTYAHLFDDKVMKQLKRRRYTGWGRLSRKLINGIRDKQSGKTILDFLKSDGFANRNFMQLIHDDSLTFKEDIQKAQVSGQGDSLHEHIANLAGSPAIKKGILQTVKVVDELVKVMGRHKPENIVIEMARENQTTQKGQKNSRERMKRIEEGIKELGSQILKEHPVENTQLQNEKLYLYYLQNGRDMYVDQELDINRLSDYDVDHIVPQSFLKDDSIDNKVLTRSDKARGKSDNVPSEEVVKKMKNYWRQLLNAKLITQRKFDNLTKAERGGLSELDKAGFIKRQLVETRQITKHVAQILDSRMNTKYDENDKLIREVKVITLKSKLVSDFRKDFQFYKVREINNYHHAHDAYLNAVVGTALIKKYPKLESEFVYGDYKVYDVRKMIAKSEQEIGKATAKYFFYSNIMNFFKTEITLANGEIRKRPLIETNGETGEIVWDKGRDFATVRKVLSMPQVNIVKKTEVQTGGFSKESILPKRNSDKLIARKKDWDPKKYGGFDSPTVAYSVLVVAKVEKGKSKKLKSVKELLGITIMERSSFEKNPIDFLEAKGYKEVKKDLIIKLPKYSLFELENGRKRMLASAGELQKGNELALPSKYVNFLYLASHYEKLKGSPEDNEQKQLFVEQHKHYLDEIIEQISEFSKRVILADANLDKVLSAYNKHRDKPIREQAENIIHLFTLTNLGAPAAFKYFDTTIDRKRYTSTKEVLDATLIHQSITGLYETRIDLSQLGGDGGGGGGGSGGLATAVDILAPQRYADPITWKSDEPVWVDQWPLTQEKLAAAQQLVQEQLQAGHIIESNSPWNTPIFVIKKKSGKWRLLQDLRAVNATMVLMGALQPGLPSPVAIPQGYFKIVIDLKDCFFTIPLQPVDQKRFAFSLPSTNFKQPMKRYQWKVLPQGMANSPTLCQKYVAAAIEPVRKSWAQMYIIHYMDDILIAGKLGEQVLQCFAQLKQALTTTGLQIAPEKVQLQDPYTYLGFQINGPKITNQKAVIRRDKLQTLNDFQKLLGDINWLRPYLHLTTGDLKPLFDILKGDSNPNSPRSLSEAALASLQKVETAIAEQFVTQIDYTQPLTFLIFNTTLTPTGLFWQNNPVMWVHLPASPKKVLLPYYDAIADLIILGRDNSKKYFGLEPSTIIQPYSKSQIHWLMQNTETWPIACASYAGNIDNHYPPNKLIQFCKLHAVVFPRIISKTPLDNALLVFTDGSSTGIAAYTFEKTTVRFKTSHTSAQLVELQALIAVLSAFPHRALNVYTDSAYLAHSIPLLETVSHIKHISDTAKFFLQCQQLIYNRSIPFYLGHIRAHSGLPGPLSQGNHITDLATKVVATTLTTAGKRTADGSEFEKRTADGSEFESPKKKAKVE

SEQ ID NO: 757 - protein, 2014 aa, synthetic construct
MPAAKRVKLDGGDKKYSIGLDIGTNSVGWAVITDEYKVPSKKFKVLGNTDRHSIKKNLIGALLFDSGETAEATRLKRTARRRYTRRKNRICYLQEIFSNEMAKVDDSFFHRLEESFLVEEDKKHERHPIFGNIVDEVAYHEKYPTIYHLRKKLVDSTDKADLRLIYLALAHMIKFRGHFLIEGDLNPDNSDVDKLFIQLVQTYNQLFEENPINASGVDAKAILSARLSKSRRLENLIAQLPGEKKNGLFGNLIALSLGLTPNFKSNFDLAEDAKLQLSKDTYDDDLDNLLAQIGDQYADLFLAAKNLSDAILLSDILRVNTEITKAPLSASMIKRYDEHHQDLTLLKALVRQQLPEKYKEIFFDQSKNGYAGYIDGGASQEEFYKFIKPILEKMDGTEELLVKLNREDLLRKQRTFDNGSIPHQIHLGELHAILRRQEDFYPFLKDNREKIEKILTFRIPYYVGPLARGNSRFAWMTRKSEETITPWNFEEVVDKGASAQSFIERMTNFDKNLPNEKVLPKHSLLYEYFTVYNELTKVKYVTEGMRKPAFLSGEQKKAIVDLLFKTNRKVTVKQLKEDYFKKIECFDSVEISGVEDRFNASLGTYHDLLKIIKDKDFLDNEENEDILEDIVLTLTLFEDREMIEERLKTYAHLFDDKVMKQLKRRRYTGWGRLSRKLINGIRDKQSGKTILDFLKSDGFANRNFMQLIHDDSLTFKEDIQKAQVSGQGDSLHEHIANLAGSPAIKKGILQTVKVVDELVKVMGRHKPENIVIEMARENQTTQKGQKNSRERMKRIEEGIKELGSQILKEHPVENTQLQNEKLYLYYLQNGRDMYVDQELDINRLSDYDVDHIVPQSFLKDDSIDNKVLTRSDKARGKSDNVPSEEVVKKMKNYWRQLLNAKLITQRKFDNLTKAERGGLSELDKAGFIKRQLVETRQITKHVAQILDSRMNTKYDENDKLIREVKVITLKSKLVSDFRKDFQFYKVREINNYHHAHDAYLNAVVGTALIKKYPKLESEFVYGDYKVYDVRKMIAKSEQEIGKATAKYFFYSNIMNFFKTEITLANGEIRKRPLIETNGETGEIVWDKGRDFATVRKVLSMPQVNIVKKTEVQTGGFSKESILPKRNSDKLIARKKDWDPKKYGGFDSPTVAYSVLVVAKVEKGKSKKLKSVKELLGITIMERSSFEKNPIDFLEAKGYKEVKKDLIIKLPKYSLFELENGRKRMLASAGELQKGNELALPSKYVNFLYLASHYEKLKGSPEDNEQKQLFVEQHKHYLDEIIEQISEFSKRVILADANLDKVLSAYNKHRDKPIREQAENIIHLFTLTNLGAPAAFKYFDTTIDRKRYTSTKEVLDATLIHQSITGLYETRIDLSQLGGDGGGSSGSSGSSGSSGSSGGLATAVDILAPQRYADPITWKSDEPVWVDQWPLTQEKLAAAQQLVQEQLQAGHIIESNSPWNTPIFVIKKKSGKWRLLQDLRAVNATMVLMGALQPGLPSPVAPPQGYFKIVIDLKDCFFTIPLQPVDQKRFAFSLPSTNFKQPMKRYQWKVLPQGMANSPTLCQKYVAAAIEPVRKSWAQMYIIHYMDDILIAGKLGEQVLQCFAQLKQALTTTGLQIAPEKVQLQDPYTYLGFQINGPKITNQKAVIRRDKLQTLNDFQKLLGDINWLRPYLHLTTGDLKPLFDILKGDSNPNSPRSLSEAALASLQKVETAIAEQFVTQIDYTQPLTFLIFNTTLTPTGLFWQNNPVMWVHLPASPKKVLLPYYDAIADLIILGRDNSKKYFGLEPSTIIQPYSKSQIHWLMQNTETWPIACASYAGNIDNHYPPNKLIQFCKLHAVVFPRIISKTPLDNALLVFTDGSSTGIAAYTFEKTTVRFKTSHTSAQLVELQALIAVLSAFPHRALNVYTDSAYLAHSIPLLETVSHIKHISDTAKFFLQCQQLIYNRSIPFYLGHIRAHSGLPGPLSQGNHITDLATKVVATTLTTAGKRTADGSEFEKRTADGSEFESPKKKAKVE

SEQ ID NO: 758 - protein, 2010 aa, synthetic construct
MPAAKRVKLDGGDKKYSIGLDIGTNSVGWAVITDEYKVPSKKFKVLGNTDRHSIKKNLIGALLFDSGETAEATRLKRTARRRYTRRKNRICYLQEIFSNEMAKVDDSFFHRLEESFLVEEDKKHERHPIFGNIVDEVAYHEKYPTIYHLRKKLVDSTDKADLRLIYLALAHMIKFRGHFLIEGDLNPDNSDVDKLFIQLVQTYNQLFEENPINASGVDAKAILSARLSKSRRLENLIAQLPGEKKNGLFGNLIALSLGLTPNFKSNFDLAEDAKLQLSKDTYDDDLDNLLAQIGDQYADLFLAAKNLSDAILLSDILRVNTEITKAPLSASMIKRYDEHHQDLTLLKALVRQQLPEKYKEIFFDQSKNGYAGYIDGGASQEEFYKFIKPILEKMDGTEELLVKLNREDLLRKQRTFDNGSIPHQIHLGELHAILRRQEDFYPFLKDNREKIEKILTFRIPYYVGPLARGNSRFAWMTRKSEETITPWNFEEVVDKGASAQSFIERMTNFDKNLPNEKVLPKHSLLYEYFTVYNELTKVKYVTEGMRKPAFLSGEQKKAIVDLLFKTNRKVTVKQLKEDYFKKIECFDSVEISGVEDRFNASLGTYHDLLKIIKDKDFLDNEENEDILEDIVLTLTLFEDREMIEERLKTYAHLFDDKVMKQLKRRRYTGWGRLSRKLINGIRDKQSGKTILDFLKSDGFANRNFMQLIHDDSLTFKEDIQKAQVSGQGDSLHEHIANLAGSPAIKKGILQTVKVVDELVKVMGRHKPENIVIEMARENQTTQKGQKNSRERMKRIEEGIKELGSQILKEHPVENTQLQNEKLYLYYLQNGRDMYVDQELDINRLSDYDVDHIVPQSFLKDDSIDNKVLTRSDKARGKSDNVPSEEVVKKMKNYWRQLLNAKLITQRKFDNLTKAERGGLSELDKAGFIKRQLVETRQITKHVAQILDSRMNTKYDENDKLIREVKVITLKSKLVSDFRKDFQFYKVREINNYHHAHDAYLNAVVGTALIKKYPKLESEFVYGDYKVYDVRKMIAKSEQEIGKATAKYFFYSNIMNFFKTEITLANGEIRKRPLIETNGETGEIVWDKGRDFATVRKVLSMPQVNIVKKTEVQTGGFSKESILPKRNSDKLIARKKDWDPKKYGGFDSPTVAYSVLVVAKVEKGKSKKLKSVKELLGITIMERSSFEKNPIDFLEAKGYKEVKKDLIIKLPKYSLFELENGRKRMLASAGELQKGNELALPSKYVNFLYLASHYEKLKGSPEDNEQKQLFVEQHKHYLDEIIEQISEFSKRVILADANLDKVLSAYNKHRDKPIREQAENIIHLFTLTNLGAPAAFKYFDTTIDRKRYTSTKEVLDATLIHQSITGLYETRIDLSQLGGDGGGSSPAPEAAAKGGLATAVDILAPQRYADPITWKSDEPVWVDQWPLTQEKLAAAQQLVQEQLQAGHIIESNSPWNTPIFVIKKKSGKWRLLQDLRAVNATMVLMGALQPGLPSPVAPPQGYFKIVIDLKDCFFTIPLQPVDQKRFAFSLPSTNFKQPMKRYQWKVLPQGMANSPTLCQKYVAAAIEPVRKSWAQMYIIHYMDDILIAGKLGEQVLQCFAQLKQALTTTGLQIAPEKVQLQDPYTYLGFQINGPKITNQKAVIRRDKLQTLNDFQKLLGDINWLRPYLHLTTGDLKPLFDILKGDSNPNSPRSLSEAALASLQKVETAIAEQFVTQIDYTQPLTFLIFNTTLTPTGLFWQNNPVMWVHLPASPKKVLLPYYDAIADLIILGRDNSKKYFGLEPSTIIQPYSKSQIHWLMQNTETWPIACASYAGNIDNHYPPNKLIQFCKLHAVVFPRIISKTPLDNALLVFTDGSSTGIAAYTFEKTTVRFKTSHTSAQLVELQALIAVLSAFPHRALNVYTDSAYLAHSIPLLETVSHIKHISDTAKFFLQCQQLIYNRSIPFYLGHIRAHSGLPGPLSQGNHITDLATKVVATTLTTAGKRTADGSEFEKRTADGSEFESPKKKAKVE

SEQ ID NO: 759 - protein, 2072 aa, synthetic construct
MPAAKRVKLDGGDKKYSIGLDIGTNSVGWAVITDEYKVPSKKFKVLGNTDRHSIKKNLIGALLFDSGETAEATRLKRTARRRYTRRKNRICYLQEIFSNEMAKVDDSFFHRLEESFLVEEDKKHERHPIFGNIVDEVAYHEKYPTIYHLRKKLVDSTDKADLRLIYLALAHMIKFRGHFLIEGDLNPDNSDVDKLFIQLVQTYNQLFEENPINASGVDAKAILSARLSKSRRLENLIAQLPGEKKNGLFGNLIALSLGLTPNFKSNFDLAEDAKLQLSKDTYDDDLDNLLAQIGDQYADLFLAAKNLSDAILLSDILRVNTEITKAPLSASMIKRYDEHHQDLTLLKALVRQQLPEKYKEIFFDQSKNGYAGYIDGGASQEEFYKFIKPILEKMDGTEELLVKLNREDLLRKQRTFDNGSIPHQIHLGELHAILRRQEDFYPFLKDNREKIEKILTFRIPYYVGPLARGNSRFAWMTRKSEETITPWNFEEVVDKGASAQSFIERMTNFDKNLPNEKVLPKHSLLYEYFTVYNELTKVKYVTEGMRKPAFLSGEQKKAIVDLLFKTNRKVTVKQLKEDYFKKIECFDSVEISGVEDRFNASLGTYHDLLKIIKDKDFLDNEENEDILEDIVLTLTLFEDREMIEERLKTYAHLFDDKVMKQLKRRRYTGWGRLSRKLINGIRDKQSGKTILDFLKSDGFANRNFMQLIHDDSLTFKEDIQKAQVSGQGDSLHEHIANLAGSPAIKKGILQTVKVVDELVKVMGRHKPENIVIEMARENQTTQKGQKNSRERMKRIEEGIKELGSQILKEHPVENTQLQNEKLYLYYLQNGRDMYVDQELDINRLSDYDVDHIVPQSFLKDDSIDNKVLTRSDKARGKSDNVPSEEVVKKMKNYWRQLLNAKLITQRKFDNLTKAERGGLSELDKAGFIKRQLVETRQITKHVAQILDSRMNTKYDENDKLIREVKVITLKSKLVSDFRKDFQFYKVREINNYHHAHDAYLNAVVGTALIKKYPKLESEFVYGDYKVYDVRKMIAKSEQEIGKATAKYFFYSNIMNFFKTEITLANGEIRKRPLIETNGETGEIVWDKGRDFATVRKVLSMPQVNIVKKTEVQTGGFSKESILPKRNSDKLIARKKDWDPKKYGGFDSPTVAYSVLVVAKVEKGKSKKLKSVKELLGITIMERSSFEKNPIDFLEAKGYKEVKKDLIIKLPKYSLFELENGRKRMLASAGELQKGNELALPSKYVNFLYLASHYEKLKGSPEDNEQKQLFVEQHKHYLDEIIEQISEFSKRVILADANLDKVLSAYNKHRDKPIREQAENIIHLFTLTNLGAPAAFKYFDTTIDRKRYTSTKEVLDATLIHQSITGLYETRIDLSQLGGDGGPAPEAAAKGGSCQTKNTLNIDEYLLQFPDQLWASLPTDIGRMLVPPITIKIKDNASLPSIRQYPLPKDKTEGLRPLISSLENQGILIKCHSPCNTPIFPIKKAGRDEYRMIHDLRAINNIVAPLTAVVASPTTVLSNLAPSLHWFTVIDLSNAFFSVPIHKDSQYLFAFTFEGHQYTWTVLPQGFIHSPTLFSQALYQSLHKIKFKISSEICIYMDDVLIASKDRDTNLKDTAVMLQHLASEGHKVSKKKLQLCQQEVVYLGQLLTPEGRKILPDRKVTVSQFQQPTTIRQIRAFLGLVGYCRHWIPEFSIHSKFLEKQLKKDTAEPFQLDDQQVEAFNKLKHAITTAPVLVVPDPAKPFQLYTSHSEHASIAVLTQKHAGRTRPIAFLSSKFDAIESGLPPCLKACASIHRSLTQADSFILGAPLIIYTTHAICTLLQRDRSQLVTASRFSKWEADLLRPELTFVACSAVSPAHLYMQSCENNIPPHDCVLLTHTISRPRPDLSDLPIPDPDMTLFSDGSYTTGRGGAAVVMHRPVTDDFIIIHQQPGGASAQTAELLALAAACHLATDKTVNIYTDSRYAYGVVHDFGHLWMHRGFVTSAGTPIKNHKEIEYLLKQIMKPKQVSVIKIEAHTKGVSMEVRGNAAADEAAKNAVFLVQRAGKRTADGSEFEKRTADGSEFESPKKKAKVE

SEQ ID NO: 760 - protein, 2070 aa, synthetic construct
MPAAKRVKLDGGDKKYSIGLDIGTNSVGWAVITDEYKVPSKKFKVLGNTDRHSIKKNLIGALLFDSGETAEATRLKRTARRRYTRRKNRICYLQEIFSNEMAKVDDSFFHRLEESFLVEEDKKHERHPIFGNIVDEVAYHEKYPTIYHLRKKLVDSTDKADLRLIYLALAHMIKFRGHFLIEGDLNPDNSDVDKLFIQLVQTYNQLFEENPINASGVDAKAILSARLSKSRRLENLIAQLPGEKKNGLFGNLIALSLGLTPNFKSNFDLAEDAKLQLSKDTYDDDLDNLLAQIGDQYADLFLAAKNLSDAILLSDILRVNTEITKAPLSASMIKRYDEHHQDLTLLKALVRQQLPEKYKEIFFDQSKNGYAGYIDGGASQEEFYKFIKPILEKMDGTEELLVKLNREDLLRKQRTFDNGSIPHQIHLGELHAILRRQEDFYPFLKDNREKIEKILTFRIPYYVGPLARGNSRFAWMTRKSEETITPWNFEEVVDKGASAQSFIERMTNFDKNLPNEKVLPKHSLLYEYFTVYNELTKVKYVTEGMRKPAFLSGEQKKAIVDLLFKTNRKVTVKQLKEDYFKKIECFDSVEISGVEDRFNASLGTYHDLLKIIKDKDFLDNEENEDILEDIVLTLTLFEDREMIEERLKTYAHLFDDKVMKQLKRRRYTGWGRLSRKLINGIRDKQSGKTILDFLKSDGFANRNFMQLIHDDSLTFKEDIQKAQVSGQGDSLHEHIANLAGSPAIKKGILQTVKVVDELVKVMGRHKPENIVIEMARENQTTQKGQKNSRERMKRIEEGIKELGSQILKEHPVENTQLQNEKLYLYYLQNGRDMYVDQELDINRLSDYDVDHIVPQSFLKDDSIDNKVLTRSDKARGKSDNVPSEEVVKKMKNYWRQLLNAKLITQRKFDNLTKAERGGLSELDKAGFIKRQLVETRQITKHVAQILDSRMNTKYDENDKLIREVKVITLKSKLVSDFRKDFQFYKVREINNYHHAHDAYLNAVVGTALIKKYPKLESEFVYGDYKVYDVRKMIAKSEQEIGKATAKYFFYSNIMNFFKTEITLANGEIRKRPLIETNGETGEIVWDKGRDFATVRKVLSMPQVNIVKKTEVQTGGFSKESILPKRNSDKLIARKKDWDPKKYGGFDSPTVAYSVLVVAKVEKGKSKKLKSVKELLGITIMERSSFEKNPIDFLEAKGYKEVKKDLIIKLPKYSLFELENGRKRMLASAGELQKGNELALPSKYVNFLYLASHYEKLKGSPEDNEQKQLFVEQHKHYLDEIIEQISEFSKRVILADANLDKVLSAYNKHRDKPIREQAENIIHLFTLTNLGAPAAFKYFDTTIDRKRYTSTKEVLDATLIHQSITGLYETRIDLSQLGGDGGGGGGGGGGSCQTKNTLNIDEYLLQFPDQLWASLPTDIGRMLVPPITIKIKDNASLPSIRQYPLPKDKTEGLRPLISSLENQGILIKCHSPCNTPIFPIKKAGRDEYRMIHDLRAINNIVAPLTAVVASPTTVLSNLAPSLHWFTVIDLSNAFFSVPIHKDSQYLFAFTFEGHQYTWTVLPQGFIHSPTLFSQALYQSLHKIKFKISSEICIYMDDVLIASKDRDTNLKDTAVMLQHLASEGHKVSKKKLQLCQQEVVYLGQLLTPEGRKILPDRKVTVSQFQQPTTIRQIRAFLGLVGYCRHWIPEFSIHSKFLEKQLKKDTAEPFQLDDQQVEAFNKLKHAITTAPVLVVPDPAKPFQLYTSHSEHASIAVLTQKHAGRTRPIAFLSSKFDAIESGLPPCLKACASIHRSLTQADSFILGAPLIIYTTHAICTLLQRDRSQLVTASRFSKWEADLLRPELTFVACSAVSPAHLYMQSCENNIPPHDCVLLTHTISRPRPDLSDLPIPDPDMTLFSDGSYTTGRGGAAVVMHRPVTDDFIIIHQQPGGASAQTAELLALAAACHLATDKTVNIYTDSRYAYGVVHDFGHLWMHRGFVTSAGTPIKNHKEIEYLLKQIMKPKQVSVIKIEAHTKGVSMEVRGNAAADEAAKNAVFLVQRAGKRTADGSEFEKRTADGSEFESPKKKAKVE

SEQ ID NO: 761 - protein, 2077 aa, synthetic construct
MPAAKRVKLDGGDKKYSIGLDIGTNSVGWAVITDEYKVPSKKFKVLGNTDRHSIKKNLIGALLFDSGETAEATRLKRTARRRYTRRKNRICYLQEIFSNEMAKVDDSFFHRLEESFLVEEDKKHERHPIFGNIVDEVAYHEKYPTIYHLRKKLVDSTDKADLRLIYLALAHMIKFRGHFLIEGDLNPDNSDVDKLFIQLVQTYNQLFEENPINASGVDAKAILSARLSKSRRLENLIAQLPGEKKNGLFGNLIALSLGLTPNFKSNFDLAEDAKLQLSKDTYDDDLDNLLAQIGDQYADLFLAAKNLSDAILLSDILRVNTEITKAPLSASMIKRYDEHHQDLTLLKALVRQQLPEKYKEIFFDQSKNGYAGYIDGGASQEEFYKFIKPILEKMDGTEELLVKLNREDLLRKQRTFDNGSIPHQIHLGELHAILRRQEDFYPFLKDNREKIEKILTFRIPYYVGPLARGNSRFAWMTRKSEETITPWNFEEVVDKGASAQSFIERMTNFDKNLPNEKVLPKHSLLYEYFTVYNELTKVKYVTEGMRKPAFLSGEQKKAIVDLLFKTNRKVTVKQLKEDYFKKIECFDSVEISGVEDRFNASLGTYHDLLKIIKDKDFLDNEENEDILEDIVLTLTLFEDREMIEERLKTYAHLFDDKVMKQLKRRRYTGWGRLSRKLINGIRDKQSGKTILDFLKSDGFANRNFMQLIHDDSLTFKEDIQKAQVSGQGDSLHEHIANLAGSPAIKKGILQTVKVVDELVKVMGRHKPENIVIEMARENQTTQKGQKNSRERMKRIEEGIKELGSQILKEHPVENTQLQNEKLYLYYLQNGRDMYVDQELDINRLSDYDVDHIVPQSFLKDDSIDNKVLTRSDKARGKSDNVPSEEVVKKMKNYWRQLLNAKLITQRKFDNLTKAERGGLSELDKAGFIKRQLVETRQITKHVAQILDSRMNTKYDENDKLIREVKVITLKSKLVSDFRKDFQFYKVREINNYHHAHDAYLNAVVGTALIKKYPKLESEFVYGDYKVYDVRKMIAKSEQEIGKATAKYFFYSNIMNFFKTEITLANGEIRKRPLIETNGETGEIVWDKGRDFATVRKVLSMPQVNIVKKTEVQTGGFSKESILPKRNSDKLIARKKDWDPKKYGGFDSPTVAYSVLVVAKVEKGKSKKLKSVKELLGITIMERSSFEKNPIDFLEAKGYKEVKKDLIIKLPKYSLFELENGRKRMLASAGELQKGNELALPSKYVNFLYLASHYEKLKGSPEDNEQKQLFVEQHKHYLDEIIEQISEFSKRVILADANLDKVLSAYNKHRDKPIREQAENIIHLFTLTNLGAPAAFKYFDTTIDRKRYTSTKEVLDATLIHQSITGLYETRIDLSQLGGDGGPAPAPAPAPAPAPGGSCQTKNTLNIDEYLLQFPDQLWASLPTDIGRMLVPPITIKIKDNASLPSIRQYPLPKDKTEGLRPLISSLENQGILIKCHSPCNTPIFPIKKAGRDEYRMIHDLRAINNIVAPLTAVVASPTTVLSNLAPSLHWFTVIDLSNAFFSVPIHKDSQYLFAFTFEGHQYTWTVLPQGFIHSPTLFSQALYQSLHKIKFKISSEICIYMDDVLIASKDRDTNLKDTAVMLQHLASEGHKVSKKKLQLCQQEVVYLGQLLTPEGRKILPDRKVTVSQFQQPTTIRQIRAFLGLVGYCRHWIPEFSIHSKFLEKQLKKDTAEPFQLDDQQVEAFNKLKHAITTAPVLVVPDPAKPFQLYTSHSEHASIAVLTQKHAGRTRPIAFLSSKFDAIESGLPPCLKACASIHRSLTQADSFILGAPLIIYTTHAICTLLQRDRSQLVTASRFSKWEADLLRPELTFVACSAVSPAHLYMQSCENNIPPHDCVLLTHTISRPRPDLSDLPIPDPDMTLFSDGSYTTGRGGAAVVMHRPVTDDFIIIHQQPGGASAQTAELLALAAACHLATDKTVNIYTDSRYAYGVVHDFGHLWMHRGFVTSAGTPIKNHKEIEYLLKQIMKPKQVSVIKIEAHTKGVSMEVRGNAAADEAAKNAVFLVQRAGKRTADGSEFEKRTADGSEFESPKKKAKVE

SEQ ID NO: 762 - protein, 2079 aa, synthetic construct
MPAAKRVKLDGGDKKYSIGLDIGTNSVGWAVITDEYKVPSKKFKVLGNTDRHSIKKNLIGALLFDSGETAEATRLKRTARRRYTRRKNRICYLQEIFSNEMAKVDDSFFHRLEESFLVEEDKKHERHPIFGNIVDEVAYHEKYPTIYHLRKKLVDSTDKADLRLIYLALAHMIKFRGHFLIEGDLNPDNSDVDKLFIQLVQTYNQLFEENPINASGVDAKAILSARLSKSRRLENLIAQLPGEKKNGLFGNLIALSLGLTPNFKSNFDLAEDAKLQLSKDTYDDDLDNLLAQIGDQYADLFLAAKNLSDAILLSDILRVNTEITKAPLSASMIKRYDEHHQDLTLLKALVRQQLPEKYKEIFFDQSKNGYAGYIDGGASQEEFYKFIKPILEKMDGTEELLVKLNREDLLRKQRTFDNGSIPHQIHLGELHAILRRQEDFYPFLKDNREKIEKILTFRIPYYVGPLARGNSRFAWMTRKSEETITPWNFEEVVDKGASAQSFIERMTNFDKNLPNEKVLPKHSLLYEYFTVYNELTKVKYVTEGMRKPAFLSGEQKKAIVDLLFKTNRKVTVKQLKEDYFKKIECFDSVEISGVEDRFNASLGTYHDLLKIIKDKDFLDNEENEDILEDIVLTLTLFEDREMIEERLKTYAHLFDDKVMKQLKRRRYTGWGRLSRKLINGIRDKQSGKTILDFLKSDGFANRNFMQLIHDDSLTFKEDIQKAQVSGQGDSLHEHIANLAGSPAIKKGILQTVKVVDELVKVMGRHKPENIVIEMARENQTTQKGQKNSRERMKRIEEGIKELGSQILKEHPVENTQLQNEKLYLYYLQNGRDMYVDQELDINRLSDYDVDHIVPQSFLKDDSIDNKVLTRSDKARGKSDNVPSEEVVKKMKNYWRQLLNAKLITQRKFDNLTKAERGGLSELDKAGFIKRQLVETRQITKHVAQILDSRMNTKYDENDKLIREVKVITLKSKLVSDFRKDFQFYKVREINNYHHAHDAYLNAVVGTALIKKYPKLESEFVYGDYKVYDVRKMIAKSEQEIGKATAKYFFYSNIMNFFKTEITLANGEIRKRPLIETNGETGEIVWDKGRDFATVRKVLSMPQVNIVKKTEVQTGGFSKESILPKRNSDKLIARKKDWDPKKYGGFDSPTVAYSVLVVAKVEKGKSKKLKSVKELLGITIMERSSFEKNPIDFLEAKGYKEVKKDLIIKLPKYSLFELENGRKRMLASAGELQKGNELALPSKYVNFLYLASHYEKLKGSPEDNEQKQLFVEQHKHYLDEIIEQISEFSKRVILADANLDKVLSAYNKHRDKPIREQAENIIHLFTLTNLGAPAAFKYFDTTIDRKRYTSTKEVLDATLIHQSITGLYETRIDLSQLGGDGGGGGGSEAAAKGGGGSGGSCQTKNTLNIDEYLLQFPDQLWASLPTDIGRMLVPPITIKIKDNASLPSIRQYPLPKDKTEGLRPLISSLENQGILIKCHSPCNTPIFPIKKAGRDEYRMIHDLRAINNIVAPLTAVVASPTTVLSNLAPSLHWFTVIDLSNAFFSVPIHKDSQYLFAFTFEGHQYTWTVLPQGFIHSPTLFNQALYQSLHKIKFKISSEICIYMDDVLIASKDRDTNLKDTAVMLQHLASEGHKVSKKKLQLCQQEVVYLGQLLTPEGRKILPDRKVTVSQFQQPTTIRQIRAFLGLVGYCRHWIPEFSIHSKFLEKQLKPDTAEPFQLDDQQVEAFNKLKHAITTAPVLVVPDPAKPFQLYTSHSEHASIAVLTQKHAGRTRPIAFLSSKFDAIESGLPPCLKACASIHRSLTQADSFILGAPLIIYTTHAICTLLQRDRSQLVTASRFSKWEADLLRPELTFVACSAVSPAHLYMQSCENNIPPHDCVLLTHTISRPRPDLSDLPIPDPDMTLFSDGSYTTGRGGAAVVMHRPVTDDFIIIHQQPGGASAQTAELLALAAACHLATDKTVNIYTDSRYAYGVVHDFGHLWMHRGFVTSAGTPIKNHKEIEYLLKQIMKPKQVSVIKIEAHTKGVSMEVRGNAAADEAAKNAVFLVQRAGKRTADGSEFEKRTADGSEFESPKKKAKVE

SEQ ID NO: 763 - protein, 2110 aa, synthetic construct
MPAAKRVKLDGGDKKYSIGLDIGTNSVGWAVITDEYKVPSKKFKVLGNTDRHSIKKNLIGALLFDSGETAEATRLKRTARRRYTRRKNRICYLQEIFSNEMAKVDDSFFHRLEESFLVEEDKKHERHPIFGNIVDEVAYHEKYPTIYHLRKKLVDSTDKADLRLIYLALAHMIKFRGHFLIEGDLNPDNSDVDKLFIQLVQTYNQLFEENPINASGVDAKAILSARLSKSRRLENLIAQLPGEKKNGLFGNLIALSLGLTPNFKSNFDLAEDAKLQLSKDTYDDDLDNLLAQIGDQYADLFLAAKNLSDAILLSDILRVNTEITKAPLSASMIKRYDEHHQDLTLLKALVRQQLPEKYKEIFFDQSKNGYAGYIDGGASQEEFYKFIKPILEKMDGTEELLVKLNREDLLRKQRTFDNGSIPHQIHLGELHAILRRQEDFYPFLKDNREKIEKILTFRIPYYVGPLARGNSRFAWMTRKSEETITPWNFEEVVDKGASAQSFIERMTNFDKNLPNEKVLPKHSLLYEYFTVYNELTKVKYVTEGMRKPAFLSGEQKKAIVDLLFKTNRKVTVKQLKEDYFKKIECFDSVEISGVEDRFNASLGTYHDLLKIIKDKDFLDNEENEDILEDIVLTLTLFEDREMIEERLKTYAHLFDDKVMKQLKRRRYTGWGRLSRKLINGIRDKQSGKTILDFLKSDGFANRNFMQLIHDDSLTFKEDIQKAQVSGQGDSLHEHIANLAGSPAIKKGILQTVKVVDELVKVMGRHKPENIVIEMARENQTTQKGQKNSRERMKRIEEGIKELGSQILKEHPVENTQLQNEKLYLYYLQNGRDMYVDQELDINRLSDYDVDHIVPQSFLKDDSIDNKVLTRSDKARGKSDNVPSEEVVKKMKNYWRQLLNAKLITQRKFDNLTKAERGGLSELDKAGFIKRQLVETRQITKHVAQILDSRMNTKYDENDKLIREVKVITLKSKLVSDFRKDFQFYKVREINNYHHAHDAYLNAVVGTALIKKYPKLESEFVYGDYKVYDVRKMIAKSEQEIGKATAKYFFYSNIMNFFKTEITLANGEIRKRPLIETNGETGEIVWDKGRDFATVRKVLSMPQVNIVKKTEVQTGGFSKESILPKRNSDKLIARKKDWDPKKYGGFDSPTVAYSVLVVAKVEKGKSKKLKSVKELLGITIMERSSFEKNPIDFLEAKGYKEVKKDLIIKLPKYSLFELENGRKRMLASAGELQKGNELALPSKYVNFLYLASHYEKLKGSPEDNEQKQLFVEQHKHYLDEIIEQISEFSKRVILADANLDKVLSAYNKHRDKPIREQAENIIHLFTLTNLGAPAAFKYFDTTIDRKRYTSTKEVLDATLIHQSITGLYETRIDLSQLGGDGGAEAAAKEAAAKEAAAKEAAAKALEAEAAAKEAAAKEAAAKEAAAKAGGSCQTKNTLNIDEYLLQFPDQLWASLPTDIGRMLVPPITIKIKDNASLPSIRQYPLPKDKTEGLRPLISSLENQGILIKCHSPCNTPIFPIKKAGRDEYRMIHDLRAINNIVAPLTAVVASPTTVLSNLAPSLHWFTVIDLSNAFFSVPIHKDSQYLFAFTFEGHQYTWTVLPQGFIHSPTLFNQALYQSLHKIKFKISSEICIYMDDVLIASKDRDTNLKDTAVMLQHLASEGHKVSKKKLQLCQQEVVYLGQLLTPEGRKILPDRKVTVSQFQQPTTIRQIRAFLGLVGYCRHWIPEFSIHSKFLEKQLKPDTAEPFQLDDQQVEAFNKLKHAITTAPVLVVPDPAKPFQLYTSHSEHASIAVLTQKHAGRTRPIAFLSSKFDAIESGLPPCLKACASIHRSLTQADSFILGAPLIIYTTHAICTLLQRDRSQLVTASRFSKWEADLLRPELTFVACSAVSPAHLYMQSCENNIPPHDCVLLTHTISRPRPDLSDLPIPDPDMTLFSDGSYTTGRGGAAVVMHRPVTDDFIIIHQQPGGASAQTAELLALAAACHLATDKTVNIYTDSRYAYGVVHDFGHLWMHRGFVTSAGTPIKNHKEIEYLLKQIMKPKQVSVIKIEAHTKGVSMEVRGNAAADEAAKNAVFLVQRAGKRTADGSEFEKRTADGSEFESPKKKAKVE

SEQ ID NO: 764 - protein, 2073 aa, synthetic construct
MPAAKRVKLDGGDKKYSIGLDIGTNSVGWAVITDEYKVPSKKFKVLGNTDRHSIKKNLIGALLFDSGETAEATRLKRTARRRYTRRKNRICYLQEIFSNEMAKVDDSFFHRLEESFLVEEDKKHERHPIFGNIVDEVAYHEKYPTIYHLRKKLVDSTDKADLRLIYLALAHMIKFRGHFLIEGDLNPDNSDVDKLFIQLVQTYNQLFEENPINASGVDAKAILSARLSKSRRLENLIAQLPGEKKNGLFGNLIALSLGLTPNFKSNFDLAEDAKLQLSKDTYDDDLDNLLAQIGDQYADLFLAAKNLSDAILLSDILRVNTEITKAPLSASMIKRYDEHHQDLTLLKALVRQQLPEKYKEIFFDQSKNGYAGYIDGGASQEEFYKFIKPILEKMDGTEELLVKLNREDLLRKQRTFDNGSIPHQIHLGELHAILRRQEDFYPFLKDNREKIEKILTFRIPYYVGPLARGNSRFAWMTRKSEETITPWNFEEVVDKGASAQSFIERMTNFDKNLPNEKVLPKHSLLYEYFTVYNELTKVKYVTEGMRKPAFLSGEQKKAIVDLLFKTNRKVTVKQLKEDYFKKIECFDSVEISGVEDRFNASLGTYHDLLKIIKDKDFLDNEENEDILEDIVLTLTLFEDREMIEERLKTYAHLFDDKVMKQLKRRRYTGWGRLSRKLINGIRDKQSGKTILDFLKSDGFANRNFMQLIHDDSLTFKEDIQKAQVSGQGDSLHEHIANLAGSPAIKKGILQTVKVVDELVKVMGRHKPENIVIEMARENQTTQKGQKNSRERMKRIEEGIKELGSQILKEHPVENTQLQNEKLYLYYLQNGRDMYVDQELDINRLSDYDVDHIVPQSFLKDDSIDNKVLTRSDKARGKSDNVPSEEVVKKMKNYWRQLLNAKLITQRKFDNLTKAERGGLSELDKAGFIKRQLVETRQITKHVAQILDSRMNTKYDENDKLIREVKVITLKSKLVSDFRKDFQFYKVREINNYHHAHDAYLNAVVGTALIKKYPKLESEFVYGDYKVYDVRKMIAKSEQEIGKATAKYFFYSNIMNFFKTEITLANGEIRKRPLIETNGETGEIVWDKGRDFATVRKVLSMPQVNIVKKTEVQTGGFSKESILPKRNSDKLIARKKDWDPKKYGGFDSPTVAYSVLVVAKVEKGKSKKLKSVKELLGITIMERSSFEKNPIDFLEAKGYKEVKKDLIIKLPKYSLFELENGRKRMLASAGELQKGNELALPSKYVNFLYLASHYEKLKGSPEDNEQKQLFVEQHKHYLDEIIEQISEFSKRVILADANLDKVLSAYNKHRDKPIREQAENIIHLFTLTNLGAPAAFKYFDTTIDRKRYTSTKEVLDATLIHQSITGLYETRIDLSQLGGDGGGSSGGSGGGGGSCQTKNTLNIDEYLLQFPDQLWASLPTDIGRMLVPPITIKIKDNASLPSIRQYPLPKDKTEGLRPLISSLENQGILIKCHSPCNTPIFPIKKAGRDEYRMIHDLRAINNIVAPLTAVVASPTTVLSNLAPSLHWFTVIDLSNAFFSVPIHKDSQYLFAFTFEGHQYTWTVLPQGFIHSPTLFNQALYQSLHKIKFKISSEICIYMDDVLIASKDRDTNLKDTAVMLQHLASEGHKVSKKKLQLCQQEVVYLGQLLTPEGRKILPDRKVTVSQFQQPTTIRQIRAFLGLVGYCRHWIPEFSIHSKFLEKQLKPDTAEPFQLDDQQVEAFNKLKHAITTAPVLVVPDPAKPFQLYTSHSEHASIAVLTQKHAGRTRPIAFLSSKFDAIESGLPPCLKACASIHRSLTQADSFILGAPLIIYTTHAICTLLQRDRSQLVTASRFSKWEADLLRPELTFVACSAVSPAHLYMQSCENNIPPHDCVLLTHTISRPRPDLSDLPIPDPDMTLFSDGSYTTGRGGAAVVMHRPVTDDFIIIHQQPGGASAQTAELLALAAACHLATDKTVNIYTDSRYAYGVVHDFGHLWMHRGFVTSAGTPIKNHKEIEYLLKQIMKPKQVSVIKIEAHTKGVSMEVRGNAAADEAAKNAVFLVQRAGKRTADGSEFEKRTADGSEFESPKKKAKVE

SEQ ID NO: 765 - protein, 2087 aa, synthetic construct
MPAAKRVKLDGGDKKYSIGLDIGTNSVGWAVITDEYKVPSKKFKVLGNTDRHSIKKNLIGALLFDSGETAEATRLKRTARRRYTRRKNRICYLQEIFSNEMAKVDDSFFHRLEESFLVEEDKKHERHPIFGNIVDEVAYHEKYPTIYHLRKKLVDSTDKADLRLIYLALAHMIKFRGHFLIEGDLNPDNSDVDKLFIQLVQTYNQLFEENPINASGVDAKAILSARLSKSRRLENLIAQLPGEKKNGLFGNLIALSLGLTPNFKSNFDLAEDAKLQLSKDTYDDDLDNLLAQIGDQYADLFLAAKNLSDAILLSDILRVNTEITKAPLSASMIKRYDEHHQDLTLLKALVRQQLPEKYKEIFFDQSKNGYAGYIDGGASQEEFYKFIKPILEKMDGTEELLVKLNREDLLRKQRTFDNGSIPHQIHLGELHAILRRQEDFYPFLKDNREKIEKILTFRIPYYVGPLARGNSRFAWMTRKSEETITPWNFEEVVDKGASAQSFIERMTNFDKNLPNEKVLPKHSLLYEYFTVYNELTKVKYVTEGMRKPAFLSGEQKKAIVDLLFKTNRKVTVKQLKEDYFKKIECFDSVEISGVEDRFNASLGTYHDLLKIIKDKDFLDNEENEDILEDIVLTLTLFEDREMIEERLKTYAHLFDDKVMKQLKRRRYTGWGRLSRKLINGIRDKQSGKTILDFLKSDGFANRNFMQLIHDDSLTFKEDIQKAQVSGQGDSLHEHIANLAGSPAIKKGILQTVKVVDELVKVMGRHKPENIVIEMARENQTTQKGQKNSRERMKRIEEGIKELGSQILKEHPVENTQLQNEKLYLYYLQNGRDMYVDQELDINRLSDYDVDHIVPQSFLKDDSIDNKVLTRSDKARGKSDNVPSEEVVKKMKNYWRQLLNAKLITQRKFDNLTKAERGGLSELDKAGFIKRQLVETRQITKHVAQILDSRMNTKYDENDKLIREVKVITLKSKLVSDFRKDFQFYKVREINNYHHAHDAYLNAVVGTALIKKYPKLESEFVYGDYKVYDVRKMIAKSEQEIGKATAKYFFYSNIMNFFKTEITLANGEIRKRPLIETNGETGEIVWDKGRDFATVRKVLSMPQVNIVKKTEVQTGGFSKESILPKRNSDKLIARKKDWDPKKYGGFDSPTVAYSVLVVAKVEKGKSKKLKSVKELLGITIMERSSFEKNPIDFLEAKGYKEVKKDLIIKLPKYSLFELENGRKRMLASAGELQKGNELALPSKYVNFLYLASHYEKLKGSPEDNEQKQLFVEQHKHYLDEIIEQISEFSKRVILADANLDKVLSAYNKHRDKPIREQAENIIHLFTLTNLGAPAAFKYFDTTIDRKRYTSTKEVLDATLIHQSITGLYETRIDLSQLGGDGGEAAAKGGSPAPGGVPWILKKPLELTIKLDLEEQQGTLLNNSILSKKGKEELKQLFEKYSALWQSWENQVGHRRIRPHKIATGTVKPTPQKQYHINPKAKPDIQIVINDLLKQGVLIQKESTMNTPVYPVPKPNGRWRMVLDYRAVNKVTPLIAVQNQHSYGILGSLFKGRYKTTIDLSNGFWAHPIVPEDYWITAFTWQGKQYCWTVLPQGFLNSPGLFTGDVVDLLQGIPNVEVYVDDVYISHDSEKEHLEYLDILFNRLKEAGYIISLKKSNIANSIVDFLGFQITNEGRGLTDTFKEKLENITAPTTLKQLQSILGLLNFARNFIPDFTELIAPLYALIPKSTKNYVPWQIEHSTTLETLITKLNGAEYLQGRKGDKTLIMKVNASYTTGYIRYYNEGEKKPISYVSIVFSKTELKFTELEKLLTTVHKGLLKALDLSMGQNIHVYSPIVSMQNIQKTPQTAKKALASRWLSWLSYLEDPRIRFFYDPQMPALKDLPAVDTGKDNKKHPSNFQHIFYTDGSAITSPTKEGHLNAGMGIVYFINKDGNLQKQQEWSISLGNHTAQFAEIAAFEFALKKCLPLGGNILVVTDSNYVAKAYNEELDVWASNGFVNNRKKPLKHISKWKSVADLKRLRPDVVVTHEPGHQKLDSSPHAYGNNLADQLATQASFKVHAGKRTADGSEFEKRTADGSEFESPKKKAKVE

SEQ ID NO: 766 - protein, 2085 aa, synthetic construct
MPAAKRVKLDGGDKKYSIGLDIGTNSVGWAVITDEYKVPSKKFKVLGNTDRHSIKKNLIGALLFDSGETAEATRLKRTARRRYTRRKNRICYLQEIFSNEMAKVDDSFFHRLEESFLVEEDKKHERHPIFGNIVDEVAYHEKYPTIYHLRKKLVDSTDKADLRLIYLALAHMIKFRGHFLIEGDLNPDNSDVDKLFIQLVQTYNQLFEENPINASGVDAKAILSARLSKSRRLENLIAQLPGEKKNGLFGNLIALSLGLTPNFKSNFDLAEDAKLQLSKDTYDDDLDNLLAQIGDQYADLFLAAKNLSDAILLSDILRVNTEITKAPLSASMIKRYDEHHQDLTLLKALVRQQLPEKYKEIFFDQSKNGYAGYIDGGASQEEFYKFIKPILEKMDGTEELLVKLNREDLLRKQRTFDNGSIPHQIHLGELHAILRRQEDFYPFLKDNREKIEKILTFRIPYYVGPLARGNSRFAWMTRKSEETITPWNFEEVVDKGASAQSFIERMTNFDKNLPNEKVLPKHSLLYEYFTVYNELTKVKYVTEGMRKPAFLSGEQKKAIVDLLFKTNRKVTVKQLKEDYFKKIECFDSVEISGVEDRFNASLGTYHDLLKIIKDKDFLDNEENEDILEDIVLTLTLFEDREMIEERLKTYAHLFDDKVMKQLKRRRYTGWGRLSRKLINGIRDKQSGKTILDFLKSDGFANRNFMQLIHDDSLTFKEDIQKAQVSGQGDSLHEHIANLAGSPAIKKGILQTVKVVDELVKVMGRHKPENIVIEMARENQTTQKGQKNSRERMKRIEEGIKELGSQILKEHPVENTQLQNEKLYLYYLQNGRDMYVDQELDINRLSDYDVDHIVPQSFLKDDSIDNKVLTRSDKARGKSDNVPSEEVVKKMKNYWRQLLNAKLITQRKFDNLTKAERGGLSELDKAGFIKRQLVETRQITKHVAQILDSRMNTKYDENDKLIREVKVITLKSKLVSDFRKDFQFYKVREINNYHHAHDAYLNAVVGTALIKKYPKLESEFVYGDYKVYDVRKMIAKSEQEIGKATAKYFFYSNIMNFFKTEITLANGEIRKRPLIETNGETGEIVWDKGRDFATVRKVLSMPQVNIVKKTEVQTGGFSKESILPKRNSDKLIARKKDWDPKKYGGFDSPTVAYSVLVVAKVEKGKSKKLKSVKELLGITIMERSSFEKNPIDFLEAKGYKEVKKDLIIKLPKYSLFELENGRKRMLASAGELQKGNELALPSKYVNFLYLASHYEKLKGSPEDNEQKQLFVEQHKHYLDEIIEQISEFSKRVILADANLDKVLSAYNKHRDKPIREQAENIIHLFTLTNLGAPAAFKYFDTTIDRKRYTSTKEVLDATLIHQSITGLYETRIDLSQLGGDGGGSSGGGGGSGGVPWILKKPLELTIKLDLEEQQGTLLNNSILSKKGKEELKQLFEKYSALWQSWENQVGHRRIRPHKIATGTVKPTPQKQYHINPKAKPDIQIVINDLLKQGVLIQKESTMNTPVYPVPKPNGRWRMVLDYRAVNKVTPLIAVQNQHSYGILGSLFKGRYKTTIDLSNGFWAHPIVPEDYWITAFTWQGKQYCWTVLPQGFLNSPGLFTGDVVDLLQGIPNVEVYVDDVYISHDSEKEHLEYLDILFNRLKEAGYIISLKKSNIANSIVDFLGFQITNEGRGLTDTFKEKLENITAPTTLKQLQSILGLLNFARNFIPDFTELIAPLYALIPKSTKNYVPWQIEHSTTLETLITKLNGAEYLQGRKGDKTLIMKVNASYTTGYIRYYNEGEKKPISYVSIVFSKTELKFTELEKLLTTVHKGLLKALDLSMGQNIHVYSPIVSMQNIQKTPQTAKKALASRWLSWLSYLEDPRIRFFYDPQMPALKDLPAVDTGKDNKKHPSNFQHIFYTDGSAITSPTKEGHLNAGMGIVYFINKDGNLQKQQEWSISLGNHTAQFAEIAAFEFALKKCLPLGGNILVVTDSNYVAKAYNEELDVWASNGFVNNRKKPLKHISKWKSVADLKRLRPDVVVTHEPGHQKLDSSPHAYGNNLADQLATQASFKVHAGKRTADGSEFEKRTADGSEFESPKKKAKVE

SEQ ID NO: 767 - protein, 2087 aa, synthetic construct
MPAAKRVKLDGGDKKYSIGLDIGTNSVGWAVITDEYKVPSKKFKVLGNTDRHSIKKNLIGALLFDSGETAEATRLKRTARRRYTRRKNRICYLQEIFSNEMAKVDDSFFHRLEESFLVEEDKKHERHPIFGNIVDEVAYHEKYPTIYHLRKKLVDSTDKADLRLIYLALAHMIKFRGHFLIEGDLNPDNSDVDKLFIQLVQTYNQLFEENPINASGVDAKAILSARLSKSRRLENLIAQLPGEKKNGLFGNLIALSLGLTPNFKSNFDLAEDAKLQLSKDTYDDDLDNLLAQIGDQYADLFLAAKNLSDAILLSDILRVNTEITKAPLSASMIKRYDEHHQDLTLLKALVRQQLPEKYKEIFFDQSKNGYAGYIDGGASQEEFYKFIKPILEKMDGTEELLVKLNREDLLRKQRTFDNGSIPHQIHLGELHAILRRQEDFYPFLKDNREKIEKILTFRIPYYVGPLARGNSRFAWMTRKSEETITPWNFEEVVDKGASAQSFIERMTNFDKNLPNEKVLPKHSLLYEYFTVYNELTKVKYVTEGMRKPAFLSGEQKKAIVDLLFKTNRKVTVKQLKEDYFKKIECFDSVEISGVEDRFNASLGTYHDLLKIIKDKDFLDNEENEDILEDIVLTLTLFEDREMIEERLKTYAHLFDDKVMKQLKRRRYTGWGRLSRKLINGIRDKQSGKTILDFLKSDGFANRNFMQLIHDDSLTFKEDIQKAQVSGQGDSLHEHIANLAGSPAIKKGILQTVKVVDELVKVMGRHKPENIVIEMARENQTTQKGQKNSRERMKRIEEGIKELGSQILKEHPVENTQLQNEKLYLYYLQNGRDMYVDQELDINRLSDYDVDHIVPQSFLKDDSIDNKVLTRSDKARGKSDNVPSEEVVKKMKNYWRQLLNAKLITQRKFDNLTKAERGGLSELDKAGFIKRQLVETRQITKHVAQILDSRMNTKYDENDKLIREVKVITLKSKLVSDFRKDFQFYKVREINNYHHAHDAYLNAVVGTALIKKYPKLESEFVYGDYKVYDVRKMIAKSEQEIGKATAKYFFYSNIMNFFKTEITLANGEIRKRPLIETNGETGEIVWDKGRDFATVRKVLSMPQVNIVKKTEVQTGGFSKESILPKRNSDKLIARKKDWDPKKYGGFDSPTVAYSVLVVAKVEKGKSKKLKSVKELLGITIMERSSFEKNPIDFLEAKGYKEVKKDLIIKLPKYSLFELENGRKRMLASAGELQKGNELALPSKYVNFLYLASHYEKLKGSPEDNEQKQLFVEQHKHYLDEIIEQISEFSKRVILADANLDKVLSAYNKHRDKPIREQAENIIHLFTLTNLGAPAAFKYFDTTIDRKRYTSTKEVLDATLIHQSITGLYETRIDLSQLGGDGGPAPEAAAKGSSGGVPWILKKPLELTIKLDLEEQQGTLLNNSILSKKGKEELKQLFEKYSALWQSWENQVGHRRIRPHKIATGTVKPTPQKQYHINPKAKPDIQIVINDLLKQGVLIQKESTMNTPVYPVPKPNGRWRMVLDYRAVNKVTPLIAVQNQHSYGILGSLFKGRYKTTIDLSNGFWAHPIVPEDYWITAFTWQGKQYCWTVLPQGFLNSPGLFTGDVVDLLQGIPNVEVYVDDVYISHDSEKEHLEYLDILFNRLKEAGYIISLKKSNIANSIVDFLGFQITNEGRGLTDTFKEKLENITAPTTLKQLQSILGLLNFARNFIPDFTELIAPLYALIPKSTKNYVPWQIEHSTTLETLITKLNGAEYLQGRKGDKTLIMKVNASYTTGYIRYYNEGEKKPISYVSIVFSKTELKFTELEKLLTTVHKGLLKALDLSMGQNIHVYSPIVSMQNIQKTPQTAKKALASRWLSWLSYLEDPRIRFFYDPQMPALKDLPAVDTGKDNKKHPSNFQHIFYTDGSAITSPTKEGHLNAGMGIVYFINKDGNLQKQQEWSISLGNHTAQFAEIAAFEFALKKCLPLGGNILVVTDSNYVAKAYNEELDVWASNGFVNNRKKPLKHISKWKSVADLKRLRPDVVVTHEPGHQKLDSSPHAYGNNLADQLATQASFKVHAGKRTADGSEFEKRTADGSEFESPKKKAKVE

SEQ ID NO: 768 - protein, 2091 aa, synthetic construct
MPAAKRVKLDGGDKKYSIGLDIGTNSVGWAVITDEYKVPSKKFKVLGNTDRHSIKKNLIGALLFDSGETAEATRLKRTARRRYTRRKNRICYLQEIFSNEMAKVDDSFFHRLEESFLVEEDKKHERHPIFGNIVDEVAYHEKYPTIYHLRKKLVDSTDKADLRLIYLALAHMIKFRGHFLIEGDLNPDNSDVDKLFIQLVQTYNQLFEENPINASGVDAKAILSARLSKSRRLENLIAQLPGEKKNGLFGNLIALSLGLTPNFKSNFDLAEDAKLQLSKDTYDDDLDNLLAQIGDQYADLFLAAKNLSDAILLSDILRVNTEITKAPLSASMIKRYDEHHQDLTLLKALVRQQLPEKYKEIFFDQSKNGYAGYIDGGASQEEFYKFIKPILEKMDGTEELLVKLNREDLLRKQRTFDNGSIPHQIHLGELHAILRRQEDFYPFLKDNREKIEKILTFRIPYYVGPLARGNSRFAWMTRKSEETITPWNFEEVVDKGASAQSFIERMTNFDKNLPNEKVLPKHSLLYEYFTVYNELTKVKYVTEGMRKPAFLSGEQKKAIVDLLFKTNRKVTVKQLKEDYFKKIECFDSVEISGVEDRFNASLGTYHDLLKIIKDKDFLDNEENEDILEDIVLTLTLFEDREMIEERLKTYAHLFDDKVMKQLKRRRYTGWGRLSRKLINGIRDKQSGKTILDFLKSDGFANRNFMQLIHDDSLTFKEDIQKAQVSGQGDSLHEHIANLAGSPAIKKGILQTVKVVDELVKVMGRHKPENIVIEMARENQTTQKGQKNSRERMKRIEEGIKELGSQILKEHPVENTQLQNEKLYLYYLQNGRDMYVDQELDINRLSDYDVDHIVPQSFLKDDSIDNKVLTRSDKARGKSDNVPSEEVVKKMKNYWRQLLNAKLITQRKFDNLTKAERGGLSELDKAGFIKRQLVETRQITKHVAQILDSRMNTKYDENDKLIREVKVITLKSKLVSDFRKDFQFYKVREINNYHHAHDAYLNAVVGTALIKKYPKLESEFVYGDYKVYDVRKMIAKSEQEIGKATAKYFFYSNIMNFFKTEITLANGEIRKRPLIETNGETGEIVWDKGRDFATVRKVLSMPQVNIVKKTEVQTGGFSKESILPKRNSDKLIARKKDWDPKKYGGFDSPTVAYSVLVVAKVEKGKSKKLKSVKELLGITIMERSSFEKNPIDFLEAKGYKEVKKDLIIKLPKYSLFELENGRKRMLASAGELQKGNELALPSKYVNFLYLASHYEKLKGSPEDNEQKQLFVEQHKHYLDEIIEQISEFSKRVILADANLDKVLSAYNKHRDKPIREQAENIIHLFTLTNLGAPAAFKYFDTTIDRKRYTSTKEVLDATLIHQSITGLYETRIDLSQLGGDGGGGGGSEAAAKGGGGSGGVPWILKKPLELTIKLDLEEQQGTLLNNSILSKKGKEELKQLFEKYSALWQSWENQVGHRRIRPHKIATGTVKPTPQKQYHINPKAKPDIQIVINDLLKQGVLIQKESTMNTPVYPVPKPNGRWRMVLDYRAVNKVTPLIAVQNQHSYGILGSLFKGRYKTTIDLSNGFWAHPIVPEDYWITAFTWQGKQYCWTVLPQGFLNSPGLFTGDVVDLLQGIPNVEVYVDDVYISHDSEKEHLEYLDILFNRLKEAGYIISLKKSNIANSIVDFLGFQITNEGRGLTDTFKEKLENITAPTTLKQLQSILGLLNFARNFIPDFTELIAPLYALIPKSTKNYVPWQIEHSTTLETLITKLNGAEYLQGRKGDKTLIMKVNASYTTGYIRYYNEGEKKPISYVSIVFSKTELKFTELEKLLTTVHKGLLKALDLSMGQNIHVYSPIVSMQNIQKTPQTAKKALASRWLSWLSYLEDPRIRFFYDPQMPALKDLPAVDTGKDNKKHPSNFQHIFYTDGSAITSPTKEGHLNAGMGIVYFINKDGNLQKQQEWSISLGNHTAQFAEIAAFEFALKKCLPLGGNILVVTDSNYVAKAYNEELDVWASNGFVNNRKKPLKHISKWKSVADLKRLRPDVVVTHEPGHQKLDSSPHAYGNNLADQLATQASFKVHAGKRTADGSEFEKRTADGSEFESPKKKAKVE

SEQ ID NO: 769 - protein, 2087 aa, synthetic construct
MPAAKRVKLDGGDKKYSIGLDIGTNSVGWAVITDEYKVPSKKFKVLGNTDRHSIKKNLIGALLFDSGETAEATRLKRTARRRYTRRKNRICYLQEIFSNEMAKVDDSFFHRLEESFLVEEDKKHERHPIFGNIVDEVAYHEKYPTIYHLRKKLVDSTDKADLRLIYLALAHMIKFRGHFLIEGDLNPDNSDVDKLFIQLVQTYNQLFEENPINASGVDAKAILSARLSKSRRLENLIAQLPGEKKNGLFGNLIALSLGLTPNFKSNFDLAEDAKLQLSKDTYDDDLDNLLAQIGDQYADLFLAAKNLSDAILLSDILRVNTEITKAPLSASMIKRYDEHHQDLTLLKALVRQQLPEKYKEIFFDQSKNGYAGYIDGGASQEEFYKFIKPILEKMDGTEELLVKLNREDLLRKQRTFDNGSIPHQIHLGELHAILRRQEDFYPFLKDNREKIEKILTFRIPYYVGPLARGNSRFAWMTRKSEETITPWNFEEVVDKGASAQSFIERMTNFDKNLPNEKVLPKHSLLYEYFTVYNELTKVKYVTEGMRKPAFLSGEQKKAIVDLLFKTNRKVTVKQLKEDYFKKIECFDSVEISGVEDRFNASLGTYHDLLKIIKDKDFLDNEENEDILEDIVLTLTLFEDREMIEERLKTYAHLFDDKVMKQLKRRRYTGWGRLSRKLINGIRDKQSGKTILDFLKSDGFANRNFMQLIHDDSLTFKEDIQKAQVSGQGDSLHEHIANLAGSPAIKKGILQTVKVVDELVKVMGRHKPENIVIEMARENQTTQKGQKNSRERMKRIEEGIKELGSQILKEHPVENTQLQNEKLYLYYLQNGRDMYVDQELDINRLSDYDVDHIVPQSFLKDDSIDNKVLTRSDKARGKSDNVPSEEVVKKMKNYWRQLLNAKLITQRKFDNLTKAERGGLSELDKAGFIKRQLVETRQITKHVAQILDSRMNTKYDENDKLIREVKVITLKSKLVSDFRKDFQFYKVREINNYHHAHDAYLNAVVGTALIKKYPKLESEFVYGDYKVYDVRKMIAKSEQEIGKATAKYFFYSNIMNFFKTEITLANGEIRKRPLIETNGETGEIVWDKGRDFATVRKVLSMPQVNIVKKTEVQTGGFSKESILPKRNSDKLIARKKDWDPKKYGGFDSPTVAYSVLVVAKVEKGKSKKLKSVKELLGITIMERSSFEKNPIDFLEAKGYKEVKKDLIIKLPKYSLFELENGRKRMLASAGELQKGNELALPSKYVNFLYLASHYEKLKGSPEDNEQKQLFVEQHKHYLDEIIEQISEFSKRVILADANLDKVLSAYNKHRDKPIREQAENIIHLFTLTNLGAPAAFKYFDTTIDRKRYTSTKEVLDATLIHQSITGLYETRIDLSQLGGDGGGGGGSSEAAAKGGVPWILKKPLELTIKLDLEEQQGTLLNNSILSKKGKEELKQLFEKYSALWQSWENQVGHRRIRPHKIATGTVKPTPQKQYHINPKAKPDIQIVINDLLKQGVLIQKESTMNTPVYPVPKPNGRWRMVLDYRAVNKVTPLIAVQNQHSYGILGSLFKGRYKTTIDLSNGFWAHPIVPEDYWITAFTWQGKQYCWTVLPQGFLNSPGLFTGDVVDLLQGIPNVEVYVDDVYISHDSEKEHLEYLDILFNRLKEAGYIISLKKSNIANSIVDFLGFQITNEGRGLTDTFKEKLENITAPTTLKQLQSILGLLNFARNFIPDFTELIAPLYALIPKSTKNYVPWQIEHSTTLETLITKLNGAEYLQGRKGDKTLIMKVNASYTTGYIRYYNEGEKKPISYVSIVFSKTELKFTELEKLLTTVHKGLLKALDLSMGQNIHVYSPIVSMQNIQKTPQTAKKALASRWLSWLSYLEDPRIRFFYDPQMPALKDLPAVDTGKDNKKHPSNFQHIFYTDGSAITSPTKEGHLNAGMGIVYFINKDGNLQKQQEWSISLGNHTAQFAEIAAFEFALKKCLPLGGNILVVTDSNYVAKAYNEELDVWASNGFVNNRKKPLKHISKWKSVADLKRLRPDVVVTHEPGHQKLDSSPHAYGNNLADQLATQASFKVHAGKRTADGSEFEKRTADGSEFESPKKKAKVE

SEQ ID NO: 770 - protein, 2087 aa, synthetic construct
MPAAKRVKLDGGDKKYSIGLDIGTNSVGWAVITDEYKVPSKKFKVLGNTDRHSIKKNLIGALLFDSGETAEATRLKRTARRRYTRRKNRICYLQEIFSNEMAKVDDSFFHRLEESFLVEEDKKHERHPIFGNIVDEVAYHEKYPTIYHLRKKLVDSTDKADLRLIYLALAHMIKFRGHFLIEGDLNPDNSDVDKLFIQLVQTYNQLFEENPINASGVDAKAILSARLSKSRRLENLIAQLPGEKKNGLFGNLIALSLGLTPNFKSNFDLAEDAKLQLSKDTYDDDLDNLLAQIGDQYADLFLAAKNLSDAILLSDILRVNTEITKAPLSASMIKRYDEHHQDLTLLKALVRQQLPEKYKEIFFDQSKNGYAGYIDGGASQEEFYKFIKPILEKMDGTEELLVKLNREDLLRKQRTFDNGSIPHQIHLGELHAILRRQEDFYPFLKDNREKIEKILTFRIPYYVGPLARGNSRFAWMTRKSEETITPWNFEEVVDKGASAQSFIERMTNFDKNLPNEKVLPKHSLLYEYFTVYNELTKVKYVTEGMRKPAFLSGEQKKAIVDLLFKTNRKVTVKQLKEDYFKKIECFDSVEISGVEDRFNASLGTYHDLLKIIKDKDFLDNEENEDILEDIVLTLTLFEDREMIEERLKTYAHLFDDKVMKQLKRRRYTGWGRLSRKLINGIRDKQSGKTILDFLKSDGFANRNFMQLIHDDSLTFKEDIQKAQVSGQGDSLHEHIANLAGSPAIKKGILQTVKVVDELVKVMGRHKPENIVIEMARENQTTQKGQKNSRERMKRIEEGIKELGSQILKEHPVENTQLQNEKLYLYYLQNGRDMYVDQELDINRLSDYDVDHIVPQSFLKDDSIDNKVLTRSDKARGKSDNVPSEEVVKKMKNYWRQLLNAKLITQRKFDNLTKAERGGLSELDKAGFIKRQLVETRQITKHVAQILDSRMNTKYDENDKLIREVKVITLKSKLVSDFRKDFQFYKVREINNYHHAHDAYLNAVVGTALIKKYPKLESEFVYGDYKVYDVRKMIAKSEQEIGKATAKYFFYSNIMNFFKTEITLANGEIRKRPLIETNGETGEIVWDKGRDFATVRKVLSMPQVNIVKKTEVQTGGFSKESILPKRNSDKLIARKKDWDPKKYGGFDSPTVAYSVLVVAKVEKGKSKKLKSVKELLGITIMERSSFEKNPIDFLEAKGYKEVKKDLIIKLPKYSLFELENGRKRMLASAGELQKGNELALPSKYVNFLYLASHYEKLKGSPEDNEQKQLFVEQHKHYLDEIIEQISEFSKRVILADANLDKVLSAYNKHRDKPIREQAENIIHLFTLTNLGAPAAFKYFDTTIDRKRYTSTKEVLDATLIHQSITGLYETRIDLSQLGGDGGGGGEAAAKGSSGGVPWILKKPLELTIKLDLEEQQGTLLNNSILSKKGKEELKQLFEKYSALWQSWENQVGHRRIRPHKIATGTVKPTPQKQYHINPKAKPDIQIVINDLLKQGVLIQKESTMNTPVYPVPKPNGRWRMVLDYRAVNKVTPLIAVQNQHSYGILGSLFKGRYKTTIDLSNGFWAHPIVPEDYWITAFTWQGKQYCWTVLPQGFLNSPGLFTGDVVDLLQGIPNVEVYVDDVYISHDSEKEHLEYLDILFNRLKEAGYIISLKKSNIANSIVDFLGFQITNEGRGLTDTFKEKLENITAPTTLKQLQSILGLLNFARNFIPDFTELIAPLYALIPKSTKNYVPWQIEHSTTLETLITKLNGAEYLQGRKGDKTLIMKVNASYTTGYIRYYNEGEKKPISYVSIVFSKTELKFTELEKLLTTVHKGLLKALDLSMGQNIHVYSPIVSMQNIQKTPQTAKKALASRWLSWLSYLEDPRIRFFYDPQMPALKDLPAVDTGKDNKKHPSNFQHIFYTDGSAITSPTKEGHLNAGMGIVYFINKDGNLQKQQEWSISLGNHTAQFAEIAAFEFALKKCLPLGGNILVVTDSNYVAKAYNEELDVWASNGFVNNRKKPLKHISKWKSVADLKRLRPDVVVTHEPGHQKLDSSPHAYGNNLADQLATQASFKVHAGKRTADGSEFEKRTADGSEFESPKKKAKVE

SEQ ID NO: 771 - protein, 2082 aa, synthetic construct
MPAAKRVKLDGGDKKYSIGLDIGTNSVGWAVITDEYKVPSKKFKVLGNTDRHSIKKNLIGALLFDSGETAEATRLKRTARRRYTRRKNRICYLQEIFSNEMAKVDDSFFHRLEESFLVEEDKKHERHPIFGNIVDEVAYHEKYPTIYHLRKKLVDSTDKADLRLIYLALAHMIKFRGHFLIEGDLNPDNSDVDKLFIQLVQTYNQLFEENPINASGVDAKAILSARLSKSRRLENLIAQLPGEKKNGLFGNLIALSLGLTPNFKSNFDLAEDAKLQLSKDTYDDDLDNLLAQIGDQYADLFLAAKNLSDAILLSDILRVNTEITKAPLSASMIKRYDEHHQDLTLLKALVRQQLPEKYKEIFFDQSKNGYAGYIDGGASQEEFYKFIKPILEKMDGTEELLVKLNREDLLRKQRTFDNGSIPHQIHLGELHAILRRQEDFYPFLKDNREKIEKILTFRIPYYVGPLARGNSRFAWMTRKSEETITPWNFEEVVDKGASAQSFIERMTNFDKNLPNEKVLPKHSLLYEYFTVYNELTKVKYVTEGMRKPAFLSGEQKKAIVDLLFKTNRKVTVKQLKEDYFKKIECFDSVEISGVEDRFNASLGTYHDLLKIIKDKDFLDNEENEDILEDIVLTLTLFEDREMIEERLKTYAHLFDDKVMKQLKRRRYTGWGRLSRKLINGIRDKQSGKTILDFLKSDGFANRNFMQLIHDDSLTFKEDIQKAQVSGQGDSLHEHIANLAGSPAIKKGILQTVKVVDELVKVMGRHKPENIVIEMARENQTTQKGQKNSRERMKRIEEGIKELGSQILKEHPVENTQLQNEKLYLYYLQNGRDMYVDQELDINRLSDYDVDHIVPQSFLKDDSIDNKVLTRSDKARGKSDNVPSEEVVKKMKNYWRQLLNAKLITQRKFDNLTKAERGGLSELDKAGFIKRQLVETRQITKHVAQILDSRMNTKYDENDKLIREVKVITLKSKLVSDFRKDFQFYKVREINNYHHAHDAYLNAVVGTALIKKYPKLESEFVYGDYKVYDVRKMIAKSEQEIGKATAKYFFYSNIMNFFKTEITLANGEIRKRPLIETNGETGEIVWDKGRDFATVRKVLSMPQVNIVKKTEVQTGGFSKESILPKRNSDKLIARKKDWDPKKYGGFDSPTVAYSVLVVAKVEKGKSKKLKSVKELLGITIMERSSFEKNPIDFLEAKGYKEVKKDLIIKLPKYSLFELENGRKRMLASAGELQKGNELALPSKYVNFLYLASHYEKLKGSPEDNEQKQLFVEQHKHYLDEIIEQISEFSKRVILADANLDKVLSAYNKHRDKPIREQAENIIHLFTLTNLGAPAAFKYFDTTIDRKRYTSTKEVLDATLIHQSITGLYETRIDLSQLGGDGGGSSGGGGGVPWILKKPLELTIKLDLEEQQGTLLNNSILSKKGKEELKQLFEKYSALWQSWENQVGHRRIRPHKIATGTVKPTPQKQYHINPKAKPDIQIVINDLLKQGVLIQKESTMNTPVYPVPKPNGRWRMVLDYRAVNKVTPLIAVQNQHSYGILGSLFKGRYKTTIDLSNGFWAHPIVPEDYWITAFTWQGKQYCWTVLPQGFLNSPGLFTGDVVDLLQGIPNVEVYVDDVYISHDSEKEHLEYLDILFNRLKEAGYIISLKKSNIANSIVDFLGFQITNEGRGLTDTFKEKLENITAPTTLKQLQSILGLLNFARNFIPDFTELIAPLYALIPKSTKNYVPWQIEHSTTLETLITKLNGAEYLQGRKGDKTLIMKVNASYTTGYIRYYNEGEKKPISYVSIVFSKTELKFTELEKLLTTVHKGLLKALDLSMGQNIHVYSPIVSMQNIQKTPQTAKKALASRWLSWLSYLEDPRIRFFYDPQMPALKDLPAVDTGKDNKKHPSNFQHIFYTDGSAITSPTKEGHLNAGMGIVYFINKDGNLQKQQEWSISLGNHTAQFAEIAAFEFALKKCLPLGGNILVVTDSNYVAKAYNEELDVWASNGFVNNRKKPLKHISKWKSVADLKRLRPDVVVTHEPGHQKLDSSPHAYGNNLADQLATQASFKVHAGKRTADGSEFEKRTADGSEFESPKKKAKVE

SEQ ID NO: 772 - protein, 2087 aa, synthetic construct
MPAAKRVKLDGGDKKYSIGLDIGTNSVGWAVITDEYKVPSKKFKVLGNTDRHSIKKNLIGALLFDSGETAEATRLKRTARRRYTRRKNRICYLQEIFSNEMAKVDDSFFHRLEESFLVEEDKKHERHPIFGNIVDEVAYHEKYPTIYHLRKKLVDSTDKADLRLIYLALAHMIKFRGHFLIEGDLNPDNSDVDKLFIQLVQTYNQLFEENPINASGVDAKAILSARLSKSRRLENLIAQLPGEKKNGLFGNLIALSLGLTPNFKSNFDLAEDAKLQLSKDTYDDDLDNLLAQIGDQYADLFLAAKNLSDAILLSDILRVNTEITKAPLSASMIKRYDEHHQDLTLLKALVRQQLPEKYKEIFFDQSKNGYAGYIDGGASQEEFYKFIKPILEKMDGTEELLVKLNREDLLRKQRTFDNGSIPHQIHLGELHAILRRQEDFYPFLKDNREKIEKILTFRIPYYVGPLARGNSRFAWMTRKSEETITPWNFEEVVDKGASAQSFIERMTNFDKNLPNEKVLPKHSLLYEYFTVYNELTKVKYVTEGMRKPAFLSGEQKKAIVDLLFKTNRKVTVKQLKEDYFKKIECFDSVEISGVEDRFNASLGTYHDLLKIIKDKDFLDNEENEDILEDIVLTLTLFEDREMIEERLKTYAHLFDDKVMKQLKRRRYTGWGRLSRKLINGIRDKQSGKTILDFLKSDGFANRNFMQLIHDDSLTFKEDIQKAQVSGQGDSLHEHIANLAGSPAIKKGILQTVKVVDELVKVMGRHKPENIVIEMARENQTTQKGQKNSRERMKRIEEGIKELGSQILKEHPVENTQLQNEKLYLYYLQNGRDMYVDQELDINRLSDYDVDHIVPQSFLKDDSIDNKVLTRSDKARGKSDNVPSEEVVKKMKNYWRQLLNAKLITQRKFDNLTKAERGGLSELDKAGFIKRQLVETRQITKHVAQILDSRMNTKYDENDKLIREVKVITLKSKLVSDFRKDFQFYKVREINNYHHAHDAYLNAVVGTALIKKYPKLESEFVYGDYKVYDVRKMIAKSEQEIGKATAKYFFYSNIMNFFKTEITLANGEIRKRPLIETNGETGEIVWDKGRDFATVRKVLSMPQVNIVKKTEVQTGGFSKESILPKRNSDKLIARKKDWDPKKYGGFDSPTVAYSVLVVAKVEKGKSKKLKSVKELLGITIMERSSFEKNPIDFLEAKGYKEVKKDLIIKLPKYSLFELENGRKRMLASAGELQKGNELALPSKYVNFLYLASHYEKLKGSPEDNEQKQLFVEQHKHYLDEIIEQISEFSKRVILADANLDKVLSAYNKHRDKPIREQAENIIHLFTLTNLGAPAAFKYFDTTIDRKRYTSTKEVLDATLIHQSITGLYETRIDLSQLGGDGGEAAAKPAPGGSGGVPWILKKPLELTIKLDLEEQQGTLLNNSILSKKGKEELKQLFEKYSALWQSWENQVGHRRIRPHKIATGTVKPTPQKQYHINPKAKPDIQIVINDLLKQGVLIQKESTMNTPVYPVPKPNGRWRMVLDYRAVNKVTPLIAVQNQHSYGILGSLFKGRYKTTIDLSNGFWAHPIVPEDYWITAFTWQGKQYCWTVLPQGFLNSPGLFTGDVVDLLQGIPNVEVYVDDVYISHDSEKEHLEYLDILFNRLKEAGYIISLKKSNIANSIVDFLGFQITNEGRGLTDTFKEKLENITAPTTLKQLQSILGLLNFARNFIPDFTELIAPLYALIPKSTKNYVPWQIEHSTTLETLITKLNGAEYLQGRKGDKTLIMKVNASYTTGYIRYYNEGEKKPISYVSIVFSKTELKFTELEKLLTTVHKGLLKALDLSMGQNIHVYSPIVSMQNIQKTPQTAKKALASRWLSWLSYLEDPRIRFFYDPQMPALKDLPAVDTGKDNKKHPSNFQHIFYTDGSAITSPTKEGHLNAGMGIVYFINKDGNLQKQQEWSISLGNHTAQFAEIAAFEFALKKCLPLGGNILVVTDSNYVAKAYNEELDVWASNGFVNNRKKPLKHISKWKSVADLKRLRPDVVVTHEPGHQKLDSSPHAYGNNLADQLATQASFKVHAGKRTADGSEFEKRTADGSEFESPKKKAKVE

SEQ ID NO: 773 - protein, 2088 aa, synthetic construct
MPAAKRVKLDGGDKKYSIGLDIGTNSVGWAVITDEYKVPSKKFKVLGNTDRHSIKKNLIGALLFDSGETAEATRLKRTARRRYTRRKNRICYLQEIFSNEMAKVDDSFFHRLEESFLVEEDKKHERHPIFGNIVDEVAYHEKYPTIYHLRKKLVDSTDKADLRLIYLALAHMIKFRGHFLIEGDLNPDNSDVDKLFIQLVQTYNQLFEENPINASGVDAKAILSARLSKSRRLENLIAQLPGEKKNGLFGNLIALSLGLTPNFKSNFDLAEDAKLQLSKDTYDDDLDNLLAQIGDQYADLFLAAKNLSDAILLSDILRVNTEITKAPLSASMIKRYDEHHQDLTLLKALVRQQLPEKYKEIFFDQSKNGYAGYIDGGASQEEFYKFIKPILEKMDGTEELLVKLNREDLLRKQRTFDNGSIPHQIHLGELHAILRRQEDFYPFLKDNREKIEKILTFRIPYYVGPLARGNSRFAWMTRKSEETITPWNFEEVVDKGASAQSFIERMTNFDKNLPNEKVLPKHSLLYEYFTVYNELTKVKYVTEGMRKPAFLSGEQKKAIVDLLFKTNRKVTVKQLKEDYFKKIECFDSVEISGVEDRFNASLGTYHDLLKIIKDKDFLDNEENEDILEDIVLTLTLFEDREMIEERLKTYAHLFDDKVMKQLKRRRYTGWGRLSRKLINGIRDKQSGKTILDFLKSDGFANRNFMQLIHDDSLTFKEDIQKAQVSGQGDSLHEHIANLAGSPAIKKGILQTVKVVDELVKVMGRHKPENIVIEMARENQTTQKGQKNSRERMKRIEEGIKELGSQILKEHPVENTQLQNEKLYLYYLQNGRDMYVDQELDINRLSDYDVDHIVPQSFLKDDSIDNKVLTRSDKARGKSDNVPSEEVVKKMKNYWRQLLNAKLITQRKFDNLTKAERGGLSELDKAGFIKRQLVETRQITKHVAQILDSRMNTKYDENDKLIREVKVITLKSKLVSDFRKDFQFYKVREINNYHHAHDAYLNAVVGTALIKKYPKLESEFVYGDYKVYDVRKMIAKSEQEIGKATAKYFFYSNIMNFFKTEITLANGEIRKRPLIETNGETGEIVWDKGRDFATVRKVLSMPQVNIVKKTEVQTGGFSKESILPKRNSDKLIARKKDWDPKKYGGFDSPTVAYSVLVVAKVEKGKSKKLKSVKELLGITIMERSSFEKNPIDFLEAKGYKEVKKDLIIKLPKYSLFELENGRKRMLASAGELQKGNELALPSKYVNFLYLASHYEKLKGSPEDNEQKQLFVEQHKHYLDEIIEQISEFSKRVILADANLDKVLSAYNKHRDKPIREQAENIIHLFTLTNLGAPAAFKYFDTTIDRKRYTSTKEVLDATLIHQSITGLYETRIDLSQLGGDGGGSSGSSGSSGSSGGVPWILKKPLELTIKLDLEEQQGTLLNNSILSKKGKEELKQLFEKYSALWQSWENQVGHRRIRPHKIATGTVKPTPQKQYHINPKAKPDIQIVINDLLKQGVLIQKESTMNTPVYPVPKPNGRWRMVLDYRAVNKVTPLIAVQNQHSYGILGSLFKGRYKTTIDLSNGFWAHPIVPEDYWITAFTWQGKQYCWTVLPQGFLNSPGLFTGDVVDLLQGIPNVEVYVDDVYISHDSEKEHLEYLDILFNRLKEAGYIISLKKSNIANSIVDFLGFQITNEGRGLTDTFKEKLENITAPTTLKQLQSILGLLNFARNFIPDFTELIAPLYALIPKSTKNYVPWQIEHSTTLETLITKLNGAEYLQGRKGDKTLIMKVNASYTTGYIRYYNEGEKKPISYVSIVFSKTELKFTELEKLLTTVHKGLLKALDLSMGQNIHVYSPIVSMQNIQKTPQTAKKALASRWLSWLSYLEDPRIRFFYDPQMPALKDLPAVDTGKDNKKHPSNFQHIFYTDGSAITSPTKEGHLNAGMGIVYFINKDGNLQKQQEWSISLGNHTAQFAEIAAFEFALKKCLPLGGNILVVTDSNYVAKAYNEELDVWASNGFVNNRKKPLKHISKWKSVADLKRLRPDVVVTHEPGHQKLDSSPHAYGNNLADQLATQASFKVHAGKRTADGSEFEKRTADGSEFESPKKKAKVE

SEQ ID NO: 774 - protein, 2085 aa, synthetic construct
MPAAKRVKLDGGDKKYSIGLDIGTNSVGWAVITDEYKVPSKKFKVLGNTDRHSIKKNLIGALLFDSGETAEATRLKRTARRRYTRRKNRICYLQEIFSNEMAKVDDSFFHRLEESFLVEEDKKHERHPIFGNIVDEVAYHEKYPTIYHLRKKLVDSTDKADLRLIYLALAHMIKFRGHFLIEGDLNPDNSDVDKLFIQLVQTYNQLFEENPINASGVDAKAILSARLSKSRRLENLIAQLPGEKKNGLFGNLIALSLGLTPNFKSNFDLAEDAKLQLSKDTYDDDLDNLLAQIGDQYADLFLAAKNLSDAILLSDILRVNTEITKAPLSASMIKRYDEHHQDLTLLKALVRQQLPEKYKEIFFDQSKNGYAGYIDGGASQEEFYKFIKPILEKMDGTEELLVKLNREDLLRKQRTFDNGSIPHQIHLGELHAILRRQEDFYPFLKDNREKIEKILTFRIPYYVGPLARGNSRFAWMTRKSEETITPWNFEEVVDKGASAQSFIERMTNFDKNLPNEKVLPKHSLLYEYFTVYNELTKVKYVTEGMRKPAFLSGEQKKAIVDLLFKTNRKVTVKQLKEDYFKKIECFDSVEISGVEDRFNASLGTYHDLLKIIKDKDFLDNEENEDILEDIVLTLTLFEDREMIEERLKTYAHLFDDKVMKQLKRRRYTGWGRLSRKLINGIRDKQSGKTILDFLKSDGFANRNFMQLIHDDSLTFKEDIQKAQVSGQGDSLHEHIANLAGSPAIKKGILQTVKVVDELVKVMGRHKPENIVIEMARENQTTQKGQKNSRERMKRIEEGIKELGSQILKEHPVENTQLQNEKLYLYYLQNGRDMYVDQELDINRLSDYDVDHIVPQSFLKDDSIDNKVLTRSDKARGKSDNVPSEEVVKKMKNYWRQLLNAKLITQRKFDNLTKAERGGLSELDKAGFIKRQLVETRQITKHVAQILDSRMNTKYDENDKLIREVKVITLKSKLVSDFRKDFQFYKVREINNYHHAHDAYLNAVVGTALIKKYPKLESEFVYGDYKVYDVRKMIAKSEQEIGKATAKYFFYSNIMNFFKTEITLANGEIRKRPLIETNGETGEIVWDKGRDFATVRKVLSMPQVNIVKKTEVQTGGFSKESILPKRNSDKLIARKKDWDPKKYGGFDSPTVAYSVLVVAKVEKGKSKKLKSVKELLGITIMERSSFEKNPIDFLEAKGYKEVKKDLIIKLPKYSLFELENGRKRMLASAGELQKGNELALPSKYVNFLYLASHYEKLKGSPEDNEQKQLFVEQHKHYLDEIIEQISEFSKRVILADANLDKVLSAYNKHRDKPIREQAENIIHLFTLTNLGAPAAFKYFDTTIDRKRYTSTKEVLDATLIHQSITGLYETRIDLSQLGGDGGGGGGGSGSSGGVPWILKKPLELTIKLDLEEQQGTLLNNSILSKKGKEELKQLFEKYSALWQSWENQVGHRRIRPHKIATGTVKPTPQKQYHINPKAKPDIQIVINDLLKQGVLIQKESTMNTPVYPVPKPNGRWRMVLDYRAVNKVTPLIAVQNQHSYGILGSLFKGRYKTTIDLSNGFWAHPIVPEDYWITAFTWQGKQYCWTVLPQGFLNSPGLFTGDVVDLLQGIPNVEVYVDDVYISHDSEKEHLEYLDILFNRLKEAGYIISLKKSNIANSIVDFLGFQITNEGRGLTDTFKEKLENITAPTTLKQLQSILGLLNFARNFIPDFTELIAPLYALIPKSTKNYVPWQIEHSTTLETLITKLNGAEYLQGRKGDKTLIMKVNASYTTGYIRYYNEGEKKPISYVSIVFSKTELKFTELEKLLTTVHKGLLKALDLSMGQNIHVYSPIVSMQNIQKTPQTAKKALASRWLSWLSYLEDPRIRFFYDPQMPALKDLPAVDTGKDNKKHPSNFQHIFYTDGSAITSPTKEGHLNAGMGIVYFINKDGNLQKQQEWSISLGNHTAQFAEIAAFEFALKKCLPLGGNILVVTDSNYVAKAYNEELDVWASNGFVNNRKKPLKHISKWKSVADLKRLRPDVVVTHEPGHQKLDSSPHAYGNNLADQLATQASFKVHAGKRTADGSEFEKRTADGSEFESPKKKAKVE

SEQ ID NO: 775 - protein, 2085 aa, synthetic construct
MPAAKRVKLDGGDKKYSIGLDIGTNSVGWAVITDEYKVPSKKFKVLGNTDRHSIKKNLIGALLFDSGETAEATRLKRTARRRYTRRKNRICYLQEIFSNEMAKVDDSFFHRLEESFLVEEDKKHERHPIFGNIVDEVAYHEKYPTIYHLRKKLVDSTDKADLRLIYLALAHMIKFRGHFLIEGDLNPDNSDVDKLFIQLVQTYNQLFEENPINASGVDAKAILSARLSKSRRLENLIAQLPGEKKNGLFGNLIALSLGLTPNFKSNFDLAEDAKLQLSKDTYDDDLDNLLAQIGDQYADLFLAAKNLSDAILLSDILRVNTEITKAPLSASMIKRYDEHHQDLTLLKALVRQQLPEKYKEIFFDQSKNGYAGYIDGGASQEEFYKFIKPILEKMDGTEELLVKLNREDLLRKQRTFDNGSIPHQIHLGELHAILRRQEDFYPFLKDNREKIEKILTFRIPYYVGPLARGNSRFAWMTRKSEETITPWNFEEVVDKGASAQSFIERMTNFDKNLPNEKVLPKHSLLYEYFTVYNELTKVKYVTEGMRKPAFLSGEQKKAIVDLLFKTNRKVTVKQLKEDYFKKIECFDSVEISGVEDRFNASLGTYHDLLKIIKDKDFLDNEENEDILEDIVLTLTLFEDREMIEERLKTYAHLFDDKVMKQLKRRRYTGWGRLSRKLINGIRDKQSGKTILDFLKSDGFANRNFMQLIHDDSLTFKEDIQKAQVSGQGDSLHEHIANLAGSPAIKKGILQTVKVVDELVKVMGRHKPENIVIEMARENQTTQKGQKNSRERMKRIEEGIKELGSQILKEHPVENTQLQNEKLYLYYLQNGRDMYVDQELDINRLSDYDVDHIVPQSFLKDDSIDNKVLTRSDKARGKSDNVPSEEVVKKMKNYWRQLLNAKLITQRKFDNLTKAERGGLSELDKAGFIKRQLVETRQITKHVAQILDSRMNTKYDENDKLIREVKVITLKSKLVSDFRKDFQFYKVREINNYHHAHDAYLNAVVGTALIKKYPKLESEFVYGDYKVYDVRKMIAKSEQEIGKATAKYFFYSNIMNFFKTEITLANGEIRKRPLIETNGETGEIVWDKGRDFATVRKVLSMPQVNIVKKTEVQTGGFSKESILPKRNSDKLIARKKDWDPKKYGGFDSPTVAYSVLVVAKVEKGKSKKLKSVKELLGITIMERSSFEKNPIDFLEAKGYKEVKKDLIIKLPKYSLFELENGRKRMLASAGELQKGNELALPSKYVNFLYLASHYEKLKGSPEDNEQKQLFVEQHKHYLDEIIEQISEFSKRVILADANLDKVLSAYNKHRDKPIREQAENIIHLFTLTNLGAPAAFKYFDTTIDRKRYTSTKEVLDATLIHQSITGLYETRIDLSQLGGDGGGSSGGSPAPGGVPWILKKPLELTIKLDLEEQQGTLLNNSILSKKGKEELKQLFEKYSALWQSWENQVGHRRIRPHKIATGTVKPTPQKQYHINPKAKPDIQIVINDLLKQGVLIQKESTMNTPVYPVPKPNGRWRMVLDYRAVNKVTPLIAVQNQHSYGILGSLFKGRYKTTIDLSNGFWAHPIVPEDYWITAFTWQGKQYCWTVLPQGFLNSPGLFTGDVVDLLQGIPNVEVYVDDVYISHDSEKEHLEYLDILFNRLKEAGYIISLKKSNIANSIVDFLGFQITNEGRGLTDTFKEKLENITAPTTLKQLQSILGLLNFARNFIPDFTELIAPLYALIPKSTKNYVPWQIEHSTTLETLITKLNGAEYLQGRKGDKTLIMKVNASYTTGYIRYYNEGEKKPISYVSIVFSKTELKFTELEKLLTTVHKGLLKALDLSMGQNIHVYSPIVSMQNIQKTPQTAKKALASRWLSWLSYLEDPRIRFFYDPQMPALKDLPAVDTGKDNKKHPSNFQHIFYTDGSAITSPTKEGHLNAGMGIVYFINKDGNLQKQQEWSISLGNHTAQFAEIAAFEFALKKCLPLGGNILVVTDSNYVAKAYNEELDVWASNGFVNNRKKPLKHISKWKSVADLKRLRPDVVVTHEPGHQKLDSSPHAYGNNLADQLATQASFKVHAGKRTADGSEFEKRTADGSEFESPKKKAKVE

SEQ ID NO: 776 - protein, 2084 aa, synthetic construct
MPAAKRVKLDGGDKKYSIGLDIGTNSVGWAVITDEYKVPSKKFKVLGNTDRHSIKKNLIGALLFDSGETAEATRLKRTARRRYTRRKNRICYLQEIFSNEMAKVDDSFFHRLEESFLVEEDKKHERHPIFGNIVDEVAYHEKYPTIYHLRKKLVDSTDKADLRLIYLALAHMIKFRGHFLIEGDLNPDNSDVDKLFIQLVQTYNQLFEENPINASGVDAKAILSARLSKSRRLENLIAQLPGEKKNGLFGNLIALSLGLTPNFKSNFDLAEDAKLQLSKDTYDDDLDNLLAQIGDQYADLFLAAKNLSDAILLSDILRVNTEITKAPLSASMIKRYDEHHQDLTLLKALVRQQLPEKYKEIFFDQSKNGYAGYIDGGASQEEFYKFIKPILEKMDGTEELLVKLNREDLLRKQRTFDNGSIPHQIHLGELHAILRRQEDFYPFLKDNREKIEKILTFRIPYYVGPLARGNSRFAWMTRKSEETITPWNFEEVVDKGASAQSFIERMTNFDKNLPNEKVLPKHSLLYEYFTVYNELTKVKYVTEGMRKPAFLSGEQKKAIVDLLFKTNRKVTVKQLKEDYFKKIECFDSVEISGVEDRFNASLGTYHDLLKIIKDKDFLDNEENEDILEDIVLTLTLFEDREMIEERLKTYAHLFDDKVMKQLKRRRYTGWGRLSRKLINGIRDKQSGKTILDFLKSDGFANRNFMQLIHDDSLTFKEDIQKAQVSGQGDSLHEHIANLAGSPAIKKGILQTVKVVDELVKVMGRHKPENIVIEMARENQTTQKGQKNSRERMKRIEEGIKELGSQILKEHPVENTQLQNEKLYLYYLQNGRDMYVDQELDINRLSDYDVDHIVPQSFLKDDSIDNKVLTRSDKARGKSDNVPSEEVVKKMKNYWRQLLNAKLITQRKFDNLTKAERGGLSELDKAGFIKRQLVETRQITKHVAQILDSRMNTKYDENDKLIREVKVITLKSKLVSDFRKDFQFYKVREINNYHHAHDAYLNAVVGTALIKKYPKLESEFVYGDYKVYDVRKMIAKSEQEIGKATAKYFFYSNIMNFFKTEITLANGEIRKRPLIETNGETGEIVWDKGRDFATVRKVLSMPQVNIVKKTEVQTGGFSKESILPKRNSDKLIARKKDWDPKKYGGFDSPTVAYSVLVVAKVEKGKSKKLKSVKELLGITIMERSSFEKNPIDFLEAKGYKEVKKDLIIKLPKYSLFELENGRKRMLASAGELQKGNELALPSKYVNFLYLASHYEKLKGSPEDNEQKQLFVEQHKHYLDEIIEQISEFSKRVILADANLDKVLSAYNKHRDKPIREQAENIIHLFTLTNLGAPAAFKYFDTTIDRKRYTSTKEVLDATLIHQSITGLYETRIDLSQLGGDGGGGSEAAAKGGVPWILKKPLELTIKLDLEEQQGTLLNNSILSKKGKEELKQLFEKYSALWQSWENQVGHRRIRPHKIATGTVKPTPQKQYHINPKAKPDIQIVINDLLKQGVLIQKESTMNTPVYPVPKPNGRWRMVLDYRAVNKVTPLIAVQNQHSYGILGSLFKGRYKTTIDLSNGFWAHPIVPEDYWITAFTWQGKQYCWTVLPQGFLNSPGLFTGDVVDLLQGIPNVEVYVDDVYISHDSEKEHLEYLDILFNRLKEAGYIISLKKSNIANSIVDFLGFQITNEGRGLTDTFKEKLENITAPTTLKQLQSILGLLNFARNFIPDFTELIAPLYALIPKSTKNYVPWQIEHSTTLETLITKLNGAEYLQGRKGDKTLIMKVNASYTTGYIRYYNEGEKKPISYVSIVFSKTELKFTELEKLLTTVHKGLLKALDLSMGQNIHVYSPIVSMQNIQKTPQTAKKALASRWLSWLSYLEDPRIRFFYDPQMPALKDLPAVDTGKDNKKHPSNFQHIFYTDGSAITSPTKEGHLNAGMGIVYFINKDGNLQKQQEWSISLGNHTAQFAEIAAFEFALKKCLPLGGNILVVTDSNYVAKAYNEELDVWASNGFVNNRKKPLKHISKWKSVADLKRLRPDVVVTHEPGHQKLDSSPHAYGNNLADQLATQASFKVHAGKRTADGSEFEKRTADGSEFESPKKKAKVE

SEQ ID NO: 777 - protein, 2085 aa, synthetic construct
MPAAKRVKLDGGDKKYSIGLDIGTNSVGWAVITDEYKVPSKKFKVLGNTDRHSIKKNLIGALLFDSGETAEATRLKRTARRRYTRRKNRICYLQEIFSNEMAKVDDSFFHRLEESFLVEEDKKHERHPIFGNIVDEVAYHEKYPTIYHLRKKLVDSTDKADLRLIYLALAHMIKFRGHFLIEGDLNPDNSDVDKLFIQLVQTYNQLFEENPINASGVDAKAILSARLSKSRRLENLIAQLPGEKKNGLFGNLIALSLGLTPNFKSNFDLAEDAKLQLSKDTYDDDLDNLLAQIGDQYADLFLAAKNLSDAILLSDILRVNTEITKAPLSASMIKRYDEHHQDLTLLKALVRQQLPEKYKEIFFDQSKNGYAGYIDGGASQEEFYKFIKPILEKMDGTEELLVKLNREDLLRKQRTFDNGSIPHQIHLGELHAILRRQEDFYPFLKDNREKIEKILTFRIPYYVGPLARGNSRFAWMTRKSEETITPWNFEEVVDKGASAQSFIERMTNFDKNLPNEKVLPKHSLLYEYFTVYNELTKVKYVTEGMRKPAFLSGEQKKAIVDLLFKTNRKVTVKQLKEDYFKKIECFDSVEISGVEDRFNASLGTYHDLLKIIKDKDFLDNEENEDILEDIVLTLTLFEDREMIEERLKTYAHLFDDKVMKQLKRRRYTGWGRLSRKLINGIRDKQSGKTILDFLKSDGFANRNFMQLIHDDSLTFKEDIQKAQVSGQGDSLHEHIANLAGSPAIKKGILQTVKVVDELVKVMGRHKPENIVIEMARENQTTQKGQKNSRERMKRIEEGIKELGSQILKEHPVENTQLQNEKLYLYYLQNGRDMYVDQELDINRLSDYDVDHIVPQSFLKDDSIDNKVLTRSDKARGKSDNVPSEEVVKKMKNYWRQLLNAKLITQRKFDNLTKAERGGLSELDKAGFIKRQLVETRQITKHVAQILDSRMNTKYDENDKLIREVKVITLKSKLVSDFRKDFQFYKVREINNYHHAHDAYLNAVVGTALIKKYPKLESEFVYGDYKVYDVRKMIAKSEQEIGKATAKYFFYSNIMNFFKTEITLANGEIRKRPLIETNGETGEIVWDKGRDFATVRKVLSMPQVNIVKKTEVQTGGFSKESILPKRNSDKLIARKKDWDPKKYGGFDSPTVAYSVLVVAKVEKGKSKKLKSVKELLGITIMERSSFEKNPIDFLEAKGYKEVKKDLIIKLPKYSLFELENGRKRMLASAGELQKGNELALPSKYVNFLYLASHYEKLKGSPEDNEQKQLFVEQHKHYLDEIIEQISEFSKRVILADANLDKVLSAYNKHRDKPIREQAENIIHLFTLTNLGAPAAFKYFDTTIDRKRYTSTKEVLDATLIHQSITGLYETRIDLSQLGGDGGGGGGSSPAPGGVPWILKKPLELTIKLDLEEQQGTLLNNSILSKKGKEELKQLFEKYSALWQSWENQVGHRRIRPHKIATGTVKPTPQKQYHINPKAKPDIQIVINDLLKQGVLIQKESTMNTPVYPVPKPNGRWRMVLDYRAVNKVTPLIAVQNQHSYGILGSLFKGRYKTTIDLSNGFWAHPIVPEDYWITAFTWQGKQYCWTVLPQGFLNSPGLFTGDVVDLLQGIPNVEVYVDDVYISHDSEKEHLEYLDILFNRLKEAGYIISLKKSNIANSIVDFLGFQITNEGRGLTDTFKEKLENITAPTTLKQLQSILGLLNFARNFIPDFTELIAPLYALIPKSTKNYVPWQIEHSTTLETLITKLNGAEYLQGRKGDKTLIMKVNASYTTGYIRYYNEGEKKPISYVSIVFSKTELKFTELEKLLTTVHKGLLKALDLSMGQNIHVYSPIVSMQNIQKTPQTAKKALASRWLSWLSYLEDPRIRFFYDPQMPALKDLPAVDTGKDNKKHPSNFQHIFYTDGSAITSPTKEGHLNAGMGIVYFINKDGNLQKQQEWSISLGNHTAQFAEIAAFEFALKKCLPLGGNILVVTDSNYVAKAYNEELDVWASNGFVNNRKKPLKHISKWKSVADLKRLRPDVVVTHEPGHQKLDSSPHAYGNNLADQLATQASFKVHAGKRTADGSEFEKRTADGSEFESPKKKAKVE

SEQ ID NO: 778 - protein, 2091 aa, synthetic construct
MPAAKRVKLDGGDKKYSIGLDIGTNSVGWAVITDEYKVPSKKFKVLGNTDRHSIKKNLIGALLFDSGETAEATRLKRTARRRYTRRKNRICYLQEIFSNEMAKVDDSFFHRLEESFLVEEDKKHERHPIFGNIVDEVAYHEKYPTIYHLRKKLVDSTDKADLRLIYLALAHMIKFRGHFLIEGDLNPDNSDVDKLFIQLVQTYNQLFEENPINASGVDAKAILSARLSKSRRLENLIAQLPGEKKNGLFGNLIALSLGLTPNFKSNFDLAEDAKLQLSKDTYDDDLDNLLAQIGDQYADLFLAAKNLSDAILLSDILRVNTEITKAPLSASMIKRYDEHHQDLTLLKALVRQQLPEKYKEIFFDQSKNGYAGYIDGGASQEEFYKFIKPILEKMDGTEELLVKLNREDLLRKQRTFDNGSIPHQIHLGELHAILRRQEDFYPFLKDNREKIEKILTFRIPYYVGPLARGNSRFAWMTRKSEETITPWNFEEVVDKGASAQSFIERMTNFDKNLPNEKVLPKHSLLYEYFTVYNELTKVKYVTEGMRKPAFLSGEQKKAIVDLLFKTNRKVTVKQLKEDYFKKIECFDSVEISGVEDRFNASLGTYHDLLKIIKDKDFLDNEENEDILEDIVLTLTLFEDREMIEERLKTYAHLFDDKVMKQLKRRRYTGWGRLSRKLINGIRDKQSGKTILDFLKSDGFANRNFMQLIHDDSLTFKEDIQKAQVSGQGDSLHEHIANLAGSPAIKKGILQTVKVVDELVKVMGRHKPENIVIEMARENQTTQKGQKNSRERMKRIEEGIKELGSQILKEHPVENTQLQNEKLYLYYLQNGRDMYVDQELDINRLSDYDVDHIVPQSFLKDDSIDNKVLTRSDKARGKSDNVPSEEVVKKMKNYWRQLLNAKLITQRKFDNLTKAERGGLSELDKAGFIKRQLVETRQITKHVAQILDSRMNTKYDENDKLIREVKVITLKSKLVSDFRKDFQFYKVREINNYHHAHDAYLNAVVGTALIKKYPKLESEFVYGDYKVYDVRKMIAKSEQEIGKATAKYFFYSNIMNFFKTEITLANGEIRKRPLIETNGETGEIVWDKGRDFATVRKVLSMPQVNIVKKTEVQTGGFSKESILPKRNSDKLIARKKDWDPKKYGGFDSPTVAYSVLVVAKVEKGKSKKLKSVKELLGITIMERSSFEKNPIDFLEAKGYKEVKKDLIIKLPKYSLFELENGRKRMLASAGELQKGNELALPSKYVNFLYLASHYEKLKGSPEDNEQKQLFVEQHKHYLDEIIEQISEFSKRVILADANLDKVLSAYNKHRDKPIREQAENIIHLFTLTNLGAPAAFKYFDTTIDRKRYTSTKEVLDATLIHQSITGLYETRIDLSQLGGDGGEAAAKGGGGSEAAAKGGVPWILKKPLELTIKLDLEEQQGTLLNNSILSKKGKEELKQLFEKYSALWQSWENQVGHRRIRPHKIATGTVKPTPQKQYHINPKAKPDIQIVINDLLKQGVLIQKESTMNTPVYPVPKPNGRWRMVLDYRAVNKVTPLIAVQNQHSYGILGSLFKGRYKTTIDLSNGFWAHPIVPEDYWITAFTWQGKQYCWTVLPQGFLNSPGLFTGDVVDLLQGIPNVEVYVDDVYISHDSEKEHLEYLDILFNRLKEAGYIISLKKSNIANSIVDFLGFQITNEGRGLTDTFKEKLENITAPTTLKQLQSILGLLNFARNFIPDFTELIAPLYALIPKSTKNYVPWQIEHSTTLETLITKLNGAEYLQGRKGDKTLIMKVNASYTTGYIRYYNEGEKKPISYVSIVFSKTELKFTELEKLLTTVHKGLLKALDLSMGQNIHVYSPIVSMQNIQKTPQTAKKALASRWLSWLSYLEDPRIRFFYDPQMPALKDLPAVDTGKDNKKHPSNFQHIFYTDGSAITSPTKEGHLNAGMGIVYFINKDGNLQKQQEWSISLGNHTAQFAEIAAFEFALKKCLPLGGNILVVTDSNYVAKAYNEELDVWASNGFVNNRKKPLKHISKWKSVADLKRLRPDVVVTHEPGHQKLDSSPHAYGNNLADQLATQASFKVHAGKRTADGSEFEKRTADGSEFESPKKKAKVE

SEQ ID NO: 779 - protein, 2087 aa, synthetic construct
MPAAKRVKLDGGDKKYSIGLDIGTNSVGWAVITDEYKVPSKKFKVLGNTDRHSIKKNLIGALLFDSGETAEATRLKRTARRRYTRRKNRICYLQEIFSNEMAKVDDSFFHRLEESFLVEEDKKHERHPIFGNIVDEVAYHEKYPTIYHLRKKLVDSTDKADLRLIYLALAHMIKFRGHFLIEGDLNPDNSDVDKLFIQLVQTYNQLFEENPINASGVDAKAILSARLSKSRRLENLIAQLPGEKKNGLFGNLIALSLGLTPNFKSNFDLAEDAKLQLSKDTYDDDLDNLLAQIGDQYADLFLAAKNLSDAILLSDILRVNTEITKAPLSASMIKRYDEHHQDLTLLKALVRQQLPEKYKEIFFDQSKNGYAGYIDGGASQEEFYKFIKPILEKMDGTEELLVKLNREDLLRKQRTFDNGSIPHQIHLGELHAILRRQEDFYPFLKDNREKIEKILTFRIPYYVGPLARGNSRFAWMTRKSEETITPWNFEEVVDKGASAQSFIERMTNFDKNLPNEKVLPKHSLLYEYFTVYNELTKVKYVTEGMRKPAFLSGEQKKAIVDLLFKTNRKVTVKQLKEDYFKKIECFDSVEISGVEDRFNASLGTYHDLLKIIKDKDFLDNEENEDILEDIVLTLTLFEDREMIEERLKTYAHLFDDKVMKQLKRRRYTGWGRLSRKLINGIRDKQSGKTILDFLKSDGFANRNFMQLIHDDSLTFKEDIQKAQVSGQGDSLHEHIANLAGSPAIKKGILQTVKVVDELVKVMGRHKPENIVIEMARENQTTQKGQKNSRERMKRIEEGIKELGSQILKEHPVENTQLQNEKLYLYYLQNGRDMYVDQELDINRLSDYDVDHIVPQSFLKDDSIDNKVLTRSDKARGKSDNVPSEEVVKKMKNYWRQLLNAKLITQRKFDNLTKAERGGLSELDKAGFIKRQLVETRQITKHVAQILDSRMNTKYDENDKLIREVKVITLKSKLVSDFRKDFQFYKVREINNYHHAHDAYLNAVVGTALIKKYPKLESEFVYGDYKVYDVRKMIAKSEQEIGKATAKYFFYSNIMNFFKTEITLANGEIRKRPLIETNGETGEIVWDKGRDFATVRKVLSMPQVNIVKKTEVQTGGFSKESILPKRNSDKLIARKKDWDPKKYGGFDSPTVAYSVLVVAKVEKGKSKKLKSVKELLGITIMERSSFEKNPIDFLEAKGYKEVKKDLIIKLPKYSLFELENGRKRMLASAGELQKGNELALPSKYVNFLYLASHYEKLKGSPEDNEQKQLFVEQHKHYLDEIIEQISEFSKRVILADANLDKVLSAYNKHRDKPIREQAENIIHLFTLTNLGAPAAFKYFDTTIDRKRYTSTKEVLDATLIHQSITGLYETRIDLSQLGGDGGEAAAKGGSGSSGGVPWILKKPLELTIKLDLEEQQGTLLNNSILSKKGKEELKQLFEKYSALWQSWENQVGHRRIRPHKIATGTVKPTPQKQYHINPKAKPDIQIVINDLLKQGVLIQKESTMNTPVYPVPKPNGRWRMVLDYRAVNKVTPLIAVQNQHSYGILGSLFKGRYKTTIDLSNGFWAHPIVPEDYWITAFTWQGKQYCWTVLPQGFLNSPGLFTGDVVDLLQGIPNVEVYVDDVYISHDSEKEHLEYLDILFNRLKEAGYIISLKKSNIANSIVDFLGFQITNEGRGLTDTFKEKLENITAPTTLKQLQSILGLLNFARNFIPDFTELIAPLYALIPKSTKNYVPWQIEHSTTLETLITKLNGAEYLQGRKGDKTLIMKVNASYTTGYIRYYNEGEKKPISYVSIVFSKTELKFTELEKLLTTVHKGLLKALDLSMGQNIHVYSPIVSMQNIQKTPQTAKKALASRWLSWLSYLEDPRIRFFYDPQMPALKDLPAVDTGKDNKKHPSNFQHIFYTDGSAITSPTKEGHLNAGMGIVYFINKDGNLQKQQEWSISLGNHTAQFAEIAAFEFALKKCLPLGGNILVVTDSNYVAKAYNEELDVWASNGFVNNRKKPLKHISKWKSVADLKRLRPDVVVTHEPGHQKLDSSPHAYGNNLADQLATQASFKVHAGKRTADGSEFEKRTADGSEFESPKKKAKVE

SEQ ID NO: 780 - protein, 2085 aa, synthetic construct
MPAAKRVKLDGGDKKYSIGLDIGTNSVGWAVITDEYKVPSKKFKVLGNTDRHSIKKNLIGALLFDSGETAEATRLKRTARRRYTRRKNRICYLQEIFSNEMAKVDDSFFHRLEESFLVEEDKKHERHPIFGNIVDEVAYHEKYPTIYHLRKKLVDSTDKADLRLIYLALAHMIKFRGHFLIEGDLNPDNSDVDKLFIQLVQTYNQLFEENPINASGVDAKAILSARLSKSRRLENLIAQLPGEKKNGLFGNLIALSLGLTPNFKSNFDLAEDAKLQLSKDTYDDDLDNLLAQIGDQYADLFLAAKNLSDAILLSDILRVNTEITKAPLSASMIKRYDEHHQDLTLLKALVRQQLPEKYKEIFFDQSKNGYAGYIDGGASQEEFYKFIKPILEKMDGTEELLVKLNREDLLRKQRTFDNGSIPHQIHLGELHAILRRQEDFYPFLKDNREKIEKILTFRIPYYVGPLARGNSRFAWMTRKSEETITPWNFEEVVDKGASAQSFIERMTNFDKNLPNEKVLPKHSLLYEYFTVYNELTKVKYVTEGMRKPAFLSGEQKKAIVDLLFKTNRKVTVKQLKEDYFKKIECFDSVEISGVEDRFNASLGTYHDLLKIIKDKDFLDNEENEDILEDIVLTLTLFEDREMIEERLKTYAHLFDDKVMKQLKRRRYTGWGRLSRKLINGIRDKQSGKTILDFLKSDGFANRNFMQLIHDDSLTFKEDIQKAQVSGQGDSLHEHIANLAGSPAIKKGILQTVKVVDELVKVMGRHKPENIVIEMARENQTTQKGQKNSRERMKRIEEGIKELGSQILKEHPVENTQLQNEKLYLYYLQNGRDMYVDQELDINRLSDYDVDHIVPQSFLKDDSIDNKVLTRSDKARGKSDNVPSEEVVKKMKNYWRQLLNAKLITQRKFDNLTKAERGGLSELDKAGFIKRQLVETRQITKHVAQILDSRMNTKYDENDKLIREVKVITLKSKLVSDFRKDFQFYKVREINNYHHAHDAYLNAVVGTALIKKYPKLESEFVYGDYKVYDVRKMIAKSEQEIGKATAKYFFYSNIMNFFKTEITLANGEIRKRPLIETNGETGEIVWDKGRDFATVRKVLSMPQVNIVKKTEVQTGGFSKESILPKRNSDKLIARKKDWDPKKYGGFDSPTVAYSVLVVAKVEKGKSKKLKSVKELLGITIMERSSFEKNPIDFLEAKGYKEVKKDLIIKLPKYSLFELENGRKRMLASAGELQKGNELALPSKYVNFLYLASHYEKLKGSPEDNEQKQLFVEQHKHYLDEIIEQISEFSKRVILADANLDKVLSAYNKHRDKPIREQAENIIHLFTLTNLGAPAAFKYFDTTIDRKRYTSTKEVLDATLIHQSITGLYETRIDLSQLGGDGGGGSGGGPAPGGVPWILKKPLELTIKLDLEEQQGTLLNNSILSKKGKEELKQLFEKYSALWQSWENQVGHRRIRPHKIATGTVKPTPQKQYHINPKAKPDIQIVINDLLKQGVLIQKESTMNTPVYPVPKPNGRWRMVLDYRAVNKVTPLIAVQNQHSYGILGSLFKGRYKTTIDLSNGFWAHPIVPEDYWITAFTWQGKQYCWTVLPQGFLNSPGLFTGDVVDLLQGIPNVEVYVDDVYISHDSEKEHLEYLDILFNRLKEAGYIISLKKSNIANSIVDFLGFQITNEGRGLTDTFKEKLENITAPTTLKQLQSILGLLNFARNFIPDFTELIAPLYALIPKSTKNYVPWQIEHSTTLETLITKLNGAEYLQGRKGDKTLIMKVNASYTTGYIRYYNEGEKKPISYVSIVFSKTELKFTELEKLLTTVHKGLLKALDLSMGQNIHVYSPIVSMQNIQKTPQTAKKALASRWLSWLSYLEDPRIRFFYDPQMPALKDLPAVDTGKDNKKHPSNFQHIFYTDGSAITSPTKEGHLNAGMGIVYFINKDGNLQKQQEWSISLGNHTAQFAEIAAFEFALKKCLPLGGNILVVTDSNYVAKAYNEELDVWASNGFVNNRKKPLKHISKWKSVADLKRLRPDVVVTHEPGHQKLDSSPHAYGNNLADQLATQASFKVHAGKRTADGSEFEKRTADGSEFESPKKKAKVE

SEQ ID NO: 781 - protein, 2086 aa, synthetic construct
MPAAKRVKLDGGDKKYSIGLDIGTNSVGWAVITDEYKVPSKKFKVLGNTDRHSIKKNLIGALLFDSGETAEATRLKRTARRRYTRRKNRICYLQEIFSNEMAKVDDSFFHRLEESFLVEEDKKHERHPIFGNIVDEVAYHEKYPTIYHLRKKLVDSTDKADLRLIYLALAHMIKFRGHFLIEGDLNPDNSDVDKLFIQLVQTYNQLFEENPINASGVDAKAILSARLSKSRRLENLIAQLPGEKKNGLFGNLIALSLGLTPNFKSNFDLAEDAKLQLSKDTYDDDLDNLLAQIGDQYADLFLAAKNLSDAILLSDILRVNTEITKAPLSASMIKRYDEHHQDLTLLKALVRQQLPEKYKEIFFDQSKNGYAGYIDGGASQEEFYKFIKPILEKMDGTEELLVKLNREDLLRKQRTFDNGSIPHQIHLGELHAILRRQEDFYPFLKDNREKIEKILTFRIPYYVGPLARGNSRFAWMTRKSEETITPWNFEEVVDKGASAQSFIERMTNFDKNLPNEKVLPKHSLLYEYFTVYNELTKVKYVTEGMRKPAFLSGEQKKAIVDLLFKTNRKVTVKQLKEDYFKKIECFDSVEISGVEDRFNASLGTYHDLLKIIKDKDFLDNEENEDILEDIVLTLTLFEDREMIEERLKTYAHLFDDKVMKQLKRRRYTGWGRLSRKLINGIRDKQSGKTILDFLKSDGFANRNFMQLIHDDSLTFKEDIQKAQVSGQGDSLHEHIANLAGSPAIKKGILQTVKVVDELVKVMGRHKPENIVIEMARENQTTQKGQKNSRERMKRIEEGIKELGSQILKEHPVENTQLQNEKLYLYYLQNGRDMYVDQELDINRLSDYDVDHIVPQSFLKDDSIDNKVLTRSDKARGKSDNVPSEEVVKKMKNYWRQLLNAKLITQRKFDNLTKAERGGLSELDKAGFIKRQLVETRQITKHVAQILDSRMNTKYDENDKLIREVKVITLKSKLVSDFRKDFQFYKVREINNYHHAHDAYLNAVVGTALIKKYPKLESEFVYGDYKVYDVRKMIAKSEQEIGKATAKYFFYSNIMNFFKTEITLANGEIRKRPLIETNGETGEIVWDKGRDFATVRKVLSMPQVNIVKKTEVQTGGFSKESILPKRNSDKLIARKKDWDPKKYGGFDSPTVAYSVLVVAKVEKGKSKKLKSVKELLGITIMERSSFEKNPIDFLEAKGYKEVKKDLIIKLPKYSLFELENGRKRMLASAGELQKGNELALPSKYVNFLYLASHYEKLKGSPEDNEQKQLFVEQHKHYLDEIIEQISEFSKRVILADANLDKVLSAYNKHRDKPIREQAENIIHLFTLTNLGAPAAFKYFDTTIDRKRYTSTKEVLDATLIHQSITGLYETRIDLSQLGGDGGGGGGSGGGGSGGVPWILKKPLELTIKLDLEEQQGTLLNNSILSKKGKEELKQLFEKYSALWQSWENQVGHRRIRPHKIATGTVKPTPQKQYHINPKAKPDIQIVINDLLKQGVLIQKESTMNTPVYPVPKPNGRWRMVLDYRAVNKVTPLIAVQNQHSYGILGSLFKGRYKTTIDLSNGFWAHPIVPEDYWITAFTWQGKQYCWTVLPQGFLNSPGLFTGDVVDLLQGIPNVEVYVDDVYISHDSEKEHLEYLDILFNRLKEAGYIISLKKSNIANSIVDFLGFQITNEGRGLTDTFKEKLENITAPTTLKQLQSILGLLNFARNFIPDFTELIAPLYALIPKSTKNYVPWQIEHSTTLETLITKLNGAEYLQGRKGDKTLIMKVNASYTTGYIRYYNEGEKKPISYVSIVFSKTELKFTELEKLLTTVHKGLLKALDLSMGQNIHVYSPIVSMQNIQKTPQTAKKALASRWLSWLSYLEDPRIRFFYDPQMPALKDLPAVDTGKDNKKHPSNFQHIFYTDGSAITSPTKEGHLNAGMGIVYFINKDGNLQKQQEWSISLGNHTAQFAEIAAFEFALKKCLPLGGNILVVTDSNYVAKAYNEELDVWASNGFVNNRKKPLKHISKWKSVADLKRLRPDVVVTHEPGHQKLDSSPHAYGNNLADQLATQASFKVHAGKRTADGSEFEKRTADGSEFESPKKKAKVE

SEQ ID NO: 782 - protein, 2085 aa, synthetic construct
MPAAKRVKLDGGDKKYSIGLDIGTNSVGWAVITDEYKVPSKKFKVLGNTDRHSIKKNLIGALLFDSGETAEATRLKRTARRRYTRRKNRICYLQEIFSNEMAKVDDSFFHRLEESFLVEEDKKHERHPIFGNIVDEVAYHEKYPTIYHLRKKLVDSTDKADLRLIYLALAHMIKFRGHFLIEGDLNPDNSDVDKLFIQLVQTYNQLFEENPINASGVDAKAILSARLSKSRRLENLIAQLPGEKKNGLFGNLIALSLGLTPNFKSNFDLAEDAKLQLSKDTYDDDLDNLLAQIGDQYADLFLAAKNLSDAILLSDILRVNTEITKAPLSASMIKRYDEHHQDLTLLKALVRQQLPEKYKEIFFDQSKNGYAGYIDGGASQEEFYKFIKPILEKMDGTEELLVKLNREDLLRKQRTFDNGSIPHQIHLGELHAILRRQEDFYPFLKDNREKIEKILTFRIPYYVGPLARGNSRFAWMTRKSEETITPWNFEEVVDKGASAQSFIERMTNFDKNLPNEKVLPKHSLLYEYFTVYNELTKVKYVTEGMRKPAFLSGEQKKAIVDLLFKTNRKVTVKQLKEDYFKKIECFDSVEISGVEDRFNASLGTYHDLLKIIKDKDFLDNEENEDILEDIVLTLTLFEDREMIEERLKTYAHLFDDKVMKQLKRRRYTGWGRLSRKLINGIRDKQSGKTILDFLKSDGFANRNFMQLIHDDSLTFKEDIQKAQVSGQGDSLHEHIANLAGSPAIKKGILQTVKVVDELVKVMGRHKPENIVIEMARENQTTQKGQKNSRERMKRIEEGIKELGSQILKEHPVENTQLQNEKLYLYYLQNGRDMYVDQELDINRLSDYDVDHIVPQSFLKDDSIDNKVLTRSDKARGKSDNVPSEEVVKKMKNYWRQLLNAKLITQRKFDNLTKAERGGLSELDKAGFIKRQLVETRQITKHVAQILDSRMNTKYDENDKLIREVKVITLKSKLVSDFRKDFQFYKVREINNYHHAHDAYLNAVVGTALIKKYPKLESEFVYGDYKVYDVRKMIAKSEQEIGKATAKYFFYSNIMNFFKTEITLANGEIRKRPLIETNGETGEIVWDKGRDFATVRKVLSMPQVNIVKKTEVQTGGFSKESILPKRNSDKLIARKKDWDPKKYGGFDSPTVAYSVLVVAKVEKGKSKKLKSVKELLGITIMERSSFEKNPIDFLEAKGYKEVKKDLIIKLPKYSLFELENGRKRMLASAGELQKGNELALPSKYVNFLYLASHYEKLKGSPEDNEQKQLFVEQHKHYLDEIIEQISEFSKRVILADANLDKVLSAYNKHRDKPIREQAENIIHLFTLTNLGAPAAFKYFDTTIDRKRYTSTKEVLDATLIHQSITGLYETRIDLSQLGGDGGPAPAPAPAPGGVPWILKKPLELTIKLDLEEQQGTLLNNSILSKKGKEELKQLFEKYSALWQSWENQVGHRRIRPHKIATGTVKPTPQKQYHINPKAKPDIQIVINDLLKQGVLIQKESTMNTPVYPVPKPNGRWRMVLDYRAVNKVTPLIAVQNQHSYGILGSLFKGRYKTTIDLSNGFWAHPIVPEDYWITAFTWQGKQYCWTVLPQGFLNSPGLFTGDVVDLLQGIPNVEVYVDDVYISHDSEKEHLEYLDILFNRLKEAGYIISLKKSNIANSIVDFLGFQITNEGRGLTDTFKEKLENITAPTTLKQLQSILGLLNFARNFIPDFTELIAPLYALIPKSTKNYVPWQIEHSTTLETLITKLNGAEYLQGRKGDKTLIMKVNASYTTGYIRYYNEGEKKPISYVSIVFSKTELKFTELEKLLTTVHKGLLKALDLSMGQNIHVYSPIVSMQNIQKTPQTAKKALASRWLSWLSYLEDPRIRFFYDPQMPALKDLPAVDTGKDNKKHPSNFQHIFYTDGSAITSPTKEGHLNAGMGIVYFINKDGNLQKQQEWSISLGNHTAQFAEIAAFEFALKKCLPLGGNILVVTDSNYVAKAYNEELDVWASNGFVNNRKKPLKHISKWKSVADLKRLRPDVVVTHEPGHQKLDSSPHAYGNNLADQLATQASFKVHAGKRTADGSEFEKRTADGSEFESPKKKAKVE

SEQ ID NO: 783 - protein, 2091 aa, synthetic construct
MPAAKRVKLDGGDKKYSIGLDIGTNSVGWAVITDEYKVPSKKFKVLGNTDRHSIKKNLIGALLFDSGETAEATRLKRTARRRYTRRKNRICYLQEIFSNEMAKVDDSFFHRLEESFLVEEDKKHERHPIFGNIVDEVAYHEKYPTIYHLRKKLVDSTDKADLRLIYLALAHMIKFRGHFLIEGDLNPDNSDVDKLFIQLVQTYNQLFEENPINASGVDAKAILSARLSKSRRLENLIAQLPGEKKNGLFGNLIALSLGLTPNFKSNFDLAEDAKLQLSKDTYDDDLDNLLAQIGDQYADLFLAAKNLSDAILLSDILRVNTEITKAPLSASMIKRYDEHHQDLTLLKALVRQQLPEKYKEIFFDQSKNGYAGYIDGGASQEEFYKFIKPILEKMDGTEELLVKLNREDLLRKQRTFDNGSIPHQIHLGELHAILRRQEDFYPFLKDNREKIEKILTFRIPYYVGPLARGNSRFAWMTRKSEETITPWNFEEVVDKGASAQSFIERMTNFDKNLPNEKVLPKHSLLYEYFTVYNELTKVKYVTEGMRKPAFLSGEQKKAIVDLLFKTNRKVTVKQLKEDYFKKIECFDSVEISGVEDRFNASLGTYHDLLKIIKDKDFLDNEENEDILEDIVLTLTLFEDREMIEERLKTYAHLFDDKVMKQLKRRRYTGWGRLSRKLINGIRDKQSGKTILDFLKSDGFANRNFMQLIHDDSLTFKEDIQKAQVSGQGDSLHEHIANLAGSPAIKKGILQTVKVVDELVKVMGRHKPENIVIEMARENQTTQKGQKNSRERMKRIEEGIKELGSQILKEHPVENTQLQNEKLYLYYLQNGRDMYVDQELDINRLSDYDVDHIVPQSFLKDDSIDNKVLTRSDKARGKSDNVPSEEVVKKMKNYWRQLLNAKLITQRKFDNLTKAERGGLSELDKAGFIKRQLVETRQITKHVAQILDSRMNTKYDENDKLIREVKVITLKSKLVSDFRKDFQFYKVREINNYHHAHDAYLNAVVGTALIKKYPKLESEFVYGDYKVYDVRKMIAKSEQEIGKATAKYFFYSNIMNFFKTEITLANGEIRKRPLIETNGETGEIVWDKGRDFATVRKVLSMPQVNIVKKTEVQTGGFSKESILPKRNSDKLIARKKDWDPKKYGGFDSPTVAYSVLVVAKVEKGKSKKLKSVKELLGITIMERSSFEKNPIDFLEAKGYKEVKKDLIIKLPKYSLFELENGRKRMLASAGELQKGNELALPSKYVNFLYLASHYEKLKGSPEDNEQKQLFVEQHKHYLDEIIEQISEFSKRVILADANLDKVLSAYNKHRDKPIREQAENIIHLFTLTNLGAPAAFKYFDTTIDRKRYTSTKEVLDATLIHQSITGLYETRIDLSQLGGDGGGGSGGSGGSGGSGGSGGVPWILKKPLELTIKLDLEEQQGTLLNNSILSKKGKEELKQLFEKYSALWQSWENQVGHRRIRPHKIATGTVKPTPQKQYHINPKAKPDIQIVINDLLKQGVLIQKESTMNTPVYPVPKPNGRWRMVLDYRAVNKVTPLIAVQNQHSYGILGSLFKGRYKTTIDLSNGFWAHPIVPEDYWITAFTWQGKQYCWTVLPQGFLNSPGLFTGDVVDLLQGIPNVEVYVDDVYISHDSEKEHLEYLDILFNRLKEAGYIISLKKSNIANSIVDFLGFQITNEGRGLTDTFKEKLENITAPTTLKQLQSILGLLNFARNFIPDFTELIAPLYALIPKSTKNYVPWQIEHSTTLETLITKLNGAEYLQGRKGDKTLIMKVNASYTTGYIRYYNEGEKKPISYVSIVFSKTELKFTELEKLLTTVHKGLLKALDLSMGQNIHVYSPIVSMQNIQKTPQTAKKALASRWLSWLSYLEDPRIRFFYDPQMPALKDLPAVDTGKDNKKHPSNFQHIFYTDGSAITSPTKEGHLNAGMGIVYFINKDGNLQKQQEWSISLGNHTAQFAEIAAFEFALKKCLPLGGNILVVTDSNYVAKAYNEELDVWASNGFVNNRKKPLKHISKWKSVADLKRLRPDVVVTHEPGHQKLDSSPHAYGNNLADQLATQASFKVHAGKRTADGSEFEKRTADGSEFESPKKKAKVE

SEQ ID NO: 784 - protein, 2084 aa, synthetic construct
MPAAKRVKLDGGDKKYSIGLDIGTNSVGWAVITDEYKVPSKKFKVLGNTDRHSIKKNLIGALLFDSGETAEATRLKRTARRRYTRRKNRICYLQEIFSNEMAKVDDSFFHRLEESFLVEEDKKHERHPIFGNIVDEVAYHEKYPTIYHLRKKLVDSTDKADLRLIYLALAHMIKFRGHFLIEGDLNPDNSDVDKLFIQLVQTYNQLFEENPINASGVDAKAILSARLSKSRRLENLIAQLPGEKKNGLFGNLIALSLGLTPNFKSNFDLAEDAKLQLSKDTYDDDLDNLLAQIGDQYADLFLAAKNLSDAILLSDILRVNTEITKAPLSASMIKRYDEHHQDLTLLKALVRQQLPEKYKEIFFDQSKNGYAGYIDGGASQEEFYKFIKPILEKMDGTEELLVKLNREDLLRKQRTFDNGSIPHQIHLGELHAILRRQEDFYPFLKDNREKIEKILTFRIPYYVGPLARGNSRFAWMTRKSEETITPWNFEEVVDKGASAQSFIERMTNFDKNLPNEKVLPKHSLLYEYFTVYNELTKVKYVTEGMRKPAFLSGEQKKAIVDLLFKTNRKVTVKQLKEDYFKKIECFDSVEISGVEDRFNASLGTYHDLLKIIKDKDFLDNEENEDILEDIVLTLTLFEDREMIEERLKTYAHLFDDKVMKQLKRRRYTGWGRLSRKLINGIRDKQSGKTILDFLKSDGFANRNFMQLIHDDSLTFKEDIQKAQVSGQGDSLHEHIANLAGSPAIKKGILQTVKVVDELVKVMGRHKPENIVIEMARENQTTQKGQKNSRERMKRIEEGIKELGSQILKEHPVENTQLQNEKLYLYYLQNGRDMYVDQELDINRLSDYDVDHIVPQSFLKDDSIDNKVLTRSDKARGKSDNVPSEEVVKKMKNYWRQLLNAKLITQRKFDNLTKAERGGLSELDKAGFIKRQLVETRQITKHVAQILDSRMNTKYDENDKLIREVKVITLKSKLVSDFRKDFQFYKVREINNYHHAHDAYLNAVVGTALIKKYPKLESEFVYGDYKVYDVRKMIAKSEQEIGKATAKYFFYSNIMNFFKTEITLANGEIRKRPLIETNGETGEIVWDKGRDFATVRKVLSMPQVNIVKKTEVQTGGFSKESILPKRNSDKLIARKKDWDPKKYGGFDSPTVAYSVLVVAKVEKGKSKKLKSVKELLGITIMERSSFEKNPIDFLEAKGYKEVKKDLIIKLPKYSLFELENGRKRMLASAGELQKGNELALPSKYVNFLYLASHYEKLKGSPEDNEQKQLFVEQHKHYLDEIIEQISEFSKRVILADANLDKVLSAYNKHRDKPIREQAENIIHLFTLTNLGAPAAFKYFDTTIDRKRYTSTKEVLDATLIHQSITGLYETRIDLSQLGGDGGEAAAKGGGGGVPWILKKPLELTIKLDLEEQQGTLLNNSILSKKGKEELKQLFEKYSALWQSWENQVGHRRIRPHKIATGTVKPTPQKQYHINPKAKPDIQIVINDLLKQGVLIQKESTMNTPVYPVPKPNGRWRMVLDYRAVNKVTPLIAVQNQHSYGILGSLFKGRYKTTIDLSNGFWAHPIVPEDYWITAFTWQGKQYCWTVLPQGFLNSPGLFTGDVVDLLQGIPNVEVYVDDVYISHDSEKEHLEYLDILFNRLKEAGYIISLKKSNIANSIVDFLGFQITNEGRGLTDTFKEKLENITAPTTLKQLQSILGLLNFARNFIPDFTELIAPLYALIPKSTKNYVPWQIEHSTTLETLITKLNGAEYLQGRKGDKTLIMKVNASYTTGYIRYYNEGEKKPISYVSIVFSKTELKFTELEKLLTTVHKGLLKALDLSMGQNIHVYSPIVSMQNIQKTPQTAKKALASRWLSWLSYLEDPRIRFFYDPQMPALKDLPAVDTGKDNKKHPSNFQHIFYTDGSAITSPTKEGHLNAGMGIVYFINKDGNLQKQQEWSISLGNHTAQFAEIAAFEFALKKCLPLGGNILVVTDSNYVAKAYNEELDVWASNGFVNNRKKPLKHISKWKSVADLKRLRPDVVVTHEPGHQKLDSSPHAYGNNLADQLATQASFKVHAGKRTADGSEFEKRTADGSEFESPKKKAKVE

SEQ ID NO: 785 - protein, 2087 aa, synthetic construct
MPAAKRVKLDGGDKKYSIGLDIGTNSVGWAVITDEYKVPSKKFKVLGNTDRHSIKKNLIGALLFDSGETAEATRLKRTARRRYTRRKNRICYLQEIFSNEMAKVDDSFFHRLEESFLVEEDKKHERHPIFGNIVDEVAYHEKYPTIYHLRKKLVDSTDKADLRLIYLALAHMIKFRGHFLIEGDLNPDNSDVDKLFIQLVQTYNQLFEENPINASGVDAKAILSARLSKSRRLENLIAQLPGEKKNGLFGNLIALSLGLTPNFKSNFDLAEDAKLQLSKDTYDDDLDNLLAQIGDQYADLFLAAKNLSDAILLSDILRVNTEITKAPLSASMIKRYDEHHQDLTLLKALVRQQLPEKYKEIFFDQSKNGYAGYIDGGASQEEFYKFIKPILEKMDGTEELLVKLNREDLLRKQRTFDNGSIPHQIHLGELHAILRRQEDFYPFLKDNREKIEKILTFRIPYYVGPLARGNSRFAWMTRKSEETITPWNFEEVVDKGASAQSFIERMTNFDKNLPNEKVLPKHSLLYEYFTVYNELTKVKYVTEGMRKPAFLSGEQKKAIVDLLFKTNRKVTVKQLKEDYFKKIECFDSVEISGVEDRFNASLGTYHDLLKIIKDKDFLDNEENEDILEDIVLTLTLFEDREMIEERLKTYAHLFDDKVMKQLKRRRYTGWGRLSRKLINGIRDKQSGKTILDFLKSDGFANRNFMQLIHDDSLTFKEDIQKAQVSGQGDSLHEHIANLAGSPAIKKGILQTVKVVDELVKVMGRHKPENIVIEMARENQTTQKGQKNSRERMKRIEEGIKELGSQILKEHPVENTQLQNEKLYLYYLQNGRDMYVDQELDINRLSDYDVDHIVPQSFLKDDSIDNKVLTRSDKARGKSDNVPSEEVVKKMKNYWRQLLNAKLITQRKFDNLTKAERGGLSELDKAGFIKRQLVETRQITKHVAQILDSRMNTKYDENDKLIREVKVITLKSKLVSDFRKDFQFYKVREINNYHHAHDAYLNAVVGTALIKKYPKLESEFVYGDYKVYDVRKMIAKSEQEIGKATAKYFFYSNIMNFFKTEITLANGEIRKRPLIETNGETGEIVWDKGRDFATVRKVLSMPQVNIVKKTEVQTGGFSKESILPKRNSDKLIARKKDWDPKKYGGFDSPTVAYSVLVVAKVEKGKSKKLKSVKELLGITIMERSSFEKNPIDFLEAKGYKEVKKDLIIKLPKYSLFELENGRKRMLASAGELQKGNELALPSKYVNFLYLASHYEKLKGSPEDNEQKQLFVEQHKHYLDEIIEQISEFSKRVILADANLDKVLSAYNKHRDKPIREQAENIIHLFTLTNLGAPAAFKYFDTTIDRKRYTSTKEVLDATLIHQSITGLYETRIDLSQLGGDGGPAPAPAPAPAPGGVPWILKKPLELTIKLDLEEQQGTLLNNSILSKKGKEELKQLFEKYSALWQSWENQVGHRRIRPHKIATGTVKPTPQKQYHINPKAKPDIQIVINDLLKQGVLIQKESTMNTPVYPVPKPNGRWRMVLDYRAVNKVTPLIAVQNQHSYGILGSLFKGRYKTTIDLSNGFWAHPIVPEDYWITAFTWQGKQYCWTVLPQGFLNSPGLFTGDVVDLLQGIPNVEVYVDDVYISHDSEKEHLEYLDILFNRLKEAGYIISLKKSNIANSIVDFLGFQITNEGRGLTDTFKEKLENITAPTTLKQLQSILGLLNFARNFIPDFTELIAPLYALIPKSTKNYVPWQIEHSTTLETLITKLNGAEYLQGRKGDKTLIMKVNASYTTGYIRYYNEGEKKPISYVSIVFSKTELKFTELEKLLTTVHKGLLKALDLSMGQNIHVYSPIVSMQNIQKTPQTAKKALASRWLSWLSYLEDPRIRFFYDPQMPALKDLPAVDTGKDNKKHPSNFQHIFYTDGSAITSPTKEGHLNAGMGIVYFINKDGNLQKQQEWSISLGNHTAQFAEIAAFEFALKKCLPLGGNILVVTDSNYVAKAYNEELDVWASNGFVNNRKKPLKHISKWKSVADLKRLRPDVVVTHEPGHQKLDSSPHAYGNNLADQLATQASFKVHAGKRTADGSEFEKRTADGSEFESPKKKAKVE

SEQ ID NO: 786 - protein, 2085 aa, synthetic construct
MPAAKRVKLDGGDKKYSIGLDIGTNSVGWAVITDEYKVPSKKFKVLGNTDRHSIKKNLIGALLFDSGETAEATRLKRTARRRYTRRKNRICYLQEIFSNEMAKVDDSFFHRLEESFLVEEDKKHERHPIFGNIVDEVAYHEKYPTIYHLRKKLVDSTDKADLRLIYLALAHMIKFRGHFLIEGDLNPDNSDVDKLFIQLVQTYNQLFEENPINASGVDAKAILSARLSKSRRLENLIAQLPGEKKNGLFGNLIALSLGLTPNFKSNFDLAEDAKLQLSKDTYDDDLDNLLAQIGDQYADLFLAAKNLSDAILLSDILRVNTEITKAPLSASMIKRYDEHHQDLTLLKALVRQQLPEKYKEIFFDQSKNGYAGYIDGGASQEEFYKFIKPILEKMDGTEELLVKLNREDLLRKQRTFDNGSIPHQIHLGELHAILRRQEDFYPFLKDNREKIEKILTFRIPYYVGPLARGNSRFAWMTRKSEETITPWNFEEVVDKGASAQSFIERMTNFDKNLPNEKVLPKHSLLYEYFTVYNELTKVKYVTEGMRKPAFLSGEQKKAIVDLLFKTNRKVTVKQLKEDYFKKIECFDSVEISGVEDRFNASLGTYHDLLKIIKDKDFLDNEENEDILEDIVLTLTLFEDREMIEERLKTYAHLFDDKVMKQLKRRRYTGWGRLSRKLINGIRDKQSGKTILDFLKSDGFANRNFMQLIHDDSLTFKEDIQKAQVSGQGDSLHEHIANLAGSPAIKKGILQTVKVVDELVKVMGRHKPENIVIEMARENQTTQKGQKNSRERMKRIEEGIKELGSQILKEHPVENTQLQNEKLYLYYLQNGRDMYVDQELDINRLSDYDVDHIVPQSFLKDDSIDNKVLTRSDKARGKSDNVPSEEVVKKMKNYWRQLLNAKLITQRKFDNLTKAERGGLSELDKAGFIKRQLVETRQITKHVAQILDSRMNTKYDENDKLIREVKVITLKSKLVSDFRKDFQFYKVREINNYHHAHDAYLNAVVGTALIKKYPKLESEFVYGDYKVYDVRKMIAKSEQEIGKATAKYFFYSNIMNFFKTEITLANGEIRKRPLIETNGETGEIVWDKGRDFATVRKVLSMPQVNIVKKTEVQTGGFSKESILPKRNSDKLIARKKDWDPKKYGGFDSPTVAYSVLVVAKVEKGKSKKLKSVKELLGITIMERSSFEKNPIDFLEAKGYKEVKKDLIIKLPKYSLFELENGRKRMLASAGELQKGNELALPSKYVNFLYLASHYEKLKGSPEDNEQKQLFVEQHKHYLDEIIEQISEFSKRVILADANLDKVLSAYNKHRDKPIREQAENIIHLFTLTNLGAPAAFKYFDTTIDRKRYTSTKEVLDATLIHQSITGLYETRIDLSQLGGDGGGGSGGSGGSGGVPWILKKPLELTIKLDLEEQQGTLLNNSILSKKGKEELKQLFEKYSALWQSWENQVGHRRIRPHKIATGTVKPTPQKQYHINPKAKPDIQIVINDLLKQGVLIQKESTMNTPVYPVPKPNGRWRMVLDYRAVNKVTPLIAVQNQHSYGILGSLFKGRYKTTIDLSNGFWAHPIVPEDYWITAFTWQGKQYCWTVLPQGFLNSPGLFTGDVVDLLQGIPNVEVYVDDVYISHDSEKEHLEYLDILFNRLKEAGYIISLKKSNIANSIVDFLGFQITNEGRGLTDTFKEKLENITAPTTLKQLQSILGLLNFARNFIPDFTELIAPLYALIPKSTKNYVPWQIEHSTTLETLITKLNGAEYLQGRKGDKTLIMKVNASYTTGYIRYYNEGEKKPISYVSIVFSKTELKFTELEKLLTTVHKGLLKALDLSMGQNIHVYSPIVSMQNIQKTPQTAKKALASRWLSWLSYLEDPRIRFFYDPQMPALKDLPAVDTGKDNKKHPSNFQHIFYTDGSAITSPTKEGHLNAGMGIVYFINKDGNLQKQQEWSISLGNHTAQFAEIAAFEFALKKCLPLGGNILVVTDSNYVAKAYNEELDVWASNGFVNNRKKPLKHISKWKSVADLKRLRPDVVVTHEPGHQKLDSSPHAYGNNLADQLATQASFKVHAGKRTADGSEFEKRTADGSEFESPKKKAKVE

SEQ ID NO: 787 - protein, 2085 aa, synthetic construct
MPAAKRVKLDGGDKKYSIGLDIGTNSVGWAVITDEYKVPSKKFKVLGNTDRHSIKKNLIGALLFDSGETAEATRLKRTARRRYTRRKNRICYLQEIFSNEMAKVDDSFFHRLEESFLVEEDKKHERHPIFGNIVDEVAYHEKYPTIYHLRKKLVDSTDKADLRLIYLALAHMIKFRGHFLIEGDLNPDNSDVDKLFIQLVQTYNQLFEENPINASGVDAKAILSARLSKSRRLENLIAQLPGEKKNGLFGNLIALSLGLTPNFKSNFDLAEDAKLQLSKDTYDDDLDNLLAQIGDQYADLFLAAKNLSDAILLSDILRVNTEITKAPLSASMIKRYDEHHQDLTLLKALVRQQLPEKYKEIFFDQSKNGYAGYIDGGASQEEFYKFIKPILEKMDGTEELLVKLNREDLLRKQRTFDNGSIPHQIHLGELHAILRRQEDFYPFLKDNREKIEKILTFRIPYYVGPLARGNSRFAWMTRKSEETITPWNFEEVVDKGASAQSFIERMTNFDKNLPNEKVLPKHSLLYEYFTVYNELTKVKYVTEGMRKPAFLSGEQKKAIVDLLFKTNRKVTVKQLKEDYFKKIECFDSVEISGVEDRFNASLGTYHDLLKIIKDKDFLDNEENEDILEDIVLTLTLFEDREMIEERLKTYAHLFDDKVMKQLKRRRYTGWGRLSRKLINGIRDKQSGKTILDFLKSDGFANRNFMQLIHDDSLTFKEDIQKAQVSGQGDSLHEHIANLAGSPAIKKGILQTVKVVDELVKVMGRHKPENIVIEMARENQTTQKGQKNSRERMKRIEEGIKELGSQILKEHPVENTQLQNEKLYLYYLQNGRDMYVDQELDINRLSDYDVDHIVPQSFLKDDSIDNKVLTRSDKARGKSDNVPSEEVVKKMKNYWRQLLNAKLITQRKFDNLTKAERGGLSELDKAGFIKRQLVETRQITKHVAQILDSRMNTKYDENDKLIREVKVITLKSKLVSDFRKDFQFYKVREINNYHHAHDAYLNAVVGTALIKKYPKLESEFVYGDYKVYDVRKMIAKSEQEIGKATAKYFFYSNIMNFFKTEITLANGEIRKRPLIETNGETGEIVWDKGRDFATVRKVLSMPQVNIVKKTEVQTGGFSKESILPKRNSDKLIARKKDWDPKKYGGFDSPTVAYSVLVVAKVEKGKSKKLKSVKELLGITIMERSSFEKNPIDFLEAKGYKEVKKDLIIKLPKYSLFELENGRKRMLASAGELQKGNELALPSKYVNFLYLASHYEKLKGSPEDNEQKQLFVEQHKHYLDEIIEQISEFSKRVILADANLDKVLSAYNKHRDKPIREQAENIIHLFTLTNLGAPAAFKYFDTTIDRKRYTSTKEVLDATLIHQSITGLYETRIDLSQLGGDGGGSSGGSGGGGGVPWILKKPLELTIKLDLEEQQGTLLNNSILSKKGKEELKQLFEKYSALWQSWENQVGHRRIRPHKIATGTVKPTPQKQYHINPKAKPDIQIVINDLLKQGVLIQKESTMNTPVYPVPKPNGRWRMVLDYRAVNKVTPLIAVQNQHSYGILGSLFKGRYKTTIDLSNGFWAHPIVPEDYWITAFTWQGKQYCWTVLPQGFLNSPGLFTGDVVDLLQGIPNVEVYVDDVYISHDSEKEHLEYLDILFNRLKEAGYIISLKKSNIANSIVDFLGFQITNEGRGLTDTFKEKLENITAPTTLKQLQSILGLLNFARNFIPDFTELIAPLYALIPKSTKNYVPWQIEHSTTLETLITKLNGAEYLQGRKGDKTLIMKVNASYTTGYIRYYNEGEKKPISYVSIVFSKTELKFTELEKLLTTVHKGLLKALDLSMGQNIHVYSPIVSMQNIQKTPQTAKKALASRWLSWLSYLEDPRIRFFYDPQMPALKDLPAVDTGKDNKKHPSNFQHIFYTDGSAITSPTKEGHLNAGMGIVYFINKDGNLQKQQEWSISLGNHTAQFAEIAAFEFALKKCLPLGGNILVVTDSNYVAKAYNEELDVWASNGFVNNRKKPLKHISKWKSVADLKRLRPDVVVTHEPGHQKLDSSPHAYGNNLADQLATQASFKVHAGKRTADGSEFEKRTADGSEFESPKKKAKVE

SEQ ID NO: 788 - protein, 2082 aa, synthetic construct
MPAAKRVKLDGGDKKYSIGLDIGTNSVGWAVITDEYKVPSKKFKVLGNTDRHSIKKNLIGALLFDSGETAEATRLKRTARRRYTRRKNRICYLQEIFSNEMAKVDDSFFHRLEESFLVEEDKKHERHPIFGNIVDEVAYHEKYPTIYHLRKKLVDSTDKADLRLIYLALAHMIKFRGHFLIEGDLNPDNSDVDKLFIQLVQTYNQLFEENPINASGVDAKAILSARLSKSRRLENLIAQLPGEKKNGLFGNLIALSLGLTPNFKSNFDLAEDAKLQLSKDTYDDDLDNLLAQIGDQYADLFLAAKNLSDAILLSDILRVNTEITKAPLSASMIKRYDEHHQDLTLLKALVRQQLPEKYKEIFFDQSKNGYAGYIDGGASQEEFYKFIKPILEKMDGTEELLVKLNREDLLRKQRTFDNGSIPHQIHLGELHAILRRQEDFYPFLKDNREKIEKILTFRIPYYVGPLARGNSRFAWMTRKSEETITPWNFEEVVDKGASAQSFIERMTNFDKNLPNEKVLPKHSLLYEYFTVYNELTKVKYVTEGMRKPAFLSGEQKKAIVDLLFKTNRKVTVKQLKEDYFKKIECFDSVEISGVEDRFNASLGTYHDLLKIIKDKDFLDNEENEDILEDIVLTLTLFEDREMIEERLKTYAHLFDDKVMKQLKRRRYTGWGRLSRKLINGIRDKQSGKTILDFLKSDGFANRNFMQLIHDDSLTFKEDIQKAQVSGQGDSLHEHIANLAGSPAIKKGILQTVKVVDELVKVMGRHKPENIVIEMARENQTTQKGQKNSRERMKRIEEGIKELGSQILKEHPVENTQLQNEKLYLYYLQNGRDMYVDQELDINRLSDYDVDHIVPQSFLKDDSIDNKVLTRSDKARGKSDNVPSEEVVKKMKNYWRQLLNAKLITQRKFDNLTKAERGGLSELDKAGFIKRQLVETRQITKHVAQILDSRMNTKYDENDKLIREVKVITLKSKLVSDFRKDFQFYKVREINNYHHAHDAYLNAVVGTALIKKYPKLESEFVYGDYKVYDVRKMIAKSEQEIGKATAKYFFYSNIMNFFKTEITLANGEIRKRPLIETNGETGEIVWDKGRDFATVRKVLSMPQVNIVKKTEVQTGGFSKESILPKRNSDKLIARKKDWDPKKYGGFDSPTVAYSVLVVAKVEKGKSKKLKSVKELLGITIMERSSFEKNPIDFLEAKGYKEVKKDLIIKLPKYSLFELENGRKRMLASAGELQKGNELALPSKYVNFLYLASHYEKLKGSPEDNEQKQLFVEQHKHYLDEIIEQISEFSKRVILADANLDKVLSAYNKHRDKPIREQAENIIHLFTLTNLGAPAAFKYFDTTIDRKRYTSTKEVLDATLIHQSITGLYETRIDLSQLGGDGGGGSGGSGGVPWILKKPLELTIKLDLEEQQGTLLNNSILSKKGKEELKQLFEKYSALWQSWENQVGHRRIRPHKIATGTVKPTPQKQYHINPKAKPDIQIVINDLLKQGVLIQKESTMNTPVYPVPKPNGRWRMVLDYRAVNKVTPLIAVQNQHSYGILGSLFKGRYKTTIDLSNGFWAHPIVPEDYWITAFTWQGKQYCWTVLPQGFLNSPGLFTGDVVDLLQGIPNVEVYVDDVYISHDSEKEHLEYLDILFNRLKEAGYIISLKKSNIANSIVDFLGFQITNEGRGLTDTFKEKLENITAPTTLKQLQSILGLLNFARNFIPDFTELIAPLYALIPKSTKNYVPWQIEHSTTLETLITKLNGAEYLQGRKGDKTLIMKVNASYTTGYIRYYNEGEKKPISYVSIVFSKTELKFTELEKLLTTVHKGLLKALDLSMGQNIHVYSPIVSMQNIQKTPQTAKKALASRWLSWLSYLEDPRIRFFYDPQMPALKDLPAVDTGKDNKKHPSNFQHIFYTDGSAITSPTKEGHLNAGMGIVYFINKDGNLQKQQEWSISLGNHTAQFAEIAAFEFALKKCLPLGGNILVVTDSNYVAKAYNEELDVWASNGFVNNRKKPLKHISKWKSVADLKRLRPDVVVTHEPGHQKLDSSPHAYGNNLADQLATQASFKVHAGKRTADGSEFEKRTADGSEFESPKKKAKVE

SEQ ID NO: 789 - protein, 2073 aa, synthetic construct
MPAAKRVKLDGGDKKYSIGLDIGTNSVGWAVITDEYKVPSKKFKVLGNTDRHSIKKNLIGALLFDSGETAEATRLKRTARRRYTRRKNRICYLQEIFSNEMAKVDDSFFHRLEESFLVEEDKKHERHPIFGNIVDEVAYHEKYPTIYHLRKKLVDSTDKADLRLIYLALAHMIKFRGHFLIEGDLNPDNSDVDKLFIQLVQTYNQLFEENPINASGVDAKAILSARLSKSRRLENLIAQLPGEKKNGLFGNLIALSLGLTPNFKSNFDLAEDAKLQLSKDTYDDDLDNLLAQIGDQYADLFLAAKNLSDAILLSDILRVNTEITKAPLSASMIKRYDEHHQDLTLLKALVRQQLPEKYKEIFFDQSKNGYAGYIDGGASQEEFYKFIKPILEKMDGTEELLVKLNREDLLRKQRTFDNGSIPHQIHLGELHAILRRQEDFYPFLKDNREKIEKILTFRIPYYVGPLARGNSRFAWMTRKSEETITPWNFEEVVDKGASAQSFIERMTNFDKNLPNEKVLPKHSLLYEYFTVYNELTKVKYVTEGMRKPAFLSGEQKKAIVDLLFKTNRKVTVKQLKEDYFKKIECFDSVEISGVEDRFNASLGTYHDLLKIIKDKDFLDNEENEDILEDIVLTLTLFEDREMIEERLKTYAHLFDDKVMKQLKRRRYTGWGRLSRKLINGIRDKQSGKTILDFLKSDGFANRNFMQLIHDDSLTFKEDIQKAQVSGQGDSLHEHIANLAGSPAIKKGILQTVKVVDELVKVMGRHKPENIVIEMARENQTTQKGQKNSRERMKRIEEGIKELGSQILKEHPVENTQLQNEKLYLYYLQNGRDMYVDQELDINRLSDYDVDHIVPQSFLKDDSIDNKVLTRSDKARGKSDNVPSEEVVKKMKNYWRQLLNAKLITQRKFDNLTKAERGGLSELDKAGFIKRQLVETRQITKHVAQILDSRMNTKYDENDKLIREVKVITLKSKLVSDFRKDFQFYKVREINNYHHAHDAYLNAVVGTALIKKYPKLESEFVYGDYKVYDVRKMIAKSEQEIGKATAKYFFYSNIMNFFKTEITLANGEIRKRPLIETNGETGEIVWDKGRDFATVRKVLSMPQVNIVKKTEVQTGGFSKESILPKRNSDKLIARKKDWDPKKYGGFDSPTVAYSVLVVAKVEKGKSKKLKSVKELLGITIMERSSFEKNPIDFLEAKGYKEVKKDLIIKLPKYSLFELENGRKRMLASAGELQKGNELALPSKYVNFLYLASHYEKLKGSPEDNEQKQLFVEQHKHYLDEIIEQISEFSKRVILADANLDKVLSAYNKHRDKPIREQAENIIHLFTLTNLGAPAAFKYFDTTIDRKRYTSTKEVLDATLIHQSITGLYETRIDLSQLGGDGGPAPGGGGSSGGSCQTKNTLNIDEYLLQFPDQLWASLPTDIGRMLVPPITIKIKDNASLPSIRQYPLPKDKTEGLRPLISSLENQGILIKCHSPCNTPIFPIKKAGRDEYRMIHDLRAINNIVAPLTAVVASPTTVLSNLAPSLHWFTVIDLSNAFFSVPIHKDSQYLFAFTFEGHQYTWTVLPQGFIHSPTLFNQALYQSLHKIKFKISSEICIYMDDVLIASKDRDTNLKDTAVMLQHLASEGHKVSKKKLQLCQQEVVYLGQLLTPEGRKILPDRKVTVSQFQQPTTIRQIRAFLGKVGYCRHFIPEFSIHSKFLEKQLKPDTAEPFQLDDQQVEAFNKLKHAITTAPVLVVPDPAKPFQLYTSHSEHASIAVLTQKHAGRTRPIAFLSSKFDAIESGLPPCLKACASIHRSLTQADSFILGAPLIIYTTHAICTLLQRDRSQLVTASRFSKWEADLLRPELTFVACSAVSPAHLYMQSCENNIPPHDCVLLTHTISRPRPDLSDLPIPDPDMTLFSDGSYTTGRGGAAVVMHRPVTDDFIIIHQQPGGASAQTAELLALAAACHLATDKTVNIYTDSRYAYGVVHDFGHLWMHRGFVTSAGTPIKNHKEIEYLLKQIMKPKQVSVIKIEAHTKGVSMEVRGNAAADEAAKNAVFLVQRAGKRTADGSEFEKRTADGSEFESPKKKAKVE

SEQ ID NO: 790 - protein, 2094 aa, synthetic construct
MPAAKRVKLDGGDKKYSIGLDIGTNSVGWAVITDEYKVPSKKFKVLGNTDRHSIKKNLIGALLFDSGETAEATRLKRTARRRYTRRKNRICYLQEIFSNEMAKVDDSFFHRLEESFLVEEDKKHERHPIFGNIVDEVAYHEKYPTIYHLRKKLVDSTDKADLRLIYLALAHMIKFRGHFLIEGDLNPDNSDVDKLFIQLVQTYNQLFEENPINASGVDAKAILSARLSKSRRLENLIAQLPGEKKNGLFGNLIALSLGLTPNFKSNFDLAEDAKLQLSKDTYDDDLDNLLAQIGDQYADLFLAAKNLSDAILLSDILRVNTEITKAPLSASMIKRYDEHHQDLTLLKALVRQQLPEKYKEIFFDQSKNGYAGYIDGGASQEEFYKFIKPILEKMDGTEELLVKLNREDLLRKQRTFDNGSIPHQIHLGELHAILRRQEDFYPFLKDNREKIEKILTFRIPYYVGPLARGNSRFAWMTRKSEETITPWNFEEVVDKGASAQSFIERMTNFDKNLPNEKVLPKHSLLYEYFTVYNELTKVKYVTEGMRKPAFLSGEQKKAIVDLLFKTNRKVTVKQLKEDYFKKIECFDSVEISGVEDRFNASLGTYHDLLKIIKDKDFLDNEENEDILEDIVLTLTLFEDREMIEERLKTYAHLFDDKVMKQLKRRRYTGWGRLSRKLINGIRDKQSGKTILDFLKSDGFANRNFMQLIHDDSLTFKEDIQKAQVSGQGDSLHEHIANLAGSPAIKKGILQTVKVVDELVKVMGRHKPENIVIEMARENQTTQKGQKNSRERMKRIEEGIKELGSQILKEHPVENTQLQNEKLYLYYLQNGRDMYVDQELDINRLSDYDVDHIVPQSFLKDDSIDNKVLTRSDKARGKSDNVPSEEVVKKMKNYWRQLLNAKLITQRKFDNLTKAERGGLSELDKAGFIKRQLVETRQITKHVAQILDSRMNTKYDENDKLIREVKVITLKSKLVSDFRKDFQFYKVREINNYHHAHDAYLNAVVGTALIKKYPKLESEFVYGDYKVYDVRKMIAKSEQEIGKATAKYFFYSNIMNFFKTEITLANGEIRKRPLIETNGETGEIVWDKGRDFATVRKVLSMPQVNIVKKTEVQTGGFSKESILPKRNSDKLIARKKDWDPKKYGGFDSPTVAYSVLVVAKVEKGKSKKLKSVKELLGITIMERSSFEKNPIDFLEAKGYKEVKKDLIIKLPKYSLFELENGRKRMLASAGELQKGNELALPSKYVNFLYLASHYEKLKGSPEDNEQKQLFVEQHKHYLDEIIEQISEFSKRVILADANLDKVLSAYNKHRDKPIREQAENIIHLFTLTNLGAPAAFKYFDTTIDRKRYTSTKEVLDATLIHQSITGLYETRIDLSQLGGDGGGGGEAAAKPAPGGVLNLEEEYRLHEKPVPSSIDPSWLQLFPTVWAERAGMGLANQVPPVVVELRSGASPVAVRQYPMSKEAREGIRPHIQRFLDLGVLVPCQSPWNTPLLPVKKPGTNDYRPVQDLREINKRVQDIHPTVPNPYNLLSSLPPSHTWYSVLDLKDAFFCLKLHPNSQPLFAFEWRDPEKGNTGQLTWTRLPQGFKNSPTLFDEALHRDLAPFRALNPQVVLLQYVDDLLVAAPTYRDCKEGTQKLLQELSKLGYRVSAKKAQLCQKEVTYLGYLLKEGKRWLTPARKATVMKIPPPTTPRQVREFLGTAGFCRLWIPGFASLAAPLYPLTKESIPFIWTEEHQKAFDRIKEALLSAPALALPDLTKPFTLYVDERAGVARGVLTQTLGPWRRPVAYLSKKLDPVASGWPTCLKAVAAVALLLKDADKLTLGQNVTVIASHSLESIVRQPPDRWMTNARMTHYQSLLLNERVSFAPPAVLNPATLLPVESEATPVHRCSEILAEETGTRRDLKDQPLPGVPAWYTDGSSFIAEGKRRAGAAIVDGKRTVWASSLPEGTSAQKAELVALTQALRLAEGKDINIYTDSRYAFATAHIHGAIYKQRGLLTSAGKDIKNKEEILALLEAIHLPKRVAIIHCPGHQKGNDPVATGNRRADEAAKQAALSTRVLAETTKPAGKRTADGSEFEKRTADGSEFESPKKKAKVE

SEQ ID NO: 791 - protein, 2094 aa, synthetic construct
MPAAKRVKLDGGDKKYSIGLDIGTNSVGWAVITDEYKVPSKKFKVLGNTDRHSIKKNLIGALLFDSGETAEATRLKRTARRRYTRRKNRICYLQEIFSNEMAKVDDSFFHRLEESFLVEEDKKHERHPIFGNIVDEVAYHEKYPTIYHLRKKLVDSTDKADLRLIYLALAHMIKFRGHFLIEGDLNPDNSDVDKLFIQLVQTYNQLFEENPINASGVDAKAILSARLSKSRRLENLIAQLPGEKKNGLFGNLIALSLGLTPNFKSNFDLAEDAKLQLSKDTYDDDLDNLLAQIGDQYADLFLAAKNLSDAILLSDILRVNTEITKAPLSASMIKRYDEHHQDLTLLKALVRQQLPEKYKEIFFDQSKNGYAGYIDGGASQEEFYKFIKPILEKMDGTEELLVKLNREDLLRKQRTFDNGSIPHQIHLGELHAILRRQEDFYPFLKDNREKIEKILTFRIPYYVGPLARGNSRFAWMTRKSEETITPWNFEEVVDKGASAQSFIERMTNFDKNLPNEKVLPKHSLLYEYFTVYNELTKVKYVTEGMRKPAFLSGEQKKAIVDLLFKTNRKVTVKQLKEDYFKKIECFDSVEISGVEDRFNASLGTYHDLLKIIKDKDFLDNEENEDILEDIVLTLTLFEDREMIEERLKTYAHLFDDKVMKQLKRRRYTGWGRLSRKLINGIRDKQSGKTILDFLKSDGFANRNFMQLIHDDSLTFKEDIQKAQVSGQGDSLHEHIANLAGSPAIKKGILQTVKVVDELVKVMGRHKPENIVIEMARENQTTQKGQKNSRERMKRIEEGIKELGSQILKEHPVENTQLQNEKLYLYYLQNGRDMYVDQELDINRLSDYDVDHIVPQSFLKDDSIDNKVLTRSDKARGKSDNVPSEEVVKKMKNYWRQLLNAKLITQRKFDNLTKAERGGLSELDKAGFIKRQLVETRQITKHVAQILDSRMNTKYDENDKLIREVKVITLKSKLVSDFRKDFQFYKVREINNYHHAHDAYLNAVVGTALIKKYPKLESEFVYGDYKVYDVRKMIAKSEQEIGKATAKYFFYSNIMNFFKTEITLANGEIRKRPLIETNGETGEIVWDKGRDFATVRKVLSMPQVNIVKKTEVQTGGFSKESILPKRNSDKLIARKKDWDPKKYGGFDSPTVAYSVLVVAKVEKGKSKKLKSVKELLGITIMERSSFEKNPIDFLEAKGYKEVKKDLIIKLPKYSLFELENGRKRMLASAGELQKGNELALPSKYVNFLYLASHYEKLKGSPEDNEQKQLFVEQHKHYLDEIIEQISEFSKRVILADANLDKVLSAYNKHRDKPIREQAENIIHLFTLTNLGAPAAFKYFDTTIDRKRYTSTKEVLDATLIHQSITGLYETRIDLSQLGGDGGGSSGGGEAAAKGGVLNLEEEYRLHEKPVPSSIDPSWLQLFPTVWAERAGMGLANQVPPVVVELRSGASPVAVRQYPMSKEAREGIRPHIQRFLDLGVLVPCQSPWNTPLLPVKKPGTNDYRPVQDLREINKRVQDIHPTVPNPYNLLSSLPPSHTWYSVLDLKDAFFCLKLHPNSQPLFAFEWRDPEKGNTGQLTWTRLPQGFKNSPTLFDEALHRDLAPFRALNPQVVLLQYVDDLLVAAPTYRDCKEGTQKLLQELSKLGYRVSAKKAQLCQKEVTYLGYLLKEGKRWLTPARKATVMKIPPPTTPRQVREFLGTAGFCRLWIPGFASLAAPLYPLTKESIPFIWTEEHQKAFDRIKEALLSAPALALPDLTKPFTLYVDERAGVARGVLTQTLGPWRRPVAYLSKKLDPVASGWPTCLKAVAAVALLLKDADKLTLGQNVTVIASHSLESIVRQPPDRWMTNARMTHYQSLLLNERVSFAPPAVLNPATLLPVESEATPVHRCSEILAEETGTRRDLKDQPLPGVPAWYTDGSSFIAEGKRRAGAAIVDGKRTVWASSLPEGTSAQKAELVALTQALRLAEGKDINIYTDSRYAFATAHIHGAIYKQRGLLTSAGKDIKNKEEILALLEAIHLPKRVAIIHCPGHQKGNDPVATGNRRADEAAKQAALSTRVLAETTKPAGKRTADGSEFEKRTADGSEFESPKKKAKVE

SEQ ID NO: 792 - protein, 2092 aa, synthetic construct
MPAAKRVKLDGGDKKYSIGLDIGTNSVGWAVITDEYKVPSKKFKVLGNTDRHSIKKNLIGALLFDSGETAEATRLKRTARRRYTRRKNRICYLQEIFSNEMAKVDDSFFHRLEESFLVEEDKKHERHPIFGNIVDEVAYHEKYPTIYHLRKKLVDSTDKADLRLIYLALAHMIKFRGHFLIEGDLNPDNSDVDKLFIQLVQTYNQLFEENPINASGVDAKAILSARLSKSRRLENLIAQLPGEKKNGLFGNLIALSLGLTPNFKSNFDLAEDAKLQLSKDTYDDDLDNLLAQIGDQYADLFLAAKNLSDAILLSDILRVNTEITKAPLSASMIKRYDEHHQDLTLLKALVRQQLPEKYKEIFFDQSKNGYAGYIDGGASQEEFYKFIKPILEKMDGTEELLVKLNREDLLRKQRTFDNGSIPHQIHLGELHAILRRQEDFYPFLKDNREKIEKILTFRIPYYVGPLARGNSRFAWMTRKSEETITPWNFEEVVDKGASAQSFIERMTNFDKNLPNEKVLPKHSLLYEYFTVYNELTKVKYVTEGMRKPAFLSGEQKKAIVDLLFKTNRKVTVKQLKEDYFKKIECFDSVEISGVEDRFNASLGTYHDLLKIIKDKDFLDNEENEDILEDIVLTLTLFEDREMIEERLKTYAHLFDDKVMKQLKRRRYTGWGRLSRKLINGIRDKQSGKTILDFLKSDGFANRNFMQLIHDDSLTFKEDIQKAQVSGQGDSLHEHIANLAGSPAIKKGILQTVKVVDELVKVMGRHKPENIVIEMARENQTTQKGQKNSRERMKRIEEGIKELGSQILKEHPVENTQLQNEKLYLYYLQNGRDMYVDQELDINRLSDYDVDHIVPQSFLKDDSIDNKVLTRSDKARGKSDNVPSEEVVKKMKNYWRQLLNAKLITQRKFDNLTKAERGGLSELDKAGFIKRQLVETRQITKHVAQILDSRMNTKYDENDKLIREVKVITLKSKLVSDFRKDFQFYKVREINNYHHAHDAYLNAVVGTALIKKYPKLESEFVYGDYKVYDVRKMIAKSEQEIGKATAKYFFYSNIMNFFKTEITLANGEIRKRPLIETNGETGEIVWDKGRDFATVRKVLSMPQVNIVKKTEVQTGGFSKESILPKRNSDKLIARKKDWDPKKYGGFDSPTVAYSVLVVAKVEKGKSKKLKSVKELLGITIMERSSFEKNPIDFLEAKGYKEVKKDLIIKLPKYSLFELENGRKRMLASAGELQKGNELALPSKYVNFLYLASHYEKLKGSPEDNEQKQLFVEQHKHYLDEIIEQISEFSKRVILADANLDKVLSAYNKHRDKPIREQAENIIHLFTLTNLGAPAAFKYFDTTIDRKRYTSTKEVLDATLIHQSITGLYETRIDLSQLGGDGGGGSGGGGSSGGVLNLEEEYRLHEKPVPSSIDPSWLQLFPTVWAERAGMGLANQVPPVVVELRSGASPVAVRQYPMSKEAREGIRPHIQRFLDLGVLVPCQSPWNTPLLPVKKPGTNDYRPVQDLREINKRVQDIHPTVPNPYNLLSSLPPSHTWYSVLDLKDAFFCLKLHPNSQPLFAFEWRDPEKGNTGQLTWTRLPQGFKNSPTLFDEALHRDLAPFRALNPQVVLLQYVDDLLVAAPTYRDCKEGTQKLLQELSKLGYRVSAKKAQLCQKEVTYLGYLLKEGKRWLTPARKATVMKIPPPTTPRQVREFLGTAGFCRLWIPGFASLAAPLYPLTKESIPFIWTEEHQKAFDRIKEALLSAPALALPDLTKPFTLYVDERAGVARGVLTQTLGPWRRPVAYLSKKLDPVASGWPTCLKAVAAVALLLKDADKLTLGQNVTVIASHSLESIVRQPPDRWMTNARMTHYQSLLLNERVSFAPPAVLNPATLLPVESEATPVHRCSEILAEETGTRRDLKDQPLPGVPAWYTDGSSFIAEGKRRAGAAIVDGKRTVWASSLPEGTSAQKAELVALTQALRLAEGKDINIYTDSRYAFATAHIHGAIYKQRGLLTSAGKDIKNKEEILALLEAIHLPKRVAIIHCPGHQKGNDPVATGNRRADEAAKQAALSTRVLAETTKPAGKRTADGSEFEKRTADGSEFESPKKKAKVE

SEQ ID NO: 793 - protein, 2094 aa, synthetic construct
MPAAKRVKLDGGDKKYSIGLDIGTNSVGWAVITDEYKVPSKKFKVLGNTDRHSIKKNLIGALLFDSGETAEATRLKRTARRRYTRRKNRICYLQEIFSNEMAKVDDSFFHRLEESFLVEEDKKHERHPIFGNIVDEVAYHEKYPTIYHLRKKLVDSTDKADLRLIYLALAHMIKFRGHFLIEGDLNPDNSDVDKLFIQLVQTYNQLFEENPINASGVDAKAILSARLSKSRRLENLIAQLPGEKKNGLFGNLIALSLGLTPNFKSNFDLAEDAKLQLSKDTYDDDLDNLLAQIGDQYADLFLAAKNLSDAILLSDILRVNTEITKAPLSASMIKRYDEHHQDLTLLKALVRQQLPEKYKEIFFDQSKNGYAGYIDGGASQEEFYKFIKPILEKMDGTEELLVKLNREDLLRKQRTFDNGSIPHQIHLGELHAILRRQEDFYPFLKDNREKIEKILTFRIPYYVGPLARGNSRFAWMTRKSEETITPWNFEEVVDKGASAQSFIERMTNFDKNLPNEKVLPKHSLLYEYFTVYNELTKVKYVTEGMRKPAFLSGEQKKAIVDLLFKTNRKVTVKQLKEDYFKKIECFDSVEISGVEDRFNASLGTYHDLLKIIKDKDFLDNEENEDILEDIVLTLTLFEDREMIEERLKTYAHLFDDKVMKQLKRRRYTGWGRLSRKLINGIRDKQSGKTILDFLKSDGFANRNFMQLIHDDSLTFKEDIQKAQVSGQGDSLHEHIANLAGSPAIKKGILQTVKVVDELVKVMGRHKPENIVIEMARENQTTQKGQKNSRERMKRIEEGIKELGSQILKEHPVENTQLQNEKLYLYYLQNGRDMYVDQELDINRLSDYDVDHIVPQSFLKDDSIDNKVLTRSDKARGKSDNVPSEEVVKKMKNYWRQLLNAKLITQRKFDNLTKAERGGLSELDKAGFIKRQLVETRQITKHVAQILDSRMNTKYDENDKLIREVKVITLKSKLVSDFRKDFQFYKVREINNYHHAHDAYLNAVVGTALIKKYPKLESEFVYGDYKVYDVRKMIAKSEQEIGKATAKYFFYSNIMNFFKTEITLANGEIRKRPLIETNGETGEIVWDKGRDFATVRKVLSMPQVNIVKKTEVQTGGFSKESILPKRNSDKLIARKKDWDPKKYGGFDSPTVAYSVLVVAKVEKGKSKKLKSVKELLGITIMERSSFEKNPIDFLEAKGYKEVKKDLIIKLPKYSLFELENGRKRMLASAGELQKGNELALPSKYVNFLYLASHYEKLKGSPEDNEQKQLFVEQHKHYLDEIIEQISEFSKRVILADANLDKVLSAYNKHRDKPIREQAENIIHLFTLTNLGAPAAFKYFDTTIDRKRYTSTKEVLDATLIHQSITGLYETRIDLSQLGGDGGPAPGSSEAAAKGGVLNLEEEYRLHEKPVPSSIDPSWLQLFPTVWAERAGMGLANQVPPVVVELRSGASPVAVRQYPMSKEAREGIRPHIQRFLDLGVLVPCQSPWNTPLLPVKKPGTNDYRPVQDLREINKRVQDIHPTVPNPYNLLSSLPPSHTWYSVLDLKDAFFCLKLHPNSQPLFAFEWRDPEKGNTGQLTWTRLPQGFKNSPTLFDEALHRDLAPFRALNPQVVLLQYVDDLLVAAPTYRDCKEGTQKLLQELSKLGYRVSAKKAQLCQKEVTYLGYLLKEGKRWLTPARKATVMKIPPPTTPRQVREFLGTAGFCRLWIPGFASLAAPLYPLTKESIPFIWTEEHQKAFDRIKEALLSAPALALPDLTKPFTLYVDERAGVARGVLTQTLGPWRRPVAYLSKKLDPVASGWPTCLKAVAAVALLLKDADKLTLGQNVTVIASHSLESIVRQPPDRWMTNARMTHYQSLLLNERVSFAPPAVLNPATLLPVESEATPVHRCSEILAEETGTRRDLKDQPLPGVPAWYTDGSSFIAEGKRRAGAAIVDGKRTVWASSLPEGTSAQKAELVALTQALRLAEGKDINIYTDSRYAFATAHIHGAIYKQRGLLTSAGKDIKNKEEILALLEAIHLPKRVAIIHCPGHQKGNDPVATGNRRADEAAKQAALSTRVLAETTKPAGKRTADGSEFEKRTADGSEFESPKKKAKVE

SEQ ID NO: 794 - protein, 2092 aa, synthetic construct
MPAAKRVKLDGGDKKYSIGLDIGTNSVGWAVITDEYKVPSKKFKVLGNTDRHSIKKNLIGALLFDSGETAEATRLKRTARRRYTRRKNRICYLQEIFSNEMAKVDDSFFHRLEESFLVEEDKKHERHPIFGNIVDEVAYHEKYPTIYHLRKKLVDSTDKADLRLIYLALAHMIKFRGHFLIEGDLNPDNSDVDKLFIQLVQTYNQLFEENPINASGVDAKAILSARLSKSRRLENLIAQLPGEKKNGLFGNLIALSLGLTPNFKSNFDLAEDAKLQLSKDTYDDDLDNLLAQIGDQYADLFLAAKNLSDAILLSDILRVNTEITKAPLSASMIKRYDEHHQDLTLLKALVRQQLPEKYKEIFFDQSKNGYAGYIDGGASQEEFYKFIKPILEKMDGTEELLVKLNREDLLRKQRTFDNGSIPHQIHLGELHAILRRQEDFYPFLKDNREKIEKILTFRIPYYVGPLARGNSRFAWMTRKSEETITPWNFEEVVDKGASAQSFIERMTNFDKNLPNEKVLPKHSLLYEYFTVYNELTKVKYVTEGMRKPAFLSGEQKKAIVDLLFKTNRKVTVKQLKEDYFKKIECFDSVEISGVEDRFNASLGTYHDLLKIIKDKDFLDNEENEDILEDIVLTLTLFEDREMIEERLKTYAHLFDDKVMKQLKRRRYTGWGRLSRKLINGIRDKQSGKTILDFLKSDGFANRNFMQLIHDDSLTFKEDIQKAQVSGQGDSLHEHIANLAGSPAIKKGILQTVKVVDELVKVMGRHKPENIVIEMARENQTTQKGQKNSRERMKRIEEGIKELGSQILKEHPVENTQLQNEKLYLYYLQNGRDMYVDQELDINRLSDYDVDHIVPQSFLKDDSIDNKVLTRSDKARGKSDNVPSEEVVKKMKNYWRQLLNAKLITQRKFDNLTKAERGGLSELDKAGFIKRQLVETRQITKHVAQILDSRMNTKYDENDKLIREVKVITLKSKLVSDFRKDFQFYKVREINNYHHAHDAYLNAVVGTALIKKYPKLESEFVYGDYKVYDVRKMIAKSEQEIGKATAKYFFYSNIMNFFKTEITLANGEIRKRPLIETNGETGEIVWDKGRDFATVRKVLSMPQVNIVKKTEVQTGGFSKESILPKRNSDKLIARKKDWDPKKYGGFDSPTVAYSVLVVAKVEKGKSKKLKSVKELLGITIMERSSFEKNPIDFLEAKGYKEVKKDLIIKLPKYSLFELENGRKRMLASAGELQKGNELALPSKYVNFLYLASHYEKLKGSPEDNEQKQLFVEQHKHYLDEIIEQISEFSKRVILADANLDKVLSAYNKHRDKPIREQAENIIHLFTLTNLGAPAAFKYFDTTIDRKRYTSTKEVLDATLIHQSITGLYETRIDLSQLGGDGGGGSGSSPAPGGVLNLEEEYRLHEKPVPSSIDPSWLQLFPTVWAERAGMGLANQVPPVVVELRSGASPVAVRQYPMSKEAREGIRPHIQRFLDLGVLVPCQSPWNTPLLPVKKPGTNDYRPVQDLREINKRVQDIHPTVPNPYNLLSSLPPSHTWYSVLDLKDAFFCLKLHPNSQPLFAFEWRDPEKGNTGQLTWTRLPQGFKNSPTLFDEALHRDLAPFRALNPQVVLLQYVDDLLVAAPTYRDCKEGTQKLLQELSKLGYRVSAKKAQLCQKEVTYLGYLLKEGKRWLTPARKATVMKIPPPTTPRQVREFLGTAGFCRLWIPGFASLAAPLYPLTKESIPFIWTEEHQKAFDRIKEALLSAPALALPDLTKPFTLYVDERAGVARGVLTQTLGPWRRPVAYLSKKLDPVASGWPTCLKAVAAVALLLKDADKLTLGQNVTVIASHSLESIVRQPPDRWMTNARMTHYQSLLLNERVSFAPPAVLNPATLLPVESEATPVHRCSEILAEETGTRRDLKDQPLPGVPAWYTDGSSFIAEGKRRAGAAIVDGKRTVWASSLPEGTSAQKAELVALTQALRLAEGKDINIYTDSRYAFATAHIHGAIYKQRGLLTSAGKDIKNKEEILALLEAIHLPKRVAIIHCPGHQKGNDPVATGNRRADEAAKQAALSTRVLAETTKPAGKRTADGSEFEKRTADGSEFESPKKKAKVE

SEQ ID NO: 795 - protein, 2096 aa, synthetic construct
MPAAKRVKLDGGDKKYSIGLDIGTNSVGWAVITDEYKVPSKKFKVLGNTDRHSIKKNLIGALLFDSGETAEATRLKRTARRRYTRRKNRICYLQEIFSNEMAKVDDSFFHRLEESFLVEEDKKHERHPIFGNIVDEVAYHEKYPTIYHLRKKLVDSTDKADLRLIYLALAHMIKFRGHFLIEGDLNPDNSDVDKLFIQLVQTYNQLFEENPINASGVDAKAILSARLSKSRRLENLIAQLPGEKKNGLFGNLIALSLGLTPNFKSNFDLAEDAKLQLSKDTYDDDLDNLLAQIGDQYADLFLAAKNLSDAILLSDILRVNTEITKAPLSASMIKRYDEHHQDLTLLKALVRQQLPEKYKEIFFDQSKNGYAGYIDGGASQEEFYKFIKPILEKMDGTEELLVKLNREDLLRKQRTFDNGSIPHQIHLGELHAILRRQEDFYPFLKDNREKIEKILTFRIPYYVGPLARGNSRFAWMTRKSEETITPWNFEEVVDKGASAQSFIERMTNFDKNLPNEKVLPKHSLLYEYFTVYNELTKVKYVTEGMRKPAFLSGEQKKAIVDLLFKTNRKVTVKQLKEDYFKKIECFDSVEISGVEDRFNASLGTYHDLLKIIKDKDFLDNEENEDILEDIVLTLTLFEDREMIEERLKTYAHLFDDKVMKQLKRRRYTGWGRLSRKLINGIRDKQSGKTILDFLKSDGFANRNFMQLIHDDSLTFKEDIQKAQVSGQGDSLHEHIANLAGSPAIKKGILQTVKVVDELVKVMGRHKPENIVIEMARENQTTQKGQKNSRERMKRIEEGIKELGSQILKEHPVENTQLQNEKLYLYYLQNGRDMYVDQELDINRLSDYDVDHIVPQSFLKDDSIDNKVLTRSDKARGKSDNVPSEEVVKKMKNYWRQLLNAKLITQRKFDNLTKAERGGLSELDKAGFIKRQLVETRQITKHVAQILDSRMNTKYDENDKLIREVKVITLKSKLVSDFRKDFQFYKVREINNYHHAHDAYLNAVVGTALIKKYPKLESEFVYGDYKVYDVRKMIAKSEQEIGKATAKYFFYSNIMNFFKTEITLANGEIRKRPLIETNGETGEIVWDKGRDFATVRKVLSMPQVNIVKKTEVQTGGFSKESILPKRNSDKLIARKKDWDPKKYGGFDSPTVAYSVLVVAKVEKGKSKKLKSVKELLGITIMERSSFEKNPIDFLEAKGYKEVKKDLIIKLPKYSLFELENGRKRMLASAGELQKGNELALPSKYVNFLYLASHYEKLKGSPEDNEQKQLFVEQHKHYLDEIIEQISEFSKRVILADANLDKVLSAYNKHRDKPIREQAENIIHLFTLTNLGAPAAFKYFDTTIDRKRYTSTKEVLDATLIHQSITGLYETRIDLSQLGGDGGPAPAPAPAPAPAPGGVLNLEEEYRLHEKPVPSSIDPSWLQLFPTVWAERAGMGLANQVPPVVVELRSGASPVAVRQYPMSKEAREGIRPHIQRFLDLGVLVPCQSPWNTPLLPVKKPGTNDYRPVQDLREINKRVQDIHPTVPNPYNLLSSLPPSHTWYSVLDLKDAFFCLKLHPNSQPLFAFEWRDPEKGNTGQLTWTRLPQGFKNSPTLFDEALHRDLAPFRALNPQVVLLQYVDDLLVAAPTYRDCKEGTQKLLQELSKLGYRVSAKKAQLCQKEVTYLGYLLKEGKRWLTPARKATVMKIPPPTTPRQVREFLGTAGFCRLWIPGFASLAAPLYPLTKESIPFIWTEEHQKAFDRIKEALLSAPALALPDLTKPFTLYVDERAGVARGVLTQTLGPWRRPVAYLSKKLDPVASGWPTCLKAVAAVALLLKDADKLTLGQNVTVIASHSLESIVRQPPDRWMTNARMTHYQSLLLNERVSFAPPAVLNPATLLPVESEATPVHRCSEILAEETGTRRDLKDQPLPGVPAWYTDGSSFIAEGKRRAGAAIVDGKRTVWASSLPEGTSAQKAELVALTQALRLAEGKDINIYTDSRYAFATAHIHGAIYKQRGLLTSAGKDIKNKEEILALLEAIHLPKRVAIIHCPGHQKGNDPVATGNRRADEAAKQAALSTRVLAETTKPAGKRTADGSEFEKRTADGSEFESPKKKAKVE

SEQ ID NO: 796 - protein, 2094 aa, synthetic construct
MPAAKRVKLDGGDKKYSIGLDIGTNSVGWAVITDEYKVPSKKFKVLGNTDRHSIKKNLIGALLFDSGETAEATRLKRTARRRYTRRKNRICYLQEIFSNEMAKVDDSFFHRLEESFLVEEDKKHERHPIFGNIVDEVAYHEKYPTIYHLRKKLVDSTDKADLRLIYLALAHMIKFRGHFLIEGDLNPDNSDVDKLFIQLVQTYNQLFEENPINASGVDAKAILSARLSKSRRLENLIAQLPGEKKNGLFGNLIALSLGLTPNFKSNFDLAEDAKLQLSKDTYDDDLDNLLAQIGDQYADLFLAAKNLSDAILLSDILRVNTEITKAPLSASMIKRYDEHHQDLTLLKALVRQQLPEKYKEIFFDQSKNGYAGYIDGGASQEEFYKFIKPILEKMDGTEELLVKLNREDLLRKQRTFDNGSIPHQIHLGELHAILRRQEDFYPFLKDNREKIEKILTFRIPYYVGPLARGNSRFAWMTRKSEETITPWNFEEVVDKGASAQSFIERMTNFDKNLPNEKVLPKHSLLYEYFTVYNELTKVKYVTEGMRKPAFLSGEQKKAIVDLLFKTNRKVTVKQLKEDYFKKIECFDSVEISGVEDRFNASLGTYHDLLKIIKDKDFLDNEENEDILEDIVLTLTLFEDREMIEERLKTYAHLFDDKVMKQLKRRRYTGWGRLSRKLINGIRDKQSGKTILDFLKSDGFANRNFMQLIHDDSLTFKEDIQKAQVSGQGDSLHEHIANLAGSPAIKKGILQTVKVVDELVKVMGRHKPENIVIEMARENQTTQKGQKNSRERMKRIEEGIKELGSQILKEHPVENTQLQNEKLYLYYLQNGRDMYVDQELDINRLSDYDVDHIVPQSFLKDDSIDNKVLTRSDKARGKSDNVPSEEVVKKMKNYWRQLLNAKLITQRKFDNLTKAERGGLSELDKAGFIKRQLVETRQITKHVAQILDSRMNTKYDENDKLIREVKVITLKSKLVSDFRKDFQFYKVREINNYHHAHDAYLNAVVGTALIKKYPKLESEFVYGDYKVYDVRKMIAKSEQEIGKATAKYFFYSNIMNFFKTEITLANGEIRKRPLIETNGETGEIVWDKGRDFATVRKVLSMPQVNIVKKTEVQTGGFSKESILPKRNSDKLIARKKDWDPKKYGGFDSPTVAYSVLVVAKVEKGKSKKLKSVKELLGITIMERSSFEKNPIDFLEAKGYKEVKKDLIIKLPKYSLFELENGRKRMLASAGELQKGNELALPSKYVNFLYLASHYEKLKGSPEDNEQKQLFVEQHKHYLDEIIEQISEFSKRVILADANLDKVLSAYNKHRDKPIREQAENIIHLFTLTNLGAPAAFKYFDTTIDRKRYTSTKEVLDATLIHQSITGLYETRIDLSQLGGDGGGGSGGGEAAAKGGVLNLEEEYRLHEKPVPSSIDPSWLQLFPTVWAERAGMGLANQVPPVVVELRSGASPVAVRQYPMSKEAREGIRPHIQRFLDLGVLVPCQSPWNTPLLPVKKPGTNDYRPVQDLREINKRVQDIHPTVPNPYNLLSSLPPSHTWYSVLDLKDAFFCLKLHPNSQPLFAFEWRDPEKGNTGQLTWTRLPQGFKNSPTLFDEALHRDLAPFRALNPQVVLLQYVDDLLVAAPTYRDCKEGTQKLLQELSKLGYRVSAKKAQLCQKEVTYLGYLLKEGKRWLTPARKATVMKIPPPTTPRQVREFLGTAGFCRLWIPGFASLAAPLYPLTKESIPFIWTEEHQKAFDRIKEALLSAPALALPDLTKPFTLYVDERAGVARGVLTQTLGPWRRPVAYLSKKLDPVASGWPTCLKAVAAVALLLKDADKLTLGQNVTVIASHSLESIVRQPPDRWMTNARMTHYQSLLLNERVSFAPPAVLNPATLLPVESEATPVHRCSEILAEETGTRRDLKDQPLPGVPAWYTDGSSFIAEGKRRAGAAIVDGKRTVWASSLPEGTSAQKAELVALTQALRLAEGKDINIYTDSRYAFATAHIHGAIYKQRGLLTSAGKDIKNKEEILALLEAIHLPKRVAIIHCPGHQKGNDPVATGNRRADEAAKQAALSTRVLAETTKPAGKRTADGSEFEKRTADGSEFESPKKKAKVE

SEQ ID NO: 797 - protein, 2092 aa, synthetic construct
MPAAKRVKLDGGDKKYSIGLDIGTNSVGWAVITDEYKVPSKKFKVLGNTDRHSIKKNLIGALLFDSGETAEATRLKRTARRRYTRRKNRICYLQEIFSNEMAKVDDSFFHRLEESFLVEEDKKHERHPIFGNIVDEVAYHEKYPTIYHLRKKLVDSTDKADLRLIYLALAHMIKFRGHFLIEGDLNPDNSDVDKLFIQLVQTYNQLFEENPINASGVDAKAILSARLSKSRRLENLIAQLPGEKKNGLFGNLIALSLGLTPNFKSNFDLAEDAKLQLSKDTYDDDLDNLLAQIGDQYADLFLAAKNLSDAILLSDILRVNTEITKAPLSASMIKRYDEHHQDLTLLKALVRQQLPEKYKEIFFDQSKNGYAGYIDGGASQEEFYKFIKPILEKMDGTEELLVKLNREDLLRKQRTFDNGSIPHQIHLGELHAILRRQEDFYPFLKDNREKIEKILTFRIPYYVGPLARGNSRFAWMTRKSEETITPWNFEEVVDKGASAQSFIERMTNFDKNLPNEKVLPKHSLLYEYFTVYNELTKVKYVTEGMRKPAFLSGEQKKAIVDLLFKTNRKVTVKQLKEDYFKKIECFDSVEISGVEDRFNASLGTYHDLLKIIKDKDFLDNEENEDILEDIVLTLTLFEDREMIEERLKTYAHLFDDKVMKQLKRRRYTGWGRLSRKLINGIRDKQSGKTILDFLKSDGFANRNFMQLIHDDSLTFKEDIQKAQVSGQGDSLHEHIANLAGSPAIKKGILQTVKVVDELVKVMGRHKPENIVIEMARENQTTQKGQKNSRERMKRIEEGIKELGSQILKEHPVENTQLQNEKLYLYYLQNGRDMYVDQELDINRLSDYDVDHIVPQSFLKDDSIDNKVLTRSDKARGKSDNVPSEEVVKKMKNYWRQLLNAKLITQRKFDNLTKAERGGLSELDKAGFIKRQLVETRQITKHVAQILDSRMNTKYDENDKLIREVKVITLKSKLVSDFRKDFQFYKVREINNYHHAHDAYLNAVVGTALIKKYPKLESEFVYGDYKVYDVRKMIAKSEQEIGKATAKYFFYSNIMNFFKTEITLANGEIRKRPLIETNGETGEIVWDKGRDFATVRKVLSMPQVNIVKKTEVQTGGFSKESILPKRNSDKLIARKKDWDPKKYGGFDSPTVAYSVLVVAKVEKGKSKKLKSVKELLGITIMERSSFEKNPIDFLEAKGYKEVKKDLIIKLPKYSLFELENGRKRMLASAGELQKGNELALPSKYVNFLYLASHYEKLKGSPEDNEQKQLFVEQHKHYLDEIIEQISEFSKRVILADANLDKVLSAYNKHRDKPIREQAENIIHLFTLTNLGAPAAFKYFDTTIDRKRYTSTKEVLDATLIHQSITGLYETRIDLSQLGGDGGGGGPAPGSSGGVLNLEEEYRLHEKPVPSSIDPSWLQLFPTVWAERAGMGLANQVPPVVVELRSGASPVAVRQYPMSKEAREGIRPHIQRFLDLGVLVPCQSPWNTPLLPVKKPGTNDYRPVQDLREINKRVQDIHPTVPNPYNLLSSLPPSHTWYSVLDLKDAFFCLKLHPNSQPLFAFEWRDPEKGNTGQLTWTRLPQGFKNSPTLFDEALHRDLAPFRALNPQVVLLQYVDDLLVAAPTYRDCKEGTQKLLQELSKLGYRVSAKKAQLCQKEVTYLGYLLKEGKRWLTPARKATVMKIPPPTTPRQVREFLGTAGFCRLWIPGFASLAAPLYPLTKESIPFIWTEEHQKAFDRIKEALLSAPALALPDLTKPFTLYVDERAGVARGVLTQTLGPWRRPVAYLSKKLDPVASGWPTCLKAVAAVALLLKDADKLTLGQNVTVIASHSLESIVRQPPDRWMTNARMTHYQSLLLNERVSFAPPAVLNPATLLPVESEATPVHRCSEILAEETGTRRDLKDQPLPGVPAWYTDGSSFIAEGKRRAGAAIVDGKRTVWASSLPEGTSAQKAELVALTQALRLAEGKDINIYTDSRYAFATAHIHGAIYKQRGLLTSAGKDIKNKEEILALLEAIHLPKRVAIIHCPGHQKGNDPVATGNRRADEAAKQAALSTRVLAETTKPAGKRTADGSEFEKRTADGSEFESPKKKAKVE

SEQ ID NO: 798 - protein, 2094 aa, synthetic construct
MPAAKRVKLDGGDKKYSIGLDIGTNSVGWAVITDEYKVPSKKFKVLGNTDRHSIKKNLIGALLFDSGETAEATRLKRTARRRYTRRKNRICYLQEIFSNEMAKVDDSFFHRLEESFLVEEDKKHERHPIFGNIVDEVAYHEKYPTIYHLRKKLVDSTDKADLRLIYLALAHMIKFRGHFLIEGDLNPDNSDVDKLFIQLVQTYNQLFEENPINASGVDAKAILSARLSKSRRLENLIAQLPGEKKNGLFGNLIALSLGLTPNFKSNFDLAEDAKLQLSKDTYDDDLDNLLAQIGDQYADLFLAAKNLSDAILLSDILRVNTEITKAPLSASMIKRYDEHHQDLTLLKALVRQQLPEKYKEIFFDQSKNGYAGYIDGGASQEEFYKFIKPILEKMDGTEELLVKLNREDLLRKQRTFDNGSIPHQIHLGELHAILRRQEDFYPFLKDNREKIEKILTFRIPYYVGPLARGNSRFAWMTRKSEETITPWNFEEVVDKGASAQSFIERMTNFDKNLPNEKVLPKHSLLYEYFTVYNELTKVKYVTEGMRKPAFLSGEQKKAIVDLLFKTNRKVTVKQLKEDYFKKIECFDSVEISGVEDRFNASLGTYHDLLKIIKDKDFLDNEENEDILEDIVLTLTLFEDREMIEERLKTYAHLFDDKVMKQLKRRRYTGWGRLSRKLINGIRDKQSGKTILDFLKSDGFANRNFMQLIHDDSLTFKEDIQKAQVSGQGDSLHEHIANLAGSPAIKKGILQTVKVVDELVKVMGRHKPENIVIEMARENQTTQKGQKNSRERMKRIEEGIKELGSQILKEHPVENTQLQNEKLYLYYLQNGRDMYVDQELDINRLSDYDVDHIVPQSFLKDDSIDNKVLTRSDKARGKSDNVPSEEVVKKMKNYWRQLLNAKLITQRKFDNLTKAERGGLSELDKAGFIKRQLVETRQITKHVAQILDSRMNTKYDENDKLIREVKVITLKSKLVSDFRKDFQFYKVREINNYHHAHDAYLNAVVGTALIKKYPKLESEFVYGDYKVYDVRKMIAKSEQEIGKATAKYFFYSNIMNFFKTEITLANGEIRKRPLIETNGETGEIVWDKGRDFATVRKVLSMPQVNIVKKTEVQTGGFSKESILPKRNSDKLIARKKDWDPKKYGGFDSPTVAYSVLVVAKVEKGKSKKLKSVKELLGITIMERSSFEKNPIDFLEAKGYKEVKKDLIIKLPKYSLFELENGRKRMLASAGELQKGNELALPSKYVNFLYLASHYEKLKGSPEDNEQKQLFVEQHKHYLDEIIEQISEFSKRVILADANLDKVLSAYNKHRDKPIREQAENIIHLFTLTNLGAPAAFKYFDTTIDRKRYTSTKEVLDATLIHQSITGLYETRIDLSQLGGDGGGGGGGSEAAAKGGVLNLEEEYRLHEKPVPSSIDPSWLQLFPTVWAERAGMGLANQVPPVVVELRSGASPVAVRQYPMSKEAREGIRPHIQRFLDLGVLVPCQSPWNTPLLPVKKPGTNDYRPVQDLREINKRVQDIHPTVPNPYNLLSSLPPSHTWYSVLDLKDAFFCLKLHPNSQPLFAFEWRDPEKGNTGQLTWTRLPQGFKNSPTLFDEALHRDLAPFRALNPQVVLLQYVDDLLVAAPTYRDCKEGTQKLLQELSKLGYRVSAKKAQLCQKEVTYLGYLLKEGKRWLTPARKATVMKIPPPTTPRQVREFLGTAGFCRLWIPGFASLAAPLYPLTKESIPFIWTEEHQKAFDRIKEALLSAPALALPDLTKPFTLYVDERAGVARGVLTQTLGPWRRPVAYLSKKLDPVASGWPTCLKAVAAVALLLKDADKLTLGQNVTVIASHSLESIVRQPPDRWMTNARMTHYQSLLLNERVSFAPPAVLNPATLLPVESEATPVHRCSEILAEETGTRRDLKDQPLPGVPAWYTDGSSFIAEGKRRAGAAIVDGKRTVWASSLPEGTSAQKAELVALTQALRLAEGKDINIYTDSRYAFATAHIHGAIYKQRGLLTSAGKDIKNKEEILALLEAIHLPKRVAIIHCPGHQKGNDPVATGNRRADEAAKQAALSTRVLAETTKPAGKRTADGSEFEKRTADGSEFESPKKKAKVE

SEQ ID NO: 799 - protein, 2108 aa, synthetic construct
MPAAKRVKLDGGDKKYSIGLDIGTNSVGWAVITDEYKVPSKKFKVLGNTDRHSIKKNLIGALLFDSGETAEATRLKRTARRRYTRRKNRICYLQEIFSNEMAKVDDSFFHRLEESFLVEEDKKHERHPIFGNIVDEVAYHEKYPTIYHLRKKLVDSTDKADLRLIYLALAHMIKFRGHFLIEGDLNPDNSDVDKLFIQLVQTYNQLFEENPINASGVDAKAILSARLSKSRRLENLIAQLPGEKKNGLFGNLIALSLGLTPNFKSNFDLAEDAKLQLSKDTYDDDLDNLLAQIGDQYADLFLAAKNLSDAILLSDILRVNTEITKAPLSASMIKRYDEHHQDLTLLKALVRQQLPEKYKEIFFDQSKNGYAGYIDGGASQEEFYKFIKPILEKMDGTEELLVKLNREDLLRKQRTFDNGSIPHQIHLGELHAILRRQEDFYPFLKDNREKIEKILTFRIPYYVGPLARGNSRFAWMTRKSEETITPWNFEEVVDKGASAQSFIERMTNFDKNLPNEKVLPKHSLLYEYFTVYNELTKVKYVTEGMRKPAFLSGEQKKAIVDLLFKTNRKVTVKQLKEDYFKKIECFDSVEISGVEDRFNASLGTYHDLLKIIKDKDFLDNEENEDILEDIVLTLTLFEDREMIEERLKTYAHLFDDKVMKQLKRRRYTGWGRLSRKLINGIRDKQSGKTILDFLKSDGFANRNFMQLIHDDSLTFKEDIQKAQVSGQGDSLHEHIANLAGSPAIKKGILQTVKVVDELVKVMGRHKPENIVIEMARENQTTQKGQKNSRERMKRIEEGIKELGSQILKEHPVENTQLQNEKLYLYYLQNGRDMYVDQELDINRLSDYDVDHIVPQSFLKDDSIDNKVLTRSDKARGKSDNVPSEEVVKKMKNYWRQLLNAKLITQRKFDNLTKAERGGLSELDKAGFIKRQLVETRQITKHVAQILDSRMNTKYDENDKLIREVKVITLKSKLVSDFRKDFQFYKVREINNYHHAHDAYLNAVVGTALIKKYPKLESEFVYGDYKVYDVRKMIAKSEQEIGKATAKYFFYSNIMNFFKTEITLANGEIRKRPLIETNGETGEIVWDKGRDFATVRKVLSMPQVNIVKKTEVQTGGFSKESILPKRNSDKLIARKKDWDPKKYGGFDSPTVAYSVLVVAKVEKGKSKKLKSVKELLGITIMERSSFEKNPIDFLEAKGYKEVKKDLIIKLPKYSLFELENGRKRMLASAGELQKGNELALPSKYVNFLYLASHYEKLKGSPEDNEQKQLFVEQHKHYLDEIIEQISEFSKRVILADANLDKVLSAYNKHRDKPIREQAENIIHLFTLTNLGAPAAFKYFDTTIDRKRYTSTKEVLDATLIHQSITGLYETRIDLSQLGGDGGEAAAKEAAAKEAAAKEAAAKEAAAKGGVLNLEEEYRLHEKPVPSSIDPSWLQLFPTVWAERAGMGLANQVPPVVVELRSGASPVAVRQYPMSKEAREGIRPHIQRFLDLGVLVPCQSPWNTPLLPVKKPGTNDYRPVQDLREINKRVQDIHPTVPNPYNLLSSLPPSHTWYSVLDLKDAFFCLKLHPNSQPLFAFEWRDPEKGNTGQLTWTRLPQGFKNSPTLFNEALHRDLAPFRALNPQVVLLQYVDDLLVAAPTYRDCKEGTQKLLQELSKLGYRVSAKKAQLCQKEVTYLGYLLKEGKRWLTPARKATVMKIPPPTTPRQVREFLGTAGFCRLWIPGFASLAAPLYPLTKPSIPFIWTEEHQKAFDRIKEALLSAPALALPDLTKPFTLYVDERAGVARGVLTQTLGPWRRPVAYLSKKLDPVASGWPTCLKAVAAVALLLKDADKLTLGQNVTVIASHSLESIVRQPPDRWMTNARMTHYQSLLLNERVSFAPPAVLNPATLLPVESEATPVHRCSEILAEETGTRRDLKDQPLPGVPAWYTDGSSFIAEGKRRAGAAIVDGKRTVWASSLPEGTSAQKAELVALTQALRLAEGKDINIYTDSRYAFATAHIHGAIYKQRGWLTSAGKDIKNKEEILALLEAIHLPKRVAIIHCPGHQKGNDPVATGNRRADEAAKQAALSTRVLAETTKPAGKRTADGSEFEKRTADGSEFESPKKKAKVE

SEQ ID NO: 800 - protein, 2094 aa, synthetic construct
MPAAKRVKLDGGDKKYSIGLDIGTNSVGWAVITDEYKVPSKKFKVLGNTDRHSIKKNLIGALLFDSGETAEATRLKRTARRRYTRRKNRICYLQEIFSNEMAKVDDSFFHRLEESFLVEEDKKHERHPIFGNIVDEVAYHEKYPTIYHLRKKLVDSTDKADLRLIYLALAHMIKFRGHFLIEGDLNPDNSDVDKLFIQLVQTYNQLFEENPINASGVDAKAILSARLSKSRRLENLIAQLPGEKKNGLFGNLIALSLGLTPNFKSNFDLAEDAKLQLSKDTYDDDLDNLLAQIGDQYADLFLAAKNLSDAILLSDILRVNTEITKAPLSASMIKRYDEHHQDLTLLKALVRQQLPEKYKEIFFDQSKNGYAGYIDGGASQEEFYKFIKPILEKMDGTEELLVKLNREDLLRKQRTFDNGSIPHQIHLGELHAILRRQEDFYPFLKDNREKIEKILTFRIPYYVGPLARGNSRFAWMTRKSEETITPWNFEEVVDKGASAQSFIERMTNFDKNLPNEKVLPKHSLLYEYFTVYNELTKVKYVTEGMRKPAFLSGEQKKAIVDLLFKTNRKVTVKQLKEDYFKKIECFDSVEISGVEDRFNASLGTYHDLLKIIKDKDFLDNEENEDILEDIVLTLTLFEDREMIEERLKTYAHLFDDKVMKQLKRRRYTGWGRLSRKLINGIRDKQSGKTILDFLKSDGFANRNFMQLIHDDSLTFKEDIQKAQVSGQGDSLHEHIANLAGSPAIKKGILQTVKVVDELVKVMGRHKPENIVIEMARENQTTQKGQKNSRERMKRIEEGIKELGSQILKEHPVENTQLQNEKLYLYYLQNGRDMYVDQELDINRLSDYDVDHIVPQSFLKDDSIDNKVLTRSDKARGKSDNVPSEEVVKKMKNYWRQLLNAKLITQRKFDNLTKAERGGLSELDKAGFIKRQLVETRQITKHVAQILDSRMNTKYDENDKLIREVKVITLKSKLVSDFRKDFQFYKVREINNYHHAHDAYLNAVVGTALIKKYPKLESEFVYGDYKVYDVRKMIAKSEQEIGKATAKYFFYSNIMNFFKTEITLANGEIRKRPLIETNGETGEIVWDKGRDFATVRKVLSMPQVNIVKKTEVQTGGFSKESILPKRNSDKLIARKKDWDPKKYGGFDSPTVAYSVLVVAKVEKGKSKKLKSVKELLGITIMERSSFEKNPIDFLEAKGYKEVKKDLIIKLPKYSLFELENGRKRMLASAGELQKGNELALPSKYVNFLYLASHYEKLKGSPEDNEQKQLFVEQHKHYLDEIIEQISEFSKRVILADANLDKVLSAYNKHRDKPIREQAENIIHLFTLTNLGAPAAFKYFDTTIDRKRYTSTKEVLDATLIHQSITGLYETRIDLSQLGGDGGGGGGGSEAAAKGGVLNLEEEYRLHEKPVPSSIDPSWLQLFPTVWAERAGMGLANQVPPVVVELRSGASPVAVRQYPMSKEAREGIRPHIQRFLDLGVLVPCQSPWNTPLLPVKKPGTNDYRPVQDLREINKRVQDIHPTVPNPYNLLSSLPPSHTWYSVLDLKDAFFCLKLHPNSQPLFAFEWRDPEKGNTGQLTWTRLPQGFKNSPTLFNEALHRDLAPFRALNPQVVLLQYVDDLLVAAPTYRDCKEGTQKLLQELSKLGYRVSAKKAQLCQKEVTYLGYLLKEGKRWLTPARKATVMKIPPPTTPRQVREFLGTAGFCRLWIPGFASLAAPLYPLTKPSIPFIWTEEHQKAFDRIKEALLSAPALALPDLTKPFTLYVDERAGVARGVLTQTLGPWRRPVAYLSKKLDPVASGWPTCLKAVAAVALLLKDADKLTLGQNVTVIASHSLESIVRQPPDRWMTNARMTHYQSLLLNERVSFAPPAVLNPATLLPVESEATPVHRCSEILAEETGTRRDLKDQPLPGVPAWYTDGSSFIAEGKRRAGAAIVDGKRTVWASSLPEGTSAQKAELVALTQALRLAEGKDINIYTDSRYAFATAHIHGAIYKQRGWLTSAGKDIKNKEEILALLEAIHLPKRVAIIHCPGHQKGNDPVATGNRRADEAAKQAALSTRVLAETTKPAGKRTADGSEFEKRTADGSEFESPKKKAKVE

SEQ ID NO: 801 - protein, 2129 aa, synthetic construct
MPAAKRVKLDGGDKKYSIGLDIGTNSVGWAVITDEYKVPSKKFKVLGNTDRHSIKKNLIGALLFDSGETAEATRLKRTARRRYTRRKNRICYLQEIFSNEMAKVDDSFFHRLEESFLVEEDKKHERHPIFGNIVDEVAYHEKYPTIYHLRKKLVDSTDKADLRLIYLALAHMIKFRGHFLIEGDLNPDNSDVDKLFIQLVQTYNQLFEENPINASGVDAKAILSARLSKSRRLENLIAQLPGEKKNGLFGNLIALSLGLTPNFKSNFDLAEDAKLQLSKDTYDDDLDNLLAQIGDQYADLFLAAKNLSDAILLSDILRVNTEITKAPLSASMIKRYDEHHQDLTLLKALVRQQLPEKYKEIFFDQSKNGYAGYIDGGASQEEFYKFIKPILEKMDGTEELLVKLNREDLLRKQRTFDNGSIPHQIHLGELHAILRRQEDFYPFLKDNREKIEKILTFRIPYYVGPLARGNSRFAWMTRKSEETITPWNFEEVVDKGASAQSFIERMTNFDKNLPNEKVLPKHSLLYEYFTVYNELTKVKYVTEGMRKPAFLSGEQKKAIVDLLFKTNRKVTVKQLKEDYFKKIECFDSVEISGVEDRFNASLGTYHDLLKIIKDKDFLDNEENEDILEDIVLTLTLFEDREMIEERLKTYAHLFDDKVMKQLKRRRYTGWGRLSRKLINGIRDKQSGKTILDFLKSDGFANRNFMQLIHDDSLTFKEDIQKAQVSGQGDSLHEHIANLAGSPAIKKGILQTVKVVDELVKVMGRHKPENIVIEMARENQTTQKGQKNSRERMKRIEEGIKELGSQILKEHPVENTQLQNEKLYLYYLQNGRDMYVDQELDINRLSDYDVDHIVPQSFLKDDSIDNKVLTRSDKARGKSDNVPSEEVVKKMKNYWRQLLNAKLITQRKFDNLTKAERGGLSELDKAGFIKRQLVETRQITKHVAQILDSRMNTKYDENDKLIREVKVITLKSKLVSDFRKDFQFYKVREINNYHHAHDAYLNAVVGTALIKKYPKLESEFVYGDYKVYDVRKMIAKSEQEIGKATAKYFFYSNIMNFFKTEITLANGEIRKRPLIETNGETGEIVWDKGRDFATVRKVLSMPQVNIVKKTEVQTGGFSKESILPKRNSDKLIARKKDWDPKKYGGFDSPTVAYSVLVVAKVEKGKSKKLKSVKELLGITIMERSSFEKNPIDFLEAKGYKEVKKDLIIKLPKYSLFELENGRKRMLASAGELQKGNELALPSKYVNFLYLASHYEKLKGSPEDNEQKQLFVEQHKHYLDEIIEQISEFSKRVILADANLDKVLSAYNKHRDKPIREQAENIIHLFTLTNLGAPAAFKYFDTTIDRKRYTSTKEVLDATLIHQSITGLYETRIDLSQLGGDGGAEAAAKEAAAKEAAAKEAAAKALEAEAAAKEAAAKEAAAKEAAAKAGGVLNLEEEYRLHEKPVPSSIDPSWLQLFPTVWAERAGMGLANQVPPVVVELRSGASPVAVRQYPMSKEAREGIRPHIQRFLDLGVLVPCQSPWNTPLLPVKKPGTNDYRPVQDLREINKRVQDIHPTVPNPYNLLSSLPPSHTWYSVLDLKDAFFCLKLHPNSQPLFAFEWRDPEKGNTGQLTWTRLPQGFKNSPTLFNEALHRDLAPFRALNPQVVLLQYVDDLLVAAPTYRDCKEGTQKLLQELSKLGYRVSAKKAQLCQKEVTYLGYLLKEGKRWLTPARKATVMKIPPPTTPRQVREFLGTAGFCRLWIPGFASLAAPLYPLTKPSIPFIWTEEHQKAFDRIKEALLSAPALALPDLTKPFTLYVDERAGVARGVLTQTLGPWRRPVAYLSKKLDPVASGWPTCLKAVAAVALLLKDADKLTLGQNVTVIASHSLESIVRQPPDRWMTNARMTHYQSLLLNERVSFAPPAVLNPATLLPVESEATPVHRCSEILAEETGTRRDLKDQPLPGVPAWYTDGSSFIAEGKRRAGAAIVDGKRTVWASSLPEGTSAQKAELVALTQALRLAEGKDINIYTDSRYAFATAHIHGAIYKQRGWLTSAGKDIKNKEEILALLEAIHLPKRVAIIHCPGHQKGNDPVATGNRRADEAAKQAALSTRVLAETTKPAGKRTADGSEFEKRTADGSEFESPKKKAKVE

SEQ ID NO: 802 - protein, 2090 aa, synthetic construct
MPAAKRVKLDGGDKKYSIGLDIGTNSVGWAVITDEYKVPSKKFKVLGNTDRHSIKKNLIGALLFDSGETAEATRLKRTARRRYTRRKNRICYLQEIFSNEMAKVDDSFFHRLEESFLVEEDKKHERHPIFGNIVDEVAYHEKYPTIYHLRKKLVDSTDKADLRLIYLALAHMIKFRGHFLIEGDLNPDNSDVDKLFIQLVQTYNQLFEENPINASGVDAKAILSARLSKSRRLENLIAQLPGEKKNGLFGNLIALSLGLTPNFKSNFDLAEDAKLQLSKDTYDDDLDNLLAQIGDQYADLFLAAKNLSDAILLSDILRVNTEITKAPLSASMIKRYDEHHQDLTLLKALVRQQLPEKYKEIFFDQSKNGYAGYIDGGASQEEFYKFIKPILEKMDGTEELLVKLNREDLLRKQRTFDNGSIPHQIHLGELHAILRRQEDFYPFLKDNREKIEKILTFRIPYYVGPLARGNSRFAWMTRKSEETITPWNFEEVVDKGASAQSFIERMTNFDKNLPNEKVLPKHSLLYEYFTVYNELTKVKYVTEGMRKPAFLSGEQKKAIVDLLFKTNRKVTVKQLKEDYFKKIECFDSVEISGVEDRFNASLGTYHDLLKIIKDKDFLDNEENEDILEDIVLTLTLFEDREMIEERLKTYAHLFDDKVMKQLKRRRYTGWGRLSRKLINGIRDKQSGKTILDFLKSDGFANRNFMQLIHDDSLTFKEDIQKAQVSGQGDSLHEHIANLAGSPAIKKGILQTVKVVDELVKVMGRHKPENIVIEMARENQTTQKGQKNSRERMKRIEEGIKELGSQILKEHPVENTQLQNEKLYLYYLQNGRDMYVDQELDINRLSDYDVDHIVPQSFLKDDSIDNKVLTRSDKARGKSDNVPSEEVVKKMKNYWRQLLNAKLITQRKFDNLTKAERGGLSELDKAGFIKRQLVETRQITKHVAQILDSRMNTKYDENDKLIREVKVITLKSKLVSDFRKDFQFYKVREINNYHHAHDAYLNAVVGTALIKKYPKLESEFVYGDYKVYDVRKMIAKSEQEIGKATAKYFFYSNIMNFFKTEITLANGEIRKRPLIETNGETGEIVWDKGRDFATVRKVLSMPQVNIVKKTEVQTGGFSKESILPKRNSDKLIARKKDWDPKKYGGFDSPTVAYSVLVVAKVEKGKSKKLKSVKELLGITIMERSSFEKNPIDFLEAKGYKEVKKDLIIKLPKYSLFELENGRKRMLASAGELQKGNELALPSKYVNFLYLASHYEKLKGSPEDNEQKQLFVEQHKHYLDEIIEQISEFSKRVILADANLDKVLSAYNKHRDKPIREQAENIIHLFTLTNLGAPAAFKYFDTTIDRKRYTSTKEVLDATLIHQSITGLYETRIDLSQLGGDGGGGGGGGGGGVLNLEEEYRLHEKPVPSSIDPSWLQLFPTVWAERAGMGLANQVPPVVVELRSGASPVAVRQYPMSKEAREGIRPHIQRFLDLGVLVPCQSPWNTPLLPVKKPGTNDYRPVQDLREINKRVQDIHPTVPNPYNLLSSLPPSHTWYSVLDLKDAFFCLKLHPNSQPLFAFEWRDPEKGNTGQLTWTRLPQGFKNSPTLFNEALHRDLAPFRALNPQVVLLQYVDDLLVAAPTYRDCKEGTQKLLQELSKLGYRVSAKKAQLCQKEVTYLGYLLKEGKRWLTPARKATVMKIPPPTTPRQVREFLGTAGFCRLWIPGFASLAAPLYPLTKPSIPFIWTEEHQKAFDRIKEALLSAPALALPDLTKPFTLYVDERAGVARGVLTQTLGPWRRPVAYLSKKLDPVASGWPTCLKAVAAVALLLKDADKLTLGQNVTVIASHSLESIVRQPPDRWMTNARMTHYQSLLLNERVSFAPPAVLNPATLLPVESEATPVHRCSEILAEETGTRRDLKDQPLPGVPAWYTDGSSFIAEGKRRAGAAIVDGKRTVWASSLPEGTSAQKAELVALTQALRLAEGKDINIYTDSRYAFATAHIHGAIYKQRGWLTSAGKDIKNKEEILALLEAIHLPKRVAIIHCPGHQKGNDPVATGNRRADEAAKQAALSTRVLAETTKPAGKRTADGSEFEKRTADGSEFESPKKKAKVE

SEQ ID NO: 803 - protein, 2086 aa, synthetic construct
MPAAKRVKLDGGDKKYSIGLDIGTNSVGWAVITDEYKVPSKKFKVLGNTDRHSIKKNLIGALLFDSGETAEATRLKRTARRRYTRRKNRICYLQEIFSNEMAKVDDSFFHRLEESFLVEEDKKHERHPIFGNIVDEVAYHEKYPTIYHLRKKLVDSTDKADLRLIYLALAHMIKFRGHFLIEGDLNPDNSDVDKLFIQLVQTYNQLFEENPINASGVDAKAILSARLSKSRRLENLIAQLPGEKKNGLFGNLIALSLGLTPNFKSNFDLAEDAKLQLSKDTYDDDLDNLLAQIGDQYADLFLAAKNLSDAILLSDILRVNTEITKAPLSASMIKRYDEHHQDLTLLKALVRQQLPEKYKEIFFDQSKNGYAGYIDGGASQEEFYKFIKPILEKMDGTEELLVKLNREDLLRKQRTFDNGSIPHQIHLGELHAILRRQEDFYPFLKDNREKIEKILTFRIPYYVGPLARGNSRFAWMTRKSEETITPWNFEEVVDKGASAQSFIERMTNFDKNLPNEKVLPKHSLLYEYFTVYNELTKVKYVTEGMRKPAFLSGEQKKAIVDLLFKTNRKVTVKQLKEDYFKKIECFDSVEISGVEDRFNASLGTYHDLLKIIKDKDFLDNEENEDILEDIVLTLTLFEDREMIEERLKTYAHLFDDKVMKQLKRRRYTGWGRLSRKLINGIRDKQSGKTILDFLKSDGFANRNFMQLIHDDSLTFKEDIQKAQVSGQGDSLHEHIANLAGSPAIKKGILQTVKVVDELVKVMGRHKPENIVIEMARENQTTQKGQKNSRERMKRIEEGIKELGSQILKEHPVENTQLQNEKLYLYYLQNGRDMYVDQELDINRLSDYDVDHIVPQSFLKDDSIDNKVLTRSDKARGKSDNVPSEEVVKKMKNYWRQLLNAKLITQRKFDNLTKAERGGLSELDKAGFIKRQLVETRQITKHVAQILDSRMNTKYDENDKLIREVKVITLKSKLVSDFRKDFQFYKVREINNYHHAHDAYLNAVVGTALIKKYPKLESEFVYGDYKVYDVRKMIAKSEQEIGKATAKYFFYSNIMNFFKTEITLANGEIRKRPLIETNGETGEIVWDKGRDFATVRKVLSMPQVNIVKKTEVQTGGFSKESILPKRNSDKLIARKKDWDPKKYGGFDSPTVAYSVLVVAKVEKGKSKKLKSVKELLGITIMERSSFEKNPIDFLEAKGYKEVKKDLIIKLPKYSLFELENGRKRMLASAGELQKGNELALPSKYVNFLYLASHYEKLKGSPEDNEQKQLFVEQHKHYLDEIIEQISEFSKRVILADANLDKVLSAYNKHRDKPIREQAENIIHLFTLTNLGAPAAFKYFDTTIDRKRYTSTKEVLDATLIHQSITGLYETRIDLSQLGGDGGGSSGGVLNLEEEYRLHEKPVPSSIDPSWLQLFPTVWAERAGMGLANQVPPVVVELRSGASPVAVRQYPMSKEAREGIRPHIQRFLDLGVLVPCQSPWNTPLLPVKKPGTNDYRPVQDLREINKRVQDIHPTVPNPYNLLSSLPPSHTWYSVLDLKDAFFCLKLHPNSQPLFAFEWRDPEKGNTGQLTWTRLPQGFKNSPTLFNEALHRDLAPFRALNPQVVLLQYVDDLLVAAPTYRDCKEGTQKLLQELSKLGYRVSAKKAQLCQKEVTYLGYLLKEGKRWLTPARKATVMKIPPPTTPRQVREFLGTAGFCRLWIPGFASLAAPLYPLTKPSIPFIWTEEHQKAFDRIKEALLSAPALALPDLTKPFTLYVDERAGVARGVLTQTLGPWRRPVAYLSKKLDPVASGWPTCLKAVAAVALLLKDADKLTLGQNVTVIASHSLESIVRQPPDRWMTNARMTHYQSLLLNERVSFAPPAVLNPATLLPVESEATPVHRCSEILAEETGTRRDLKDQPLPGVPAWYTDGSSFIAEGKRRAGAAIVDGKRTVWASSLPEGTSAQKAELVALTQALRLAEGKDINIYTDSRYAFATAHIHGAIYKQRGWLTSAGKDIKNKEEILALLEAIHLPKRVAIIHCPGHQKGNDPVATGNRRADEAAKQAALSTRVLAETTKPAGKRTADGSEFEKRTADGSEFESPKKKAKVE

SEQ ID NO: 804 - protein, 2092 aa, synthetic construct
MPAAKRVKLDGGDKKYSIGLDIGTNSVGWAVITDEYKVPSKKFKVLGNTDRHSIKKNLIGALLFDSGETAEATRLKRTARRRYTRRKNRICYLQEIFSNEMAKVDDSFFHRLEESFLVEEDKKHERHPIFGNIVDEVAYHEKYPTIYHLRKKLVDSTDKADLRLIYLALAHMIKFRGHFLIEGDLNPDNSDVDKLFIQLVQTYNQLFEENPINASGVDAKAILSARLSKSRRLENLIAQLPGEKKNGLFGNLIALSLGLTPNFKSNFDLAEDAKLQLSKDTYDDDLDNLLAQIGDQYADLFLAAKNLSDAILLSDILRVNTEITKAPLSASMIKRYDEHHQDLTLLKALVRQQLPEKYKEIFFDQSKNGYAGYIDGGASQEEFYKFIKPILEKMDGTEELLVKLNREDLLRKQRTFDNGSIPHQIHLGELHAILRRQEDFYPFLKDNREKIEKILTFRIPYYVGPLARGNSRFAWMTRKSEETITPWNFEEVVDKGASAQSFIERMTNFDKNLPNEKVLPKHSLLYEYFTVYNELTKVKYVTEGMRKPAFLSGEQKKAIVDLLFKTNRKVTVKQLKEDYFKKIECFDSVEISGVEDRFNASLGTYHDLLKIIKDKDFLDNEENEDILEDIVLTLTLFEDREMIEERLKTYAHLFDDKVMKQLKRRRYTGWGRLSRKLINGIRDKQSGKTILDFLKSDGFANRNFMQLIHDDSLTFKEDIQKAQVSGQGDSLHEHIANLAGSPAIKKGILQTVKVVDELVKVMGRHKPENIVIEMARENQTTQKGQKNSRERMKRIEEGIKELGSQILKEHPVENTQLQNEKLYLYYLQNGRDMYVDQELDINRLSDYDVDHIVPQSFLKDDSIDNKVLTRSDKARGKSDNVPSEEVVKKMKNYWRQLLNAKLITQRKFDNLTKAERGGLSELDKAGFIKRQLVETRQITKHVAQILDSRMNTKYDENDKLIREVKVITLKSKLVSDFRKDFQFYKVREINNYHHAHDAYLNAVVGTALIKKYPKLESEFVYGDYKVYDVRKMIAKSEQEIGKATAKYFFYSNIMNFFKTEITLANGEIRKRPLIETNGETGEIVWDKGRDFATVRKVLSMPQVNIVKKTEVQTGGFSKESILPKRNSDKLIARKKDWDPKKYGGFDSPTVAYSVLVVAKVEKGKSKKLKSVKELLGITIMERSSFEKNPIDFLEAKGYKEVKKDLIIKLPKYSLFELENGRKRMLASAGELQKGNELALPSKYVNFLYLASHYEKLKGSPEDNEQKQLFVEQHKHYLDEIIEQISEFSKRVILADANLDKVLSAYNKHRDKPIREQAENIIHLFTLTNLGAPAAFKYFDTTIDRKRYTSTKEVLDATLIHQSITGLYETRIDLSQLGGDGGGGGGSSGGSGGVLNLEEEYRLHEKPVPSSIDPSWLQLFPTVWAERAGMGLANQVPPVVVELRSGASPVAVRQYPMSKEAREGIRPHIQRFLDLGVLVPCQSPWNTPLLPVKKPGTNDYRPVQDLREINKRVQDIHPTVPNPYNLLSSLPPSHTWYSVLDLKDAFFCLKLHPNSQPLFAFEWRDPEKGNTGQLTWTRLPQGFKNSPTLFNEALHRDLAPFRALNPQVVLLQYVDDLLVAAPTYRDCKEGTQKLLQELSKLGYRVSAKKAQLCQKEVTYLGYLLKEGKRWLTPARKATVMKIPPPTTPRQVREFLGTAGFCRLWIPGFASLAAPLYPLTKPSIPFIWTEEHQKAFDRIKEALLSAPALALPDLTKPFTLYVDERAGVARGVLTQTLGPWRRPVAYLSKKLDPVASGWPTCLKAVAAVALLLKDADKLTLGQNVTVIASHSLESIVRQPPDRWMTNARMTHYQSLLLNERVSFAPPAVLNPATLLPVESEATPVHRCSEILAEETGTRRDLKDQPLPGVPAWYTDGSSFIAEGKRRAGAAIVDGKRTVWASSLPEGTSAQKAELVALTQALRLAEGKDINIYTDSRYAFATAHIHGAIYKQRGWLTSAGKDIKNKEEILALLEAIHLPKRVAIIHCPGHQKGNDPVATGNRRADEAAKQAALSTRVLAETTKPAGKRTADGSEFEKRTADGSEFESPKKKAKVE

SEQ ID NO: 805 - protein, 2089 aa, synthetic construct
MPAAKRVKLDGGDKKYSIGLDIGTNSVGWAVITDEYKVPSKKFKVLGNTDRHSIKKNLIGALLFDSGETAEATRLKRTARRRYTRRKNRICYLQEIFSNEMAKVDDSFFHRLEESFLVEEDKKHERHPIFGNIVDEVAYHEKYPTIYHLRKKLVDSTDKADLRLIYLALAHMIKFRGHFLIEGDLNPDNSDVDKLFIQLVQTYNQLFEENPINASGVDAKAILSARLSKSRRLENLIAQLPGEKKNGLFGNLIALSLGLTPNFKSNFDLAEDAKLQLSKDTYDDDLDNLLAQIGDQYADLFLAAKNLSDAILLSDILRVNTEITKAPLSASMIKRYDEHHQDLTLLKALVRQQLPEKYKEIFFDQSKNGYAGYIDGGASQEEFYKFIKPILEKMDGTEELLVKLNREDLLRKQRTFDNGSIPHQIHLGELHAILRRQEDFYPFLKDNREKIEKILTFRIPYYVGPLARGNSRFAWMTRKSEETITPWNFEEVVDKGASAQSFIERMTNFDKNLPNEKVLPKHSLLYEYFTVYNELTKVKYVTEGMRKPAFLSGEQKKAIVDLLFKTNRKVTVKQLKEDYFKKIECFDSVEISGVEDRFNASLGTYHDLLKIIKDKDFLDNEENEDILEDIVLTLTLFEDREMIEERLKTYAHLFDDKVMKQLKRRRYTGWGRLSRKLINGIRDKQSGKTILDFLKSDGFANRNFMQLIHDDSLTFKEDIQKAQVSGQGDSLHEHIANLAGSPAIKKGILQTVKVVDELVKVMGRHKPENIVIEMARENQTTQKGQKNSRERMKRIEEGIKELGSQILKEHPVENTQLQNEKLYLYYLQNGRDMYVDQELDINRLSDYDVDHIVPQSFLKDDSIDNKVLTRSDKARGKSDNVPSEEVVKKMKNYWRQLLNAKLITQRKFDNLTKAERGGLSELDKAGFIKRQLVETRQITKHVAQILDSRMNTKYDENDKLIREVKVITLKSKLVSDFRKDFQFYKVREINNYHHAHDAYLNAVVGTALIKKYPKLESEFVYGDYKVYDVRKMIAKSEQEIGKATAKYFFYSNIMNFFKTEITLANGEIRKRPLIETNGETGEIVWDKGRDFATVRKVLSMPQVNIVKKTEVQTGGFSKESILPKRNSDKLIARKKDWDPKKYGGFDSPTVAYSVLVVAKVEKGKSKKLKSVKELLGITIMERSSFEKNPIDFLEAKGYKEVKKDLIIKLPKYSLFELENGRKRMLASAGELQKGNELALPSKYVNFLYLASHYEKLKGSPEDNEQKQLFVEQHKHYLDEIIEQISEFSKRVILADANLDKVLSAYNKHRDKPIREQAENIIHLFTLTNLGAPAAFKYFDTTIDRKRYTSTKEVLDATLIHQSITGLYETRIDLSQLGGDGGGGGGGGGGVLNLEEEYRLHEKPVPSSIDPSWLQLFPTVWAERAGMGLANQVPPVVVELRSGASPVAVRQYPMSKEAREGIRPHIQRFLDLGVLVPCQSPWNTPLLPVKKPGTNDYRPVQDLREINKRVQDIHPTVPNPYNLLSSLPPSHTWYSVLDLKDAFFCLKLHPNSQPLFAFEWRDPEKGNTGQLTWTRLPQGFKNSPTLFNEALHRDLAPFRALNPQVVLLQYVDDLLVAAPTYRDCKEGTQKLLQELSKLGYRVSAKKAQLCQKEVTYLGYLLKEGKRWLTPARKATVMKIPPPTTPRQVREFLGTAGFCRLWIPGFASLAAPLYPLTKPSIPFIWTEEHQKAFDRIKEALLSAPALALPDLTKPFTLYVDERAGVARGVLTQTLGPWRRPVAYLSKKLDPVASGWPTCLKAVAAVALLLKDADKLTLGQNVTVIASHSLESIVRQPPDRWMTNARMTHYQSLLLNERVSFAPPAVLNPATLLPVESEATPVHRCSEILAEETGTRRDLKDQPLPGVPAWYTDGSSFIAEGKRRAGAAIVDGKRTVWASSLPEGTSAQKAELVALTQALRLAEGKDINIYTDSRYAFATAHIHGAIYKQRGWLTSAGKDIKNKEEILALLEAIHLPKRVAIIHCPGHQKGNDPVATGNRRADEAAKQAALSTRVLAETTKPAGKRTADGSEFEKRTADGSEFESPKKKAKVE

SEQ ID NO: 806 - protein, 2099 aa, synthetic construct
MPAAKRVKLDGGDKKYSIGLDIGTNSVGWAVITDEYKVPSKKFKVLGNTDRHSIKKNLIGALLFDSGETAEATRLKRTARRRYTRRKNRICYLQEIFSNEMAKVDDSFFHRLEESFLVEEDKKHERHPIFGNIVDEVAYHEKYPTIYHLRKKLVDSTDKADLRLIYLALAHMIKFRGHFLIEGDLNPDNSDVDKLFIQLVQTYNQLFEENPINASGVDAKAILSARLSKSRRLENLIAQLPGEKKNGLFGNLIALSLGLTPNFKSNFDLAEDAKLQLSKDTYDDDLDNLLAQIGDQYADLFLAAKNLSDAILLSDILRVNTEITKAPLSASMIKRYDEHHQDLTLLKALVRQQLPEKYKEIFFDQSKNGYAGYIDGGASQEEFYKFIKPILEKMDGTEELLVKLNREDLLRKQRTFDNGSIPHQIHLGELHAILRRQEDFYPFLKDNREKIEKILTFRIPYYVGPLARGNSRFAWMTRKSEETITPWNFEEVVDKGASAQSFIERMTNFDKNLPNEKVLPKHSLLYEYFTVYNELTKVKYVTEGMRKPAFLSGEQKKAIVDLLFKTNRKVTVKQLKEDYFKKIECFDSVEISGVEDRFNASLGTYHDLLKIIKDKDFLDNEENEDILEDIVLTLTLFEDREMIEERLKTYAHLFDDKVMKQLKRRRYTGWGRLSRKLINGIRDKQSGKTILDFLKSDGFANRNFMQLIHDDSLTFKEDIQKAQVSGQGDSLHEHIANLAGSPAIKKGILQTVKVVDELVKVMGRHKPENIVIEMARENQTTQKGQKNSRERMKRIEEGIKELGSQILKEHPVENTQLQNEKLYLYYLQNGRDMYVDQELDINRLSDYDVDHIVPQSFLKDDSIDNKVLTRSDKARGKSDNVPSEEVVKKMKNYWRQLLNAKLITQRKFDNLTKAERGGLSELDKAGFIKRQLVETRQITKHVAQILDSRMNTKYDENDKLIREVKVITLKSKLVSDFRKDFQFYKVREINNYHHAHDAYLNAVVGTALIKKYPKLESEFVYGDYKVYDVRKMIAKSEQEIGKATAKYFFYSNIMNFFKTEITLANGEIRKRPLIETNGETGEIVWDKGRDFATVRKVLSMPQVNIVKKTEVQTGGFSKESILPKRNSDKLIARKKDWDPKKYGGFDSPTVAYSVLVVAKVEKGKSKKLKSVKELLGITIMERSSFEKNPIDFLEAKGYKEVKKDLIIKLPKYSLFELENGRKRMLASAGELQKGNELALPSKYVNFLYLASHYEKLKGSPEDNEQKQLFVEQHKHYLDEIIEQISEFSKRVILADANLDKVLSAYNKHRDKPIREQAENIIHLFTLTNLGAPAAFKYFDTTIDRKRYTSTKEVLDATLIHQSITGLYETRIDLSQLGGDGGSGSETPGTSESATPESGGVLNLEEEYRLHEKPVPSSIDPSWLQLFPTVWAERAGMGLANQVPPVVVELRSGASPVAVRQYPMSKEAREGIRPHIQRFLDLGVLVPCQSPWNTPLLPVKKPGTNDYRPVQDLREINKRVQDIHPTVPNPYNLLSSLPPSHTWYSVLDLKDAFFCLKLHPNSQPLFAFEWRDPEKGNTGQLTWTRLPQGFKNSPTLFNEALHRDLAPFRALNPQVVLLQYVDDLLVAAPTYRDCKEGTQKLLQELSKLGYRVSAKKAQLCQKEVTYLGYLLKEGKRWLTPARKATVMKIPPPTTPRQVREFLGTAGFCRLWIPGFASLAAPLYPLTKPSIPFIWTEEHQKAFDRIKEALLSAPALALPDLTKPFTLYVDERAGVARGVLTQTLGPWRRPVAYLSKKLDPVASGWPTCLKAVAAVALLLKDADKLTLGQNVTVIASHSLESIVRQPPDRWMTNARMTHYQSLLLNERVSFAPPAVLNPATLLPVESEATPVHRCSEILAEETGTRRDLKDQPLPGVPAWYTDGSSFIAEGKRRAGAAIVDGKRTVWASSLPEGTSAQKAELVALTQALRLAEGKDINIYTDSRYAFATAHIHGAIYKQRGWLTSAGKDIKNKEEILALLEAIHLPKRVAIIHCPGHQKGNDPVATGNRRADEAAKQAALSTRVLAETTKPAGKRTADGSEFEKRTADGSEFESPKKKAKVE

SEQ ID NO: 807 - protein, 2094 aa, synthetic construct
MPAAKRVKLDGGDKKYSIGLDIGTNSVGWAVITDEYKVPSKKFKVLGNTDRHSIKKNLIGALLFDSGETAEATRLKRTARRRYTRRKNRICYLQEIFSNEMAKVDDSFFHRLEESFLVEEDKKHERHPIFGNIVDEVAYHEKYPTIYHLRKKLVDSTDKADLRLIYLALAHMIKFRGHFLIEGDLNPDNSDVDKLFIQLVQTYNQLFEENPINASGVDAKAILSARLSKSRRLENLIAQLPGEKKNGLFGNLIALSLGLTPNFKSNFDLAEDAKLQLSKDTYDDDLDNLLAQIGDQYADLFLAAKNLSDAILLSDILRVNTEITKAPLSASMIKRYDEHHQDLTLLKALVRQQLPEKYKEIFFDQSKNGYAGYIDGGASQEEFYKFIKPILEKMDGTEELLVKLNREDLLRKQRTFDNGSIPHQIHLGELHAILRRQEDFYPFLKDNREKIEKILTFRIPYYVGPLARGNSRFAWMTRKSEETITPWNFEEVVDKGASAQSFIERMTNFDKNLPNEKVLPKHSLLYEYFTVYNELTKVKYVTEGMRKPAFLSGEQKKAIVDLLFKTNRKVTVKQLKEDYFKKIECFDSVEISGVEDRFNASLGTYHDLLKIIKDKDFLDNEENEDILEDIVLTLTLFEDREMIEERLKTYAHLFDDKVMKQLKRRRYTGWGRLSRKLINGIRDKQSGKTILDFLKSDGFANRNFMQLIHDDSLTFKEDIQKAQVSGQGDSLHEHIANLAGSPAIKKGILQTVKVVDELVKVMGRHKPENIVIEMARENQTTQKGQKNSRERMKRIEEGIKELGSQILKEHPVENTQLQNEKLYLYYLQNGRDMYVDQELDINRLSDYDVDHIVPQSFLKDDSIDNKVLTRSDKARGKSDNVPSEEVVKKMKNYWRQLLNAKLITQRKFDNLTKAERGGLSELDKAGFIKRQLVETRQITKHVAQILDSRMNTKYDENDKLIREVKVITLKSKLVSDFRKDFQFYKVREINNYHHAHDAYLNAVVGTALIKKYPKLESEFVYGDYKVYDVRKMIAKSEQEIGKATAKYFFYSNIMNFFKTEITLANGEIRKRPLIETNGETGEIVWDKGRDFATVRKVLSMPQVNIVKKTEVQTGGFSKESILPKRNSDKLIARKKDWDPKKYGGFDSPTVAYSVLVVAKVEKGKSKKLKSVKELLGITIMERSSFEKNPIDFLEAKGYKEVKKDLIIKLPKYSLFELENGRKRMLASAGELQKGNELALPSKYVNFLYLASHYEKLKGSPEDNEQKQLFVEQHKHYLDEIIEQISEFSKRVILADANLDKVLSAYNKHRDKPIREQAENIIHLFTLTNLGAPAAFKYFDTTIDRKRYTSTKEVLDATLIHQSITGLYETRIDLSQLGGDGGGGGGSSEAAAKGGVLNLEEEYRLHEKPVPSSIDPSWLQLFPTVWAERAGMGLANQVPPVVVELRSGASPVAVRQYPMSKEAREGIRPHIQRFLDLGVLVPCQSPWNTPLLPVKKPGTNDYRPVQDLREINKRVQDIHPTVPNPYNLLSSLPPSHTWYSVLDLKDAFFCLKLHPNSQPLFAFEWRDPEKGNTGQLTWTRLPQGFKNSPTLFNEALHRDLAPFRALNPQVVLLQYVDDLLVAAPTYRDCKEGTQKLLQELSKLGYRVSAKKAQLCQKEVTYLGYLLKEGKRWLTPARKATVMKIPPPTTPRQVREFLGTAGFCRLWIPGFASLAAPLYPLTKPSIPFIWTEEHQKAFDRIKEALLSAPALALPDLTKPFTLYVDERAGVARGVLTQTLGPWRRPVAYLSKKLDPVASGWPTCLKAVAAVALLLKDADKLTLGQNVTVIASHSLESIVRQPPDRWMTNARMTHYQSLLLNERVSFAPPAVLNPATLLPVESEATPVHRCSEILAEETGTRRDLKDQPLPGVPAWYTDGSSFIAEGKRRAGAAIVDGKRTVWASSLPEGTSAQKAELVALTQALRLAEGKDINIYTDSRYAFATAHIHGAIYKQRGWLTSAGKDIKNKEEILALLEAIHLPKRVAIIHCPGHQKGNDPVATGNRRADEAAKQAALSTRVLAETTKPAGKRTADGSEFEKRTADGSEFESPKKKAKVE

SEQ ID NO: 808 - protein, 2093 aa, synthetic construct
MPAAKRVKLDGGDKKYSIGLDIGTNSVGWAVITDEYKVPSKKFKVLGNTDRHSIKKNLIGALLFDSGETAEATRLKRTARRRYTRRKNRICYLQEIFSNEMAKVDDSFFHRLEESFLVEEDKKHERHPIFGNIVDEVAYHEKYPTIYHLRKKLVDSTDKADLRLIYLALAHMIKFRGHFLIEGDLNPDNSDVDKLFIQLVQTYNQLFEENPINASGVDAKAILSARLSKSRRLENLIAQLPGEKKNGLFGNLIALSLGLTPNFKSNFDLAEDAKLQLSKDTYDDDLDNLLAQIGDQYADLFLAAKNLSDAILLSDILRVNTEITKAPLSASMIKRYDEHHQDLTLLKALVRQQLPEKYKEIFFDQSKNGYAGYIDGGASQEEFYKFIKPILEKMDGTEELLVKLNREDLLRKQRTFDNGSIPHQIHLGELHAILRRQEDFYPFLKDNREKIEKILTFRIPYYVGPLARGNSRFAWMTRKSEETITPWNFEEVVDKGASAQSFIERMTNFDKNLPNEKVLPKHSLLYEYFTVYNELTKVKYVTEGMRKPAFLSGEQKKAIVDLLFKTNRKVTVKQLKEDYFKKIECFDSVEISGVEDRFNASLGTYHDLLKIIKDKDFLDNEENEDILEDIVLTLTLFEDREMIEERLKTYAHLFDDKVMKQLKRRRYTGWGRLSRKLINGIRDKQSGKTILDFLKSDGFANRNFMQLIHDDSLTFKEDIQKAQVSGQGDSLHEHIANLAGSPAIKKGILQTVKVVDELVKVMGRHKPENIVIEMARENQTTQKGQKNSRERMKRIEEGIKELGSQILKEHPVENTQLQNEKLYLYYLQNGRDMYVDQELDINRLSDYDVDHIVPQSFLKDDSIDNKVLTRSDKARGKSDNVPSEEVVKKMKNYWRQLLNAKLITQRKFDNLTKAERGGLSELDKAGFIKRQLVETRQITKHVAQILDSRMNTKYDENDKLIREVKVITLKSKLVSDFRKDFQFYKVREINNYHHAHDAYLNAVVGTALIKKYPKLESEFVYGDYKVYDVRKMIAKSEQEIGKATAKYFFYSNIMNFFKTEITLANGEIRKRPLIETNGETGEIVWDKGRDFATVRKVLSMPQVNIVKKTEVQTGGFSKESILPKRNSDKLIARKKDWDPKKYGGFDSPTVAYSVLVVAKVEKGKSKKLKSVKELLGITIMERSSFEKNPIDFLEAKGYKEVKKDLIIKLPKYSLFELENGRKRMLASAGELQKGNELALPSKYVNFLYLASHYEKLKGSPEDNEQKQLFVEQHKHYLDEIIEQISEFSKRVILADANLDKVLSAYNKHRDKPIREQAENIIHLFTLTNLGAPAAFKYFDTTIDRKRYTSTKEVLDATLIHQSITGLYETRIDLSQLGGDGGGGGGSGGGGSGGVLNLEEEYRLHEKPVPSSIDPSWLQLFPTVWAERAGMGLANQVPPVVVELRSGASPVAVRQYPMSKEAREGIRPHIQRFLDLGVLVPCQSPWNTPLLPVKKPGTNDYRPVQDLREINKRVQDIHPTVPNPYNLLSSLPPSHTWYSVLDLKDAFFCLKLHPNSQPLFAFEWRDPEKGNTGQLTWTRLPQGFKNSPTLFNEALHRDLAPFRALNPQVVLLQYVDDLLVAAPTYRDCKEGTQKLLQELSKLGYRVSAKKAQLCQKEVTYLGYLLKEGKRWLTPARKATVMKIPPPTTPRQVREFLGTAGFCRLWIPGFASLAAPLYPLTKPSIPFIWTEEHQKAFDRIKEALLSAPALALPDLTKPFTLYVDERAGVARGVLTQTLGPWRRPVAYLSKKLDPVASGWPTCLKAVAAVALLLKDADKLTLGQNVTVIASHSLESIVRQPPDRWMTNARMTHYQSLLLNERVSFAPPAVLNPATLLPVESEATPVHRCSEILAEETGTRRDLKDQPLPGVPAWYTDGSSFIAEGKRRAGAAIVDGKRTVWASSLPEGTSAQKAELVALTQALRLAEGKDINIYTDSRYAFATAHIHGAIYKQRGWLTSAGKDIKNKEEILALLEAIHLPKRVAIIHCPGHQKGNDPVATGNRRADEAAKQAALSTRVLAETTKPAGKRTADGSEFEKRTADGSEFESPKKKAKVE

SEQ ID NO: 809 - protein, 2094 aa, synthetic construct
MPAAKRVKLDGGDKKYSIGLDIGTNSVGWAVITDEYKVPSKKFKVLGNTDRHSIKKNLIGALLFDSGETAEATRLKRTARRRYTRRKNRICYLQEIFSNEMAKVDDSFFHRLEESFLVEEDKKHERHPIFGNIVDEVAYHEKYPTIYHLRKKLVDSTDKADLRLIYLALAHMIKFRGHFLIEGDLNPDNSDVDKLFIQLVQTYNQLFEENPINASGVDAKAILSARLSKSRRLENLIAQLPGEKKNGLFGNLIALSLGLTPNFKSNFDLAEDAKLQLSKDTYDDDLDNLLAQIGDQYADLFLAAKNLSDAILLSDILRVNTEITKAPLSASMIKRYDEHHQDLTLLKALVRQQLPEKYKEIFFDQSKNGYAGYIDGGASQEEFYKFIKPILEKMDGTEELLVKLNREDLLRKQRTFDNGSIPHQIHLGELHAILRRQEDFYPFLKDNREKIEKILTFRIPYYVGPLARGNSRFAWMTRKSEETITPWNFEEVVDKGASAQSFIERMTNFDKNLPNEKVLPKHSLLYEYFTVYNELTKVKYVTEGMRKPAFLSGEQKKAIVDLLFKTNRKVTVKQLKEDYFKKIECFDSVEISGVEDRFNASLGTYHDLLKIIKDKDFLDNEENEDILEDIVLTLTLFEDREMIEERLKTYAHLFDDKVMKQLKRRRYTGWGRLSRKLINGIRDKQSGKTILDFLKSDGFANRNFMQLIHDDSLTFKEDIQKAQVSGQGDSLHEHIANLAGSPAIKKGILQTVKVVDELVKVMGRHKPENIVIEMARENQTTQKGQKNSRERMKRIEEGIKELGSQILKEHPVENTQLQNEKLYLYYLQNGRDMYVDQELDINRLSDYDVDHIVPQSFLKDDSIDNKVLTRSDKARGKSDNVPSEEVVKKMKNYWRQLLNAKLITQRKFDNLTKAERGGLSELDKAGFIKRQLVETRQITKHVAQILDSRMNTKYDENDKLIREVKVITLKSKLVSDFRKDFQFYKVREINNYHHAHDAYLNAVVGTALIKKYPKLESEFVYGDYKVYDVRKMIAKSEQEIGKATAKYFFYSNIMNFFKTEITLANGEIRKRPLIETNGETGEIVWDKGRDFATVRKVLSMPQVNIVKKTEVQTGGFSKESILPKRNSDKLIARKKDWDPKKYGGFDSPTVAYSVLVVAKVEKGKSKKLKSVKELLGITIMERSSFEKNPIDFLEAKGYKEVKKDLIIKLPKYSLFELENGRKRMLASAGELQKGNELALPSKYVNFLYLASHYEKLKGSPEDNEQKQLFVEQHKHYLDEIIEQISEFSKRVILADANLDKVLSAYNKHRDKPIREQAENIIHLFTLTNLGAPAAFKYFDTTIDRKRYTSTKEVLDATLIHQSITGLYETRIDLSQLGGDGGGSSGGSEAAAKGGVLNLEEEYRLHEKPVPSSIDPSWLQLFPTVWAERAGMGLANQVPPVVVELRSGASPVAVRQYPMSKEAREGIRPHIQRFLDLGVLVPCQSPWNTPLLPVKKPGTNDYRPVQDLREINKRVQDIHPTVPNPYNLLSSLPPSHTWYSVLDLKDAFFCLKLHPNSQPLFAFEWRDPEKGNTGQLTWTRLPQGFKNSPTLFNEALHRDLAPFRALNPQVVLLQYVDDLLVAAPTYRDCKEGTQKLLQELSKLGYRVSAKKAQLCQKEVTYLGYLLKEGKRWLTPARKATVMKIPPPTTPRQVREFLGTAGFCRLWIPGFASLAAPLYPLTKPSIPFIWTEEHQKAFDRIKEALLSAPALALPDLTKPFTLYVDERAGVARGVLTQTLGPWRRPVAYLSKKLDPVASGWPTCLKAVAAVALLLKDADKLTLGQNVTVIASHSLESIVRQPPDRWMTNARMTHYQSLLLNERVSFAPPAVLNPATLLPVESEATPVHRCSEILAEETGTRRDLKDQPLPGVPAWYTDGSSFIAEGKRRAGAAIVDGKRTVWASSLPEGTSAQKAELVALTQALRLAEGKDINIYTDSRYAFATAHIHGAIYKQRGWLTSAGKDIKNKEEILALLEAIHLPKRVAIIHCPGHQKGNDPVATGNRRADEAAKQAALSTRVLAETTKPAGKRTADGSEFEKRTADGSEFESPKKKAKVE

SEQ ID NO: 810 - protein, 2089 aa, synthetic construct
MPAAKRVKLDGGDKKYSIGLDIGTNSVGWAVITDEYKVPSKKFKVLGNTDRHSIKKNLIGALLFDSGETAEATRLKRTARRRYTRRKNRICYLQEIFSNEMAKVDDSFFHRLEESFLVEEDKKHERHPIFGNIVDEVAYHEKYPTIYHLRKKLVDSTDKADLRLIYLALAHMIKFRGHFLIEGDLNPDNSDVDKLFIQLVQTYNQLFEENPINASGVDAKAILSARLSKSRRLENLIAQLPGEKKNGLFGNLIALSLGLTPNFKSNFDLAEDAKLQLSKDTYDDDLDNLLAQIGDQYADLFLAAKNLSDAILLSDILRVNTEITKAPLSASMIKRYDEHHQDLTLLKALVRQQLPEKYKEIFFDQSKNGYAGYIDGGASQEEFYKFIKPILEKMDGTEELLVKLNREDLLRKQRTFDNGSIPHQIHLGELHAILRRQEDFYPFLKDNREKIEKILTFRIPYYVGPLARGNSRFAWMTRKSEETITPWNFEEVVDKGASAQSFIERMTNFDKNLPNEKVLPKHSLLYEYFTVYNELTKVKYVTEGMRKPAFLSGEQKKAIVDLLFKTNRKVTVKQLKEDYFKKIECFDSVEISGVEDRFNASLGTYHDLLKIIKDKDFLDNEENEDILEDIVLTLTLFEDREMIEERLKTYAHLFDDKVMKQLKRRRYTGWGRLSRKLINGIRDKQSGKTILDFLKSDGFANRNFMQLIHDDSLTFKEDIQKAQVSGQGDSLHEHIANLAGSPAIKKGILQTVKVVDELVKVMGRHKPENIVIEMARENQTTQKGQKNSRERMKRIEEGIKELGSQILKEHPVENTQLQNEKLYLYYLQNGRDMYVDQELDINRLSDYDVDHIVPQSFLKDDSIDNKVLTRSDKARGKSDNVPSEEVVKKMKNYWRQLLNAKLITQRKFDNLTKAERGGLSELDKAGFIKRQLVETRQITKHVAQILDSRMNTKYDENDKLIREVKVITLKSKLVSDFRKDFQFYKVREINNYHHAHDAYLNAVVGTALIKKYPKLESEFVYGDYKVYDVRKMIAKSEQEIGKATAKYFFYSNIMNFFKTEITLANGEIRKRPLIETNGETGEIVWDKGRDFATVRKVLSMPQVNIVKKTEVQTGGFSKESILPKRNSDKLIARKKDWDPKKYGGFDSPTVAYSVLVVAKVEKGKSKKLKSVKELLGITIMERSSFEKNPIDFLEAKGYKEVKKDLIIKLPKYSLFELENGRKRMLASAGELQKGNELALPSKYVNFLYLASHYEKLKGSPEDNEQKQLFVEQHKHYLDEIIEQISEFSKRVILADANLDKVLSAYNKHRDKPIREQAENIIHLFTLTNLGAPAAFKYFDTTIDRKRYTSTKEVLDATLIHQSITGLYETRIDLSQLGGDGGPAPGGGGGVLNLEEEYRLHEKPVPSSIDPSWLQLFPTVWAERAGMGLANQVPPVVVELRSGASPVAVRQYPMSKEAREGIRPHIQRFLDLGVLVPCQSPWNTPLLPVKKPGTNDYRPVQDLREINKRVQDIHPTVPNPYNLLSSLPPSHTWYSVLDLKDAFFCLKLHPNSQPLFAFEWRDPEKGNTGQLTWTRLPQGFKNSPTLFNEALHRDLAPFRALNPQVVLLQYVDDLLVAAPTYRDCKEGTQKLLQELSKLGYRVSAKKAQLCQKEVTYLGYLLKEGKRWLTPARKATVMKIPPPTTPRQVREFLGTAGFCRLWIPGFASLAAPLYPLTKPSIPFIWTEEHQKAFDRIKEALLSAPALALPDLTKPFTLYVDERAGVARGVLTQTLGPWRRPVAYLSKKLDPVASGWPTCLKAVAAVALLLKDADKLTLGQNVTVIASHSLESIVRQPPDRWMTNARMTHYQSLLLNERVSFAPPAVLNPATLLPVESEATPVHRCSEILAEETGTRRDLKDQPLPGVPAWYTDGSSFIAEGKRRAGAAIVDGKRTVWASSLPEGTSAQKAELVALTQALRLAEGKDINIYTDSRYAFATAHIHGAIYKQRGWLTSAGKDIKNKEEILALLEAIHLPKRVAIIHCPGHQKGNDPVATGNRRADEAAKQAALSTRVLAETTKPAGKRTADGSEFEKRTADGSEFESPKKKAKVE

SEQ ID NO: 811 - protein, 2094 aa, synthetic construct
MPAAKRVKLDGGDKKYSIGLDIGTNSVGWAVITDEYKVPSKKFKVLGNTDRHSIKKNLIGALLFDSGETAEATRLKRTARRRYTRRKNRICYLQEIFSNEMAKVDDSFFHRLEESFLVEEDKKHERHPIFGNIVDEVAYHEKYPTIYHLRKKLVDSTDKADLRLIYLALAHMIKFRGHFLIEGDLNPDNSDVDKLFIQLVQTYNQLFEENPINASGVDAKAILSARLSKSRRLENLIAQLPGEKKNGLFGNLIALSLGLTPNFKSNFDLAEDAKLQLSKDTYDDDLDNLLAQIGDQYADLFLAAKNLSDAILLSDILRVNTEITKAPLSASMIKRYDEHHQDLTLLKALVRQQLPEKYKEIFFDQSKNGYAGYIDGGASQEEFYKFIKPILEKMDGTEELLVKLNREDLLRKQRTFDNGSIPHQIHLGELHAILRRQEDFYPFLKDNREKIEKILTFRIPYYVGPLARGNSRFAWMTRKSEETITPWNFEEVVDKGASAQSFIERMTNFDKNLPNEKVLPKHSLLYEYFTVYNELTKVKYVTEGMRKPAFLSGEQKKAIVDLLFKTNRKVTVKQLKEDYFKKIECFDSVEISGVEDRFNASLGTYHDLLKIIKDKDFLDNEENEDILEDIVLTLTLFEDREMIEERLKTYAHLFDDKVMKQLKRRRYTGWGRLSRKLINGIRDKQSGKTILDFLKSDGFANRNFMQLIHDDSLTFKEDIQKAQVSGQGDSLHEHIANLAGSPAIKKGILQTVKVVDELVKVMGRHKPENIVIEMARENQTTQKGQKNSRERMKRIEEGIKELGSQILKEHPVENTQLQNEKLYLYYLQNGRDMYVDQELDINRLSDYDVDHIVPQSFLKDDSIDNKVLTRSDKARGKSDNVPSEEVVKKMKNYWRQLLNAKLITQRKFDNLTKAERGGLSELDKAGFIKRQLVETRQITKHVAQILDSRMNTKYDENDKLIREVKVITLKSKLVSDFRKDFQFYKVREINNYHHAHDAYLNAVVGTALIKKYPKLESEFVYGDYKVYDVRKMIAKSEQEIGKATAKYFFYSNIMNFFKTEITLANGEIRKRPLIETNGETGEIVWDKGRDFATVRKVLSMPQVNIVKKTEVQTGGFSKESILPKRNSDKLIARKKDWDPKKYGGFDSPTVAYSVLVVAKVEKGKSKKLKSVKELLGITIMERSSFEKNPIDFLEAKGYKEVKKDLIIKLPKYSLFELENGRKRMLASAGELQKGNELALPSKYVNFLYLASHYEKLKGSPEDNEQKQLFVEQHKHYLDEIIEQISEFSKRVILADANLDKVLSAYNKHRDKPIREQAENIIHLFTLTNLGAPAAFKYFDTTIDRKRYTSTKEVLDATLIHQSITGLYETRIDLSQLGGDGGGGGEAAAKGSSGGVLNLEEEYRLHEKPVPSSIDPSWLQLFPTVWAERAGMGLANQVPPVVVELRSGASPVAVRQYPMSKEAREGIRPHIQRFLDLGVLVPCQSPWNTPLLPVKKPGTNDYRPVQDLREINKRVQDIHPTVPNPYNLLSSLPPSHTWYSVLDLKDAFFCLKLHPNSQPLFAFEWRDPEKGNTGQLTWTRLPQGFKNSPTLFNEALHRDLAPFRALNPQVVLLQYVDDLLVAAPTYRDCKEGTQKLLQELSKLGYRVSAKKAQLCQKEVTYLGYLLKEGKRWLTPARKATVMKIPPPTTPRQVREFLGTAGFCRLWIPGFASLAAPLYPLTKPSIPFIWTEEHQKAFDRIKEALLSAPALALPDLTKPFTLYVDERAGVARGVLTQTLGPWRRPVAYLSKKLDPVASGWPTCLKAVAAVALLLKDADKLTLGQNVTVIASHSLESIVRQPPDRWMTNARMTHYQSLLLNERVSFAPPAVLNPATLLPVESEATPVHRCSEILAEETGTRRDLKDQPLPGVPAWYTDGSSFIAEGKRRAGAAIVDGKRTVWASSLPEGTSAQKAELVALTQALRLAEGKDINIYTDSRYAFATAHIHGAIYKQRGWLTSAGKDIKNKEEILALLEAIHLPKRVAIIHCPGHQKGNDPVATGNRRADEAAKQAALSTRVLAETTKPAGKRTADGSEFEKRTADGSEFESPKKKAKVE

SEQ ID NO: 812 - protein, 2094 aa, synthetic construct
MPAAKRVKLDGGDKKYSIGLDIGTNSVGWAVITDEYKVPSKKFKVLGNTDRHSIKKNLIGALLFDSGETAEATRLKRTARRRYTRRKNRICYLQEIFSNEMAKVDDSFFHRLEESFLVEEDKKHERHPIFGNIVDEVAYHEKYPTIYHLRKKLVDSTDKADLRLIYLALAHMIKFRGHFLIEGDLNPDNSDVDKLFIQLVQTYNQLFEENPINASGVDAKAILSARLSKSRRLENLIAQLPGEKKNGLFGNLIALSLGLTPNFKSNFDLAEDAKLQLSKDTYDDDLDNLLAQIGDQYADLFLAAKNLSDAILLSDILRVNTEITKAPLSASMIKRYDEHHQDLTLLKALVRQQLPEKYKEIFFDQSKNGYAGYIDGGASQEEFYKFIKPILEKMDGTEELLVKLNREDLLRKQRTFDNGSIPHQIHLGELHAILRRQEDFYPFLKDNREKIEKILTFRIPYYVGPLARGNSRFAWMTRKSEETITPWNFEEVVDKGASAQSFIERMTNFDKNLPNEKVLPKHSLLYEYFTVYNELTKVKYVTEGMRKPAFLSGEQKKAIVDLLFKTNRKVTVKQLKEDYFKKIECFDSVEISGVEDRFNASLGTYHDLLKIIKDKDFLDNEENEDILEDIVLTLTLFEDREMIEERLKTYAHLFDDKVMKQLKRRRYTGWGRLSRKLINGIRDKQSGKTILDFLKSDGFANRNFMQLIHDDSLTFKEDIQKAQVSGQGDSLHEHIANLAGSPAIKKGILQTVKVVDELVKVMGRHKPENIVIEMARENQTTQKGQKNSRERMKRIEEGIKELGSQILKEHPVENTQLQNEKLYLYYLQNGRDMYVDQELDINRLSDYDVDHIVPQSFLKDDSIDNKVLTRSDKARGKSDNVPSEEVVKKMKNYWRQLLNAKLITQRKFDNLTKAERGGLSELDKAGFIKRQLVETRQITKHVAQILDSRMNTKYDENDKLIREVKVITLKSKLVSDFRKDFQFYKVREINNYHHAHDAYLNAVVGTALIKKYPKLESEFVYGDYKVYDVRKMIAKSEQEIGKATAKYFFYSNIMNFFKTEITLANGEIRKRPLIETNGETGEIVWDKGRDFATVRKVLSMPQVNIVKKTEVQTGGFSKESILPKRNSDKLIARKKDWDPKKYGGFDSPTVAYSVLVVAKVEKGKSKKLKSVKELLGITIMERSSFEKNPIDFLEAKGYKEVKKDLIIKLPKYSLFELENGRKRMLASAGELQKGNELALPSKYVNFLYLASHYEKLKGSPEDNEQKQLFVEQHKHYLDEIIEQISEFSKRVILADANLDKVLSAYNKHRDKPIREQAENIIHLFTLTNLGAPAAFKYFDTTIDRKRYTSTKEVLDATLIHQSITGLYETRIDLSQLGGDGGEAAAKGSSPAPGGVLNLEEEYRLHEKPVPSSIDPSWLQLFPTVWAERAGMGLANQVPPVVVELRSGASPVAVRQYPMSKEAREGIRPHIQRFLDLGVLVPCQSPWNTPLLPVKKPGTNDYRPVQDLREINKRVQDIHPTVPNPYNLLSSLPPSHTWYSVLDLKDAFFCLKLHPNSQPLFAFEWRDPEKGNTGQLTWTRLPQGFKNSPTLFNEALHRDLAPFRALNPQVVLLQYVDDLLVAAPTYRDCKEGTQKLLQELSKLGYRVSAKKAQLCQKEVTYLGYLLKEGKRWLTPARKATVMKIPPPTTPRQVREFLGTAGFCRLWIPGFASLAAPLYPLTKPSIPFIWTEEHQKAFDRIKEALLSAPALALPDLTKPFTLYVDERAGVARGVLTQTLGPWRRPVAYLSKKLDPVASGWPTCLKAVAAVALLLKDADKLTLGQNVTVIASHSLESIVRQPPDRWMTNARMTHYQSLLLNERVSFAPPAVLNPATLLPVESEATPVHRCSEILAEETGTRRDLKDQPLPGVPAWYTDGSSFIAEGKRRAGAAIVDGKRTVWASSLPEGTSAQKAELVALTQALRLAEGKDINIYTDSRYAFATAHIHGAIYKQRGWLTSAGKDIKNKEEILALLEAIHLPKRVAIIHCPGHQKGNDPVATGNRRADEAAKQAALSTRVLAETTKPAGKRTADGSEFEKRTADGSEFESPKKKAKVE

SEQ ID NO: 813 - protein, 2098 aa, synthetic construct
MPAAKRVKLDGGDKKYSIGLDIGTNSVGWAVITDEYKVPSKKFKVLGNTDRHSIKKNLIGALLFDSGETAEATRLKRTARRRYTRRKNRICYLQEIFSNEMAKVDDSFFHRLEESFLVEEDKKHERHPIFGNIVDEVAYHEKYPTIYHLRKKLVDSTDKADLRLIYLALAHMIKFRGHFLIEGDLNPDNSDVDKLFIQLVQTYNQLFEENPINASGVDAKAILSARLSKSRRLENLIAQLPGEKKNGLFGNLIALSLGLTPNFKSNFDLAEDAKLQLSKDTYDDDLDNLLAQIGDQYADLFLAAKNLSDAILLSDILRVNTEITKAPLSASMIKRYDEHHQDLTLLKALVRQQLPEKYKEIFFDQSKNGYAGYIDGGASQEEFYKFIKPILEKMDGTEELLVKLNREDLLRKQRTFDNGSIPHQIHLGELHAILRRQEDFYPFLKDNREKIEKILTFRIPYYVGPLARGNSRFAWMTRKSEETITPWNFEEVVDKGASAQSFIERMTNFDKNLPNEKVLPKHSLLYEYFTVYNELTKVKYVTEGMRKPAFLSGEQKKAIVDLLFKTNRKVTVKQLKEDYFKKIECFDSVEISGVEDRFNASLGTYHDLLKIIKDKDFLDNEENEDILEDIVLTLTLFEDREMIEERLKTYAHLFDDKVMKQLKRRRYTGWGRLSRKLINGIRDKQSGKTILDFLKSDGFANRNFMQLIHDDSLTFKEDIQKAQVSGQGDSLHEHIANLAGSPAIKKGILQTVKVVDELVKVMGRHKPENIVIEMARENQTTQKGQKNSRERMKRIEEGIKELGSQILKEHPVENTQLQNEKLYLYYLQNGRDMYVDQELDINRLSDYDVDHIVPQSFLKDDSIDNKVLTRSDKARGKSDNVPSEEVVKKMKNYWRQLLNAKLITQRKFDNLTKAERGGLSELDKAGFIKRQLVETRQITKHVAQILDSRMNTKYDENDKLIREVKVITLKSKLVSDFRKDFQFYKVREINNYHHAHDAYLNAVVGTALIKKYPKLESEFVYGDYKVYDVRKMIAKSEQEIGKATAKYFFYSNIMNFFKTEITLANGEIRKRPLIETNGETGEIVWDKGRDFATVRKVLSMPQVNIVKKTEVQTGGFSKESILPKRNSDKLIARKKDWDPKKYGGFDSPTVAYSVLVVAKVEKGKSKKLKSVKELLGITIMERSSFEKNPIDFLEAKGYKEVKKDLIIKLPKYSLFELENGRKRMLASAGELQKGNELALPSKYVNFLYLASHYEKLKGSPEDNEQKQLFVEQHKHYLDEIIEQISEFSKRVILADANLDKVLSAYNKHRDKPIREQAENIIHLFTLTNLGAPAAFKYFDTTIDRKRYTSTKEVLDATLIHQSITGLYETRIDLSQLGGDGGGSSGSSGSSGSSGSSGGVLNLEEEYRLHEKPVPSSIDPSWLQLFPTVWAERAGMGLANQVPPVVVELRSGASPVAVRQYPMSKEAREGIRPHIQRFLDLGVLVPCQSPWNTPLLPVKKPGTNDYRPVQDLREINKRVQDIHPTVPNPYNLLSSLPPSHTWYSVLDLKDAFFCLKLHPNSQPLFAFEWRDPEKGNTGQLTWTRLPQGFKNSPTLFNEALHRDLAPFRALNPQVVLLQYVDDLLVAAPTYRDCKEGTQKLLQELSKLGYRVSAKKAQLCQKEVTYLGYLLKEGKRWLTPARKATVMKIPPPTTPRQVREFLGTAGFCRLWIPGFASLAAPLYPLTKPSIPFIWTEEHQKAFDRIKEALLSAPALALPDLTKPFTLYVDERAGVARGVLTQTLGPWRRPVAYLSKKLDPVASGWPTCLKAVAAVALLLKDADKLTLGQNVTVIASHSLESIVRQPPDRWMTNARMTHYQSLLLNERVSFAPPAVLNPATLLPVESEATPVHRCSEILAEETGTRRDLKDQPLPGVPAWYTDGSSFIAEGKRRAGAAIVDGKRTVWASSLPEGTSAQKAELVALTQALRLAEGKDINIYTDSRYAFATAHIHGAIYKQRGWLTSAGKDIKNKEEILALLEAIHLPKRVAIIHCPGHQKGNDPVATGNRRADEAAKQAALSTRVLAETTKPAGKRTADGSEFEKRTADGSEFESPKKKAKVE

SEQ ID NO: 814 - protein, 2094 aa, synthetic construct
MPAAKRVKLDGGDKKYSIGLDIGTNSVGWAVITDEYKVPSKKFKVLGNTDRHSIKKNLIGALLFDSGETAEATRLKRTARRRYTRRKNRICYLQEIFSNEMAKVDDSFFHRLEESFLVEEDKKHERHPIFGNIVDEVAYHEKYPTIYHLRKKLVDSTDKADLRLIYLALAHMIKFRGHFLIEGDLNPDNSDVDKLFIQLVQTYNQLFEENPINASGVDAKAILSARLSKSRRLENLIAQLPGEKKNGLFGNLIALSLGLTPNFKSNFDLAEDAKLQLSKDTYDDDLDNLLAQIGDQYADLFLAAKNLSDAILLSDILRVNTEITKAPLSASMIKRYDEHHQDLTLLKALVRQQLPEKYKEIFFDQSKNGYAGYIDGGASQEEFYKFIKPILEKMDGTEELLVKLNREDLLRKQRTFDNGSIPHQIHLGELHAILRRQEDFYPFLKDNREKIEKILTFRIPYYVGPLARGNSRFAWMTRKSEETITPWNFEEVVDKGASAQSFIERMTNFDKNLPNEKVLPKHSLLYEYFTVYNELTKVKYVTEGMRKPAFLSGEQKKAIVDLLFKTNRKVTVKQLKEDYFKKIECFDSVEISGVEDRFNASLGTYHDLLKIIKDKDFLDNEENEDILEDIVLTLTLFEDREMIEERLKTYAHLFDDKVMKQLKRRRYTGWGRLSRKLINGIRDKQSGKTILDFLKSDGFANRNFMQLIHDDSLTFKEDIQKAQVSGQGDSLHEHIANLAGSPAIKKGILQTVKVVDELVKVMGRHKPENIVIEMARENQTTQKGQKNSRERMKRIEEGIKELGSQILKEHPVENTQLQNEKLYLYYLQNGRDMYVDQELDINRLSDYDVDHIVPQSFLKDDSIDNKVLTRSDKARGKSDNVPSEEVVKKMKNYWRQLLNAKLITQRKFDNLTKAERGGLSELDKAGFIKRQLVETRQITKHVAQILDSRMNTKYDENDKLIREVKVITLKSKLVSDFRKDFQFYKVREINNYHHAHDAYLNAVVGTALIKKYPKLESEFVYGDYKVYDVRKMIAKSEQEIGKATAKYFFYSNIMNFFKTEITLANGEIRKRPLIETNGETGEIVWDKGRDFATVRKVLSMPQVNIVKKTEVQTGGFSKESILPKRNSDKLIARKKDWDPKKYGGFDSPTVAYSVLVVAKVEKGKSKKLKSVKELLGITIMERSSFEKNPIDFLEAKGYKEVKKDLIIKLPKYSLFELENGRKRMLASAGELQKGNELALPSKYVNFLYLASHYEKLKGSPEDNEQKQLFVEQHKHYLDEIIEQISEFSKRVILADANLDKVLSAYNKHRDKPIREQAENIIHLFTLTNLGAPAAFKYFDTTIDRKRYTSTKEVLDATLIHQSITGLYETRIDLSQLGGDGGPAPAPAPAPAPGGVLNLEEEYRLHEKPVPSSIDPSWLQLFPTVWAERAGMGLANQVPPVVVELRSGASPVAVRQYPMSKEAREGIRPHIQRFLDLGVLVPCQSPWNTPLLPVKKPGTNDYRPVQDLREINKRVQDIHPTVPNPYNLLSSLPPSHTWYSVLDLKDAFFCLKLHPNSQPLFAFEWRDPEKGNTGQLTWTRLPQGFKNSPTLFNEALHRDLAPFRALNPQVVLLQYVDDLLVAAPTYRDCKEGTQKLLQELSKLGYRVSAKKAQLCQKEVTYLGYLLKEGKRWLTPARKATVMKIPPPTTPRQVREFLGTAGFCRLWIPGFASLAAPLYPLTKPSIPFIWTEEHQKAFDRIKEALLSAPALALPDLTKPFTLYVDERAGVARGVLTQTLGPWRRPVAYLSKKLDPVASGWPTCLKAVAAVALLLKDADKLTLGQNVTVIASHSLESIVRQPPDRWMTNARMTHYQSLLLNERVSFAPPAVLNPATLLPVESEATPVHRCSEILAEETGTRRDLKDQPLPGVPAWYTDGSSFIAEGKRRAGAAIVDGKRTVWASSLPEGTSAQKAELVALTQALRLAEGKDINIYTDSRYAFATAHIHGAIYKQRGWLTSAGKDIKNKEEILALLEAIHLPKRVAIIHCPGHQKGNDPVATGNRRADEAAKQAALSTRVLAETTKPAGKRTADGSEFEKRTADGSEFESPKKKAKVE

SEQ ID NO: 815 - protein, 2086 aa, synthetic construct
MPAAKRVKLDGGDKKYSIGLDIGTNSVGWAVITDEYKVPSKKFKVLGNTDRHSIKKNLIGALLFDSGETAEATRLKRTARRRYTRRKNRICYLQEIFSNEMAKVDDSFFHRLEESFLVEEDKKHERHPIFGNIVDEVAYHEKYPTIYHLRKKLVDSTDKADLRLIYLALAHMIKFRGHFLIEGDLNPDNSDVDKLFIQLVQTYNQLFEENPINASGVDAKAILSARLSKSRRLENLIAQLPGEKKNGLFGNLIALSLGLTPNFKSNFDLAEDAKLQLSKDTYDDDLDNLLAQIGDQYADLFLAAKNLSDAILLSDILRVNTEITKAPLSASMIKRYDEHHQDLTLLKALVRQQLPEKYKEIFFDQSKNGYAGYIDGGASQEEFYKFIKPILEKMDGTEELLVKLNREDLLRKQRTFDNGSIPHQIHLGELHAILRRQEDFYPFLKDNREKIEKILTFRIPYYVGPLARGNSRFAWMTRKSEETITPWNFEEVVDKGASAQSFIERMTNFDKNLPNEKVLPKHSLLYEYFTVYNELTKVKYVTEGMRKPAFLSGEQKKAIVDLLFKTNRKVTVKQLKEDYFKKIECFDSVEISGVEDRFNASLGTYHDLLKIIKDKDFLDNEENEDILEDIVLTLTLFEDREMIEERLKTYAHLFDDKVMKQLKRRRYTGWGRLSRKLINGIRDKQSGKTILDFLKSDGFANRNFMQLIHDDSLTFKEDIQKAQVSGQGDSLHEHIANLAGSPAIKKGILQTVKVVDELVKVMGRHKPENIVIEMARENQTTQKGQKNSRERMKRIEEGIKELGSQILKEHPVENTQLQNEKLYLYYLQNGRDMYVDQELDINRLSDYDVDHIVPQSFLKDDSIDNKVLTRSDKARGKSDNVPSEEVVKKMKNYWRQLLNAKLITQRKFDNLTKAERGGLSELDKAGFIKRQLVETRQITKHVAQILDSRMNTKYDENDKLIREVKVITLKSKLVSDFRKDFQFYKVREINNYHHAHDAYLNAVVGTALIKKYPKLESEFVYGDYKVYDVRKMIAKSEQEIGKATAKYFFYSNIMNFFKTEITLANGEIRKRPLIETNGETGEIVWDKGRDFATVRKVLSMPQVNIVKKTEVQTGGFSKESILPKRNSDKLIARKKDWDPKKYGGFDSPTVAYSVLVVAKVEKGKSKKLKSVKELLGITIMERSSFEKNPIDFLEAKGYKEVKKDLIIKLPKYSLFELENGRKRMLASAGELQKGNELALPSKYVNFLYLASHYEKLKGSPEDNEQKQLFVEQHKHYLDEIIEQISEFSKRVILADANLDKVLSAYNKHRDKPIREQAENIIHLFTLTNLGAPAAFKYFDTTIDRKRYTSTKEVLDATLIHQSITGLYETRIDLSQLGGDGGGGGGGVLNLEEEYRLHEKPVPSSIDPSWLQLFPTVWAERAGMGLANQVPPVVVELRSGASPVAVRQYPMSKEAREGIRPHIQRFLDLGVLVPCQSPWNTPLLPVKKPGTNDYRPVQDLREINKRVQDIHPTVPNPYNLLSSLPPSHTWYSVLDLKDAFFCLKLHPNSQPLFAFEWRDPEKGNTGQLTWTRLPQGFKNSPTLFNEALHRDLAPFRALNPQVVLLQYVDDLLVAAPTYRDCKEGTQKLLQELSKLGYRVSAKKAQLCQKEVTYLGYLLKEGKRWLTPARKATVMKIPPPTTPRQVREFLGTAGFCRLWIPGFASLAAPLYPLTKPSIPFIWTEEHQKAFDRIKEALLSAPALALPDLTKPFTLYVDERAGVARGVLTQTLGPWRRPVAYLSKKLDPVASGWPTCLKAVAAVALLLKDADKLTLGQNVTVIASHSLESIVRQPPDRWMTNARMTHYQSLLLNERVSFAPPAVLNPATLLPVESEATPVHRCSEILAEETGTRRDLKDQPLPGVPAWYTDGSSFIAEGKRRAGAAIVDGKRTVWASSLPEGTSAQKAELVALTQALRLAEGKDINIYTDSRYAFATAHIHGAIYKQRGWLTSAGKDIKNKEEILALLEAIHLPKRVAIIHCPGHQKGNDPVATGNRRADEAAKQAALSTRVLAETTKPAGKRTADGSEFEKRTADGSEFESPKKKAKVE

SEQ ID NO: 816 - protein, 2087 aa, synthetic construct
MPAAKRVKLDGGDKKYSIGLDIGTNSVGWAVITDEYKVPSKKFKVLGNTDRHSIKKNLIGALLFDSGETAEATRLKRTARRRYTRRKNRICYLQEIFSNEMAKVDDSFFHRLEESFLVEEDKKHERHPIFGNIVDEVAYHEKYPTIYHLRKKLVDSTDKADLRLIYLALAHMIKFRGHFLIEGDLNPDNSDVDKLFIQLVQTYNQLFEENPINASGVDAKAILSARLSKSRRLENLIAQLPGEKKNGLFGNLIALSLGLTPNFKSNFDLAEDAKLQLSKDTYDDDLDNLLAQIGDQYADLFLAAKNLSDAILLSDILRVNTEITKAPLSASMIKRYDEHHQDLTLLKALVRQQLPEKYKEIFFDQSKNGYAGYIDGGASQEEFYKFIKPILEKMDGTEELLVKLNREDLLRKQRTFDNGSIPHQIHLGELHAILRRQEDFYPFLKDNREKIEKILTFRIPYYVGPLARGNSRFAWMTRKSEETITPWNFEEVVDKGASAQSFIERMTNFDKNLPNEKVLPKHSLLYEYFTVYNELTKVKYVTEGMRKPAFLSGEQKKAIVDLLFKTNRKVTVKQLKEDYFKKIECFDSVEISGVEDRFNASLGTYHDLLKIIKDKDFLDNEENEDILEDIVLTLTLFEDREMIEERLKTYAHLFDDKVMKQLKRRRYTGWGRLSRKLINGIRDKQSGKTILDFLKSDGFANRNFMQLIHDDSLTFKEDIQKAQVSGQGDSLHEHIANLAGSPAIKKGILQTVKVVDELVKVMGRHKPENIVIEMARENQTTQKGQKNSRERMKRIEEGIKELGSQILKEHPVENTQLQNEKLYLYYLQNGRDMYVDQELDINRLSDYDVDHIVPQSFLKDDSIDNKVLTRSDKARGKSDNVPSEEVVKKMKNYWRQLLNAKLITQRKFDNLTKAERGGLSELDKAGFIKRQLVETRQITKHVAQILDSRMNTKYDENDKLIREVKVITLKSKLVSDFRKDFQFYKVREINNYHHAHDAYLNAVVGTALIKKYPKLESEFVYGDYKVYDVRKMIAKSEQEIGKATAKYFFYSNIMNFFKTEITLANGEIRKRPLIETNGETGEIVWDKGRDFATVRKVLSMPQVNIVKKTEVQTGGFSKESILPKRNSDKLIARKKDWDPKKYGGFDSPTVAYSVLVVAKVEKGKSKKLKSVKELLGITIMERSSFEKNPIDFLEAKGYKEVKKDLIIKLPKYSLFELENGRKRMLASAGELQKGNELALPSKYVNFLYLASHYEKLKGSPEDNEQKQLFVEQHKHYLDEIIEQISEFSKRVILADANLDKVLSAYNKHRDKPIREQAENIIHLFTLTNLGAPAAFKYFDTTIDRKRYTSTKEVLDATLIHQSITGLYETRIDLSQLGGDGGGGGGGGVLNLEEEYRLHEKPVPSSIDPSWLQLFPTVWAERAGMGLANQVPPVVVELRSGASPVAVRQYPMSKEAREGIRPHIQRFLDLGVLVPCQSPWNTPLLPVKKPGTNDYRPVQDLREINKRVQDIHPTVPNPYNLLSSLPPSHTWYSVLDLKDAFFCLKLHPNSQPLFAFEWRDPEKGNTGQLTWTRLPQGFKNSPTLFNEALHRDLAPFRALNPQVVLLQYVDDLLVAAPTYRDCKEGTQKLLQELSKLGYRVSAKKAQLCQKEVTYLGYLLKEGKRWLTPARKATVMKIPPPTTPRQVREFLGTAGFCRLWIPGFASLAAPLYPLTKPSIPFIWTEEHQKAFDRIKEALLSAPALALPDLTKPFTLYVDERAGVARGVLTQTLGPWRRPVAYLSKKLDPVASGWPTCLKAVAAVALLLKDADKLTLGQNVTVIASHSLESIVRQPPDRWMTNARMTHYQSLLLNERVSFAPPAVLNPATLLPVESEATPVHRCSEILAEETGTRRDLKDQPLPGVPAWYTDGSSFIAEGKRRAGAAIVDGKRTVWASSLPEGTSAQKAELVALTQALRLAEGKDINIYTDSRYAFATAHIHGAIYKQRGWLTSAGKDIKNKEEILALLEAIHLPKRVAIIHCPGHQKGNDPVATGNRRADEAAKQAALSTRVLAETTKPAGKRTADGSEFEKRTADGSEFESPKKKAKVE

SEQ ID NO: 817 - protein, 2091 aa, synthetic construct
MPAAKRVKLDGGDKKYSIGLDIGTNSVGWAVITDEYKVPSKKFKVLGNTDRHSIKKNLIGALLFDSGETAEATRLKRTARRRYTRRKNRICYLQEIFSNEMAKVDDSFFHRLEESFLVEEDKKHERHPIFGNIVDEVAYHEKYPTIYHLRKKLVDSTDKADLRLIYLALAHMIKFRGHFLIEGDLNPDNSDVDKLFIQLVQTYNQLFEENPINASGVDAKAILSARLSKSRRLENLIAQLPGEKKNGLFGNLIALSLGLTPNFKSNFDLAEDAKLQLSKDTYDDDLDNLLAQIGDQYADLFLAAKNLSDAILLSDILRVNTEITKAPLSASMIKRYDEHHQDLTLLKALVRQQLPEKYKEIFFDQSKNGYAGYIDGGASQEEFYKFIKPILEKMDGTEELLVKLNREDLLRKQRTFDNGSIPHQIHLGELHAILRRQEDFYPFLKDNREKIEKILTFRIPYYVGPLARGNSRFAWMTRKSEETITPWNFEEVVDKGASAQSFIERMTNFDKNLPNEKVLPKHSLLYEYFTVYNELTKVKYVTEGMRKPAFLSGEQKKAIVDLLFKTNRKVTVKQLKEDYFKKIECFDSVEISGVEDRFNASLGTYHDLLKIIKDKDFLDNEENEDILEDIVLTLTLFEDREMIEERLKTYAHLFDDKVMKQLKRRRYTGWGRLSRKLINGIRDKQSGKTILDFLKSDGFANRNFMQLIHDDSLTFKEDIQKAQVSGQGDSLHEHIANLAGSPAIKKGILQTVKVVDELVKVMGRHKPENIVIEMARENQTTQKGQKNSRERMKRIEEGIKELGSQILKEHPVENTQLQNEKLYLYYLQNGRDMYVDQELDINRLSDYDVDHIVPQSFLKDDSIDNKVLTRSDKARGKSDNVPSEEVVKKMKNYWRQLLNAKLITQRKFDNLTKAERGGLSELDKAGFIKRQLVETRQITKHVAQILDSRMNTKYDENDKLIREVKVITLKSKLVSDFRKDFQFYKVREINNYHHAHDAYLNAVVGTALIKKYPKLESEFVYGDYKVYDVRKMIAKSEQEIGKATAKYFFYSNIMNFFKTEITLANGEIRKRPLIETNGETGEIVWDKGRDFATVRKVLSMPQVNIVKKTEVQTGGFSKESILPKRNSDKLIARKKDWDPKKYGGFDSPTVAYSVLVVAKVEKGKSKKLKSVKELLGITIMERSSFEKNPIDFLEAKGYKEVKKDLIIKLPKYSLFELENGRKRMLASAGELQKGNELALPSKYVNFLYLASHYEKLKGSPEDNEQKQLFVEQHKHYLDEIIEQISEFSKRVILADANLDKVLSAYNKHRDKPIREQAENIIHLFTLTNLGAPAAFKYFDTTIDRKRYTSTKEVLDATLIHQSITGLYETRIDLSQLGGDGGEAAAKGGGGGVLNLEEEYRLHEKPVPSSIDPSWLQLFPTVWAERAGMGLANQVPPVVVELRSGASPVAVRQYPMSKEAREGIRPHIQRFLDLGVLVPCQSPWNTPLLPVKKPGTNDYRPVQDLREINKRVQDIHPTVPNPYNLLSSLPPSHTWYSVLDLKDAFFCLKLHPNSQPLFAFEWRDPEKGNTGQLTWTRLPQGFKNSPTLFNEALHRDLAPFRALNPQVVLLQYVDDLLVAAPTYRDCKEGTQKLLQELSKLGYRVSAKKAQLCQKEVTYLGYLLKEGKRWLTPARKATVMKIPPPTTPRQVREFLGTAGFCRLWIPGFASLAAPLYPLTKPSIPFIWTEEHQKAFDRIKEALLSAPALALPDLTKPFTLYVDERAGVARGVLTQTLGPWRRPVAYLSKKLDPVASGWPTCLKAVAAVALLLKDADKLTLGQNVTVIASHSLESIVRQPPDRWMTNARMTHYQSLLLNERVSFAPPAVLNPATLLPVESEATPVHRCSEILAEETGTRRDLKDQPLPGVPAWYTDGSSFIAEGKRRAGAAIVDGKRTVWASSLPEGTSAQKAELVALTQALRLAEGKDINIYTDSRYAFATAHIHGAIYKQRGWLTSAGKDIKNKEEILALLEAIHLPKRVAIIHCPGHQKGNDPVATGNRRADEAAKQAALSTRVLAETTKPAGKRTADGSEFEKRTADGSEFESPKKKAKVE

SEQ ID NO: 818 - protein, 2101 aa, synthetic construct
MPAAKRVKLDGGDKKYSIGLDIGTNSVGWAVITDEYKVPSKKFKVLGNTDRHSIKKNLIGALLFDSGETAEATRLKRTARRRYTRRKNRICYLQEIFSNEMAKVDDSFFHRLEESFLVEEDKKHERHPIFGNIVDEVAYHEKYPTIYHLRKKLVDSTDKADLRLIYLALAHMIKFRGHFLIEGDLNPDNSDVDKLFIQLVQTYNQLFEENPINASGVDAKAILSARLSKSRRLENLIAQLPGEKKNGLFGNLIALSLGLTPNFKSNFDLAEDAKLQLSKDTYDDDLDNLLAQIGDQYADLFLAAKNLSDAILLSDILRVNTEITKAPLSASMIKRYDEHHQDLTLLKALVRQQLPEKYKEIFFDQSKNGYAGYIDGGASQEEFYKFIKPILEKMDGTEELLVKLNREDLLRKQRTFDNGSIPHQIHLGELHAILRRQEDFYPFLKDNREKIEKILTFRIPYYVGPLARGNSRFAWMTRKSEETITPWNFEEVVDKGASAQSFIERMTNFDKNLPNEKVLPKHSLLYEYFTVYNELTKVKYVTEGMRKPAFLSGEQKKAIVDLLFKTNRKVTVKQLKEDYFKKIECFDSVEISGVEDRFNASLGTYHDLLKIIKDKDFLDNEENEDILEDIVLTLTLFEDREMIEERLKTYAHLFDDKVMKQLKRRRYTGWGRLSRKLINGIRDKQSGKTILDFLKSDGFANRNFMQLIHDDSLTFKEDIQKAQVSGQGDSLHEHIANLAGSPAIKKGILQTVKVVDELVKVMGRHKPENIVIEMARENQTTQKGQKNSRERMKRIEEGIKELGSQILKEHPVENTQLQNEKLYLYYLQNGRDMYVDQELDINRLSDYDVDHIVPQSFLKDDSIDNKVLTRSDKARGKSDNVPSEEVVKKMKNYWRQLLNAKLITQRKFDNLTKAERGGLSELDKAGFIKRQLVETRQITKHVAQILDSRMNTKYDENDKLIREVKVITLKSKLVSDFRKDFQFYKVREINNYHHAHDAYLNAVVGTALIKKYPKLESEFVYGDYKVYDVRKMIAKSEQEIGKATAKYFFYSNIMNFFKTEITLANGEIRKRPLIETNGETGEIVWDKGRDFATVRKVLSMPQVNIVKKTEVQTGGFSKESILPKRNSDKLIARKKDWDPKKYGGFDSPTVAYSVLVVAKVEKGKSKKLKSVKELLGITIMERSSFEKNPIDFLEAKGYKEVKKDLIIKLPKYSLFELENGRKRMLASAGELQKGNELALPSKYVNFLYLASHYEKLKGSPEDNEQKQLFVEQHKHYLDEIIEQISEFSKRVILADANLDKVLSAYNKHRDKPIREQAENIIHLFTLTNLGAPAAFKYFDTTIDRKRYTSTKEVLDATLIHQSITGLYETRIDLSQLGGDGGGSSGSSGSSGSSGSSGSSGGVLNLEEEYRLHEKPVPSSIDPSWLQLFPTVWAERAGMGLANQVPPVVVELRSGASPVAVRQYPMSKEAREGIRPHIQRFLDLGVLVPCQSPWNTPLLPVKKPGTNDYRPVQDLREINKRVQDIHPTVPNPYNLLSSLPPSHTWYSVLDLKDAFFCLKLHPNSQPLFAFEWRDPEKGNTGQLTWTRLPQGFKNSPTLFNEALHRDLAPFRALNPQVVLLQYVDDLLVAAPTYRDCKEGTQKLLQELSKLGYRVSAKKAQLCQKEVTYLGYLLKEGKRWLTPARKATVMKIPPPTTPRQVREFLGTAGFCRLWIPGFASLAAPLYPLTKPSIPFIWTEEHQKAFDRIKEALLSAPALALPDLTKPFTLYVDERAGVARGVLTQTLGPWRRPVAYLSKKLDPVASGWPTCLKAVAAVALLLKDADKLTLGQNVTVIASHSLESIVRQPPDRWMTNARMTHYQSLLLNERVSFAPPAVLNPATLLPVESEATPVHRCSEILAEETGTRRDLKDQPLPGVPAWYTDGSSFIAEGKRRAGAAIVDGKRTVWASSLPEGTSAQKAELVALTQALRLAEGKDINIYTDSRYAFATAHIHGAIYKQRGWLTSAGKDIKNKEEILALLEAIHLPKRVAIIHCPGHQKGNDPVATGNRRADEAAKQAALSTRVLAETTKPAGKRTADGSEFEKRTADGSEFESPKKKAKVE

SEQ ID NO: 819 - protein, 2091 aa, synthetic construct
MPAAKRVKLDGGDKKYSIGLDIGTNSVGWAVITDEYKVPSKKFKVLGNTDRHSIKKNLIGALLFDSGETAEATRLKRTARRRYTRRKNRICYLQEIFSNEMAKVDDSFFHRLEESFLVEEDKKHERHPIFGNIVDEVAYHEKYPTIYHLRKKLVDSTDKADLRLIYLALAHMIKFRGHFLIEGDLNPDNSDVDKLFIQLVQTYNQLFEENPINASGVDAKAILSARLSKSRRLENLIAQLPGEKKNGLFGNLIALSLGLTPNFKSNFDLAEDAKLQLSKDTYDDDLDNLLAQIGDQYADLFLAAKNLSDAILLSDILRVNTEITKAPLSASMIKRYDEHHQDLTLLKALVRQQLPEKYKEIFFDQSKNGYAGYIDGGASQEEFYKFIKPILEKMDGTEELLVKLNREDLLRKQRTFDNGSIPHQIHLGELHAILRRQEDFYPFLKDNREKIEKILTFRIPYYVGPLARGNSRFAWMTRKSEETITPWNFEEVVDKGASAQSFIERMTNFDKNLPNEKVLPKHSLLYEYFTVYNELTKVKYVTEGMRKPAFLSGEQKKAIVDLLFKTNRKVTVKQLKEDYFKKIECFDSVEISGVEDRFNASLGTYHDLLKIIKDKDFLDNEENEDILEDIVLTLTLFEDREMIEERLKTYAHLFDDKVMKQLKRRRYTGWGRLSRKLINGIRDKQSGKTILDFLKSDGFANRNFMQLIHDDSLTFKEDIQKAQVSGQGDSLHEHIANLAGSPAIKKGILQTVKVVDELVKVMGRHKPENIVIEMARENQTTQKGQKNSRERMKRIEEGIKELGSQILKEHPVENTQLQNEKLYLYYLQNGRDMYVDQELDINRLSDYDVDHIVPQSFLKDDSIDNKVLTRSDKARGKSDNVPSEEVVKKMKNYWRQLLNAKLITQRKFDNLTKAERGGLSELDKAGFIKRQLVETRQITKHVAQILDSRMNTKYDENDKLIREVKVITLKSKLVSDFRKDFQFYKVREINNYHHAHDAYLNAVVGTALIKKYPKLESEFVYGDYKVYDVRKMIAKSEQEIGKATAKYFFYSNIMNFFKTEITLANGEIRKRPLIETNGETGEIVWDKGRDFATVRKVLSMPQVNIVKKTEVQTGGFSKESILPKRNSDKLIARKKDWDPKKYGGFDSPTVAYSVLVVAKVEKGKSKKLKSVKELLGITIMERSSFEKNPIDFLEAKGYKEVKKDLIIKLPKYSLFELENGRKRMLASAGELQKGNELALPSKYVNFLYLASHYEKLKGSPEDNEQKQLFVEQHKHYLDEIIEQISEFSKRVILADANLDKVLSAYNKHRDKPIREQAENIIHLFTLTNLGAPAAFKYFDTTIDRKRYTSTKEVLDATLIHQSITGLYETRIDLSQLGGDGGPAPEAAAKGGVLNLEEEYRLHEKPVPSSIDPSWLQLFPTVWAERAGMGLANQVPPVVVELRSGASPVAVRQYPMSKEAREGIRPHIQRFLDLGVLVPCQSPWNTPLLPVKKPGTNDYRPVQDLREINKRVQDIHPTVPNPYNLLSSLPPSHTWYSVLDLKDAFFCLKLHPNSQPLFAFEWRDPEKGNTGQLTWTRLPQGFKNSPTLFNEALHRDLAPFRALNPQVVLLQYVDDLLVAAPTYRDCKEGTQKLLQELSKLGYRVSAKKAQLCQKEVTYLGYLLKEGKRWLTPARKATVMKIPPPTTPRQVREFLGTAGFCRLWIPGFASLAAPLYPLTKPSIPFIWTEEHQKAFDRIKEALLSAPALALPDLTKPFTLYVDERAGVARGVLTQTLGPWRRPVAYLSKKLDPVASGWPTCLKAVAAVALLLKDADKLTLGQNVTVIASHSLESIVRQPPDRWMTNARMTHYQSLLLNERVSFAPPAVLNPATLLPVESEATPVHRCSEILAEETGTRRDLKDQPLPGVPAWYTDGSSFIAEGKRRAGAAIVDGKRTVWASSLPEGTSAQKAELVALTQALRLAEGKDINIYTDSRYAFATAHIHGAIYKQRGWLTSAGKDIKNKEEILALLEAIHLPKRVAIIHCPGHQKGNDPVATGNRRADEAAKQAALSTRVLAETTKPAGKRTADGSEFEKRTADGSEFESPKKKAKVE

SEQ ID NO: 820 - protein, 2094 aa, synthetic construct
MPAAKRVKLDGGDKKYSIGLDIGTNSVGWAVITDEYKVPSKKFKVLGNTDRHSIKKNLIGALLFDSGETAEATRLKRTARRRYTRRKNRICYLQEIFSNEMAKVDDSFFHRLEESFLVEEDKKHERHPIFGNIVDEVAYHEKYPTIYHLRKKLVDSTDKADLRLIYLALAHMIKFRGHFLIEGDLNPDNSDVDKLFIQLVQTYNQLFEENPINASGVDAKAILSARLSKSRRLENLIAQLPGEKKNGLFGNLIALSLGLTPNFKSNFDLAEDAKLQLSKDTYDDDLDNLLAQIGDQYADLFLAAKNLSDAILLSDILRVNTEITKAPLSASMIKRYDEHHQDLTLLKALVRQQLPEKYKEIFFDQSKNGYAGYIDGGASQEEFYKFIKPILEKMDGTEELLVKLNREDLLRKQRTFDNGSIPHQIHLGELHAILRRQEDFYPFLKDNREKIEKILTFRIPYYVGPLARGNSRFAWMTRKSEETITPWNFEEVVDKGASAQSFIERMTNFDKNLPNEKVLPKHSLLYEYFTVYNELTKVKYVTEGMRKPAFLSGEQKKAIVDLLFKTNRKVTVKQLKEDYFKKIECFDSVEISGVEDRFNASLGTYHDLLKIIKDKDFLDNEENEDILEDIVLTLTLFEDREMIEERLKTYAHLFDDKVMKQLKRRRYTGWGRLSRKLINGIRDKQSGKTILDFLKSDGFANRNFMQLIHDDSLTFKEDIQKAQVSGQGDSLHEHIANLAGSPAIKKGILQTVKVVDELVKVMGRHKPENIVIEMARENQTTQKGQKNSRERMKRIEEGIKELGSQILKEHPVENTQLQNEKLYLYYLQNGRDMYVDQELDINRLSDYDVDHIVPQSFLKDDSIDNKVLTRSDKARGKSDNVPSEEVVKKMKNYWRQLLNAKLITQRKFDNLTKAERGGLSELDKAGFIKRQLVETRQITKHVAQILDSRMNTKYDENDKLIREVKVITLKSKLVSDFRKDFQFYKVREINNYHHAHDAYLNAVVGTALIKKYPKLESEFVYGDYKVYDVRKMIAKSEQEIGKATAKYFFYSNIMNFFKTEITLANGEIRKRPLIETNGETGEIVWDKGRDFATVRKVLSMPQVNIVKKTEVQTGGFSKESILPKRNSDKLIARKKDWDPKKYGGFDSPTVAYSVLVVAKVEKGKSKKLKSVKELLGITIMERSSFEKNPIDFLEAKGYKEVKKDLIIKLPKYSLFELENGRKRMLASAGELQKGNELALPSKYVNFLYLASHYEKLKGSPEDNEQKQLFVEQHKHYLDEIIEQISEFSKRVILADANLDKVLSAYNKHRDKPIREQAENIIHLFTLTNLGAPAAFKYFDTTIDRKRYTSTKEVLDATLIHQSITGLYETRIDLSQLGGDGGEAAAKGGSGSSGGVLNLEEEYRLHEKPVPSSIDPSWLQLFPTVWAERAGMGLANQVPPVVVELRSGASPVAVRQYPMSKEAREGIRPHIQRFLDLGVLVPCQSPWNTPLLPVKKPGTNDYRPVQDLREINKRVQDIHPTVPNPYNLLSSLPPSHTWYSVLDLKDAFFCLKLHPNSQPLFAFEWRDPEKGNTGQLTWTRLPQGFKNSPTLFNEALHRDLAPFRALNPQVVLLQYVDDLLVAAPTYRDCKEGTQKLLQELSKLGYRVSAKKAQLCQKEVTYLGYLLKEGKRWLTPARKATVMKIPPPTTPRQVREFLGTAGFCRLWIPGFASLAAPLYPLTKPSIPFIWTEEHQKAFDRIKEALLSAPALALPDLTKPFTLYVDERAGVARGVLTQTLGPWRRPVAYLSKKLDPVASGWPTCLKAVAAVALLLKDADKLTLGQNVTVIASHSLESIVRQPPDRWMTNARMTHYQSLLLNERVSFAPPAVLNPATLLPVESEATPVHRCSEILAEETGTRRDLKDQPLPGVPAWYTDGSSFIAEGKRRAGAAIVDGKRTVWASSLPEGTSAQKAELVALTQALRLAEGKDINIYTDSRYAFATAHIHGAIYKQRGWLTSAGKDIKNKEEILALLEAIHLPKRVAIIHCPGHQKGNDPVATGNRRADEAAKQAALSTRVLAETTKPAGKRTADGSEFEKRTADGSEFESPKKKAKVE

SEQ ID NO: 821 - protein, 2092 aa, synthetic construct
MPAAKRVKLDGGDKKYSIGLDIGTNSVGWAVITDEYKVPSKKFKVLGNTDRHSIKKNLIGALLFDSGETAEATRLKRTARRRYTRRKNRICYLQEIFSNEMAKVDDSFFHRLEESFLVEEDKKHERHPIFGNIVDEVAYHEKYPTIYHLRKKLVDSTDKADLRLIYLALAHMIKFRGHFLIEGDLNPDNSDVDKLFIQLVQTYNQLFEENPINASGVDAKAILSARLSKSRRLENLIAQLPGEKKNGLFGNLIALSLGLTPNFKSNFDLAEDAKLQLSKDTYDDDLDNLLAQIGDQYADLFLAAKNLSDAILLSDILRVNTEITKAPLSASMIKRYDEHHQDLTLLKALVRQQLPEKYKEIFFDQSKNGYAGYIDGGASQEEFYKFIKPILEKMDGTEELLVKLNREDLLRKQRTFDNGSIPHQIHLGELHAILRRQEDFYPFLKDNREKIEKILTFRIPYYVGPLARGNSRFAWMTRKSEETITPWNFEEVVDKGASAQSFIERMTNFDKNLPNEKVLPKHSLLYEYFTVYNELTKVKYVTEGMRKPAFLSGEQKKAIVDLLFKTNRKVTVKQLKEDYFKKIECFDSVEISGVEDRFNASLGTYHDLLKIIKDKDFLDNEENEDILEDIVLTLTLFEDREMIEERLKTYAHLFDDKVMKQLKRRRYTGWGRLSRKLINGIRDKQSGKTILDFLKSDGFANRNFMQLIHDDSLTFKEDIQKAQVSGQGDSLHEHIANLAGSPAIKKGILQTVKVVDELVKVMGRHKPENIVIEMARENQTTQKGQKNSRERMKRIEEGIKELGSQILKEHPVENTQLQNEKLYLYYLQNGRDMYVDQELDINRLSDYDVDHIVPQSFLKDDSIDNKVLTRSDKARGKSDNVPSEEVVKKMKNYWRQLLNAKLITQRKFDNLTKAERGGLSELDKAGFIKRQLVETRQITKHVAQILDSRMNTKYDENDKLIREVKVITLKSKLVSDFRKDFQFYKVREINNYHHAHDAYLNAVVGTALIKKYPKLESEFVYGDYKVYDVRKMIAKSEQEIGKATAKYFFYSNIMNFFKTEITLANGEIRKRPLIETNGETGEIVWDKGRDFATVRKVLSMPQVNIVKKTEVQTGGFSKESILPKRNSDKLIARKKDWDPKKYGGFDSPTVAYSVLVVAKVEKGKSKKLKSVKELLGITIMERSSFEKNPIDFLEAKGYKEVKKDLIIKLPKYSLFELENGRKRMLASAGELQKGNELALPSKYVNFLYLASHYEKLKGSPEDNEQKQLFVEQHKHYLDEIIEQISEFSKRVILADANLDKVLSAYNKHRDKPIREQAENIIHLFTLTNLGAPAAFKYFDTTIDRKRYTSTKEVLDATLIHQSITGLYETRIDLSQLGGDGGPAPAPAPAPGGVLNLEEEYRLHEKPVPSSIDPSWLQLFPTVWAERAGMGLANQVPPVVVELRSGASPVAVRQYPMSKEAREGIRPHIQRFLDLGVLVPCQSPWNTPLLPVKKPGTNDYRPVQDLREINKRVQDIHPTVPNPYNLLSSLPPSHTWYSVLDLKDAFFCLKLHPNSQPLFAFEWRDPEKGNTGQLTWTRLPQGFKNSPTLFNEALHRDLAPFRALNPQVVLLQYVDDLLVAAPTYRDCKEGTQKLLQELSKLGYRVSAKKAQLCQKEVTYLGYLLKEGKRWLTPARKATVMKIPPPTTPRQVREFLGTAGFCRLWIPGFASLAAPLYPLTKPSIPFIWTEEHQKAFDRIKEALLSAPALALPDLTKPFTLYVDERAGVARGVLTQTLGPWRRPVAYLSKKLDPVASGWPTCLKAVAAVALLLKDADKLTLGQNVTVIASHSLESIVRQPPDRWMTNARMTHYQSLLLNERVSFAPPAVLNPATLLPVESEATPVHRCSEILAEETGTRRDLKDQPLPGVPAWYTDGSSFIAEGKRRAGAAIVDGKRTVWASSLPEGTSAQKAELVALTQALRLAEGKDINIYTDSRYAFATAHIHGAIYKQRGWLTSAGKDIKNKEEILALLEAIHLPKRVAIIHCPGHQKGNDPVATGNRRADEAAKQAALSTRVLAETTKPAGKRTADGSEFEKRTADGSEFESPKKKAKVE

SEQ ID NO: 822 - protein, 2094 aa, synthetic construct
MPAAKRVKLDGGDKKYSIGLDIGTNSVGWAVITDEYKVPSKKFKVLGNTDRHSIKKNLIGALLFDSGETAEATRLKRTARRRYTRRKNRICYLQEIFSNEMAKVDDSFFHRLEESFLVEEDKKHERHPIFGNIVDEVAYHEKYPTIYHLRKKLVDSTDKADLRLIYLALAHMIKFRGHFLIEGDLNPDNSDVDKLFIQLVQTYNQLFEENPINASGVDAKAILSARLSKSRRLENLIAQLPGEKKNGLFGNLIALSLGLTPNFKSNFDLAEDAKLQLSKDTYDDDLDNLLAQIGDQYADLFLAAKNLSDAILLSDILRVNTEITKAPLSASMIKRYDEHHQDLTLLKALVRQQLPEKYKEIFFDQSKNGYAGYIDGGASQEEFYKFIKPILEKMDGTEELLVKLNREDLLRKQRTFDNGSIPHQIHLGELHAILRRQEDFYPFLKDNREKIEKILTFRIPYYVGPLARGNSRFAWMTRKSEETITPWNFEEVVDKGASAQSFIERMTNFDKNLPNEKVLPKHSLLYEYFTVYNELTKVKYVTEGMRKPAFLSGEQKKAIVDLLFKTNRKVTVKQLKEDYFKKIECFDSVEISGVEDRFNASLGTYHDLLKIIKDKDFLDNEENEDILEDIVLTLTLFEDREMIEERLKTYAHLFDDKVMKQLKRRRYTGWGRLSRKLINGIRDKQSGKTILDFLKSDGFANRNFMQLIHDDSLTFKEDIQKAQVSGQGDSLHEHIANLAGSPAIKKGILQTVKVVDELVKVMGRHKPENIVIEMARENQTTQKGQKNSRERMKRIEEGIKELGSQILKEHPVENTQLQNEKLYLYYLQNGRDMYVDQELDINRLSDYDVDHIVPQSFLKDDSIDNKVLTRSDKARGKSDNVPSEEVVKKMKNYWRQLLNAKLITQRKFDNLTKAERGGLSELDKAGFIKRQLVETRQITKHVAQILDSRMNTKYDENDKLIREVKVITLKSKLVSDFRKDFQFYKVREINNYHHAHDAYLNAVVGTALIKKYPKLESEFVYGDYKVYDVRKMIAKSEQEIGKATAKYFFYSNIMNFFKTEITLANGEIRKRPLIETNGETGEIVWDKGRDFATVRKVLSMPQVNIVKKTEVQTGGFSKESILPKRNSDKLIARKKDWDPKKYGGFDSPTVAYSVLVVAKVEKGKSKKLKSVKELLGITIMERSSFEKNPIDFLEAKGYKEVKKDLIIKLPKYSLFELENGRKRMLASAGELQKGNELALPSKYVNFLYLASHYEKLKGSPEDNEQKQLFVEQHKHYLDEIIEQISEFSKRVILADANLDKVLSAYNKHRDKPIREQAENIIHLFTLTNLGAPAAFKYFDTTIDRKRYTSTKEVLDATLIHQSITGLYETRIDLSQLGGDGGEAAAKGGGPAPGGVLNLEEEYRLHEKPVPSSIDPSWLQLFPTVWAERAGMGLANQVPPVVVELRSGASPVAVRQYPMSKEAREGIRPHIQRFLDLGVLVPCQSPWNTPLLPVKKPGTNDYRPVQDLREINKRVQDIHPTVPNPYNLLSSLPPSHTWYSVLDLKDAFFCLKLHPNSQPLFAFEWRDPEKGNTGQLTWTRLPQGFKNSPTLFNEALHRDLAPFRALNPQVVLLQYVDDLLVAAPTYRDCKEGTQKLLQELSKLGYRVSAKKAQLCQKEVTYLGYLLKEGKRWLTPARKATVMKIPPPTTPRQVREFLGTAGFCRLWIPGFASLAAPLYPLTKPSIPFIWTEEHQKAFDRIKEALLSAPALALPDLTKPFTLYVDERAGVARGVLTQTLGPWRRPVAYLSKKLDPVASGWPTCLKAVAAVALLLKDADKLTLGQNVTVIASHSLESIVRQPPDRWMTNARMTHYQSLLLNERVSFAPPAVLNPATLLPVESEATPVHRCSEILAEETGTRRDLKDQPLPGVPAWYTDGSSFIAEGKRRAGAAIVDGKRTVWASSLPEGTSAQKAELVALTQALRLAEGKDINIYTDSRYAFATAHIHGAIYKQRGWLTSAGKDIKNKEEILALLEAIHLPKRVAIIHCPGHQKGNDPVATGNRRADEAAKQAALSTRVLAETTKPAGKRTADGSEFEKRTADGSEFESPKKKAKVE

SEQ ID NO: 823 - protein, 2088 aa, synthetic construct
MPAAKRVKLDGGDKKYSIGLDIGTNSVGWAVITDEYKVPSKKFKVLGNTDRHSIKKNLIGALLFDSGETAEATRLKRTARRRYTRRKNRICYLQEIFSNEMAKVDDSFFHRLEESFLVEEDKKHERHPIFGNIVDEVAYHEKYPTIYHLRKKLVDSTDKADLRLIYLALAHMIKFRGHFLIEGDLNPDNSDVDKLFIQLVQTYNQLFEENPINASGVDAKAILSARLSKSRRLENLIAQLPGEKKNGLFGNLIALSLGLTPNFKSNFDLAEDAKLQLSKDTYDDDLDNLLAQIGDQYADLFLAAKNLSDAILLSDILRVNTEITKAPLSASMIKRYDEHHQDLTLLKALVRQQLPEKYKEIFFDQSKNGYAGYIDGGASQEEFYKFIKPILEKMDGTEELLVKLNREDLLRKQRTFDNGSIPHQIHLGELHAILRRQEDFYPFLKDNREKIEKILTFRIPYYVGPLARGNSRFAWMTRKSEETITPWNFEEVVDKGASAQSFIERMTNFDKNLPNEKVLPKHSLLYEYFTVYNELTKVKYVTEGMRKPAFLSGEQKKAIVDLLFKTNRKVTVKQLKEDYFKKIECFDSVEISGVEDRFNASLGTYHDLLKIIKDKDFLDNEENEDILEDIVLTLTLFEDREMIEERLKTYAHLFDDKVMKQLKRRRYTGWGRLSRKLINGIRDKQSGKTILDFLKSDGFANRNFMQLIHDDSLTFKEDIQKAQVSGQGDSLHEHIANLAGSPAIKKGILQTVKVVDELVKVMGRHKPENIVIEMARENQTTQKGQKNSRERMKRIEEGIKELGSQILKEHPVENTQLQNEKLYLYYLQNGRDMYVDQELDINRLSDYDVDHIVPQSFLKDDSIDNKVLTRSDKARGKSDNVPSEEVVKKMKNYWRQLLNAKLITQRKFDNLTKAERGGLSELDKAGFIKRQLVETRQITKHVAQILDSRMNTKYDENDKLIREVKVITLKSKLVSDFRKDFQFYKVREINNYHHAHDAYLNAVVGTALIKKYPKLESEFVYGDYKVYDVRKMIAKSEQEIGKATAKYFFYSNIMNFFKTEITLANGEIRKRPLIETNGETGEIVWDKGRDFATVRKVLSMPQVNIVKKTEVQTGGFSKESILPKRNSDKLIARKKDWDPKKYGGFDSPTVAYSVLVVAKVEKGKSKKLKSVKELLGITIMERSSFEKNPIDFLEAKGYKEVKKDLIIKLPKYSLFELENGRKRMLASAGELQKGNELALPSKYVNFLYLASHYEKLKGSPEDNEQKQLFVEQHKHYLDEIIEQISEFSKRVILADANLDKVLSAYNKHRDKPIREQAENIIHLFTLTNLGAPAAFKYFDTTIDRKRYTSTKEVLDATLIHQSITGLYETRIDLSQLGGDGGEAAAKGGVLNLEEEYRLHEKPVPSSIDPSWLQLFPTVWAERAGMGLANQVPPVVVELRSGASPVAVRQYPMSKEAREGIRPHIQRFLDLGVLVPCQSPWNTPLLPVKKPGTNDYRPVQDLREINKRVQDIHPTVPNPYNLLSSLPPSHTWYSVLDLKDAFFCLKLHPNSQPLFAFEWRDPEKGNTGQLTWTRLPQGFKNSPTLFNEALHRDLAPFRALNPQVVLLQYVDDLLVAAPTYRDCKEGTQKLLQELSKLGYRVSAKKAQLCQKEVTYLGYLLKEGKRWLTPARKATVMKIPPPTTPRQVREFLGTAGFCRLWIPGFASLAAPLYPLTKPSIPFIWTEEHQKAFDRIKEALLSAPALALPDLTKPFTLYVDERAGVARGVLTQTLGPWRRPVAYLSKKLDPVASGWPTCLKAVAAVALLLKDADKLTLGQNVTVIASHSLESIVRQPPDRWMTNARMTHYQSLLLNERVSFAPPAVLNPATLLPVESEATPVHRCSEILAEETGTRRDLKDQPLPGVPAWYTDGSSFIAEGKRRAGAAIVDGKRTVWASSLPEGTSAQKAELVALTQALRLAEGKDINIYTDSRYAFATAHIHGAIYKQRGWLTSAGKDIKNKEEILALLEAIHLPKRVAIIHCPGHQKGNDPVATGNRRADEAAKQAALSTRVLAETTKPAGKRTADGSEFEKRTADGSEFESPKKKAKVE

SEQ ID NO: 824 - protein, 2095 aa, synthetic construct
MPAAKRVKLDGGDKKYSIGLDIGTNSVGWAVITDEYKVPSKKFKVLGNTDRHSIKKNLIGALLFDSGETAEATRLKRTARRRYTRRKNRICYLQEIFSNEMAKVDDSFFHRLEESFLVEEDKKHERHPIFGNIVDEVAYHEKYPTIYHLRKKLVDSTDKADLRLIYLALAHMIKFRGHFLIEGDLNPDNSDVDKLFIQLVQTYNQLFEENPINASGVDAKAILSARLSKSRRLENLIAQLPGEKKNGLFGNLIALSLGLTPNFKSNFDLAEDAKLQLSKDTYDDDLDNLLAQIGDQYADLFLAAKNLSDAILLSDILRVNTEITKAPLSASMIKRYDEHHQDLTLLKALVRQQLPEKYKEIFFDQSKNGYAGYIDGGASQEEFYKFIKPILEKMDGTEELLVKLNREDLLRKQRTFDNGSIPHQIHLGELHAILRRQEDFYPFLKDNREKIEKILTFRIPYYVGPLARGNSRFAWMTRKSEETITPWNFEEVVDKGASAQSFIERMTNFDKNLPNEKVLPKHSLLYEYFTVYNELTKVKYVTEGMRKPAFLSGEQKKAIVDLLFKTNRKVTVKQLKEDYFKKIECFDSVEISGVEDRFNASLGTYHDLLKIIKDKDFLDNEENEDILEDIVLTLTLFEDREMIEERLKTYAHLFDDKVMKQLKRRRYTGWGRLSRKLINGIRDKQSGKTILDFLKSDGFANRNFMQLIHDDSLTFKEDIQKAQVSGQGDSLHEHIANLAGSPAIKKGILQTVKVVDELVKVMGRHKPENIVIEMARENQTTQKGQKNSRERMKRIEEGIKELGSQILKEHPVENTQLQNEKLYLYYLQNGRDMYVDQELDINRLSDYDVDHIVPQSFLKDDSIDNKVLTRSDKARGKSDNVPSEEVVKKMKNYWRQLLNAKLITQRKFDNLTKAERGGLSELDKAGFIKRQLVETRQITKHVAQILDSRMNTKYDENDKLIREVKVITLKSKLVSDFRKDFQFYKVREINNYHHAHDAYLNAVVGTALIKKYPKLESEFVYGDYKVYDVRKMIAKSEQEIGKATAKYFFYSNIMNFFKTEITLANGEIRKRPLIETNGETGEIVWDKGRDFATVRKVLSMPQVNIVKKTEVQTGGFSKESILPKRNSDKLIARKKDWDPKKYGGFDSPTVAYSVLVVAKVEKGKSKKLKSVKELLGITIMERSSFEKNPIDFLEAKGYKEVKKDLIIKLPKYSLFELENGRKRMLASAGELQKGNELALPSKYVNFLYLASHYEKLKGSPEDNEQKQLFVEQHKHYLDEIIEQISEFSKRVILADANLDKVLSAYNKHRDKPIREQAENIIHLFTLTNLGAPAAFKYFDTTIDRKRYTSTKEVLDATLIHQSITGLYETRIDLSQLGGDGGGGSGGSGGSGGSGGVLNLEEEYRLHEKPVPSSIDPSWLQLFPTVWAERAGMGLANQVPPVVVELRSGASPVAVRQYPMSKEAREGIRPHIQRFLDLGVLVPCQSPWNTPLLPVKKPGTNDYRPVQDLREINKRVQDIHPTVPNPYNLLSSLPPSHTWYSVLDLKDAFFCLKLHPNSQPLFAFEWRDPEKGNTGQLTWTRLPQGFKNSPTLFNEALHRDLAPFRALNPQVVLLQYVDDLLVAAPTYRDCKEGTQKLLQELSKLGYRVSAKKAQLCQKEVTYLGYLLKEGKRWLTPARKATVMKIPPPTTPRQVREFLGTAGFCRLWIPGFASLAAPLYPLTKPSIPFIWTEEHQKAFDRIKEALLSAPALALPDLTKPFTLYVDERAGVARGVLTQTLGPWRRPVAYLSKKLDPVASGWPTCLKAVAAVALLLKDADKLTLGQNVTVIASHSLESIVRQPPDRWMTNARMTHYQSLLLNERVSFAPPAVLNPATLLPVESEATPVHRCSEILAEETGTRRDLKDQPLPGVPAWYTDGSSFIAEGKRRAGAAIVDGKRTVWASSLPEGTSAQKAELVALTQALRLAEGKDINIYTDSRYAFATAHIHGAIYKQRGWLTSAGKDIKNKEEILALLEAIHLPKRVAIIHCPGHQKGNDPVATGNRRADEAAKQAALSTRVLAETTKPAGKRTADGSEFEKRTADGSEFESPKKKAKVE

SEQ ID NO: 825 - protein, 2094 aa, synthetic construct
MPAAKRVKLDGGDKKYSIGLDIGTNSVGWAVITDEYKVPSKKFKVLGNTDRHSIKKNLIGALLFDSGETAEATRLKRTARRRYTRRKNRICYLQEIFSNEMAKVDDSFFHRLEESFLVEEDKKHERHPIFGNIVDEVAYHEKYPTIYHLRKKLVDSTDKADLRLIYLALAHMIKFRGHFLIEGDLNPDNSDVDKLFIQLVQTYNQLFEENPINASGVDAKAILSARLSKSRRLENLIAQLPGEKKNGLFGNLIALSLGLTPNFKSNFDLAEDAKLQLSKDTYDDDLDNLLAQIGDQYADLFLAAKNLSDAILLSDILRVNTEITKAPLSASMIKRYDEHHQDLTLLKALVRQQLPEKYKEIFFDQSKNGYAGYIDGGASQEEFYKFIKPILEKMDGTEELLVKLNREDLLRKQRTFDNGSIPHQIHLGELHAILRRQEDFYPFLKDNREKIEKILTFRIPYYVGPLARGNSRFAWMTRKSEETITPWNFEEVVDKGASAQSFIERMTNFDKNLPNEKVLPKHSLLYEYFTVYNELTKVKYVTEGMRKPAFLSGEQKKAIVDLLFKTNRKVTVKQLKEDYFKKIECFDSVEISGVEDRFNASLGTYHDLLKIIKDKDFLDNEENEDILEDIVLTLTLFEDREMIEERLKTYAHLFDDKVMKQLKRRRYTGWGRLSRKLINGIRDKQSGKTILDFLKSDGFANRNFMQLIHDDSLTFKEDIQKAQVSGQGDSLHEHIANLAGSPAIKKGILQTVKVVDELVKVMGRHKPENIVIEMARENQTTQKGQKNSRERMKRIEEGIKELGSQILKEHPVENTQLQNEKLYLYYLQNGRDMYVDQELDINRLSDYDVDHIVPQSFLKDDSIDNKVLTRSDKARGKSDNVPSEEVVKKMKNYWRQLLNAKLITQRKFDNLTKAERGGLSELDKAGFIKRQLVETRQITKHVAQILDSRMNTKYDENDKLIREVKVITLKSKLVSDFRKDFQFYKVREINNYHHAHDAYLNAVVGTALIKKYPKLESEFVYGDYKVYDVRKMIAKSEQEIGKATAKYFFYSNIMNFFKTEITLANGEIRKRPLIETNGETGEIVWDKGRDFATVRKVLSMPQVNIVKKTEVQTGGFSKESILPKRNSDKLIARKKDWDPKKYGGFDSPTVAYSVLVVAKVEKGKSKKLKSVKELLGITIMERSSFEKNPIDFLEAKGYKEVKKDLIIKLPKYSLFELENGRKRMLASAGELQKGNELALPSKYVNFLYLASHYEKLKGSPEDNEQKQLFVEQHKHYLDEIIEQISEFSKRVILADANLDKVLSAYNKHRDKPIREQAENIIHLFTLTNLGAPAAFKYFDTTIDRKRYTSTKEVLDATLIHQSITGLYETRIDLSQLGGDGGGGSGSSEAAAKGGVLNLEEEYRLHEKPVPSSIDPSWLQLFPTVWAERAGMGLANQVPPVVVELRSGASPVAVRQYPMSKEAREGIRPHIQRFLDLGVLVPCQSPWNTPLLPVKKPGTNDYRPVQDLREINKRVQDIHPTVPNPYNLLSSLPPSHTWYSVLDLKDAFFCLKLHPNSQPLFAFEWRDPEKGNTGQLTWTRLPQGFKNSPTLFNEALHRDLAPFRALNPQVVLLQYVDDLLVAAPTYRDCKEGTQKLLQELSKLGYRVSAKKAQLCQKEVTYLGYLLKEGKRWLTPARKATVMKIPPPTTPRQVREFLGTAGFCRLWIPGFASLAAPLYPLTKPSIPFIWTEEHQKAFDRIKEALLSAPALALPDLTKPFTLYVDERAGVARGVLTQTLGPWRRPVAYLSKKLDPVASGWPTCLKAVAAVALLLKDADKLTLGQNVTVIASHSLESIVRQPPDRWMTNARMTHYQSLLLNERVSFAPPAVLNPATLLPVESEATPVHRCSEILAEETGTRRDLKDQPLPGVPAWYTDGSSFIAEGKRRAGAAIVDGKRTVWASSLPEGTSAQKAELVALTQALRLAEGKDINIYTDSRYAFATAHIHGAIYKQRGWLTSAGKDIKNKEEILALLEAIHLPKRVAIIHCPGHQKGNDPVATGNRRADEAAKQAALSTRVLAETTKPAGKRTADGSEFEKRTADGSEFESPKKKAKVE

SEQ ID NO: 826 - protein, 2094 aa, synthetic construct
MPAAKRVKLDGGDKKYSIGLDIGTNSVGWAVITDEYKVPSKKFKVLGNTDRHSIKKNLIGALLFDSGETAEATRLKRTARRRYTRRKNRICYLQEIFSNEMAKVDDSFFHRLEESFLVEEDKKHERHPIFGNIVDEVAYHEKYPTIYHLRKKLVDSTDKADLRLIYLALAHMIKFRGHFLIEGDLNPDNSDVDKLFIQLVQTYNQLFEENPINASGVDAKAILSARLSKSRRLENLIAQLPGEKKNGLFGNLIALSLGLTPNFKSNFDLAEDAKLQLSKDTYDDDLDNLLAQIGDQYADLFLAAKNLSDAILLSDILRVNTEITKAPLSASMIKRYDEHHQDLTLLKALVRQQLPEKYKEIFFDQSKNGYAGYIDGGASQEEFYKFIKPILEKMDGTEELLVKLNREDLLRKQRTFDNGSIPHQIHLGELHAILRRQEDFYPFLKDNREKIEKILTFRIPYYVGPLARGNSRFAWMTRKSEETITPWNFEEVVDKGASAQSFIERMTNFDKNLPNEKVLPKHSLLYEYFTVYNELTKVKYVTEGMRKPAFLSGEQKKAIVDLLFKTNRKVTVKQLKEDYFKKIECFDSVEISGVEDRFNASLGTYHDLLKIIKDKDFLDNEENEDILEDIVLTLTLFEDREMIEERLKTYAHLFDDKVMKQLKRRRYTGWGRLSRKLINGIRDKQSGKTILDFLKSDGFANRNFMQLIHDDSLTFKEDIQKAQVSGQGDSLHEHIANLAGSPAIKKGILQTVKVVDELVKVMGRHKPENIVIEMARENQTTQKGQKNSRERMKRIEEGIKELGSQILKEHPVENTQLQNEKLYLYYLQNGRDMYVDQELDINRLSDYDVDHIVPQSFLKDDSIDNKVLTRSDKARGKSDNVPSEEVVKKMKNYWRQLLNAKLITQRKFDNLTKAERGGLSELDKAGFIKRQLVETRQITKHVAQILDSRMNTKYDENDKLIREVKVITLKSKLVSDFRKDFQFYKVREINNYHHAHDAYLNAVVGTALIKKYPKLESEFVYGDYKVYDVRKMIAKSEQEIGKATAKYFFYSNIMNFFKTEITLANGEIRKRPLIETNGETGEIVWDKGRDFATVRKVLSMPQVNIVKKTEVQTGGFSKESILPKRNSDKLIARKKDWDPKKYGGFDSPTVAYSVLVVAKVEKGKSKKLKSVKELLGITIMERSSFEKNPIDFLEAKGYKEVKKDLIIKLPKYSLFELENGRKRMLASAGELQKGNELALPSKYVNFLYLASHYEKLKGSPEDNEQKQLFVEQHKHYLDEIIEQISEFSKRVILADANLDKVLSAYNKHRDKPIREQAENIIHLFTLTNLGAPAAFKYFDTTIDRKRYTSTKEVLDATLIHQSITGLYETRIDLSQLGGDGGEAAAKGGGGSSGGVLNLEEEYRLHEKPVPSSIDPSWLQLFPTVWAERAGMGLANQVPPVVVELRSGASPVAVRQYPMSKEAREGIRPHIQRFLDLGVLVPCQSPWNTPLLPVKKPGTNDYRPVQDLREINKRVQDIHPTVPNPYNLLSSLPPSHTWYSVLDLKDAFFCLKLHPNSQPLFAFEWRDPEKGNTGQLTWTRLPQGFKNSPTLFNEALHRDLAPFRALNPQVVLLQYVDDLLVAAPTYRDCKEGTQKLLQELSKLGYRVSAKKAQLCQKEVTYLGYLLKEGKRWLTPARKATVMKIPPPTTPRQVREFLGTAGFCRLWIPGFASLAAPLYPLTKPSIPFIWTEEHQKAFDRIKEALLSAPALALPDLTKPFTLYVDERAGVARGVLTQTLGPWRRPVAYLSKKLDPVASGWPTCLKAVAAVALLLKDADKLTLGQNVTVIASHSLESIVRQPPDRWMTNARMTHYQSLLLNERVSFAPPAVLNPATLLPVESEATPVHRCSEILAEETGTRRDLKDQPLPGVPAWYTDGSSFIAEGKRRAGAAIVDGKRTVWASSLPEGTSAQKAELVALTQALRLAEGKDINIYTDSRYAFATAHIHGAIYKQRGWLTSAGKDIKNKEEILALLEAIHLPKRVAIIHCPGHQKGNDPVATGNRRADEAAKQAALSTRVLAETTKPAGKRTADGSEFEKRTADGSEFESPKKKAKVE

SEQ ID NO: 827 - protein, 2103 aa, synthetic construct
MPAAKRVKLDGGDKKYSIGLDIGTNSVGWAVITDEYKVPSKKFKVLGNTDRHSIKKNLIGALLFDSGETAEATRLKRTARRRYTRRKNRICYLQEIFSNEMAKVDDSFFHRLEESFLVEEDKKHERHPIFGNIVDEVAYHEKYPTIYHLRKKLVDSTDKADLRLIYLALAHMIKFRGHFLIEGDLNPDNSDVDKLFIQLVQTYNQLFEENPINASGVDAKAILSARLSKSRRLENLIAQLPGEKKNGLFGNLIALSLGLTPNFKSNFDLAEDAKLQLSKDTYDDDLDNLLAQIGDQYADLFLAAKNLSDAILLSDILRVNTEITKAPLSASMIKRYDEHHQDLTLLKALVRQQLPEKYKEIFFDQSKNGYAGYIDGGASQEEFYKFIKPILEKMDGTEELLVKLNREDLLRKQRTFDNGSIPHQIHLGELHAILRRQEDFYPFLKDNREKIEKILTFRIPYYVGPLARGNSRFAWMTRKSEETITPWNFEEVVDKGASAQSFIERMTNFDKNLPNEKVLPKHSLLYEYFTVYNELTKVKYVTEGMRKPAFLSGEQKKAIVDLLFKTNRKVTVKQLKEDYFKKIECFDSVEISGVEDRFNASLGTYHDLLKIIKDKDFLDNEENEDILEDIVLTLTLFEDREMIEERLKTYAHLFDDKVMKQLKRRRYTGWGRLSRKLINGIRDKQSGKTILDFLKSDGFANRNFMQLIHDDSLTFKEDIQKAQVSGQGDSLHEHIANLAGSPAIKKGILQTVKVVDELVKVMGRHKPENIVIEMARENQTTQKGQKNSRERMKRIEEGIKELGSQILKEHPVENTQLQNEKLYLYYLQNGRDMYVDQELDINRLSDYDVDHIVPQSFLKDDSIDNKVLTRSDKARGKSDNVPSEEVVKKMKNYWRQLLNAKLITQRKFDNLTKAERGGLSELDKAGFIKRQLVETRQITKHVAQILDSRMNTKYDENDKLIREVKVITLKSKLVSDFRKDFQFYKVREINNYHHAHDAYLNAVVGTALIKKYPKLESEFVYGDYKVYDVRKMIAKSEQEIGKATAKYFFYSNIMNFFKTEITLANGEIRKRPLIETNGETGEIVWDKGRDFATVRKVLSMPQVNIVKKTEVQTGGFSKESILPKRNSDKLIARKKDWDPKKYGGFDSPTVAYSVLVVAKVEKGKSKKLKSVKELLGITIMERSSFEKNPIDFLEAKGYKEVKKDLIIKLPKYSLFELENGRKRMLASAGELQKGNELALPSKYVNFLYLASHYEKLKGSPEDNEQKQLFVEQHKHYLDEIIEQISEFSKRVILADANLDKVLSAYNKHRDKPIREQAENIIHLFTLTNLGAPAAFKYFDTTIDRKRYTSTKEVLDATLIHQSITGLYETRIDLSQLGGDGGEAAAKEAAAKEAAAKEAAAKGGVLNLEEEYRLHEKPVPSSIDPSWLQLFPTVWAERAGMGLANQVPPVVVELRSGASPVAVRQYPMSKEAREGIRPHIQRFLDLGVLVPCQSPWNTPLLPVKKPGTNDYRPVQDLREINKRVQDIHPTVPNPYNLLSSLPPSHTWYSVLDLKDAFFCLKLHPNSQPLFAFEWRDPEKGNTGQLTWTRLPQGFKNSPTLFNEALHRDLAPFRALNPQVVLLQYVDDLLVAAPTYRDCKEGTQKLLQELSKLGYRVSAKKAQLCQKEVTYLGYLLKEGKRWLTPARKATVMKIPPPTTPRQVREFLGTAGFCRLWIPGFASLAAPLYPLTKPSIPFIWTEEHQKAFDRIKEALLSAPALALPDLTKPFTLYVDERAGVARGVLTQTLGPWRRPVAYLSKKLDPVASGWPTCLKAVAAVALLLKDADKLTLGQNVTVIASHSLESIVRQPPDRWMTNARMTHYQSLLLNERVSFAPPAVLNPATLLPVESEATPVHRCSEILAEETGTRRDLKDQPLPGVPAWYTDGSSFIAEGKRRAGAAIVDGKRTVWASSLPEGTSAQKAELVALTQALRLAEGKDINIYTDSRYAFATAHIHGAIYKQRGWLTSAGKDIKNKEEILALLEAIHLPKRVAIIHCPGHQKGNDPVATGNRRADEAAKQAALSTRVLAETTKPAGKRTADGSEFEKRTADGSEFESPKKKAKVE

SEQ ID NO: 828 - protein, 2092 aa, synthetic construct
MPAAKRVKLDGGDKKYSIGLDIGTNSVGWAVITDEYKVPSKKFKVLGNTDRHSIKKNLIGALLFDSGETAEATRLKRTARRRYTRRKNRICYLQEIFSNEMAKVDDSFFHRLEESFLVEEDKKHERHPIFGNIVDEVAYHEKYPTIYHLRKKLVDSTDKADLRLIYLALAHMIKFRGHFLIEGDLNPDNSDVDKLFIQLVQTYNQLFEENPINASGVDAKAILSARLSKSRRLENLIAQLPGEKKNGLFGNLIALSLGLTPNFKSNFDLAEDAKLQLSKDTYDDDLDNLLAQIGDQYADLFLAAKNLSDAILLSDILRVNTEITKAPLSASMIKRYDEHHQDLTLLKALVRQQLPEKYKEIFFDQSKNGYAGYIDGGASQEEFYKFIKPILEKMDGTEELLVKLNREDLLRKQRTFDNGSIPHQIHLGELHAILRRQEDFYPFLKDNREKIEKILTFRIPYYVGPLARGNSRFAWMTRKSEETITPWNFEEVVDKGASAQSFIERMTNFDKNLPNEKVLPKHSLLYEYFTVYNELTKVKYVTEGMRKPAFLSGEQKKAIVDLLFKTNRKVTVKQLKEDYFKKIECFDSVEISGVEDRFNASLGTYHDLLKIIKDKDFLDNEENEDILEDIVLTLTLFEDREMIEERLKTYAHLFDDKVMKQLKRRRYTGWGRLSRKLINGIRDKQSGKTILDFLKSDGFANRNFMQLIHDDSLTFKEDIQKAQVSGQGDSLHEHIANLAGSPAIKKGILQTVKVVDELVKVMGRHKPENIVIEMARENQTTQKGQKNSRERMKRIEEGIKELGSQILKEHPVENTQLQNEKLYLYYLQNGRDMYVDQELDINRLSDYDVDHIVPQSFLKDDSIDNKVLTRSDKARGKSDNVPSEEVVKKMKNYWRQLLNAKLITQRKFDNLTKAERGGLSELDKAGFIKRQLVETRQITKHVAQILDSRMNTKYDENDKLIREVKVITLKSKLVSDFRKDFQFYKVREINNYHHAHDAYLNAVVGTALIKKYPKLESEFVYGDYKVYDVRKMIAKSEQEIGKATAKYFFYSNIMNFFKTEITLANGEIRKRPLIETNGETGEIVWDKGRDFATVRKVLSMPQVNIVKKTEVQTGGFSKESILPKRNSDKLIARKKDWDPKKYGGFDSPTVAYSVLVVAKVEKGKSKKLKSVKELLGITIMERSSFEKNPIDFLEAKGYKEVKKDLIIKLPKYSLFELENGRKRMLASAGELQKGNELALPSKYVNFLYLASHYEKLKGSPEDNEQKQLFVEQHKHYLDEIIEQISEFSKRVILADANLDKVLSAYNKHRDKPIREQAENIIHLFTLTNLGAPAAFKYFDTTIDRKRYTSTKEVLDATLIHQSITGLYETRIDLSQLGGDGGGGSGGGGSSGGVLNLEEEYRLHEKPVPSSIDPSWLQLFPTVWAERAGMGLANQVPPVVVELRSGASPVAVRQYPMSKEAREGIRPHIQRFLDLGVLVPCQSPWNTPLLPVKKPGTNDYRPVQDLREINKRVQDIHPTVPNPYNLLSSLPPSHTWYSVLDLKDAFFCLKLHPNSQPLFAFEWRDPEKGNTGQLTWTRLPQGFKNSPTLFNEALHRDLAPFRALNPQVVLLQYVDDLLVAAPTYRDCKEGTQKLLQELSKLGYRVSAKKAQLCQKEVTYLGYLLKEGKRWLTPARKATVMKIPPPTTPRQVREFLGTAGFCRLWIPGFASLAAPLYPLTKPSIPFIWTEEHQKAFDRIKEALLSAPALALPDLTKPFTLYVDERAGVARGVLTQTLGPWRRPVAYLSKKLDPVASGWPTCLKAVAAVALLLKDADKLTLGQNVTVIASHSLESIVRQPPDRWMTNARMTHYQSLLLNERVSFAPPAVLNPATLLPVESEATPVHRCSEILAEETGTRRDLKDQPLPGVPAWYTDGSSFIAEGKRRAGAAIVDGKRTVWASSLPEGTSAQKAELVALTQALRLAEGKDINIYTDSRYAFATAHIHGAIYKQRGWLTSAGKDIKNKEEILALLEAIHLPKRVAIIHCPGHQKGNDPVATGNRRADEAAKQAALSTRVLAETTKPAGKRTADGSEFEKRTADGSEFESPKKKAKVE

SEQ ID NO: 829 - protein, 2094 aa, synthetic construct
MPAAKRVKLDGGDKKYSIGLDIGTNSVGWAVITDEYKVPSKKFKVLGNTDRHSIKKNLIGALLFDSGETAEATRLKRTARRRYTRRKNRICYLQEIFSNEMAKVDDSFFHRLEESFLVEEDKKHERHPIFGNIVDEVAYHEKYPTIYHLRKKLVDSTDKADLRLIYLALAHMIKFRGHFLIEGDLNPDNSDVDKLFIQLVQTYNQLFEENPINASGVDAKAILSARLSKSRRLENLIAQLPGEKKNGLFGNLIALSLGLTPNFKSNFDLAEDAKLQLSKDTYDDDLDNLLAQIGDQYADLFLAAKNLSDAILLSDILRVNTEITKAPLSASMIKRYDEHHQDLTLLKALVRQQLPEKYKEIFFDQSKNGYAGYIDGGASQEEFYKFIKPILEKMDGTEELLVKLNREDLLRKQRTFDNGSIPHQIHLGELHAILRRQEDFYPFLKDNREKIEKILTFRIPYYVGPLARGNSRFAWMTRKSEETITPWNFEEVVDKGASAQSFIERMTNFDKNLPNEKVLPKHSLLYEYFTVYNELTKVKYVTEGMRKPAFLSGEQKKAIVDLLFKTNRKVTVKQLKEDYFKKIECFDSVEISGVEDRFNASLGTYHDLLKIIKDKDFLDNEENEDILEDIVLTLTLFEDREMIEERLKTYAHLFDDKVMKQLKRRRYTGWGRLSRKLINGIRDKQSGKTILDFLKSDGFANRNFMQLIHDDSLTFKEDIQKAQVSGQGDSLHEHIANLAGSPAIKKGILQTVKVVDELVKVMGRHKPENIVIEMARENQTTQKGQKNSRERMKRIEEGIKELGSQILKEHPVENTQLQNEKLYLYYLQNGRDMYVDQELDINRLSDYDVDHIVPQSFLKDDSIDNKVLTRSDKARGKSDNVPSEEVVKKMKNYWRQLLNAKLITQRKFDNLTKAERGGLSELDKAGFIKRQLVETRQITKHVAQILDSRMNTKYDENDKLIREVKVITLKSKLVSDFRKDFQFYKVREINNYHHAHDAYLNAVVGTALIKKYPKLESEFVYGDYKVYDVRKMIAKSEQEIGKATAKYFFYSNIMNFFKTEITLANGEIRKRPLIETNGETGEIVWDKGRDFATVRKVLSMPQVNIVKKTEVQTGGFSKESILPKRNSDKLIARKKDWDPKKYGGFDSPTVAYSVLVVAKVEKGKSKKLKSVKELLGITIMERSSFEKNPIDFLEAKGYKEVKKDLIIKLPKYSLFELENGRKRMLASAGELQKGNELALPSKYVNFLYLASHYEKLKGSPEDNEQKQLFVEQHKHYLDEIIEQISEFSKRVILADANLDKVLSAYNKHRDKPIREQAENIIHLFTLTNLGAPAAFKYFDTTIDRKRYTSTKEVLDATLIHQSITGLYETRIDLSQLGGDGGEAAAKGGSPAPGGVLNLEEEYRLHEKPVPSSIDPSWLQLFPTVWAERAGMGLANQVPPVVVELRSGASPVAVRQYPMSKEAREGIRPHIQRFLDLGVLVPCQSPWNTPLLPVKKPGTNDYRPVQDLREINKRVQDIHPTVPNPYNLLSSLPPSHTWYSVLDLKDAFFCLKLHPNSQPLFAFEWRDPEKGNTGQLTWTRLPQGFKNSPTLFNEALHRDLAPFRALNPQVVLLQYVDDLLVAAPTYRDCKEGTQKLLQELSKLGYRVSAKKAQLCQKEVTYLGYLLKEGKRWLTPARKATVMKIPPPTTPRQVREFLGTAGFCRLWIPGFASLAAPLYPLTKPSIPFIWTEEHQKAFDRIKEALLSAPALALPDLTKPFTLYVDERAGVARGVLTQTLGPWRRPVAYLSKKLDPVASGWPTCLKAVAAVALLLKDADKLTLGQNVTVIASHSLESIVRQPPDRWMTNARMTHYQSLLLNERVSFAPPAVLNPATLLPVESEATPVHRCSEILAEETGTRRDLKDQPLPGVPAWYTDGSSFIAEGKRRAGAAIVDGKRTVWASSLPEGTSAQKAELVALTQALRLAEGKDINIYTDSRYAFATAHIHGAIYKQRGWLTSAGKDIKNKEEILALLEAIHLPKRVAIIHCPGHQKGNDPVATGNRRADEAAKQAALSTRVLAETTKPAGKRTADGSEFEKRTADGSEFESPKKKAKVE

SEQ ID NO: 830 - protein, 2094 aa, synthetic construct
MPAAKRVKLDGGDKKYSIGLDIGTNSVGWAVITDEYKVPSKKFKVLGNTDRHSIKKNLIGALLFDSGETAEATRLKRTARRRYTRRKNRICYLQEIFSNEMAKVDDSFFHRLEESFLVEEDKKHERHPIFGNIVDEVAYHEKYPTIYHLRKKLVDSTDKADLRLIYLALAHMIKFRGHFLIEGDLNPDNSDVDKLFIQLVQTYNQLFEENPINASGVDAKAILSARLSKSRRLENLIAQLPGEKKNGLFGNLIALSLGLTPNFKSNFDLAEDAKLQLSKDTYDDDLDNLLAQIGDQYADLFLAAKNLSDAILLSDILRVNTEITKAPLSASMIKRYDEHHQDLTLLKALVRQQLPEKYKEIFFDQSKNGYAGYIDGGASQEEFYKFIKPILEKMDGTEELLVKLNREDLLRKQRTFDNGSIPHQIHLGELHAILRRQEDFYPFLKDNREKIEKILTFRIPYYVGPLARGNSRFAWMTRKSEETITPWNFEEVVDKGASAQSFIERMTNFDKNLPNEKVLPKHSLLYEYFTVYNELTKVKYVTEGMRKPAFLSGEQKKAIVDLLFKTNRKVTVKQLKEDYFKKIECFDSVEISGVEDRFNASLGTYHDLLKIIKDKDFLDNEENEDILEDIVLTLTLFEDREMIEERLKTYAHLFDDKVMKQLKRRRYTGWGRLSRKLINGIRDKQSGKTILDFLKSDGFANRNFMQLIHDDSLTFKEDIQKAQVSGQGDSLHEHIANLAGSPAIKKGILQTVKVVDELVKVMGRHKPENIVIEMARENQTTQKGQKNSRERMKRIEEGIKELGSQILKEHPVENTQLQNEKLYLYYLQNGRDMYVDQELDINRLSDYDVDHIVPQSFLKDDSIDNKVLTRSDKARGKSDNVPSEEVVKKMKNYWRQLLNAKLITQRKFDNLTKAERGGLSELDKAGFIKRQLVETRQITKHVAQILDSRMNTKYDENDKLIREVKVITLKSKLVSDFRKDFQFYKVREINNYHHAHDAYLNAVVGTALIKKYPKLESEFVYGDYKVYDVRKMIAKSEQEIGKATAKYFFYSNIMNFFKTEITLANGEIRKRPLIETNGETGEIVWDKGRDFATVRKVLSMPQVNIVKKTEVQTGGFSKESILPKRNSDKLIARKKDWDPKKYGGFDSPTVAYSVLVVAKVEKGKSKKLKSVKELLGITIMERSSFEKNPIDFLEAKGYKEVKKDLIIKLPKYSLFELENGRKRMLASAGELQKGNELALPSKYVNFLYLASHYEKLKGSPEDNEQKQLFVEQHKHYLDEIIEQISEFSKRVILADANLDKVLSAYNKHRDKPIREQAENIIHLFTLTNLGAPAAFKYFDTTIDRKRYTSTKEVLDATLIHQSITGLYETRIDLSQLGGDGGEAAAKGGGGGSGGVLNLEEEYRLHEKPVPSSIDPSWLQLFPTVWAERAGMGLANQVPPVVVELRSGASPVAVRQYPMSKEAREGIRPHIQRFLDLGVLVPCQSPWNTPLLPVKKPGTNDYRPVQDLREINKRVQDIHPTVPNPYNLLSSLPPSHTWYSVLDLKDAFFCLKLHPNSQPLFAFEWRDPEKGNTGQLTWTRLPQGFKNSPTLFNEALHRDLAPFRALNPQVVLLQYVDDLLVAAPTYRDCKEGTQKLLQELSKLGYRVSAKKAQLCQKEVTYLGYLLKEGKRWLTPARKATVMKIPPPTTPRQVREFLGTAGFCRLWIPGFASLAAPLYPLTKPSIPFIWTEEHQKAFDRIKEALLSAPALALPDLTKPFTLYVDERAGVARGVLTQTLGPWRRPVAYLSKKLDPVASGWPTCLKAVAAVALLLKDADKLTLGQNVTVIASHSLESIVRQPPDRWMTNARMTHYQSLLLNERVSFAPPAVLNPATLLPVESEATPVHRCSEILAEETGTRRDLKDQPLPGVPAWYTDGSSFIAEGKRRAGAAIVDGKRTVWASSLPEGTSAQKAELVALTQALRLAEGKDINIYTDSRYAFATAHIHGAIYKQRGWLTSAGKDIKNKEEILALLEAIHLPKRVAIIHCPGHQKGNDPVATGNRRADEAAKQAALSTRVLAETTKPAGKRTADGSEFEKRTADGSEFESPKKKAKVE

SEQ ID NO: 831 - protein, 2094 aa, synthetic construct
MPAAKRVKLDGGDKKYSIGLDIGTNSVGWAVITDEYKVPSKKFKVLGNTDRHSIKKNLIGALLFDSGETAEATRLKRTARRRYTRRKNRICYLQEIFSNEMAKVDDSFFHRLEESFLVEEDKKHERHPIFGNIVDEVAYHEKYPTIYHLRKKLVDSTDKADLRLIYLALAHMIKFRGHFLIEGDLNPDNSDVDKLFIQLVQTYNQLFEENPINASGVDAKAILSARLSKSRRLENLIAQLPGEKKNGLFGNLIALSLGLTPNFKSNFDLAEDAKLQLSKDTYDDDLDNLLAQIGDQYADLFLAAKNLSDAILLSDILRVNTEITKAPLSASMIKRYDEHHQDLTLLKALVRQQLPEKYKEIFFDQSKNGYAGYIDGGASQEEFYKFIKPILEKMDGTEELLVKLNREDLLRKQRTFDNGSIPHQIHLGELHAILRRQEDFYPFLKDNREKIEKILTFRIPYYVGPLARGNSRFAWMTRKSEETITPWNFEEVVDKGASAQSFIERMTNFDKNLPNEKVLPKHSLLYEYFTVYNELTKVKYVTEGMRKPAFLSGEQKKAIVDLLFKTNRKVTVKQLKEDYFKKIECFDSVEISGVEDRFNASLGTYHDLLKIIKDKDFLDNEENEDILEDIVLTLTLFEDREMIEERLKTYAHLFDDKVMKQLKRRRYTGWGRLSRKLINGIRDKQSGKTILDFLKSDGFANRNFMQLIHDDSLTFKEDIQKAQVSGQGDSLHEHIANLAGSPAIKKGILQTVKVVDELVKVMGRHKPENIVIEMARENQTTQKGQKNSRERMKRIEEGIKELGSQILKEHPVENTQLQNEKLYLYYLQNGRDMYVDQELDINRLSDYDVDHIVPQSFLKDDSIDNKVLTRSDKARGKSDNVPSEEVVKKMKNYWRQLLNAKLITQRKFDNLTKAERGGLSELDKAGFIKRQLVETRQITKHVAQILDSRMNTKYDENDKLIREVKVITLKSKLVSDFRKDFQFYKVREINNYHHAHDAYLNAVVGTALIKKYPKLESEFVYGDYKVYDVRKMIAKSEQEIGKATAKYFFYSNIMNFFKTEITLANGEIRKRPLIETNGETGEIVWDKGRDFATVRKVLSMPQVNIVKKTEVQTGGFSKESILPKRNSDKLIARKKDWDPKKYGGFDSPTVAYSVLVVAKVEKGKSKKLKSVKELLGITIMERSSFEKNPIDFLEAKGYKEVKKDLIIKLPKYSLFELENGRKRMLASAGELQKGNELALPSKYVNFLYLASHYEKLKGSPEDNEQKQLFVEQHKHYLDEIIEQISEFSKRVILADANLDKVLSAYNKHRDKPIREQAENIIHLFTLTNLGAPAAFKYFDTTIDRKRYTSTKEVLDATLIHQSITGLYETRIDLSQLGGDGGPAPGSSEAAAKGGVLNLEEEYRLHEKPVPSSIDPSWLQLFPTVWAERAGMGLANQVPPVVVELRSGASPVAVRQYPMSKEAREGIRPHIQRFLDLGVLVPCQSPWNTPLLPVKKPGTNDYRPVQDLREINKRVQDIHPTVPNPYNLLSSLPPSHTWYSVLDLKDAFFCLKLHPNSQPLFAFEWRDPEKGNTGQLTWTRLPQGFKNSPTLFNEALHRDLAPFRALNPQVVLLQYVDDLLVAAPTYRDCKEGTQKLLQELSKLGYRVSAKKAQLCQKEVTYLGYLLKEGKRWLTPARKATVMKIPPPTTPRQVREFLGTAGFCRLWIPGFASLAAPLYPLTKPSIPFIWTEEHQKAFDRIKEALLSAPALALPDLTKPFTLYVDERAGVARGVLTQTLGPWRRPVAYLSKKLDPVASGWPTCLKAVAAVALLLKDADKLTLGQNVTVIASHSLESIVRQPPDRWMTNARMTHYQSLLLNERVSFAPPAVLNPATLLPVESEATPVHRCSEILAEETGTRRDLKDQPLPGVPAWYTDGSSFIAEGKRRAGAAIVDGKRTVWASSLPEGTSAQKAELVALTQALRLAEGKDINIYTDSRYAFATAHIHGAIYKQRGWLTSAGKDIKNKEEILALLEAIHLPKRVAIIHCPGHQKGNDPVATGNRRADEAAKQAALSTRVLAETTKPAGKRTADGSEFEKRTADGSEFESPKKKAKVE

SEQ ID NO: 832 - protein, 2091 aa, synthetic construct
MPAAKRVKLDGGDKKYSIGLDIGTNSVGWAVITDEYKVPSKKFKVLGNTDRHSIKKNLIGALLFDSGETAEATRLKRTARRRYTRRKNRICYLQEIFSNEMAKVDDSFFHRLEESFLVEEDKKHERHPIFGNIVDEVAYHEKYPTIYHLRKKLVDSTDKADLRLIYLALAHMIKFRGHFLIEGDLNPDNSDVDKLFIQLVQTYNQLFEENPINASGVDAKAILSARLSKSRRLENLIAQLPGEKKNGLFGNLIALSLGLTPNFKSNFDLAEDAKLQLSKDTYDDDLDNLLAQIGDQYADLFLAAKNLSDAILLSDILRVNTEITKAPLSASMIKRYDEHHQDLTLLKALVRQQLPEKYKEIFFDQSKNGYAGYIDGGASQEEFYKFIKPILEKMDGTEELLVKLNREDLLRKQRTFDNGSIPHQIHLGELHAILRRQEDFYPFLKDNREKIEKILTFRIPYYVGPLARGNSRFAWMTRKSEETITPWNFEEVVDKGASAQSFIERMTNFDKNLPNEKVLPKHSLLYEYFTVYNELTKVKYVTEGMRKPAFLSGEQKKAIVDLLFKTNRKVTVKQLKEDYFKKIECFDSVEISGVEDRFNASLGTYHDLLKIIKDKDFLDNEENEDILEDIVLTLTLFEDREMIEERLKTYAHLFDDKVMKQLKRRRYTGWGRLSRKLINGIRDKQSGKTILDFLKSDGFANRNFMQLIHDDSLTFKEDIQKAQVSGQGDSLHEHIANLAGSPAIKKGILQTVKVVDELVKVMGRHKPENIVIEMARENQTTQKGQKNSRERMKRIEEGIKELGSQILKEHPVENTQLQNEKLYLYYLQNGRDMYVDQELDINRLSDYDVDHIVPQSFLKDDSIDNKVLTRSDKARGKSDNVPSEEVVKKMKNYWRQLLNAKLITQRKFDNLTKAERGGLSELDKAGFIKRQLVETRQITKHVAQILDSRMNTKYDENDKLIREVKVITLKSKLVSDFRKDFQFYKVREINNYHHAHDAYLNAVVGTALIKKYPKLESEFVYGDYKVYDVRKMIAKSEQEIGKATAKYFFYSNIMNFFKTEITLANGEIRKRPLIETNGETGEIVWDKGRDFATVRKVLSMPQVNIVKKTEVQTGGFSKESILPKRNSDKLIARKKDWDPKKYGGFDSPTVAYSVLVVAKVEKGKSKKLKSVKELLGITIMERSSFEKNPIDFLEAKGYKEVKKDLIIKLPKYSLFELENGRKRMLASAGELQKGNELALPSKYVNFLYLASHYEKLKGSPEDNEQKQLFVEQHKHYLDEIIEQISEFSKRVILADANLDKVLSAYNKHRDKPIREQAENIIHLFTLTNLGAPAAFKYFDTTIDRKRYTSTKEVLDATLIHQSITGLYETRIDLSQLGGDGGEAAAKGGSGGVLNLEEEYRLHEKPVPSSIDPSWLQLFPTVWAERAGMGLANQVPPVVVELRSGASPVAVRQYPMSKEAREGIRPHIQRFLDLGVLVPCQSPWNTPLLPVKKPGTNDYRPVQDLREINKRVQDIHPTVPNPYNLLSSLPPSHTWYSVLDLKDAFFCLKLHPNSQPLFAFEWRDPEKGNTGQLTWTRLPQGFKNSPTLFNEALHRDLAPFRALNPQVVLLQYVDDLLVAAPTYRDCKEGTQKLLQELSKLGYRVSAKKAQLCQKEVTYLGYLLKEGKRWLTPARKATVMKIPPPTTPRQVREFLGTAGFCRLWIPGFASLAAPLYPLTKPSIPFIWTEEHQKAFDRIKEALLSAPALALPDLTKPFTLYVDERAGVARGVLTQTLGPWRRPVAYLSKKLDPVASGWPTCLKAVAAVALLLKDADKLTLGQNVTVIASHSLESIVRQPPDRWMTNARMTHYQSLLLNERVSFAPPAVLNPATLLPVESEATPVHRCSEILAEETGTRRDLKDQPLPGVPAWYTDGSSFIAEGKRRAGAAIVDGKRTVWASSLPEGTSAQKAELVALTQALRLAEGKDINIYTDSRYAFATAHIHGAIYKQRGWLTSAGKDIKNKEEILALLEAIHLPKRVAIIHCPGHQKGNDPVATGNRRADEAAKQAALSTRVLAETTKPAGKRTADGSEFEKRTADGSEFESPKKKAKVE

SEQ ID NO: 833 - protein, 2093 aa, synthetic construct
MPAAKRVKLDGGDKKYSIGLDIGTNSVGWAVITDEYKVPSKKFKVLGNTDRHSIKKNLIGALLFDSGETAEATRLKRTARRRYTRRKNRICYLQEIFSNEMAKVDDSFFHRLEESFLVEEDKKHERHPIFGNIVDEVAYHEKYPTIYHLRKKLVDSTDKADLRLIYLALAHMIKFRGHFLIEGDLNPDNSDVDKLFIQLVQTYNQLFEENPINASGVDAKAILSARLSKSRRLENLIAQLPGEKKNGLFGNLIALSLGLTPNFKSNFDLAEDAKLQLSKDTYDDDLDNLLAQIGDQYADLFLAAKNLSDAILLSDILRVNTEITKAPLSASMIKRYDEHHQDLTLLKALVRQQLPEKYKEIFFDQSKNGYAGYIDGGASQEEFYKFIKPILEKMDGTEELLVKLNREDLLRKQRTFDNGSIPHQIHLGELHAILRRQEDFYPFLKDNREKIEKILTFRIPYYVGPLARGNSRFAWMTRKSEETITPWNFEEVVDKGASAQSFIERMTNFDKNLPNEKVLPKHSLLYEYFTVYNELTKVKYVTEGMRKPAFLSGEQKKAIVDLLFKTNRKVTVKQLKEDYFKKIECFDSVEISGVEDRFNASLGTYHDLLKIIKDKDFLDNEENEDILEDIVLTLTLFEDREMIEERLKTYAHLFDDKVMKQLKRRRYTGWGRLSRKLINGIRDKQSGKTILDFLKSDGFANRNFMQLIHDDSLTFKEDIQKAQVSGQGDSLHEHIANLAGSPAIKKGILQTVKVVDELVKVMGRHKPENIVIEMARENQTTQKGQKNSRERMKRIEEGIKELGSQILKEHPVENTQLQNEKLYLYYLQNGRDMYVDQELDINRLSDYDVDHIVPQSFLKDDSIDNKVLTRSDKARGKSDNVPSEEVVKKMKNYWRQLLNAKLITQRKFDNLTKAERGGLSELDKAGFIKRQLVETRQITKHVAQILDSRMNTKYDENDKLIREVKVITLKSKLVSDFRKDFQFYKVREINNYHHAHDAYLNAVVGTALIKKYPKLESEFVYGDYKVYDVRKMIAKSEQEIGKATAKYFFYSNIMNFFKTEITLANGEIRKRPLIETNGETGEIVWDKGRDFATVRKVLSMPQVNIVKKTEVQTGGFSKESILPKRNSDKLIARKKDWDPKKYGGFDSPTVAYSVLVVAKVEKGKSKKLKSVKELLGITIMERSSFEKNPIDFLEAKGYKEVKKDLIIKLPKYSLFELENGRKRMLASAGELQKGNELALPSKYVNFLYLASHYEKLKGSPEDNEQKQLFVEQHKHYLDEIIEQISEFSKRVILADANLDKVLSAYNKHRDKPIREQAENIIHLFTLTNLGAPAAFKYFDTTIDRKRYTSTKEVLDATLIHQSITGLYETRIDLSQLGGDGGEAAAKEAAAKGGVLNLEEEYRLHEKPVPSSIDPSWLQLFPTVWAERAGMGLANQVPPVVVELRSGASPVAVRQYPMSKEAREGIRPHIQRFLDLGVLVPCQSPWNTPLLPVKKPGTNDYRPVQDLREINKRVQDIHPTVPNPYNLLSSLPPSHTWYSVLDLKDAFFCLKLHPNSQPLFAFEWRDPEKGNTGQLTWTRLPQGFKNSPTLFNEALHRDLAPFRALNPQVVLLQYVDDLLVAAPTYRDCKEGTQKLLQELSKLGYRVSAKKAQLCQKEVTYLGYLLKEGKRWLTPARKATVMKIPPPTTPRQVREFLGTAGFCRLWIPGFASLAAPLYPLTKPSIPFIWTEEHQKAFDRIKEALLSAPALALPDLTKPFTLYVDERAGVARGVLTQTLGPWRRPVAYLSKKLDPVASGWPTCLKAVAAVALLLKDADKLTLGQNVTVIASHSLESIVRQPPDRWMTNARMTHYQSLLLNERVSFAPPAVLNPATLLPVESEATPVHRCSEILAEETGTRRDLKDQPLPGVPAWYTDGSSFIAEGKRRAGAAIVDGKRTVWASSLPEGTSAQKAELVALTQALRLAEGKDINIYTDSRYAFATAHIHGAIYKQRGWLTSAGKDIKNKEEILALLEAIHLPKRVAIIHCPGHQKGNDPVATGNRRADEAAKQAALSTRVLAETTKPAGKRTADGSEFEKRTADGSEFESPKKKAKVE

SEQ ID NO: 834 - protein, 2094 aa, synthetic construct
MPAAKRVKLDGGDKKYSIGLDIGTNSVGWAVITDEYKVPSKKFKVLGNTDRHSIKKNLIGALLFDSGETAEATRLKRTARRRYTRRKNRICYLQEIFSNEMAKVDDSFFHRLEESFLVEEDKKHERHPIFGNIVDEVAYHEKYPTIYHLRKKLVDSTDKADLRLIYLALAHMIKFRGHFLIEGDLNPDNSDVDKLFIQLVQTYNQLFEENPINASGVDAKAILSARLSKSRRLENLIAQLPGEKKNGLFGNLIALSLGLTPNFKSNFDLAEDAKLQLSKDTYDDDLDNLLAQIGDQYADLFLAAKNLSDAILLSDILRVNTEITKAPLSASMIKRYDEHHQDLTLLKALVRQQLPEKYKEIFFDQSKNGYAGYIDGGASQEEFYKFIKPILEKMDGTEELLVKLNREDLLRKQRTFDNGSIPHQIHLGELHAILRRQEDFYPFLKDNREKIEKILTFRIPYYVGPLARGNSRFAWMTRKSEETITPWNFEEVVDKGASAQSFIERMTNFDKNLPNEKVLPKHSLLYEYFTVYNELTKVKYVTEGMRKPAFLSGEQKKAIVDLLFKTNRKVTVKQLKEDYFKKIECFDSVEISGVEDRFNASLGTYHDLLKIIKDKDFLDNEENEDILEDIVLTLTLFEDREMIEERLKTYAHLFDDKVMKQLKRRRYTGWGRLSRKLINGIRDKQSGKTILDFLKSDGFANRNFMQLIHDDSLTFKEDIQKAQVSGQGDSLHEHIANLAGSPAIKKGILQTVKVVDELVKVMGRHKPENIVIEMARENQTTQKGQKNSRERMKRIEEGIKELGSQILKEHPVENTQLQNEKLYLYYLQNGRDMYVDQELDINRLSDYDVDHIVPQSFLKDDSIDNKVLTRSDKARGKSDNVPSEEVVKKMKNYWRQLLNAKLITQRKFDNLTKAERGGLSELDKAGFIKRQLVETRQITKHVAQILDSRMNTKYDENDKLIREVKVITLKSKLVSDFRKDFQFYKVREINNYHHAHDAYLNAVVGTALIKKYPKLESEFVYGDYKVYDVRKMIAKSEQEIGKATAKYFFYSNIMNFFKTEITLANGEIRKRPLIETNGETGEIVWDKGRDFATVRKVLSMPQVNIVKKTEVQTGGFSKESILPKRNSDKLIARKKDWDPKKYGGFDSPTVAYSVLVVAKVEKGKSKKLKSVKELLGITIMERSSFEKNPIDFLEAKGYKEVKKDLIIKLPKYSLFELENGRKRMLASAGELQKGNELALPSKYVNFLYLASHYEKLKGSPEDNEQKQLFVEQHKHYLDEIIEQISEFSKRVILADANLDKVLSAYNKHRDKPIREQAENIIHLFTLTNLGAPAAFKYFDTTIDRKRYTSTKEVLDATLIHQSITGLYETRIDLSQLGGDGGEAAAKPAPGSSGGVLNLEEEYRLHEKPVPSSIDPSWLQLFPTVWAERAGMGLANQVPPVVVELRSGASPVAVRQYPMSKEAREGIRPHIQRFLDLGVLVPCQSPWNTPLLPVKKPGTNDYRPVQDLREINKRVQDIHPTVPNPYNLLSSLPPSHTWYSVLDLKDAFFCLKLHPNSQPLFAFEWRDPEKGNTGQLTWTRLPQGFKNSPTLFNEALHRDLAPFRALNPQVVLLQYVDDLLVAAPTYRDCKEGTQKLLQELSKLGYRVSAKKAQLCQKEVTYLGYLLKEGKRWLTPARKATVMKIPPPTTPRQVREFLGTAGFCRLWIPGFASLAAPLYPLTKPSIPFIWTEEHQKAFDRIKEALLSAPALALPDLTKPFTLYVDERAGVARGVLTQTLGPWRRPVAYLSKKLDPVASGWPTCLKAVAAVALLLKDADKLTLGQNVTVIASHSLESIVRQPPDRWMTNARMTHYQSLLLNERVSFAPPAVLNPATLLPVESEATPVHRCSEILAEETGTRRDLKDQPLPGVPAWYTDGSSFIAEGKRRAGAAIVDGKRTVWASSLPEGTSAQKAELVALTQALRLAEGKDINIYTDSRYAFATAHIHGAIYKQRGWLTSAGKDIKNKEEILALLEAIHLPKRVAIIHCPGHQKGNDPVATGNRRADEAAKQAALSTRVLAETTKPAGKRTADGSEFEKRTADGSEFESPKKKAKVE

SEQ ID NO: 835 - protein, 2092 aa, synthetic construct
MPAAKRVKLDGGDKKYSIGLDIGTNSVGWAVITDEYKVPSKKFKVLGNTDRHSIKKNLIGALLFDSGETAEATRLKRTARRRYTRRKNRICYLQEIFSNEMAKVDDSFFHRLEESFLVEEDKKHERHPIFGNIVDEVAYHEKYPTIYHLRKKLVDSTDKADLRLIYLALAHMIKFRGHFLIEGDLNPDNSDVDKLFIQLVQTYNQLFEENPINASGVDAKAILSARLSKSRRLENLIAQLPGEKKNGLFGNLIALSLGLTPNFKSNFDLAEDAKLQLSKDTYDDDLDNLLAQIGDQYADLFLAAKNLSDAILLSDILRVNTEITKAPLSASMIKRYDEHHQDLTLLKALVRQQLPEKYKEIFFDQSKNGYAGYIDGGASQEEFYKFIKPILEKMDGTEELLVKLNREDLLRKQRTFDNGSIPHQIHLGELHAILRRQEDFYPFLKDNREKIEKILTFRIPYYVGPLARGNSRFAWMTRKSEETITPWNFEEVVDKGASAQSFIERMTNFDKNLPNEKVLPKHSLLYEYFTVYNELTKVKYVTEGMRKPAFLSGEQKKAIVDLLFKTNRKVTVKQLKEDYFKKIECFDSVEISGVEDRFNASLGTYHDLLKIIKDKDFLDNEENEDILEDIVLTLTLFEDREMIEERLKTYAHLFDDKVMKQLKRRRYTGWGRLSRKLINGIRDKQSGKTILDFLKSDGFANRNFMQLIHDDSLTFKEDIQKAQVSGQGDSLHEHIANLAGSPAIKKGILQTVKVVDELVKVMGRHKPENIVIEMARENQTTQKGQKNSRERMKRIEEGIKELGSQILKEHPVENTQLQNEKLYLYYLQNGRDMYVDQELDINRLSDYDVDHIVPQSFLKDDSIDNKVLTRSDKARGKSDNVPSEEVVKKMKNYWRQLLNAKLITQRKFDNLTKAERGGLSELDKAGFIKRQLVETRQITKHVAQILDSRMNTKYDENDKLIREVKVITLKSKLVSDFRKDFQFYKVREINNYHHAHDAYLNAVVGTALIKKYPKLESEFVYGDYKVYDVRKMIAKSEQEIGKATAKYFFYSNIMNFFKTEITLANGEIRKRPLIETNGETGEIVWDKGRDFATVRKVLSMPQVNIVKKTEVQTGGFSKESILPKRNSDKLIARKKDWDPKKYGGFDSPTVAYSVLVVAKVEKGKSKKLKSVKELLGITIMERSSFEKNPIDFLEAKGYKEVKKDLIIKLPKYSLFELENGRKRMLASAGELQKGNELALPSKYVNFLYLASHYEKLKGSPEDNEQKQLFVEQHKHYLDEIIEQISEFSKRVILADANLDKVLSAYNKHRDKPIREQAENIIHLFTLTNLGAPAAFKYFDTTIDRKRYTSTKEVLDATLIHQSITGLYETRIDLSQLGGDGGGSSGSSGSSGGVLNLEEEYRLHEKPVPSSIDPSWLQLFPTVWAERAGMGLANQVPPVVVELRSGASPVAVRQYPMSKEAREGIRPHIQRFLDLGVLVPCQSPWNTPLLPVKKPGTNDYRPVQDLREINKRVQDIHPTVPNPYNLLSSLPPSHTWYSVLDLKDAFFCLKLHPNSQPLFAFEWRDPEKGNTGQLTWTRLPQGFKNSPTLFNEALHRDLAPFRALNPQVVLLQYVDDLLVAAPTYRDCKEGTQKLLQELSKLGYRVSAKKAQLCQKEVTYLGYLLKEGKRWLTPARKATVMKIPPPTTPRQVREFLGTAGFCRLWIPGFASLAAPLYPLTKPSIPFIWTEEHQKAFDRIKEALLSAPALALPDLTKPFTLYVDERAGVARGVLTQTLGPWRRPVAYLSKKLDPVASGWPTCLKAVAAVALLLKDADKLTLGQNVTVIASHSLESIVRQPPDRWMTNARMTHYQSLLLNERVSFAPPAVLNPATLLPVESEATPVHRCSEILAEETGTRRDLKDQPLPGVPAWYTDGSSFIAEGKRRAGAAIVDGKRTVWASSLPEGTSAQKAELVALTQALRLAEGKDINIYTDSRYAFATAHIHGAIYKQRGWLTSAGKDIKNKEEILALLEAIHLPKRVAIIHCPGHQKGNDPVATGNRRADEAAKQAALSTRVLAETTKPAGKRTADGSEFEKRTADGSEFESPKKKAKVE

SEQ ID NO: 836 - protein, 2091 aa, synthetic construct
MPAAKRVKLDGGDKKYSIGLDIGTNSVGWAVITDEYKVPSKKFKVLGNTDRHSIKKNLIGALLFDSGETAEATRLKRTARRRYTRRKNRICYLQEIFSNEMAKVDDSFFHRLEESFLVEEDKKHERHPIFGNIVDEVAYHEKYPTIYHLRKKLVDSTDKADLRLIYLALAHMIKFRGHFLIEGDLNPDNSDVDKLFIQLVQTYNQLFEENPINASGVDAKAILSARLSKSRRLENLIAQLPGEKKNGLFGNLIALSLGLTPNFKSNFDLAEDAKLQLSKDTYDDDLDNLLAQIGDQYADLFLAAKNLSDAILLSDILRVNTEITKAPLSASMIKRYDEHHQDLTLLKALVRQQLPEKYKEIFFDQSKNGYAGYIDGGASQEEFYKFIKPILEKMDGTEELLVKLNREDLLRKQRTFDNGSIPHQIHLGELHAILRRQEDFYPFLKDNREKIEKILTFRIPYYVGPLARGNSRFAWMTRKSEETITPWNFEEVVDKGASAQSFIERMTNFDKNLPNEKVLPKHSLLYEYFTVYNELTKVKYVTEGMRKPAFLSGEQKKAIVDLLFKTNRKVTVKQLKEDYFKKIECFDSVEISGVEDRFNASLGTYHDLLKIIKDKDFLDNEENEDILEDIVLTLTLFEDREMIEERLKTYAHLFDDKVMKQLKRRRYTGWGRLSRKLINGIRDKQSGKTILDFLKSDGFANRNFMQLIHDDSLTFKEDIQKAQVSGQGDSLHEHIANLAGSPAIKKGILQTVKVVDELVKVMGRHKPENIVIEMARENQTTQKGQKNSRERMKRIEEGIKELGSQILKEHPVENTQLQNEKLYLYYLQNGRDMYVDQELDINRLSDYDVDHIVPQSFLKDDSIDNKVLTRSDKARGKSDNVPSEEVVKKMKNYWRQLLNAKLITQRKFDNLTKAERGGLSELDKAGFIKRQLVETRQITKHVAQILDSRMNTKYDENDKLIREVKVITLKSKLVSDFRKDFQFYKVREINNYHHAHDAYLNAVVGTALIKKYPKLESEFVYGDYKVYDVRKMIAKSEQEIGKATAKYFFYSNIMNFFKTEITLANGEIRKRPLIETNGETGEIVWDKGRDFATVRKVLSMPQVNIVKKTEVQTGGFSKESILPKRNSDKLIARKKDWDPKKYGGFDSPTVAYSVLVVAKVEKGKSKKLKSVKELLGITIMERSSFEKNPIDFLEAKGYKEVKKDLIIKLPKYSLFELENGRKRMLASAGELQKGNELALPSKYVNFLYLASHYEKLKGSPEDNEQKQLFVEQHKHYLDEIIEQISEFSKRVILADANLDKVLSAYNKHRDKPIREQAENIIHLFTLTNLGAPAAFKYFDTTIDRKRYTSTKEVLDATLIHQSITGLYETRIDLSQLGGDGGEAAAKGSSGGVLNLEEEYRLHEKPVPSSIDPSWLQLFPTVWAERAGMGLANQVPPVVVELRSGASPVAVRQYPMSKEAREGIRPHIQRFLDLGVLVPCQSPWNTPLLPVKKPGTNDYRPVQDLREINKRVQDIHPTVPNPYNLLSSLPPSHTWYSVLDLKDAFFCLKLHPNSQPLFAFEWRDPEKGNTGQLTWTRLPQGFKNSPTLFNEALHRDLAPFRALNPQVVLLQYVDDLLVAAPTYRDCKEGTQKLLQELSKLGYRVSAKKAQLCQKEVTYLGYLLKEGKRWLTPARKATVMKIPPPTTPRQVREFLGTAGFCRLWIPGFASLAAPLYPLTKPSIPFIWTEEHQKAFDRIKEALLSAPALALPDLTKPFTLYVDERAGVARGVLTQTLGPWRRPVAYLSKKLDPVASGWPTCLKAVAAVALLLKDADKLTLGQNVTVIASHSLESIVRQPPDRWMTNARMTHYQSLLLNERVSFAPPAVLNPATLLPVESEATPVHRCSEILAEETGTRRDLKDQPLPGVPAWYTDGSSFIAEGKRRAGAAIVDGKRTVWASSLPEGTSAQKAELVALTQALRLAEGKDINIYTDSRYAFATAHIHGAIYKQRGWLTSAGKDIKNKEEILALLEAIHLPKRVAIIHCPGHQKGNDPVATGNRRADEAAKQAALSTRVLAETTKPAGKRTADGSEFEKRTADGSEFESPKKKAKVE

SEQ ID NO: 837 - protein, 2091 aa, synthetic construct
MPAAKRVKLDGGDKKYSIGLDIGTNSVGWAVITDEYKVPSKKFKVLGNTDRHSIKKNLIGALLFDSGETAEATRLKRTARRRYTRRKNRICYLQEIFSNEMAKVDDSFFHRLEESFLVEEDKKHERHPIFGNIVDEVAYHEKYPTIYHLRKKLVDSTDKADLRLIYLALAHMIKFRGHFLIEGDLNPDNSDVDKLFIQLVQTYNQLFEENPINASGVDAKAILSARLSKSRRLENLIAQLPGEKKNGLFGNLIALSLGLTPNFKSNFDLAEDAKLQLSKDTYDDDLDNLLAQIGDQYADLFLAAKNLSDAILLSDILRVNTEITKAPLSASMIKRYDEHHQDLTLLKALVRQQLPEKYKEIFFDQSKNGYAGYIDGGASQEEFYKFIKPILEKMDGTEELLVKLNREDLLRKQRTFDNGSIPHQIHLGELHAILRRQEDFYPFLKDNREKIEKILTFRIPYYVGPLARGNSRFAWMTRKSEETITPWNFEEVVDKGASAQSFIERMTNFDKNLPNEKVLPKHSLLYEYFTVYNELTKVKYVTEGMRKPAFLSGEQKKAIVDLLFKTNRKVTVKQLKEDYFKKIECFDSVEISGVEDRFNASLGTYHDLLKIIKDKDFLDNEENEDILEDIVLTLTLFEDREMIEERLKTYAHLFDDKVMKQLKRRRYTGWGRLSRKLINGIRDKQSGKTILDFLKSDGFANRNFMQLIHDDSLTFKEDIQKAQVSGQGDSLHEHIANLAGSPAIKKGILQTVKVVDELVKVMGRHKPENIVIEMARENQTTQKGQKNSRERMKRIEEGIKELGSQILKEHPVENTQLQNEKLYLYYLQNGRDMYVDQELDINRLSDYDVDHIVPQSFLKDDSIDNKVLTRSDKARGKSDNVPSEEVVKKMKNYWRQLLNAKLITQRKFDNLTKAERGGLSELDKAGFIKRQLVETRQITKHVAQILDSRMNTKYDENDKLIREVKVITLKSKLVSDFRKDFQFYKVREINNYHHAHDAYLNAVVGTALIKKYPKLESEFVYGDYKVYDVRKMIAKSEQEIGKATAKYFFYSNIMNFFKTEITLANGEIRKRPLIETNGETGEIVWDKGRDFATVRKVLSMPQVNIVKKTEVQTGGFSKESILPKRNSDKLIARKKDWDPKKYGGFDSPTVAYSVLVVAKVEKGKSKKLKSVKELLGITIMERSSFEKNPIDFLEAKGYKEVKKDLIIKLPKYSLFELENGRKRMLASAGELQKGNELALPSKYVNFLYLASHYEKLKGSPEDNEQKQLFVEQHKHYLDEIIEQISEFSKRVILADANLDKVLSAYNKHRDKPIREQAENIIHLFTLTNLGAPAAFKYFDTTIDRKRYTSTKEVLDATLIHQSITGLYETRIDLSQLGGDGGGGGEAAAKGGVLNLEEEYRLHEKPVPSSIDPSWLQLFPTVWAERAGMGLANQVPPVVVELRSGASPVAVRQYPMSKEAREGIRPHIQRFLDLGVLVPCQSPWNTPLLPVKKPGTNDYRPVQDLREINKRVQDIHPTVPNPYNLLSSLPPSHTWYSVLDLKDAFFCLKLHPNSQPLFAFEWRDPEKGNTGQLTWTRLPQGFKNSPTLFNEALHRDLAPFRALNPQVVLLQYVDDLLVAAPTYRDCKEGTQKLLQELSKLGYRVSAKKAQLCQKEVTYLGYLLKEGKRWLTPARKATVMKIPPPTTPRQVREFLGTAGFCRLWIPGFASLAAPLYPLTKPSIPFIWTEEHQKAFDRIKEALLSAPALALPDLTKPFTLYVDERAGVARGVLTQTLGPWRRPVAYLSKKLDPVASGWPTCLKAVAAVALLLKDADKLTLGQNVTVIASHSLESIVRQPPDRWMTNARMTHYQSLLLNERVSFAPPAVLNPATLLPVESEATPVHRCSEILAEETGTRRDLKDQPLPGVPAWYTDGSSFIAEGKRRAGAAIVDGKRTVWASSLPEGTSAQKAELVALTQALRLAEGKDINIYTDSRYAFATAHIHGAIYKQRGWLTSAGKDIKNKEEILALLEAIHLPKRVAIIHCPGHQKGNDPVATGNRRADEAAKQAALSTRVLAETTKPAGKRTADGSEFEKRTADGSEFESPKKKAKVE

SEQ ID NO: 838 - protein, 2091 aa, synthetic construct
MPAAKRVKLDGGDKKYSIGLDIGTNSVGWAVITDEYKVPSKKFKVLGNTDRHSIKKNLIGALLFDSGETAEATRLKRTARRRYTRRKNRICYLQEIFSNEMAKVDDSFFHRLEESFLVEEDKKHERHPIFGNIVDEVAYHEKYPTIYHLRKKLVDSTDKADLRLIYLALAHMIKFRGHFLIEGDLNPDNSDVDKLFIQLVQTYNQLFEENPINASGVDAKAILSARLSKSRRLENLIAQLPGEKKNGLFGNLIALSLGLTPNFKSNFDLAEDAKLQLSKDTYDDDLDNLLAQIGDQYADLFLAAKNLSDAILLSDILRVNTEITKAPLSASMIKRYDEHHQDLTLLKALVRQQLPEKYKEIFFDQSKNGYAGYIDGGASQEEFYKFIKPILEKMDGTEELLVKLNREDLLRKQRTFDNGSIPHQIHLGELHAILRRQEDFYPFLKDNREKIEKILTFRIPYYVGPLARGNSRFAWMTRKSEETITPWNFEEVVDKGASAQSFIERMTNFDKNLPNEKVLPKHSLLYEYFTVYNELTKVKYVTEGMRKPAFLSGEQKKAIVDLLFKTNRKVTVKQLKEDYFKKIECFDSVEISGVEDRFNASLGTYHDLLKIIKDKDFLDNEENEDILEDIVLTLTLFEDREMIEERLKTYAHLFDDKVMKQLKRRRYTGWGRLSRKLINGIRDKQSGKTILDFLKSDGFANRNFMQLIHDDSLTFKEDIQKAQVSGQGDSLHEHIANLAGSPAIKKGILQTVKVVDELVKVMGRHKPENIVIEMARENQTTQKGQKNSRERMKRIEEGIKELGSQILKEHPVENTQLQNEKLYLYYLQNGRDMYVDQELDINRLSDYDVDHIVPQSFLKDDSIDNKVLTRSDKARGKSDNVPSEEVVKKMKNYWRQLLNAKLITQRKFDNLTKAERGGLSELDKAGFIKRQLVETRQITKHVAQILDSRMNTKYDENDKLIREVKVITLKSKLVSDFRKDFQFYKVREINNYHHAHDAYLNAVVGTALIKKYPKLESEFVYGDYKVYDVRKMIAKSEQEIGKATAKYFFYSNIMNFFKTEITLANGEIRKRPLIETNGETGEIVWDKGRDFATVRKVLSMPQVNIVKKTEVQTGGFSKESILPKRNSDKLIARKKDWDPKKYGGFDSPTVAYSVLVVAKVEKGKSKKLKSVKELLGITIMERSSFEKNPIDFLEAKGYKEVKKDLIIKLPKYSLFELENGRKRMLASAGELQKGNELALPSKYVNFLYLASHYEKLKGSPEDNEQKQLFVEQHKHYLDEIIEQISEFSKRVILADANLDKVLSAYNKHRDKPIREQAENIIHLFTLTNLGAPAAFKYFDTTIDRKRYTSTKEVLDATLIHQSITGLYETRIDLSQLGGDGGGSSEAAAKGGVLNLEEEYRLHEKPVPSSIDPSWLQLFPTVWAERAGMGLANQVPPVVVELRSGASPVAVRQYPMSKEAREGIRPHIQRFLDLGVLVPCQSPWNTPLLPVKKPGTNDYRPVQDLREINKRVQDIHPTVPNPYNLLSSLPPSHTWYSVLDLKDAFFCLKLHPNSQPLFAFEWRDPEKGNTGQLTWTRLPQGFKNSPTLFNEALHRDLAPFRALNPQVVLLQYVDDLLVAAPTYRDCKEGTQKLLQELSKLGYRVSAKKAQLCQKEVTYLGYLLKEGKRWLTPARKATVMKIPPPTTPRQVREFLGTAGFCRLWIPGFASLAAPLYPLTKPSIPFIWTEEHQKAFDRIKEALLSAPALALPDLTKPFTLYVDERAGVARGVLTQTLGPWRRPVAYLSKKLDPVASGWPTCLKAVAAVALLLKDADKLTLGQNVTVIASHSLESIVRQPPDRWMTNARMTHYQSLLLNERVSFAPPAVLNPATLLPVESEATPVHRCSEILAEETGTRRDLKDQPLPGVPAWYTDGSSFIAEGKRRAGAAIVDGKRTVWASSLPEGTSAQKAELVALTQALRLAEGKDINIYTDSRYAFATAHIHGAIYKQRGWLTSAGKDIKNKEEILALLEAIHLPKRVAIIHCPGHQKGNDPVATGNRRADEAAKQAALSTRVLAETTKPAGKRTADGSEFEKRTADGSEFESPKKKAKVE

SEQ ID NO: 839 - protein, 2094 aa, synthetic construct
MPAAKRVKLDGGDKKYSIGLDIGTNSVGWAVITDEYKVPSKKFKVLGNTDRHSIKKNLIGALLFDSGETAEATRLKRTARRRYTRRKNRICYLQEIFSNEMAKVDDSFFHRLEESFLVEEDKKHERHPIFGNIVDEVAYHEKYPTIYHLRKKLVDSTDKADLRLIYLALAHMIKFRGHFLIEGDLNPDNSDVDKLFIQLVQTYNQLFEENPINASGVDAKAILSARLSKSRRLENLIAQLPGEKKNGLFGNLIALSLGLTPNFKSNFDLAEDAKLQLSKDTYDDDLDNLLAQIGDQYADLFLAAKNLSDAILLSDILRVNTEITKAPLSASMIKRYDEHHQDLTLLKALVRQQLPEKYKEIFFDQSKNGYAGYIDGGASQEEFYKFIKPILEKMDGTEELLVKLNREDLLRKQRTFDNGSIPHQIHLGELHAILRRQEDFYPFLKDNREKIEKILTFRIPYYVGPLARGNSRFAWMTRKSEETITPWNFEEVVDKGASAQSFIERMTNFDKNLPNEKVLPKHSLLYEYFTVYNELTKVKYVTEGMRKPAFLSGEQKKAIVDLLFKTNRKVTVKQLKEDYFKKIECFDSVEISGVEDRFNASLGTYHDLLKIIKDKDFLDNEENEDILEDIVLTLTLFEDREMIEERLKTYAHLFDDKVMKQLKRRRYTGWGRLSRKLINGIRDKQSGKTILDFLKSDGFANRNFMQLIHDDSLTFKEDIQKAQVSGQGDSLHEHIANLAGSPAIKKGILQTVKVVDELVKVMGRHKPENIVIEMARENQTTQKGQKNSRERMKRIEEGIKELGSQILKEHPVENTQLQNEKLYLYYLQNGRDMYVDQELDINRLSDYDVDHIVPQSFLKDDSIDNKVLTRSDKARGKSDNVPSEEVVKKMKNYWRQLLNAKLITQRKFDNLTKAERGGLSELDKAGFIKRQLVETRQITKHVAQILDSRMNTKYDENDKLIREVKVITLKSKLVSDFRKDFQFYKVREINNYHHAHDAYLNAVVGTALIKKYPKLESEFVYGDYKVYDVRKMIAKSEQEIGKATAKYFFYSNIMNFFKTEITLANGEIRKRPLIETNGETGEIVWDKGRDFATVRKVLSMPQVNIVKKTEVQTGGFSKESILPKRNSDKLIARKKDWDPKKYGGFDSPTVAYSVLVVAKVEKGKSKKLKSVKELLGITIMERSSFEKNPIDFLEAKGYKEVKKDLIIKLPKYSLFELENGRKRMLASAGELQKGNELALPSKYVNFLYLASHYEKLKGSPEDNEQKQLFVEQHKHYLDEIIEQISEFSKRVILADANLDKVLSAYNKHRDKPIREQAENIIHLFTLTNLGAPAAFKYFDTTIDRKRYTSTKEVLDATLIHQSITGLYETRIDLSQLGGDGGGSSPAPEAAAKGGVLNLEEEYRLHEKPVPSSIDPSWLQLFPTVWAERAGMGLANQVPPVVVELRSGASPVAVRQYPMSKEAREGIRPHIQRFLDLGVLVPCQSPWNTPLLPVKKPGTNDYRPVQDLREINKRVQDIHPTVPNPYNLLSSLPPSHTWYSVLDLKDAFFCLKLHPNSQPLFAFEWRDPEKGNTGQLTWTRLPQGFKNSPTLFNEALHRDLAPFRALNPQVVLLQYVDDLLVAAPTYRDCKEGTQKLLQELSKLGYRVSAKKAQLCQKEVTYLGYLLKEGKRWLTPARKATVMKIPPPTTPRQVREFLGTAGFCRLWIPGFASLAAPLYPLTKPSIPFIWTEEHQKAFDRIKEALLSAPALALPDLTKPFTLYVDERAGVARGVLTQTLGPWRRPVAYLSKKLDPVASGWPTCLKAVAAVALLLKDADKLTLGQNVTVIASHSLESIVRQPPDRWMTNARMTHYQSLLLNERVSFAPPAVLNPATLLPVESEATPVHRCSEILAEETGTRRDLKDQPLPGVPAWYTDGSSFIAEGKRRAGAAIVDGKRTVWASSLPEGTSAQKAELVALTQALRLAEGKDINIYTDSRYAFATAHIHGAIYKQRGWLTSAGKDIKNKEEILALLEAIHLPKRVAIIHCPGHQKGNDPVATGNRRADEAAKQAALSTRVLAETTKPAGKRTADGSEFEKRTADGSEFESPKKKAKVE

SEQ ID NO: 840 - protein, 2092 aa, synthetic construct
MPAAKRVKLDGGDKKYSIGLDIGTNSVGWAVITDEYKVPSKKFKVLGNTDRHSIKKNLIGALLFDSGETAEATRLKRTARRRYTRRKNRICYLQEIFSNEMAKVDDSFFHRLEESFLVEEDKKHERHPIFGNIVDEVAYHEKYPTIYHLRKKLVDSTDKADLRLIYLALAHMIKFRGHFLIEGDLNPDNSDVDKLFIQLVQTYNQLFEENPINASGVDAKAILSARLSKSRRLENLIAQLPGEKKNGLFGNLIALSLGLTPNFKSNFDLAEDAKLQLSKDTYDDDLDNLLAQIGDQYADLFLAAKNLSDAILLSDILRVNTEITKAPLSASMIKRYDEHHQDLTLLKALVRQQLPEKYKEIFFDQSKNGYAGYIDGGASQEEFYKFIKPILEKMDGTEELLVKLNREDLLRKQRTFDNGSIPHQIHLGELHAILRRQEDFYPFLKDNREKIEKILTFRIPYYVGPLARGNSRFAWMTRKSEETITPWNFEEVVDKGASAQSFIERMTNFDKNLPNEKVLPKHSLLYEYFTVYNELTKVKYVTEGMRKPAFLSGEQKKAIVDLLFKTNRKVTVKQLKEDYFKKIECFDSVEISGVEDRFNASLGTYHDLLKIIKDKDFLDNEENEDILEDIVLTLTLFEDREMIEERLKTYAHLFDDKVMKQLKRRRYTGWGRLSRKLINGIRDKQSGKTILDFLKSDGFANRNFMQLIHDDSLTFKEDIQKAQVSGQGDSLHEHIANLAGSPAIKKGILQTVKVVDELVKVMGRHKPENIVIEMARENQTTQKGQKNSRERMKRIEEGIKELGSQILKEHPVENTQLQNEKLYLYYLQNGRDMYVDQELDINRLSDYDVDHIVPQSFLKDDSIDNKVLTRSDKARGKSDNVPSEEVVKKMKNYWRQLLNAKLITQRKFDNLTKAERGGLSELDKAGFIKRQLVETRQITKHVAQILDSRMNTKYDENDKLIREVKVITLKSKLVSDFRKDFQFYKVREINNYHHAHDAYLNAVVGTALIKKYPKLESEFVYGDYKVYDVRKMIAKSEQEIGKATAKYFFYSNIMNFFKTEITLANGEIRKRPLIETNGETGEIVWDKGRDFATVRKVLSMPQVNIVKKTEVQTGGFSKESILPKRNSDKLIARKKDWDPKKYGGFDSPTVAYSVLVVAKVEKGKSKKLKSVKELLGITIMERSSFEKNPIDFLEAKGYKEVKKDLIIKLPKYSLFELENGRKRMLASAGELQKGNELALPSKYVNFLYLASHYEKLKGSPEDNEQKQLFVEQHKHYLDEIIEQISEFSKRVILADANLDKVLSAYNKHRDKPIREQAENIIHLFTLTNLGAPAAFKYFDTTIDRKRYTSTKEVLDATLIHQSITGLYETRIDLSQLGGDGGGSSPAPGGSGGVLNLEEEYRLHEKPVPSSIDPSWLQLFPTVWAERAGMGLANQVPPVVVELRSGASPVAVRQYPMSKEAREGIRPHIQRFLDLGVLVPCQSPWNTPLLPVKKPGTNDYRPVQDLREINKRVQDIHPTVPNPYNLLSSLPPSHTWYSVLDLKDAFFCLKLHPNSQPLFAFEWRDPEKGNTGQLTWTRLPQGFKNSPTLFNEALHRDLAPFRALNPQVVLLQYVDDLLVAAPTYRDCKEGTQKLLQELSKLGYRVSAKKAQLCQKEVTYLGYLLKEGKRWLTPARKATVMKIPPPTTPRQVREFLGTAGFCRLWIPGFASLAAPLYPLTKPSIPFIWTEEHQKAFDRIKEALLSAPALALPDLTKPFTLYVDERAGVARGVLTQTLGPWRRPVAYLSKKLDPVASGWPTCLKAVAAVALLLKDADKLTLGQNVTVIASHSLESIVRQPPDRWMTNARMTHYQSLLLNERVSFAPPAVLNPATLLPVESEATPVHRCSEILAEETGTRRDLKDQPLPGVPAWYTDGSSFIAEGKRRAGAAIVDGKRTVWASSLPEGTSAQKAELVALTQALRLAEGKDINIYTDSRYAFATAHIHGAIYKQRGWLTSAGKDIKNKEEILALLEAIHLPKRVAIIHCPGHQKGNDPVATGNRRADEAAKQAALSTRVLAETTKPAGKRTADGSEFEKRTADGSEFESPKKKAKVE

SEQ ID NO: 841 - protein, 2094 aa, synthetic construct
MPAAKRVKLDGGDKKYSIGLDIGTNSVGWAVITDEYKVPSKKFKVLGNTDRHSIKKNLIGALLFDSGETAEATRLKRTARRRYTRRKNRICYLQEIFSNEMAKVDDSFFHRLEESFLVEEDKKHERHPIFGNIVDEVAYHEKYPTIYHLRKKLVDSTDKADLRLIYLALAHMIKFRGHFLIEGDLNPDNSDVDKLFIQLVQTYNQLFEENPINASGVDAKAILSARLSKSRRLENLIAQLPGEKKNGLFGNLIALSLGLTPNFKSNFDLAEDAKLQLSKDTYDDDLDNLLAQIGDQYADLFLAAKNLSDAILLSDILRVNTEITKAPLSASMIKRYDEHHQDLTLLKALVRQQLPEKYKEIFFDQSKNGYAGYIDGGASQEEFYKFIKPILEKMDGTEELLVKLNREDLLRKQRTFDNGSIPHQIHLGELHAILRRQEDFYPFLKDNREKIEKILTFRIPYYVGPLARGNSRFAWMTRKSEETITPWNFEEVVDKGASAQSFIERMTNFDKNLPNEKVLPKHSLLYEYFTVYNELTKVKYVTEGMRKPAFLSGEQKKAIVDLLFKTNRKVTVKQLKEDYFKKIECFDSVEISGVEDRFNASLGTYHDLLKIIKDKDFLDNEENEDILEDIVLTLTLFEDREMIEERLKTYAHLFDDKVMKQLKRRRYTGWGRLSRKLINGIRDKQSGKTILDFLKSDGFANRNFMQLIHDDSLTFKEDIQKAQVSGQGDSLHEHIANLAGSPAIKKGILQTVKVVDELVKVMGRHKPENIVIEMARENQTTQKGQKNSRERMKRIEEGIKELGSQILKEHPVENTQLQNEKLYLYYLQNGRDMYVDQELDINRLSDYDVDHIVPQSFLKDDSIDNKVLTRSDKARGKSDNVPSEEVVKKMKNYWRQLLNAKLITQRKFDNLTKAERGGLSELDKAGFIKRQLVETRQITKHVAQILDSRMNTKYDENDKLIREVKVITLKSKLVSDFRKDFQFYKVREINNYHHAHDAYLNAVVGTALIKKYPKLESEFVYGDYKVYDVRKMIAKSEQEIGKATAKYFFYSNIMNFFKTEITLANGEIRKRPLIETNGETGEIVWDKGRDFATVRKVLSMPQVNIVKKTEVQTGGFSKESILPKRNSDKLIARKKDWDPKKYGGFDSPTVAYSVLVVAKVEKGKSKKLKSVKELLGITIMERSSFEKNPIDFLEAKGYKEVKKDLIIKLPKYSLFELENGRKRMLASAGELQKGNELALPSKYVNFLYLASHYEKLKGSPEDNEQKQLFVEQHKHYLDEIIEQISEFSKRVILADANLDKVLSAYNKHRDKPIREQAENIIHLFTLTNLGAPAAFKYFDTTIDRKRYTSTKEVLDATLIHQSITGLYETRIDLSQLGGDGGGGGEAAAKGGSGGVLNLEEEYRLHEKPVPSSIDPSWLQLFPTVWAERAGMGLANQVPPVVVELRSGASPVAVRQYPMSKEAREGIRPHIQRFLDLGVLVPCQSPWNTPLLPVKKPGTNDYRPVQDLREINKRVQDIHPTVPNPYNLLSSLPPSHTWYSVLDLKDAFFCLKLHPNSQPLFAFEWRDPEKGNTGQLTWTRLPQGFKNSPTLFNEALHRDLAPFRALNPQVVLLQYVDDLLVAAPTYRDCKEGTQKLLQELSKLGYRVSAKKAQLCQKEVTYLGYLLKEGKRWLTPARKATVMKIPPPTTPRQVREFLGTAGFCRLWIPGFASLAAPLYPLTKPSIPFIWTEEHQKAFDRIKEALLSAPALALPDLTKPFTLYVDERAGVARGVLTQTLGPWRRPVAYLSKKLDPVASGWPTCLKAVAAVALLLKDADKLTLGQNVTVIASHSLESIVRQPPDRWMTNARMTHYQSLLLNERVSFAPPAVLNPATLLPVESEATPVHRCSEILAEETGTRRDLKDQPLPGVPAWYTDGSSFIAEGKRRAGAAIVDGKRTVWASSLPEGTSAQKAELVALTQALRLAEGKDINIYTDSRYAFATAHIHGAIYKQRGWLTSAGKDIKNKEEILALLEAIHLPKRVAIIHCPGHQKGNDPVATGNRRADEAAKQAALSTRVLAETTKPAGKRTADGSEFEKRTADGSEFESPKKKAKVE

SEQ ID NO: 842 - protein, 2091 aa, synthetic construct
MPAAKRVKLDGGDKKYSIGLDIGTNSVGWAVITDEYKVPSKKFKVLGNTDRHSIKKNLIGALLFDSGETAEATRLKRTARRRYTRRKNRICYLQEIFSNEMAKVDDSFFHRLEESFLVEEDKKHERHPIFGNIVDEVAYHEKYPTIYHLRKKLVDSTDKADLRLIYLALAHMIKFRGHFLIEGDLNPDNSDVDKLFIQLVQTYNQLFEENPINASGVDAKAILSARLSKSRRLENLIAQLPGEKKNGLFGNLIALSLGLTPNFKSNFDLAEDAKLQLSKDTYDDDLDNLLAQIGDQYADLFLAAKNLSDAILLSDILRVNTEITKAPLSASMIKRYDEHHQDLTLLKALVRQQLPEKYKEIFFDQSKNGYAGYIDGGASQEEFYKFIKPILEKMDGTEELLVKLNREDLLRKQRTFDNGSIPHQIHLGELHAILRRQEDFYPFLKDNREKIEKILTFRIPYYVGPLARGNSRFAWMTRKSEETITPWNFEEVVDKGASAQSFIERMTNFDKNLPNEKVLPKHSLLYEYFTVYNELTKVKYVTEGMRKPAFLSGEQKKAIVDLLFKTNRKVTVKQLKEDYFKKIECFDSVEISGVEDRFNASLGTYHDLLKIIKDKDFLDNEENEDILEDIVLTLTLFEDREMIEERLKTYAHLFDDKVMKQLKRRRYTGWGRLSRKLINGIRDKQSGKTILDFLKSDGFANRNFMQLIHDDSLTFKEDIQKAQVSGQGDSLHEHIANLAGSPAIKKGILQTVKVVDELVKVMGRHKPENIVIEMARENQTTQKGQKNSRERMKRIEEGIKELGSQILKEHPVENTQLQNEKLYLYYLQNGRDMYVDQELDINRLSDYDVDHIVPQSFLKDDSIDNKVLTRSDKARGKSDNVPSEEVVKKMKNYWRQLLNAKLITQRKFDNLTKAERGGLSELDKAGFIKRQLVETRQITKHVAQILDSRMNTKYDENDKLIREVKVITLKSKLVSDFRKDFQFYKVREINNYHHAHDAYLNAVVGTALIKKYPKLESEFVYGDYKVYDVRKMIAKSEQEIGKATAKYFFYSNIMNFFKTEITLANGEIRKRPLIETNGETGEIVWDKGRDFATVRKVLSMPQVNIVKKTEVQTGGFSKESILPKRNSDKLIARKKDWDPKKYGGFDSPTVAYSVLVVAKVEKGKSKKLKSVKELLGITIMERSSFEKNPIDFLEAKGYKEVKKDLIIKLPKYSLFELENGRKRMLASAGELQKGNELALPSKYVNFLYLASHYEKLKGSPEDNEQKQLFVEQHKHYLDEIIEQISEFSKRVILADANLDKVLSAYNKHRDKPIREQAENIIHLFTLTNLGAPAAFKYFDTTIDRKRYTSTKEVLDATLIHQSITGLYETRIDLSQLGGDGGGGGGGGGGGGVLNLEEEYRLHEKPVPSSIDPSWLQLFPTVWAERAGMGLANQVPPVVVELRSGASPVAVRQYPMSKEAREGIRPHIQRFLDLGVLVPCQSPWNTPLLPVKKPGTNDYRPVQDLREINKRVQDIHPTVPNPYNLLSSLPPSHTWYSVLDLKDAFFCLKLHPNSQPLFAFEWRDPEKGNTGQLTWTRLPQGFKNSPTLFNEALHRDLAPFRALNPQVVLLQYVDDLLVAAPTYRDCKEGTQKLLQELSKLGYRVSAKKAQLCQKEVTYLGYLLKEGKRWLTPARKATVMKIPPPTTPRQVREFLGTAGFCRLWIPGFASLAAPLYPLTKPSIPFIWTEEHQKAFDRIKEALLSAPALALPDLTKPFTLYVDERAGVARGVLTQTLGPWRRPVAYLSKKLDPVASGWPTCLKAVAAVALLLKDADKLTLGQNVTVIASHSLESIVRQPPDRWMTNARMTHYQSLLLNERVSFAPPAVLNPATLLPVESEATPVHRCSEILAEETGTRRDLKDQPLPGVPAWYTDGSSFIAEGKRRAGAAIVDGKRTVWASSLPEGTSAQKAELVALTQALRLAEGKDINIYTDSRYAFATAHIHGAIYKQRGWLTSAGKDIKNKEEILALLEAIHLPKRVAIIHCPGHQKGNDPVATGNRRADEAAKQAALSTRVLAETTKPAGKRTADGSEFEKRTADGSEFESPKKKAKVE

SEQ ID NO: 843 - protein, 2103 aa, synthetic construct
MPAAKRVKLDGGDKKYSIGLDIGTNSVGWAVITDEYKVPSKKFKVLGNTDRHSIKKNLIGALLFDSGETAEATRLKRTARRRYTRRKNRICYLQEIFSNEMAKVDDSFFHRLEESFLVEEDKKHERHPIFGNIVDEVAYHEKYPTIYHLRKKLVDSTDKADLRLIYLALAHMIKFRGHFLIEGDLNPDNSDVDKLFIQLVQTYNQLFEENPINASGVDAKAILSARLSKSRRLENLIAQLPGEKKNGLFGNLIALSLGLTPNFKSNFDLAEDAKLQLSKDTYDDDLDNLLAQIGDQYADLFLAAKNLSDAILLSDILRVNTEITKAPLSASMIKRYDEHHQDLTLLKALVRQQLPEKYKEIFFDQSKNGYAGYIDGGASQEEFYKFIKPILEKMDGTEELLVKLNREDLLRKQRTFDNGSIPHQIHLGELHAILRRQEDFYPFLKDNREKIEKILTFRIPYYVGPLARGNSRFAWMTRKSEETITPWNFEEVVDKGASAQSFIERMTNFDKNLPNEKVLPKHSLLYEYFTVYNELTKVKYVTEGMRKPAFLSGEQKKAIVDLLFKTNRKVTVKQLKEDYFKKIECFDSVEISGVEDRFNASLGTYHDLLKIIKDKDFLDNEENEDILEDIVLTLTLFEDREMIEERLKTYAHLFDDKVMKQLKRRRYTGWGRLSRKLINGIRDKQSGKTILDFLKSDGFANRNFMQLIHDDSLTFKEDIQKAQVSGQGDSLHEHIANLAGSPAIKKGILQTVKVVDELVKVMGRHKPENIVIEMARENQTTQKGQKNSRERMKRIEEGIKELGSQILKEHPVENTQLQNEKLYLYYLQNGRDMYVDQELDINRLSDYDVDHIVPQSFLKDDSIDNKVLTRSDKARGKSDNVPSEEVVKKMKNYWRQLLNAKLITQRKFDNLTKAERGGLSELDKAGFIKRQLVETRQITKHVAQILDSRMNTKYDENDKLIREVKVITLKSKLVSDFRKDFQFYKVREINNYHHAHDAYLNAVVGTALIKKYPKLESEFVYGDYKVYDVRKMIAKSEQEIGKATAKYFFYSNIMNFFKTEITLANGEIRKRPLIETNGETGEIVWDKGRDFATVRKVLSMPQVNIVKKTEVQTGGFSKESILPKRNSDKLIARKKDWDPKKYGGFDSPTVAYSVLVVAKVEKGKSKKLKSVKELLGITIMERSSFEKNPIDFLEAKGYKEVKKDLIIKLPKYSLFELENGRKRMLASAGELQKGNELALPSKYVNFLYLASHYEKLKGSPEDNEQKQLFVEQHKHYLDEIIEQISEFSKRVILADANLDKVLSAYNKHRDKPIREQAENIIHLFTLTNLGAPAAFKYFDTTIDRKRYTSTKEVLDATLIHQSITGLYETRIDLSQLGGDGGGGGGSGGGGSGGGGSGGGGSGGVLNLEEEYRLHEKPVPSSIDPSWLQLFPTVWAERAGMGLANQVPPVVVELRSGASPVAVRQYPMSKEAREGIRPHIQRFLDLGVLVPCQSPWNTPLLPVKKPGTNDYRPVQDLREINKRVQDIHPTVPNPYNLLSSLPPSHTWYSVLDLKDAFFCLKLHPNSQPLFAFEWRDPEKGNTGQLTWTRLPQGFKNSPTLFNEALHRDLAPFRALNPQVVLLQYVDDLLVAAPTYRDCKEGTQKLLQELSKLGYRVSAKKAQLCQKEVTYLGYLLKEGKRWLTPARKATVMKIPPPTTPRQVREFLGTAGFCRLWIPGFASLAAPLYPLTKPSIPFIWTEEHQKAFDRIKEALLSAPALALPDLTKPFTLYVDERAGVARGVLTQTLGPWRRPVAYLSKKLDPVASGWPTCLKAVAAVALLLKDADKLTLGQNVTVIASHSLESIVRQPPDRWMTNARMTHYQSLLLNERVSFAPPAVLNPATLLPVESEATPVHRCSEILAEETGTRRDLKDQPLPGVPAWYTDGSSFIAEGKRRAGAAIVDGKRTVWASSLPEGTSAQKAELVALTQALRLAEGKDINIYTDSRYAFATAHIHGAIYKQRGWLTSAGKDIKNKEEILALLEAIHLPKRVAIIHCPGHQKGNDPVATGNRRADEAAKQAALSTRVLAETTKPAGKRTADGSEFEKRTADGSEFESPKKKAKVE

SEQ ID NO: 844 - protein, 2094 aa, synthetic construct
MPAAKRVKLDGGDKKYSIGLDIGTNSVGWAVITDEYKVPSKKFKVLGNTDRHSIKKNLIGALLFDSGETAEATRLKRTARRRYTRRKNRICYLQEIFSNEMAKVDDSFFHRLEESFLVEEDKKHERHPIFGNIVDEVAYHEKYPTIYHLRKKLVDSTDKADLRLIYLALAHMIKFRGHFLIEGDLNPDNSDVDKLFIQLVQTYNQLFEENPINASGVDAKAILSARLSKSRRLENLIAQLPGEKKNGLFGNLIALSLGLTPNFKSNFDLAEDAKLQLSKDTYDDDLDNLLAQIGDQYADLFLAAKNLSDAILLSDILRVNTEITKAPLSASMIKRYDEHHQDLTLLKALVRQQLPEKYKEIFFDQSKNGYAGYIDGGASQEEFYKFIKPILEKMDGTEELLVKLNREDLLRKQRTFDNGSIPHQIHLGELHAILRRQEDFYPFLKDNREKIEKILTFRIPYYVGPLARGNSRFAWMTRKSEETITPWNFEEVVDKGASAQSFIERMTNFDKNLPNEKVLPKHSLLYEYFTVYNELTKVKYVTEGMRKPAFLSGEQKKAIVDLLFKTNRKVTVKQLKEDYFKKIECFDSVEISGVEDRFNASLGTYHDLLKIIKDKDFLDNEENEDILEDIVLTLTLFEDREMIEERLKTYAHLFDDKVMKQLKRRRYTGWGRLSRKLINGIRDKQSGKTILDFLKSDGFANRNFMQLIHDDSLTFKEDIQKAQVSGQGDSLHEHIANLAGSPAIKKGILQTVKVVDELVKVMGRHKPENIVIEMARENQTTQKGQKNSRERMKRIEEGIKELGSQILKEHPVENTQLQNEKLYLYYLQNGRDMYVDQELDINRLSDYDVDHIVPQSFLKDDSIDNKVLTRSDKARGKSDNVPSEEVVKKMKNYWRQLLNAKLITQRKFDNLTKAERGGLSELDKAGFIKRQLVETRQITKHVAQILDSRMNTKYDENDKLIREVKVITLKSKLVSDFRKDFQFYKVREINNYHHAHDAYLNAVVGTALIKKYPKLESEFVYGDYKVYDVRKMIAKSEQEIGKATAKYFFYSNIMNFFKTEITLANGEIRKRPLIETNGETGEIVWDKGRDFATVRKVLSMPQVNIVKKTEVQTGGFSKESILPKRNSDKLIARKKDWDPKKYGGFDSPTVAYSVLVVAKVEKGKSKKLKSVKELLGITIMERSSFEKNPIDFLEAKGYKEVKKDLIIKLPKYSLFELENGRKRMLASAGELQKGNELALPSKYVNFLYLASHYEKLKGSPEDNEQKQLFVEQHKHYLDEIIEQISEFSKRVILADANLDKVLSAYNKHRDKPIREQAENIIHLFTLTNLGAPAAFKYFDTTIDRKRYTSTKEVLDATLIHQSITGLYETRIDLSQLGGDGGGGSEAAAKPAPGGVLNLEEEYRLHEKPVPSSIDPSWLQLFPTVWAERAGMGLANQVPPVVVELRSGASPVAVRQYPMSKEAREGIRPHIQRFLDLGVLVPCQSPWNTPLLPVKKPGTNDYRPVQDLREINKRVQDIHPTVPNPYNLLSSLPPSHTWYSVLDLKDAFFCLKLHPNSQPLFAFEWRDPEKGNTGQLTWTRLPQGFKNSPTLFNEALHRDLAPFRALNPQVVLLQYVDDLLVAAPTYRDCKEGTQKLLQELSKLGYRVSAKKAQLCQKEVTYLGYLLKEGKRWLTPARKATVMKIPPPTTPRQVREFLGTAGFCRLWIPGFASLAAPLYPLTKPSIPFIWTEEHQKAFDRIKEALLSAPALALPDLTKPFTLYVDERAGVARGVLTQTLGPWRRPVAYLSKKLDPVASGWPTCLKAVAAVALLLKDADKLTLGQNVTVIASHSLESIVRQPPDRWMTNARMTHYQSLLLNERVSFAPPAVLNPATLLPVESEATPVHRCSEILAEETGTRRDLKDQPLPGVPAWYTDGSSFIAEGKRRAGAAIVDGKRTVWASSLPEGTSAQKAELVALTQALRLAEGKDINIYTDSRYAFATAHIHGAIYKQRGWLTSAGKDIKNKEEILALLEAIHLPKRVAIIHCPGHQKGNDPVATGNRRADEAAKQAALSTRVLAETTKPAGKRTADGSEFEKRTADGSEFESPKKKAKVE

SEQ ID NO: 845 - protein, 2092 aa, synthetic construct
MPAAKRVKLDGGDKKYSIGLDIGTNSVGWAVITDEYKVPSKKFKVLGNTDRHSIKKNLIGALLFDSGETAEATRLKRTARRRYTRRKNRICYLQEIFSNEMAKVDDSFFHRLEESFLVEEDKKHERHPIFGNIVDEVAYHEKYPTIYHLRKKLVDSTDKADLRLIYLALAHMIKFRGHFLIEGDLNPDNSDVDKLFIQLVQTYNQLFEENPINASGVDAKAILSARLSKSRRLENLIAQLPGEKKNGLFGNLIALSLGLTPNFKSNFDLAEDAKLQLSKDTYDDDLDNLLAQIGDQYADLFLAAKNLSDAILLSDILRVNTEITKAPLSASMIKRYDEHHQDLTLLKALVRQQLPEKYKEIFFDQSKNGYAGYIDGGASQEEFYKFIKPILEKMDGTEELLVKLNREDLLRKQRTFDNGSIPHQIHLGELHAILRRQEDFYPFLKDNREKIEKILTFRIPYYVGPLARGNSRFAWMTRKSEETITPWNFEEVVDKGASAQSFIERMTNFDKNLPNEKVLPKHSLLYEYFTVYNELTKVKYVTEGMRKPAFLSGEQKKAIVDLLFKTNRKVTVKQLKEDYFKKIECFDSVEISGVEDRFNASLGTYHDLLKIIKDKDFLDNEENEDILEDIVLTLTLFEDREMIEERLKTYAHLFDDKVMKQLKRRRYTGWGRLSRKLINGIRDKQSGKTILDFLKSDGFANRNFMQLIHDDSLTFKEDIQKAQVSGQGDSLHEHIANLAGSPAIKKGILQTVKVVDELVKVMGRHKPENIVIEMARENQTTQKGQKNSRERMKRIEEGIKELGSQILKEHPVENTQLQNEKLYLYYLQNGRDMYVDQELDINRLSDYDVDHIVPQSFLKDDSIDNKVLTRSDKARGKSDNVPSEEVVKKMKNYWRQLLNAKLITQRKFDNLTKAERGGLSELDKAGFIKRQLVETRQITKHVAQILDSRMNTKYDENDKLIREVKVITLKSKLVSDFRKDFQFYKVREINNYHHAHDAYLNAVVGTALIKKYPKLESEFVYGDYKVYDVRKMIAKSEQEIGKATAKYFFYSNIMNFFKTEITLANGEIRKRPLIETNGETGEIVWDKGRDFATVRKVLSMPQVNIVKKTEVQTGGFSKESILPKRNSDKLIARKKDWDPKKYGGFDSPTVAYSVLVVAKVEKGKSKKLKSVKELLGITIMERSSFEKNPIDFLEAKGYKEVKKDLIIKLPKYSLFELENGRKRMLASAGELQKGNELALPSKYVNFLYLASHYEKLKGSPEDNEQKQLFVEQHKHYLDEIIEQISEFSKRVILADANLDKVLSAYNKHRDKPIREQAENIIHLFTLTNLGAPAAFKYFDTTIDRKRYTSTKEVLDATLIHQSITGLYETRIDLSQLGGDGGGSSPAPGGGGGVLNLEEEYRLHEKPVPSSIDPSWLQLFPTVWAERAGMGLANQVPPVVVELRSGASPVAVRQYPMSKEAREGIRPHIQRFLDLGVLVPCQSPWNTPLLPVKKPGTNDYRPVQDLREINKRVQDIHPTVPNPYNLLSSLPPSHTWYSVLDLKDAFFCLKLHPNSQPLFAFEWRDPEKGNTGQLTWTRLPQGFKNSPTLFNEALHRDLAPFRALNPQVVLLQYVDDLLVAAPTYRDCKEGTQKLLQELSKLGYRVSAKKAQLCQKEVTYLGYLLKEGKRWLTPARKATVMKIPPPTTPRQVREFLGTAGFCRLWIPGFASLAAPLYPLTKPSIPFIWTEEHQKAFDRIKEALLSAPALALPDLTKPFTLYVDERAGVARGVLTQTLGPWRRPVAYLSKKLDPVASGWPTCLKAVAAVALLLKDADKLTLGQNVTVIASHSLESIVRQPPDRWMTNARMTHYQSLLLNERVSFAPPAVLNPATLLPVESEATPVHRCSEILAEETGTRRDLKDQPLPGVPAWYTDGSSFIAEGKRRAGAAIVDGKRTVWASSLPEGTSAQKAELVALTQALRLAEGKDINIYTDSRYAFATAHIHGAIYKQRGWLTSAGKDIKNKEEILALLEAIHLPKRVAIIHCPGHQKGNDPVATGNRRADEAAKQAALSTRVLAETTKPAGKRTADGSEFEKRTADGSEFESPKKKAKVE

SEQ ID NO: 846 - protein, 2095 aa, synthetic construct
MPAAKRVKLDGGDKKYSIGLDIGTNSVGWAVITDEYKVPSKKFKVLGNTDRHSIKKNLIGALLFDSGETAEATRLKRTARRRYTRRKNRICYLQEIFSNEMAKVDDSFFHRLEESFLVEEDKKHERHPIFGNIVDEVAYHEKYPTIYHLRKKLVDSTDKADLRLIYLALAHMIKFRGHFLIEGDLNPDNSDVDKLFIQLVQTYNQLFEENPINASGVDAKAILSARLSKSRRLENLIAQLPGEKKNGLFGNLIALSLGLTPNFKSNFDLAEDAKLQLSKDTYDDDLDNLLAQIGDQYADLFLAAKNLSDAILLSDILRVNTEITKAPLSASMIKRYDEHHQDLTLLKALVRQQLPEKYKEIFFDQSKNGYAGYIDGGASQEEFYKFIKPILEKMDGTEELLVKLNREDLLRKQRTFDNGSIPHQIHLGELHAILRRQEDFYPFLKDNREKIEKILTFRIPYYVGPLARGNSRFAWMTRKSEETITPWNFEEVVDKGASAQSFIERMTNFDKNLPNEKVLPKHSLLYEYFTVYNELTKVKYVTEGMRKPAFLSGEQKKAIVDLLFKTNRKVTVKQLKEDYFKKIECFDSVEISGVEDRFNASLGTYHDLLKIIKDKDFLDNEENEDILEDIVLTLTLFEDREMIEERLKTYAHLFDDKVMKQLKRRRYTGWGRLSRKLINGIRDKQSGKTILDFLKSDGFANRNFMQLIHDDSLTFKEDIQKAQVSGQGDSLHEHIANLAGSPAIKKGILQTVKVVDELVKVMGRHKPENIVIEMARENQTTQKGQKNSRERMKRIEEGIKELGSQILKEHPVENTQLQNEKLYLYYLQNGRDMYVDQELDINRLSDYDVDHIVPQSFLKDDSIDNKVLTRSDKARGKSDNVPSEEVVKKMKNYWRQLLNAKLITQRKFDNLTKAERGGLSELDKAGFIKRQLVETRQITKHVAQILDSRMNTKYDENDKLIREVKVITLKSKLVSDFRKDFQFYKVREINNYHHAHDAYLNAVVGTALIKKYPKLESEFVYGDYKVYDVRKMIAKSEQEIGKATAKYFFYSNIMNFFKTEITLANGEIRKRPLIETNGETGEIVWDKGRDFATVRKVLSMPQVNIVKKTEVQTGGFSKESILPKRNSDKLIARKKDWDPKKYGGFDSPTVAYSVLVVAKVEKGKSKKLKSVKELLGITIMERSSFEKNPIDFLEAKGYKEVKKDLIIKLPKYSLFELENGRKRMLASAGELQKGNELALPSKYVNFLYLASHYEKLKGSPEDNEQKQLFVEQHKHYLDEIIEQISEFSKRVILADANLDKVLSAYNKHRDKPIREQAENIIHLFTLTNLGAPAAFKYFDTTIDRKRYTSTKEVLDATLIHQSITGLYETRIDLSQLGGDGGGSSGSSGSSGSSGGVLNLEEEYRLHEKPVPSSIDPSWLQLFPTVWAERAGMGLANQVPPVVVELRSGASPVAVRQYPMSKEAREGIRPHIQRFLDLGVLVPCQSPWNTPLLPVKKPGTNDYRPVQDLREINKRVQDIHPTVPNPYNLLSSLPPSHTWYSVLDLKDAFFCLKLHPNSQPLFAFEWRDPEKGNTGQLTWTRLPQGFKNSPTLFNEALHRDLAPFRALNPQVVLLQYVDDLLVAAPTYRDCKEGTQKLLQELSKLGYRVSAKKAQLCQKEVTYLGYLLKEGKRWLTPARKATVMKIPPPTTPRQVREFLGTAGFCRLWIPGFASLAAPLYPLTKPSIPFIWTEEHQKAFDRIKEALLSAPALALPDLTKPFTLYVDERAGVARGVLTQTLGPWRRPVAYLSKKLDPVASGWPTCLKAVAAVALLLKDADKLTLGQNVTVIASHSLESIVRQPPDRWMTNARMTHYQSLLLNERVSFAPPAVLNPATLLPVESEATPVHRCSEILAEETGTRRDLKDQPLPGVPAWYTDGSSFIAEGKRRAGAAIVDGKRTVWASSLPEGTSAQKAELVALTQALRLAEGKDINIYTDSRYAFATAHIHGAIYKQRGWLTSAGKDIKNKEEILALLEAIHLPKRVAIIHCPGHQKGNDPVATGNRRADEAAKQAALSTRVLAETTKPAGKRTADGSEFEKRTADGSEFESPKKKAKVE

SEQ ID NO: 847 - protein, 2094 aa, synthetic construct
MPAAKRVKLDGGDKKYSIGLDIGTNSVGWAVITDEYKVPSKKFKVLGNTDRHSIKKNLIGALLFDSGETAEATRLKRTARRRYTRRKNRICYLQEIFSNEMAKVDDSFFHRLEESFLVEEDKKHERHPIFGNIVDEVAYHEKYPTIYHLRKKLVDSTDKADLRLIYLALAHMIKFRGHFLIEGDLNPDNSDVDKLFIQLVQTYNQLFEENPINASGVDAKAILSARLSKSRRLENLIAQLPGEKKNGLFGNLIALSLGLTPNFKSNFDLAEDAKLQLSKDTYDDDLDNLLAQIGDQYADLFLAAKNLSDAILLSDILRVNTEITKAPLSASMIKRYDEHHQDLTLLKALVRQQLPEKYKEIFFDQSKNGYAGYIDGGASQEEFYKFIKPILEKMDGTEELLVKLNREDLLRKQRTFDNGSIPHQIHLGELHAILRRQEDFYPFLKDNREKIEKILTFRIPYYVGPLARGNSRFAWMTRKSEETITPWNFEEVVDKGASAQSFIERMTNFDKNLPNEKVLPKHSLLYEYFTVYNELTKVKYVTEGMRKPAFLSGEQKKAIVDLLFKTNRKVTVKQLKEDYFKKIECFDSVEISGVEDRFNASLGTYHDLLKIIKDKDFLDNEENEDILEDIVLTLTLFEDREMIEERLKTYAHLFDDKVMKQLKRRRYTGWGRLSRKLINGIRDKQSGKTILDFLKSDGFANRNFMQLIHDDSLTFKEDIQKAQVSGQGDSLHEHIANLAGSPAIKKGILQTVKVVDELVKVMGRHKPENIVIEMARENQTTQKGQKNSRERMKRIEEGIKELGSQILKEHPVENTQLQNEKLYLYYLQNGRDMYVDQELDINRLSDYDVDHIVPQSFLKDDSIDNKVLTRSDKARGKSDNVPSEEVVKKMKNYWRQLLNAKLITQRKFDNLTKAERGGLSELDKAGFIKRQLVETRQITKHVAQILDSRMNTKYDENDKLIREVKVITLKSKLVSDFRKDFQFYKVREINNYHHAHDAYLNAVVGTALIKKYPKLESEFVYGDYKVYDVRKMIAKSEQEIGKATAKYFFYSNIMNFFKTEITLANGEIRKRPLIETNGETGEIVWDKGRDFATVRKVLSMPQVNIVKKTEVQTGGFSKESILPKRNSDKLIARKKDWDPKKYGGFDSPTVAYSVLVVAKVEKGKSKKLKSVKELLGITIMERSSFEKNPIDFLEAKGYKEVKKDLIIKLPKYSLFELENGRKRMLASAGELQKGNELALPSKYVNFLYLASHYEKLKGSPEDNEQKQLFVEQHKHYLDEIIEQISEFSKRVILADANLDKVLSAYNKHRDKPIREQAENIIHLFTLTNLGAPAAFKYFDTTIDRKRYTSTKEVLDATLIHQSITGLYETRIDLSQLGGDGGPAPGGSEAAAKGGVLNLEEEYRLHEKPVPSSIDPSWLQLFPTVWAERAGMGLANQVPPVVVELRSGASPVAVRQYPMSKEAREGIRPHIQRFLDLGVLVPCQSPWNTPLLPVKKPGTNDYRPVQDLREINKRVQDIHPTVPNPYNLLSSLPPSHTWYSVLDLKDAFFCLKLHPNSQPLFAFEWRDPEKGNTGQLTWTRLPQGFKNSPTLFNEALHRDLAPFRALNPQVVLLQYVDDLLVAAPTYRDCKEGTQKLLQELSKLGYRVSAKKAQLCQKEVTYLGYLLKEGKRWLTPARKATVMKIPPPTTPRQVREFLGTAGFCRLWIPGFASLAAPLYPLTKPSIPFIWTEEHQKAFDRIKEALLSAPALALPDLTKPFTLYVDERAGVARGVLTQTLGPWRRPVAYLSKKLDPVASGWPTCLKAVAAVALLLKDADKLTLGQNVTVIASHSLESIVRQPPDRWMTNARMTHYQSLLLNERVSFAPPAVLNPATLLPVESEATPVHRCSEILAEETGTRRDLKDQPLPGVPAWYTDGSSFIAEGKRRAGAAIVDGKRTVWASSLPEGTSAQKAELVALTQALRLAEGKDINIYTDSRYAFATAHIHGAIYKQRGWLTSAGKDIKNKEEILALLEAIHLPKRVAIIHCPGHQKGNDPVATGNRRADEAAKQAALSTRVLAETTKPAGKRTADGSEFEKRTADGSEFESPKKKAKVE

SEQ ID NO: 848 - protein, 2088 aa, synthetic construct
MPAAKRVKLDGGDKKYSIGLDIGTNSVGWAVITDEYKVPSKKFKVLGNTDRHSIKKNLIGALLFDSGETAEATRLKRTARRRYTRRKNRICYLQEIFSNEMAKVDDSFFHRLEESFLVEEDKKHERHPIFGNIVDEVAYHEKYPTIYHLRKKLVDSTDKADLRLIYLALAHMIKFRGHFLIEGDLNPDNSDVDKLFIQLVQTYNQLFEENPINASGVDAKAILSARLSKSRRLENLIAQLPGEKKNGLFGNLIALSLGLTPNFKSNFDLAEDAKLQLSKDTYDDDLDNLLAQIGDQYADLFLAAKNLSDAILLSDILRVNTEITKAPLSASMIKRYDEHHQDLTLLKALVRQQLPEKYKEIFFDQSKNGYAGYIDGGASQEEFYKFIKPILEKMDGTEELLVKLNREDLLRKQRTFDNGSIPHQIHLGELHAILRRQEDFYPFLKDNREKIEKILTFRIPYYVGPLARGNSRFAWMTRKSEETITPWNFEEVVDKGASAQSFIERMTNFDKNLPNEKVLPKHSLLYEYFTVYNELTKVKYVTEGMRKPAFLSGEQKKAIVDLLFKTNRKVTVKQLKEDYFKKIECFDSVEISGVEDRFNASLGTYHDLLKIIKDKDFLDNEENEDILEDIVLTLTLFEDREMIEERLKTYAHLFDDKVMKQLKRRRYTGWGRLSRKLINGIRDKQSGKTILDFLKSDGFANRNFMQLIHDDSLTFKEDIQKAQVSGQGDSLHEHIANLAGSPAIKKGILQTVKVVDELVKVMGRHKPENIVIEMARENQTTQKGQKNSRERMKRIEEGIKELGSQILKEHPVENTQLQNEKLYLYYLQNGRDMYVDQELDINRLSDYDVDHIVPQSFLKDDSIDNKVLTRSDKARGKSDNVPSEEVVKKMKNYWRQLLNAKLITQRKFDNLTKAERGGLSELDKAGFIKRQLVETRQITKHVAQILDSRMNTKYDENDKLIREVKVITLKSKLVSDFRKDFQFYKVREINNYHHAHDAYLNAVVGTALIKKYPKLESEFVYGDYKVYDVRKMIAKSEQEIGKATAKYFFYSNIMNFFKTEITLANGEIRKRPLIETNGETGEIVWDKGRDFATVRKVLSMPQVNIVKKTEVQTGGFSKESILPKRNSDKLIARKKDWDPKKYGGFDSPTVAYSVLVVAKVEKGKSKKLKSVKELLGITIMERSSFEKNPIDFLEAKGYKEVKKDLIIKLPKYSLFELENGRKRMLASAGELQKGNELALPSKYVNFLYLASHYEKLKGSPEDNEQKQLFVEQHKHYLDEIIEQISEFSKRVILADANLDKVLSAYNKHRDKPIREQAENIIHLFTLTNLGAPAAFKYFDTTIDRKRYTSTKEVLDATLIHQSITGLYETRIDLSQLGGDGGPAPAPGGVLNLEEEYRLHEKPVPSSIDPSWLQLFPTVWAERAGMGLANQVPPVVVELRSGASPVAVRQYPMSKEAREGIRPHIQRFLDLGVLVPCQSPWNTPLLPVKKPGTNDYRPVQDLREINKRVQDIHPTVPNPYNLLSSLPPSHTWYSVLDLKDAFFCLKLHPNSQPLFAFEWRDPEKGNTGQLTWTRLPQGFKNSPTLFNEALHRDLAPFRALNPQVVLLQYVDDLLVAAPTYRDCKEGTQKLLQELSKLGYRVSAKKAQLCQKEVTYLGYLLKEGKRWLTPARKATVMKIPPPTTPRQVREFLGTAGFCRLWIPGFASLAAPLYPLTKPSIPFIWTEEHQKAFDRIKEALLSAPALALPDLTKPFTLYVDERAGVARGVLTQTLGPWRRPVAYLSKKLDPVASGWPTCLKAVAAVALLLKDADKLTLGQNVTVIASHSLESIVRQPPDRWMTNARMTHYQSLLLNERVSFAPPAVLNPATLLPVESEATPVHRCSEILAEETGTRRDLKDQPLPGVPAWYTDGSSFIAEGKRRAGAAIVDGKRTVWASSLPEGTSAQKAELVALTQALRLAEGKDINIYTDSRYAFATAHIHGAIYKQRGWLTSAGKDIKNKEEILALLEAIHLPKRVAIIHCPGHQKGNDPVATGNRRADEAAKQAALSTRVLAETTKPAGKRTADGSEFEKRTADGSEFESPKKKAKVE

SEQ ID NO: 849 - protein, 2092 aa, synthetic construct
MPAAKRVKLDGGDKKYSIGLDIGTNSVGWAVITDEYKVPSKKFKVLGNTDRHSIKKNLIGALLFDSGETAEATRLKRTARRRYTRRKNRICYLQEIFSNEMAKVDDSFFHRLEESFLVEEDKKHERHPIFGNIVDEVAYHEKYPTIYHLRKKLVDSTDKADLRLIYLALAHMIKFRGHFLIEGDLNPDNSDVDKLFIQLVQTYNQLFEENPINASGVDAKAILSARLSKSRRLENLIAQLPGEKKNGLFGNLIALSLGLTPNFKSNFDLAEDAKLQLSKDTYDDDLDNLLAQIGDQYADLFLAAKNLSDAILLSDILRVNTEITKAPLSASMIKRYDEHHQDLTLLKALVRQQLPEKYKEIFFDQSKNGYAGYIDGGASQEEFYKFIKPILEKMDGTEELLVKLNREDLLRKQRTFDNGSIPHQIHLGELHAILRRQEDFYPFLKDNREKIEKILTFRIPYYVGPLARGNSRFAWMTRKSEETITPWNFEEVVDKGASAQSFIERMTNFDKNLPNEKVLPKHSLLYEYFTVYNELTKVKYVTEGMRKPAFLSGEQKKAIVDLLFKTNRKVTVKQLKEDYFKKIECFDSVEISGVEDRFNASLGTYHDLLKIIKDKDFLDNEENEDILEDIVLTLTLFEDREMIEERLKTYAHLFDDKVMKQLKRRRYTGWGRLSRKLINGIRDKQSGKTILDFLKSDGFANRNFMQLIHDDSLTFKEDIQKAQVSGQGDSLHEHIANLAGSPAIKKGILQTVKVVDELVKVMGRHKPENIVIEMARENQTTQKGQKNSRERMKRIEEGIKELGSQILKEHPVENTQLQNEKLYLYYLQNGRDMYVDQELDINRLSDYDVDHIVPQSFLKDDSIDNKVLTRSDKARGKSDNVPSEEVVKKMKNYWRQLLNAKLITQRKFDNLTKAERGGLSELDKAGFIKRQLVETRQITKHVAQILDSRMNTKYDENDKLIREVKVITLKSKLVSDFRKDFQFYKVREINNYHHAHDAYLNAVVGTALIKKYPKLESEFVYGDYKVYDVRKMIAKSEQEIGKATAKYFFYSNIMNFFKTEITLANGEIRKRPLIETNGETGEIVWDKGRDFATVRKVLSMPQVNIVKKTEVQTGGFSKESILPKRNSDKLIARKKDWDPKKYGGFDSPTVAYSVLVVAKVEKGKSKKLKSVKELLGITIMERSSFEKNPIDFLEAKGYKEVKKDLIIKLPKYSLFELENGRKRMLASAGELQKGNELALPSKYVNFLYLASHYEKLKGSPEDNEQKQLFVEQHKHYLDEIIEQISEFSKRVILADANLDKVLSAYNKHRDKPIREQAENIIHLFTLTNLGAPAAFKYFDTTIDRKRYTSTKEVLDATLIHQSITGLYETRIDLSQLGGDGGGSSGGGGGSGGVLNLEEEYRLHEKPVPSSIDPSWLQLFPTVWAERAGMGLANQVPPVVVELRSGASPVAVRQYPMSKEAREGIRPHIQRFLDLGVLVPCQSPWNTPLLPVKKPGTNDYRPVQDLREINKRVQDIHPTVPNPYNLLSSLPPSHTWYSVLDLKDAFFCLKLHPNSQPLFAFEWRDPEKGNTGQLTWTRLPQGFKNSPTLFNEALHRDLAPFRALNPQVVLLQYVDDLLVAAPTYRDCKEGTQKLLQELSKLGYRVSAKKAQLCQKEVTYLGYLLKEGKRWLTPARKATVMKIPPPTTPRQVREFLGTAGFCRLWIPGFASLAAPLYPLTKPSIPFIWTEEHQKAFDRIKEALLSAPALALPDLTKPFTLYVDERAGVARGVLTQTLGPWRRPVAYLSKKLDPVASGWPTCLKAVAAVALLLKDADKLTLGQNVTVIASHSLESIVRQPPDRWMTNARMTHYQSLLLNERVSFAPPAVLNPATLLPVESEATPVHRCSEILAEETGTRRDLKDQPLPGVPAWYTDGSSFIAEGKRRAGAAIVDGKRTVWASSLPEGTSAQKAELVALTQALRLAEGKDINIYTDSRYAFATAHIHGAIYKQRGWLTSAGKDIKNKEEILALLEAIHLPKRVAIIHCPGHQKGNDPVATGNRRADEAAKQAALSTRVLAETTKPAGKRTADGSEFEKRTADGSEFESPKKKAKVE

SEQ ID NO: 850 - protein, 2092 aa, synthetic construct
MPAAKRVKLDGGDKKYSIGLDIGTNSVGWAVITDEYKVPSKKFKVLGNTDRHSIKKNLIGALLFDSGETAEATRLKRTARRRYTRRKNRICYLQEIFSNEMAKVDDSFFHRLEESFLVEEDKKHERHPIFGNIVDEVAYHEKYPTIYHLRKKLVDSTDKADLRLIYLALAHMIKFRGHFLIEGDLNPDNSDVDKLFIQLVQTYNQLFEENPINASGVDAKAILSARLSKSRRLENLIAQLPGEKKNGLFGNLIALSLGLTPNFKSNFDLAEDAKLQLSKDTYDDDLDNLLAQIGDQYADLFLAAKNLSDAILLSDILRVNTEITKAPLSASMIKRYDEHHQDLTLLKALVRQQLPEKYKEIFFDQSKNGYAGYIDGGASQEEFYKFIKPILEKMDGTEELLVKLNREDLLRKQRTFDNGSIPHQIHLGELHAILRRQEDFYPFLKDNREKIEKILTFRIPYYVGPLARGNSRFAWMTRKSEETITPWNFEEVVDKGASAQSFIERMTNFDKNLPNEKVLPKHSLLYEYFTVYNELTKVKYVTEGMRKPAFLSGEQKKAIVDLLFKTNRKVTVKQLKEDYFKKIECFDSVEISGVEDRFNASLGTYHDLLKIIKDKDFLDNEENEDILEDIVLTLTLFEDREMIEERLKTYAHLFDDKVMKQLKRRRYTGWGRLSRKLINGIRDKQSGKTILDFLKSDGFANRNFMQLIHDDSLTFKEDIQKAQVSGQGDSLHEHIANLAGSPAIKKGILQTVKVVDELVKVMGRHKPENIVIEMARENQTTQKGQKNSRERMKRIEEGIKELGSQILKEHPVENTQLQNEKLYLYYLQNGRDMYVDQELDINRLSDYDVDHIVPQSFLKDDSIDNKVLTRSDKARGKSDNVPSEEVVKKMKNYWRQLLNAKLITQRKFDNLTKAERGGLSELDKAGFIKRQLVETRQITKHVAQILDSRMNTKYDENDKLIREVKVITLKSKLVSDFRKDFQFYKVREINNYHHAHDAYLNAVVGTALIKKYPKLESEFVYGDYKVYDVRKMIAKSEQEIGKATAKYFFYSNIMNFFKTEITLANGEIRKRPLIETNGETGEIVWDKGRDFATVRKVLSMPQVNIVKKTEVQTGGFSKESILPKRNSDKLIARKKDWDPKKYGGFDSPTVAYSVLVVAKVEKGKSKKLKSVKELLGITIMERSSFEKNPIDFLEAKGYKEVKKDLIIKLPKYSLFELENGRKRMLASAGELQKGNELALPSKYVNFLYLASHYEKLKGSPEDNEQKQLFVEQHKHYLDEIIEQISEFSKRVILADANLDKVLSAYNKHRDKPIREQAENIIHLFTLTNLGAPAAFKYFDTTIDRKRYTSTKEVLDATLIHQSITGLYETRIDLSQLGGDGGGGSGGSGGSGGVLNLEEEYRLHEKPVPSSIDPSWLQLFPTVWAERAGMGLANQVPPVVVELRSGASPVAVRQYPMSKEAREGIRPHIQRFLDLGVLVPCQSPWNTPLLPVKKPGTNDYRPVQDLREINKRVQDIHPTVPNPYNLLSSLPPSHTWYSVLDLKDAFFCLKLHPNSQPLFAFEWRDPEKGNTGQLTWTRLPQGFKNSPTLFNEALHRDLAPFRALNPQVVLLQYVDDLLVAAPTYRDCKEGTQKLLQELSKLGYRVSAKKAQLCQKEVTYLGYLLKEGKRWLTPARKATVMKIPPPTTPRQVREFLGTAGFCRLWIPGFASLAAPLYPLTKPSIPFIWTEEHQKAFDRIKEALLSAPALALPDLTKPFTLYVDERAGVARGVLTQTLGPWRRPVAYLSKKLDPVASGWPTCLKAVAAVALLLKDADKLTLGQNVTVIASHSLESIVRQPPDRWMTNARMTHYQSLLLNERVSFAPPAVLNPATLLPVESEATPVHRCSEILAEETGTRRDLKDQPLPGVPAWYTDGSSFIAEGKRRAGAAIVDGKRTVWASSLPEGTSAQKAELVALTQALRLAEGKDINIYTDSRYAFATAHIHGAIYKQRGWLTSAGKDIKNKEEILALLEAIHLPKRVAIIHCPGHQKGNDPVATGNRRADEAAKQAALSTRVLAETTKPAGKRTADGSEFEKRTADGSEFESPKKKAKVE

SEQ ID NO: 851 - protein, 2086 aa, synthetic construct
MPAAKRVKLDGGDKKYSIGLDIGTNSVGWAVITDEYKVPSKKFKVLGNTDRHSIKKNLIGALLFDSGETAEATRLKRTARRRYTRRKNRICYLQEIFSNEMAKVDDSFFHRLEESFLVEEDKKHERHPIFGNIVDEVAYHEKYPTIYHLRKKLVDSTDKADLRLIYLALAHMIKFRGHFLIEGDLNPDNSDVDKLFIQLVQTYNQLFEENPINASGVDAKAILSARLSKSRRLENLIAQLPGEKKNGLFGNLIALSLGLTPNFKSNFDLAEDAKLQLSKDTYDDDLDNLLAQIGDQYADLFLAAKNLSDAILLSDILRVNTEITKAPLSASMIKRYDEHHQDLTLLKALVRQQLPEKYKEIFFDQSKNGYAGYIDGGASQEEFYKFIKPILEKMDGTEELLVKLNREDLLRKQRTFDNGSIPHQIHLGELHAILRRQEDFYPFLKDNREKIEKILTFRIPYYVGPLARGNSRFAWMTRKSEETITPWNFEEVVDKGASAQSFIERMTNFDKNLPNEKVLPKHSLLYEYFTVYNELTKVKYVTEGMRKPAFLSGEQKKAIVDLLFKTNRKVTVKQLKEDYFKKIECFDSVEISGVEDRFNASLGTYHDLLKIIKDKDFLDNEENEDILEDIVLTLTLFEDREMIEERLKTYAHLFDDKVMKQLKRRRYTGWGRLSRKLINGIRDKQSGKTILDFLKSDGFANRNFMQLIHDDSLTFKEDIQKAQVSGQGDSLHEHIANLAGSPAIKKGILQTVKVVDELVKVMGRHKPENIVIEMARENQTTQKGQKNSRERMKRIEEGIKELGSQILKEHPVENTQLQNEKLYLYYLQNGRDMYVDQELDINRLSDYDVDHIVPQSFLKDDSIDNKVLTRSDKARGKSDNVPSEEVVKKMKNYWRQLLNAKLITQRKFDNLTKAERGGLSELDKAGFIKRQLVETRQITKHVAQILDSRMNTKYDENDKLIREVKVITLKSKLVSDFRKDFQFYKVREINNYHHAHDAYLNAVVGTALIKKYPKLESEFVYGDYKVYDVRKMIAKSEQEIGKATAKYFFYSNIMNFFKTEITLANGEIRKRPLIETNGETGEIVWDKGRDFATVRKVLSMPQVNIVKKTEVQTGGFSKESILPKRNSDKLIARKKDWDPKKYGGFDSPTVAYSVLVVAKVEKGKSKKLKSVKELLGITIMERSSFEKNPIDFLEAKGYKEVKKDLIIKLPKYSLFELENGRKRMLASAGELQKGNELALPSKYVNFLYLASHYEKLKGSPEDNEQKQLFVEQHKHYLDEIIEQISEFSKRVILADANLDKVLSAYNKHRDKPIREQAENIIHLFTLTNLGAPAAFKYFDTTIDRKRYTSTKEVLDATLIHQSITGLYETRIDLSQLGGDGGGGSGGVLNLEEEYRLHEKPVPSSIDPSWLQLFPTVWAERAGMGLANQVPPVVVELRSGASPVAVRQYPMSKEAREGIRPHIQRFLDLGVLVPCQSPWNTPLLPVKKPGTNDYRPVQDLREINKRVQDIHPTVPNPYNLLSSLPPSHTWYSVLDLKDAFFCLKLHPNSQPLFAFEWRDPEKGNTGQLTWTRLPQGFKNSPTLFNEALHRDLAPFRALNPQVVLLQYVDDLLVAAPTYRDCKEGTQKLLQELSKLGYRVSAKKAQLCQKEVTYLGYLLKEGKRWLTPARKATVMKIPPPTTPRQVREFLGTAGFCRLWIPGFASLAAPLYPLTKPSIPFIWTEEHQKAFDRIKEALLSAPALALPDLTKPFTLYVDERAGVARGVLTQTLGPWRRPVAYLSKKLDPVASGWPTCLKAVAAVALLLKDADKLTLGQNVTVIASHSLESIVRQPPDRWMTNARMTHYQSLLLNERVSFAPPAVLNPATLLPVESEATPVHRCSEILAEETGTRRDLKDQPLPGVPAWYTDGSSFIAEGKRRAGAAIVDGKRTVWASSLPEGTSAQKAELVALTQALRLAEGKDINIYTDSRYAFATAHIHGAIYKQRGWLTSAGKDIKNKEEILALLEAIHLPKRVAIIHCPGHQKGNDPVATGNRRADEAAKQAALSTRVLAETTKPAGKRTADGSEFEKRTADGSEFESPKKKAKVE

SEQ ID NO: 852 - protein, 2091 aa, synthetic construct
MPAAKRVKLDGGDKKYSIGLDIGTNSVGWAVITDEYKVPSKKFKVLGNTDRHSIKKNLIGALLFDSGETAEATRLKRTARRRYTRRKNRICYLQEIFSNEMAKVDDSFFHRLEESFLVEEDKKHERHPIFGNIVDEVAYHEKYPTIYHLRKKLVDSTDKADLRLIYLALAHMIKFRGHFLIEGDLNPDNSDVDKLFIQLVQTYNQLFEENPINASGVDAKAILSARLSKSRRLENLIAQLPGEKKNGLFGNLIALSLGLTPNFKSNFDLAEDAKLQLSKDTYDDDLDNLLAQIGDQYADLFLAAKNLSDAILLSDILRVNTEITKAPLSASMIKRYDEHHQDLTLLKALVRQQLPEKYKEIFFDQSKNGYAGYIDGGASQEEFYKFIKPILEKMDGTEELLVKLNREDLLRKQRTFDNGSIPHQIHLGELHAILRRQEDFYPFLKDNREKIEKILTFRIPYYVGPLARGNSRFAWMTRKSEETITPWNFEEVVDKGASAQSFIERMTNFDKNLPNEKVLPKHSLLYEYFTVYNELTKVKYVTEGMRKPAFLSGEQKKAIVDLLFKTNRKVTVKQLKEDYFKKIECFDSVEISGVEDRFNASLGTYHDLLKIIKDKDFLDNEENEDILEDIVLTLTLFEDREMIEERLKTYAHLFDDKVMKQLKRRRYTGWGRLSRKLINGIRDKQSGKTILDFLKSDGFANRNFMQLIHDDSLTFKEDIQKAQVSGQGDSLHEHIANLAGSPAIKKGILQTVKVVDELVKVMGRHKPENIVIEMARENQTTQKGQKNSRERMKRIEEGIKELGSQILKEHPVENTQLQNEKLYLYYLQNGRDMYVDQELDINRLSDYDVDHIVPQSFLKDDSIDNKVLTRSDKARGKSDNVPSEEVVKKMKNYWRQLLNAKLITQRKFDNLTKAERGGLSELDKAGFIKRQLVETRQITKHVAQILDSRMNTKYDENDKLIREVKVITLKSKLVSDFRKDFQFYKVREINNYHHAHDAYLNAVVGTALIKKYPKLESEFVYGDYKVYDVRKMIAKSEQEIGKATAKYFFYSNIMNFFKTEITLANGEIRKRPLIETNGETGEIVWDKGRDFATVRKVLSMPQVNIVKKTEVQTGGFSKESILPKRNSDKLIARKKDWDPKKYGGFDSPTVAYSVLVVAKVEKGKSKKLKSVKELLGITIMERSSFEKNPIDFLEAKGYKEVKKDLIIKLPKYSLFELENGRKRMLASAGELQKGNELALPSKYVNFLYLASHYEKLKGSPEDNEQKQLFVEQHKHYLDEIIEQISEFSKRVILADANLDKVLSAYNKHRDKPIREQAENIIHLFTLTNLGAPAAFKYFDTTIDRKRYTSTKEVLDATLIHQSITGLYETRIDLSQLGGDGGGGSEAAAKGGVLNLEEEYRLHEKPVPSSIDPSWLQLFPTVWAERAGMGLANQVPPVVVELRSGASPVAVRQYPMSKEAREGIRPHIQRFLDLGVLVPCQSPWNTPLLPVKKPGTNDYRPVQDLREINKRVQDIHPTVPNPYNLLSSLPPSHTWYSVLDLKDAFFCLKLHPNSQPLFAFEWRDPEKGNTGQLTWTRLPQGFKNSPTLFNEALHRDLAPFRALNPQVVLLQYVDDLLVAAPTYRDCKEGTQKLLQELSKLGYRVSAKKAQLCQKEVTYLGYLLKEGKRWLTPARKATVMKIPPPTTPRQVREFLGTAGFCRLWIPGFASLAAPLYPLTKPSIPFIWTEEHQKAFDRIKEALLSAPALALPDLTKPFTLYVDERAGVARGVLTQTLGPWRRPVAYLSKKLDPVASGWPTCLKAVAAVALLLKDADKLTLGQNVTVIASHSLESIVRQPPDRWMTNARMTHYQSLLLNERVSFAPPAVLNPATLLPVESEATPVHRCSEILAEETGTRRDLKDQPLPGVPAWYTDGSSFIAEGKRRAGAAIVDGKRTVWASSLPEGTSAQKAELVALTQALRLAEGKDINIYTDSRYAFATAHIHGAIYKQRGWLTSAGKDIKNKEEILALLEAIHLPKRVAIIHCPGHQKGNDPVATGNRRADEAAKQAALSTRVLAETTKPAGKRTADGSEFEKRTADGSEFESPKKKAKVE

SEQ ID NO: 853 - protein, 2094 aa, synthetic construct
MPAAKRVKLDGGDKKYSIGLDIGTNSVGWAVITDEYKVPSKKFKVLGNTDRHSIKKNLIGALLFDSGETAEATRLKRTARRRYTRRKNRICYLQEIFSNEMAKVDDSFFHRLEESFLVEEDKKHERHPIFGNIVDEVAYHEKYPTIYHLRKKLVDSTDKADLRLIYLALAHMIKFRGHFLIEGDLNPDNSDVDKLFIQLVQTYNQLFEENPINASGVDAKAILSARLSKSRRLENLIAQLPGEKKNGLFGNLIALSLGLTPNFKSNFDLAEDAKLQLSKDTYDDDLDNLLAQIGDQYADLFLAAKNLSDAILLSDILRVNTEITKAPLSASMIKRYDEHHQDLTLLKALVRQQLPEKYKEIFFDQSKNGYAGYIDGGASQEEFYKFIKPILEKMDGTEELLVKLNREDLLRKQRTFDNGSIPHQIHLGELHAILRRQEDFYPFLKDNREKIEKILTFRIPYYVGPLARGNSRFAWMTRKSEETITPWNFEEVVDKGASAQSFIERMTNFDKNLPNEKVLPKHSLLYEYFTVYNELTKVKYVTEGMRKPAFLSGEQKKAIVDLLFKTNRKVTVKQLKEDYFKKIECFDSVEISGVEDRFNASLGTYHDLLKIIKDKDFLDNEENEDILEDIVLTLTLFEDREMIEERLKTYAHLFDDKVMKQLKRRRYTGWGRLSRKLINGIRDKQSGKTILDFLKSDGFANRNFMQLIHDDSLTFKEDIQKAQVSGQGDSLHEHIANLAGSPAIKKGILQTVKVVDELVKVMGRHKPENIVIEMARENQTTQKGQKNSRERMKRIEEGIKELGSQILKEHPVENTQLQNEKLYLYYLQNGRDMYVDQELDINRLSDYDVDHIVPQSFLKDDSIDNKVLTRSDKARGKSDNVPSEEVVKKMKNYWRQLLNAKLITQRKFDNLTKAERGGLSELDKAGFIKRQLVETRQITKHVAQILDSRMNTKYDENDKLIREVKVITLKSKLVSDFRKDFQFYKVREINNYHHAHDAYLNAVVGTALIKKYPKLESEFVYGDYKVYDVRKMIAKSEQEIGKATAKYFFYSNIMNFFKTEITLANGEIRKRPLIETNGETGEIVWDKGRDFATVRKVLSMPQVNIVKKTEVQTGGFSKESILPKRNSDKLIARKKDWDPKKYGGFDSPTVAYSVLVVAKVEKGKSKKLKSVKELLGITIMERSSFEKNPIDFLEAKGYKEVKKDLIIKLPKYSLFELENGRKRMLASAGELQKGNELALPSKYVNFLYLASHYEKLKGSPEDNEQKQLFVEQHKHYLDEIIEQISEFSKRVILADANLDKVLSAYNKHRDKPIREQAENIIHLFTLTNLGAPAAFKYFDTTIDRKRYTSTKEVLDATLIHQSITGLYETRIDLSQLGGDGGGSSEAAAKGGGGGVLNLEEEYRLHEKPVPSSIDPSWLQLFPTVWAERAGMGLANQVPPVVVELRSGASPVAVRQYPMSKEAREGIRPHIQRFLDLGVLVPCQSPWNTPLLPVKKPGTNDYRPVQDLREINKRVQDIHPTVPNPYNLLSSLPPSHTWYSVLDLKDAFFCLKLHPNSQPLFAFEWRDPEKGNTGQLTWTRLPQGFKNSPTLFNEALHRDLAPFRALNPQVVLLQYVDDLLVAAPTYRDCKEGTQKLLQELSKLGYRVSAKKAQLCQKEVTYLGYLLKEGKRWLTPARKATVMKIPPPTTPRQVREFLGTAGFCRLWIPGFASLAAPLYPLTKPSIPFIWTEEHQKAFDRIKEALLSAPALALPDLTKPFTLYVDERAGVARGVLTQTLGPWRRPVAYLSKKLDPVASGWPTCLKAVAAVALLLKDADKLTLGQNVTVIASHSLESIVRQPPDRWMTNARMTHYQSLLLNERVSFAPPAVLNPATLLPVESEATPVHRCSEILAEETGTRRDLKDQPLPGVPAWYTDGSSFIAEGKRRAGAAIVDGKRTVWASSLPEGTSAQKAELVALTQALRLAEGKDINIYTDSRYAFATAHIHGAIYKQRGWLTSAGKDIKNKEEILALLEAIHLPKRVAIIHCPGHQKGNDPVATGNRRADEAAKQAALSTRVLAETTKPAGKRTADGSEFEKRTADGSEFESPKKKAKVE

SEQ ID NO: 854 - protein, 2094 aa, synthetic construct
MPAAKRVKLDGGDKKYSIGLDIGTNSVGWAVITDEYKVPSKKFKVLGNTDRHSIKKNLIGALLFDSGETAEATRLKRTARRRYTRRKNRICYLQEIFSNEMAKVDDSFFHRLEESFLVEEDKKHERHPIFGNIVDEVAYHEKYPTIYHLRKKLVDSTDKADLRLIYLALAHMIKFRGHFLIEGDLNPDNSDVDKLFIQLVQTYNQLFEENPINASGVDAKAILSARLSKSRRLENLIAQLPGEKKNGLFGNLIALSLGLTPNFKSNFDLAEDAKLQLSKDTYDDDLDNLLAQIGDQYADLFLAAKNLSDAILLSDILRVNTEITKAPLSASMIKRYDEHHQDLTLLKALVRQQLPEKYKEIFFDQSKNGYAGYIDGGASQEEFYKFIKPILEKMDGTEELLVKLNREDLLRKQRTFDNGSIPHQIHLGELHAILRRQEDFYPFLKDNREKIEKILTFRIPYYVGPLARGNSRFAWMTRKSEETITPWNFEEVVDKGASAQSFIERMTNFDKNLPNEKVLPKHSLLYEYFTVYNELTKVKYVTEGMRKPAFLSGEQKKAIVDLLFKTNRKVTVKQLKEDYFKKIECFDSVEISGVEDRFNASLGTYHDLLKIIKDKDFLDNEENEDILEDIVLTLTLFEDREMIEERLKTYAHLFDDKVMKQLKRRRYTGWGRLSRKLINGIRDKQSGKTILDFLKSDGFANRNFMQLIHDDSLTFKEDIQKAQVSGQGDSLHEHIANLAGSPAIKKGILQTVKVVDELVKVMGRHKPENIVIEMARENQTTQKGQKNSRERMKRIEEGIKELGSQILKEHPVENTQLQNEKLYLYYLQNGRDMYVDQELDINRLSDYDVDHIVPQSFLKDDSIDNKVLTRSDKARGKSDNVPSEEVVKKMKNYWRQLLNAKLITQRKFDNLTKAERGGLSELDKAGFIKRQLVETRQITKHVAQILDSRMNTKYDENDKLIREVKVITLKSKLVSDFRKDFQFYKVREINNYHHAHDAYLNAVVGTALIKKYPKLESEFVYGDYKVYDVRKMIAKSEQEIGKATAKYFFYSNIMNFFKTEITLANGEIRKRPLIETNGETGEIVWDKGRDFATVRKVLSMPQVNIVKKTEVQTGGFSKESILPKRNSDKLIARKKDWDPKKYGGFDSPTVAYSVLVVAKVEKGKSKKLKSVKELLGITIMERSSFEKNPIDFLEAKGYKEVKKDLIIKLPKYSLFELENGRKRMLASAGELQKGNELALPSKYVNFLYLASHYEKLKGSPEDNEQKQLFVEQHKHYLDEIIEQISEFSKRVILADANLDKVLSAYNKHRDKPIREQAENIIHLFTLTNLGAPAAFKYFDTTIDRKRYTSTKEVLDATLIHQSITGLYETRIDLSQLGGDGGGGSEAAAKGGGGGVLNLEEEYRLHEKPVPSSIDPSWLQLFPTVWAERAGMGLANQVPPVVVELRSGASPVAVRQYPMSKEAREGIRPHIQRFLDLGVLVPCQSPWNTPLLPVKKPGTNDYRPVQDLREINKRVQDIHPTVPNPYNLLSSLPPSHTWYSVLDLKDAFFCLKLHPNSQPLFAFEWRDPEKGNTGQLTWTRLPQGFKNSPTLFNEALHRDLAPFRALNPQVVLLQYVDDLLVAAPTYRDCKEGTQKLLQELSKLGYRVSAKKAQLCQKEVTYLGYLLKEGKRWLTPARKATVMKIPPPTTPRQVREFLGTAGFCRLWIPGFASLAAPLYPLTKPSIPFIWTEEHQKAFDRIKEALLSAPALALPDLTKPFTLYVDERAGVARGVLTQTLGPWRRPVAYLSKKLDPVASGWPTCLKAVAAVALLLKDADKLTLGQNVTVIASHSLESIVRQPPDRWMTNARMTHYQSLLLNERVSFAPPAVLNPATLLPVESEATPVHRCSEILAEETGTRRDLKDQPLPGVPAWYTDGSSFIAEGKRRAGAAIVDGKRTVWASSLPEGTSAQKAELVALTQALRLAEGKDINIYTDSRYAFATAHIHGAIYKQRGWLTSAGKDIKNKEEILALLEAIHLPKRVAIIHCPGHQKGNDPVATGNRRADEAAKQAALSTRVLAETTKPAGKRTADGSEFEKRTADGSEFESPKKKAKVE

SEQ ID NO: 855 - protein, 2089 aa, synthetic construct
MPAAKRVKLDGGDKKYSIGLDIGTNSVGWAVITDEYKVPSKKFKVLGNTDRHSIKKNLIGALLFDSGETAEATRLKRTARRRYTRRKNRICYLQEIFSNEMAKVDDSFFHRLEESFLVEEDKKHERHPIFGNIVDEVAYHEKYPTIYHLRKKLVDSTDKADLRLIYLALAHMIKFRGHFLIEGDLNPDNSDVDKLFIQLVQTYNQLFEENPINASGVDAKAILSARLSKSRRLENLIAQLPGEKKNGLFGNLIALSLGLTPNFKSNFDLAEDAKLQLSKDTYDDDLDNLLAQIGDQYADLFLAAKNLSDAILLSDILRVNTEITKAPLSASMIKRYDEHHQDLTLLKALVRQQLPEKYKEIFFDQSKNGYAGYIDGGASQEEFYKFIKPILEKMDGTEELLVKLNREDLLRKQRTFDNGSIPHQIHLGELHAILRRQEDFYPFLKDNREKIEKILTFRIPYYVGPLARGNSRFAWMTRKSEETITPWNFEEVVDKGASAQSFIERMTNFDKNLPNEKVLPKHSLLYEYFTVYNELTKVKYVTEGMRKPAFLSGEQKKAIVDLLFKTNRKVTVKQLKEDYFKKIECFDSVEISGVEDRFNASLGTYHDLLKIIKDKDFLDNEENEDILEDIVLTLTLFEDREMIEERLKTYAHLFDDKVMKQLKRRRYTGWGRLSRKLINGIRDKQSGKTILDFLKSDGFANRNFMQLIHDDSLTFKEDIQKAQVSGQGDSLHEHIANLAGSPAIKKGILQTVKVVDELVKVMGRHKPENIVIEMARENQTTQKGQKNSRERMKRIEEGIKELGSQILKEHPVENTQLQNEKLYLYYLQNGRDMYVDQELDINRLSDYDVDHIVPQSFLKDDSIDNKVLTRSDKARGKSDNVPSEEVVKKMKNYWRQLLNAKLITQRKFDNLTKAERGGLSELDKAGFIKRQLVETRQITKHVAQILDSRMNTKYDENDKLIREVKVITLKSKLVSDFRKDFQFYKVREINNYHHAHDAYLNAVVGTALIKKYPKLESEFVYGDYKVYDVRKMIAKSEQEIGKATAKYFFYSNIMNFFKTEITLANGEIRKRPLIETNGETGEIVWDKGRDFATVRKVLSMPQVNIVKKTEVQTGGFSKESILPKRNSDKLIARKKDWDPKKYGGFDSPTVAYSVLVVAKVEKGKSKKLKSVKELLGITIMERSSFEKNPIDFLEAKGYKEVKKDLIIKLPKYSLFELENGRKRMLASAGELQKGNELALPSKYVNFLYLASHYEKLKGSPEDNEQKQLFVEQHKHYLDEIIEQISEFSKRVILADANLDKVLSAYNKHRDKPIREQAENIIHLFTLTNLGAPAAFKYFDTTIDRKRYTSTKEVLDATLIHQSITGLYETRIDLSQLGGDGGGGSGGGGGVLNLEEEYRLHEKPVPSSIDPSWLQLFPTVWAERAGMGLANQVPPVVVELRSGASPVAVRQYPMSKEAREGIRPHIQRFLDLGVLVPCQSPWNTPLLPVKKPGTNDYRPVQDLREINKRVQDIHPTVPNPYNLLSSLPPSHTWYSVLDLKDAFFCLKLHPNSQPLFAFEWRDPEKGNTGQLTWTRLPQGFKNSPTLFNEALHRDLAPFRALNPQVVLLQYVDDLLVAAPTYRDCKEGTQKLLQELSKLGYRVSAKKAQLCQKEVTYLGYLLKEGKRWLTPARKATVMKIPPPTTPRQVREFLGTAGFCRLWIPGFASLAAPLYPLTKPSIPFIWTEEHQKAFDRIKEALLSAPALALPDLTKPFTLYVDERAGVARGVLTQTLGPWRRPVAYLSKKLDPVASGWPTCLKAVAAVALLLKDADKLTLGQNVTVIASHSLESIVRQPPDRWMTNARMTHYQSLLLNERVSFAPPAVLNPATLLPVESEATPVHRCSEILAEETGTRRDLKDQPLPGVPAWYTDGSSFIAEGKRRAGAAIVDGKRTVWASSLPEGTSAQKAELVALTQALRLAEGKDINIYTDSRYAFATAHIHGAIYKQRGWLTSAGKDIKNKEEILALLEAIHLPKRVAIIHCPGHQKGNDPVATGNRRADEAAKQAALSTRVLAETTKPAGKRTADGSEFEKRTADGSEFESPKKKAKVE

SEQ ID NO: 856 - protein, 2094 aa, synthetic construct
MPAAKRVKLDGGDKKYSIGLDIGTNSVGWAVITDEYKVPSKKFKVLGNTDRHSIKKNLIGALLFDSGETAEATRLKRTARRRYTRRKNRICYLQEIFSNEMAKVDDSFFHRLEESFLVEEDKKHERHPIFGNIVDEVAYHEKYPTIYHLRKKLVDSTDKADLRLIYLALAHMIKFRGHFLIEGDLNPDNSDVDKLFIQLVQTYNQLFEENPINASGVDAKAILSARLSKSRRLENLIAQLPGEKKNGLFGNLIALSLGLTPNFKSNFDLAEDAKLQLSKDTYDDDLDNLLAQIGDQYADLFLAAKNLSDAILLSDILRVNTEITKAPLSASMIKRYDEHHQDLTLLKALVRQQLPEKYKEIFFDQSKNGYAGYIDGGASQEEFYKFIKPILEKMDGTEELLVKLNREDLLRKQRTFDNGSIPHQIHLGELHAILRRQEDFYPFLKDNREKIEKILTFRIPYYVGPLARGNSRFAWMTRKSEETITPWNFEEVVDKGASAQSFIERMTNFDKNLPNEKVLPKHSLLYEYFTVYNELTKVKYVTEGMRKPAFLSGEQKKAIVDLLFKTNRKVTVKQLKEDYFKKIECFDSVEISGVEDRFNASLGTYHDLLKIIKDKDFLDNEENEDILEDIVLTLTLFEDREMIEERLKTYAHLFDDKVMKQLKRRRYTGWGRLSRKLINGIRDKQSGKTILDFLKSDGFANRNFMQLIHDDSLTFKEDIQKAQVSGQGDSLHEHIANLAGSPAIKKGILQTVKVVDELVKVMGRHKPENIVIEMARENQTTQKGQKNSRERMKRIEEGIKELGSQILKEHPVENTQLQNEKLYLYYLQNGRDMYVDQELDINRLSDYDVDHIVPQSFLKDDSIDNKVLTRSDKARGKSDNVPSEEVVKKMKNYWRQLLNAKLITQRKFDNLTKAERGGLSELDKAGFIKRQLVETRQITKHVAQILDSRMNTKYDENDKLIREVKVITLKSKLVSDFRKDFQFYKVREINNYHHAHDAYLNAVVGTALIKKYPKLESEFVYGDYKVYDVRKMIAKSEQEIGKATAKYFFYSNIMNFFKTEITLANGEIRKRPLIETNGETGEIVWDKGRDFATVRKVLSMPQVNIVKKTEVQTGGFSKESILPKRNSDKLIARKKDWDPKKYGGFDSPTVAYSVLVVAKVEKGKSKKLKSVKELLGITIMERSSFEKNPIDFLEAKGYKEVKKDLIIKLPKYSLFELENGRKRMLASAGELQKGNELALPSKYVNFLYLASHYEKLKGSPEDNEQKQLFVEQHKHYLDEIIEQISEFSKRVILADANLDKVLSAYNKHRDKPIREQAENIIHLFTLTNLGAPAAFKYFDTTIDRKRYTSTKEVLDATLIHQSITGLYETRIDLSQLGGDGGEAAAKPAPGGGGGVLNLEEEYRLHEKPVPSSIDPSWLQLFPTVWAERAGMGLANQVPPVVVELRSGASPVAVRQYPMSKEAREGIRPHIQRFLDLGVLVPCQSPWNTPLLPVKKPGTNDYRPVQDLREINKRVQDIHPTVPNPYNLLSSLPPSHTWYSVLDLKDAFFCLKLHPNSQPLFAFEWRDPEKGNTGQLTWTRLPQGFKNSPTLFNEALHRDLAPFRALNPQVVLLQYVDDLLVAAPTYRDCKEGTQKLLQELSKLGYRVSAKKAQLCQKEVTYLGYLLKEGKRWLTPARKATVMKIPPPTTPRQVREFLGTAGFCRLWIPGFASLAAPLYPLTKPSIPFIWTEEHQKAFDRIKEALLSAPALALPDLTKPFTLYVDERAGVARGVLTQTLGPWRRPVAYLSKKLDPVASGWPTCLKAVAAVALLLKDADKLTLGQNVTVIASHSLESIVRQPPDRWMTNARMTHYQSLLLNERVSFAPPAVLNPATLLPVESEATPVHRCSEILAEETGTRRDLKDQPLPGVPAWYTDGSSFIAEGKRRAGAAIVDGKRTVWASSLPEGTSAQKAELVALTQALRLAEGKDINIYTDSRYAFATAHIHGAIYKQRGWLTSAGKDIKNKEEILALLEAIHLPKRVAIIHCPGHQKGNDPVATGNRRADEAAKQAALSTRVLAETTKPAGKRTADGSEFEKRTADGSEFESPKKKAKVE

SEQ ID NO: 857 - protein, 2094 aa, synthetic construct
MPAAKRVKLDGGDKKYSIGLDIGTNSVGWAVITDEYKVPSKKFKVLGNTDRHSIKKNLIGALLFDSGETAEATRLKRTARRRYTRRKNRICYLQEIFSNEMAKVDDSFFHRLEESFLVEEDKKHERHPIFGNIVDEVAYHEKYPTIYHLRKKLVDSTDKADLRLIYLALAHMIKFRGHFLIEGDLNPDNSDVDKLFIQLVQTYNQLFEENPINASGVDAKAILSARLSKSRRLENLIAQLPGEKKNGLFGNLIALSLGLTPNFKSNFDLAEDAKLQLSKDTYDDDLDNLLAQIGDQYADLFLAAKNLSDAILLSDILRVNTEITKAPLSASMIKRYDEHHQDLTLLKALVRQQLPEKYKEIFFDQSKNGYAGYIDGGASQEEFYKFIKPILEKMDGTEELLVKLNREDLLRKQRTFDNGSIPHQIHLGELHAILRRQEDFYPFLKDNREKIEKILTFRIPYYVGPLARGNSRFAWMTRKSEETITPWNFEEVVDKGASAQSFIERMTNFDKNLPNEKVLPKHSLLYEYFTVYNELTKVKYVTEGMRKPAFLSGEQKKAIVDLLFKTNRKVTVKQLKEDYFKKIECFDSVEISGVEDRFNASLGTYHDLLKIIKDKDFLDNEENEDILEDIVLTLTLFEDREMIEERLKTYAHLFDDKVMKQLKRRRYTGWGRLSRKLINGIRDKQSGKTILDFLKSDGFANRNFMQLIHDDSLTFKEDIQKAQVSGQGDSLHEHIANLAGSPAIKKGILQTVKVVDELVKVMGRHKPENIVIEMARENQTTQKGQKNSRERMKRIEEGIKELGSQILKEHPVENTQLQNEKLYLYYLQNGRDMYVDQELDINRLSDYDVDHIVPQSFLKDDSIDNKVLTRSDKARGKSDNVPSEEVVKKMKNYWRQLLNAKLITQRKFDNLTKAERGGLSELDKAGFIKRQLVETRQITKHVAQILDSRMNTKYDENDKLIREVKVITLKSKLVSDFRKDFQFYKVREINNYHHAHDAYLNAVVGTALIKKYPKLESEFVYGDYKVYDVRKMIAKSEQEIGKATAKYFFYSNIMNFFKTEITLANGEIRKRPLIETNGETGEIVWDKGRDFATVRKVLSMPQVNIVKKTEVQTGGFSKESILPKRNSDKLIARKKDWDPKKYGGFDSPTVAYSVLVVAKVEKGKSKKLKSVKELLGITIMERSSFEKNPIDFLEAKGYKEVKKDLIIKLPKYSLFELENGRKRMLASAGELQKGNELALPSKYVNFLYLASHYEKLKGSPEDNEQKQLFVEQHKHYLDEIIEQISEFSKRVILADANLDKVLSAYNKHRDKPIREQAENIIHLFTLTNLGAPAAFKYFDTTIDRKRYTSTKEVLDATLIHQSITGLYETRIDLSQLGGDGGGSSEAAAKGGSGGVLNLEEEYRLHEKPVPSSIDPSWLQLFPTVWAERAGMGLANQVPPVVVELRSGASPVAVRQYPMSKEAREGIRPHIQRFLDLGVLVPCQSPWNTPLLPVKKPGTNDYRPVQDLREINKRVQDIHPTVPNPYNLLSSLPPSHTWYSVLDLKDAFFCLKLHPNSQPLFAFEWRDPEKGNTGQLTWTRLPQGFKNSPTLFNEALHRDLAPFRALNPQVVLLQYVDDLLVAAPTYRDCKEGTQKLLQELSKLGYRVSAKKAQLCQKEVTYLGYLLKEGKRWLTPARKATVMKIPPPTTPRQVREFLGTAGFCRLWIPGFASLAAPLYPLTKPSIPFIWTEEHQKAFDRIKEALLSAPALALPDLTKPFTLYVDERAGVARGVLTQTLGPWRRPVAYLSKKLDPVASGWPTCLKAVAAVALLLKDADKLTLGQNVTVIASHSLESIVRQPPDRWMTNARMTHYQSLLLNERVSFAPPAVLNPATLLPVESEATPVHRCSEILAEETGTRRDLKDQPLPGVPAWYTDGSSFIAEGKRRAGAAIVDGKRTVWASSLPEGTSAQKAELVALTQALRLAEGKDINIYTDSRYAFATAHIHGAIYKQRGWLTSAGKDIKNKEEILALLEAIHLPKRVAIIHCPGHQKGNDPVATGNRRADEAAKQAALSTRVLAETTKPAGKRTADGSEFEKRTADGSEFESPKKKAKVE

SEQ ID NO: 858 - protein, 2092 aa, synthetic construct
MPAAKRVKLDGGDKKYSIGLDIGTNSVGWAVITDEYKVPSKKFKVLGNTDRHSIKKNLIGALLFDSGETAEATRLKRTARRRYTRRKNRICYLQEIFSNEMAKVDDSFFHRLEESFLVEEDKKHERHPIFGNIVDEVAYHEKYPTIYHLRKKLVDSTDKADLRLIYLALAHMIKFRGHFLIEGDLNPDNSDVDKLFIQLVQTYNQLFEENPINASGVDAKAILSARLSKSRRLENLIAQLPGEKKNGLFGNLIALSLGLTPNFKSNFDLAEDAKLQLSKDTYDDDLDNLLAQIGDQYADLFLAAKNLSDAILLSDILRVNTEITKAPLSASMIKRYDEHHQDLTLLKALVRQQLPEKYKEIFFDQSKNGYAGYIDGGASQEEFYKFIKPILEKMDGTEELLVKLNREDLLRKQRTFDNGSIPHQIHLGELHAILRRQEDFYPFLKDNREKIEKILTFRIPYYVGPLARGNSRFAWMTRKSEETITPWNFEEVVDKGASAQSFIERMTNFDKNLPNEKVLPKHSLLYEYFTVYNELTKVKYVTEGMRKPAFLSGEQKKAIVDLLFKTNRKVTVKQLKEDYFKKIECFDSVEISGVEDRFNASLGTYHDLLKIIKDKDFLDNEENEDILEDIVLTLTLFEDREMIEERLKTYAHLFDDKVMKQLKRRRYTGWGRLSRKLINGIRDKQSGKTILDFLKSDGFANRNFMQLIHDDSLTFKEDIQKAQVSGQGDSLHEHIANLAGSPAIKKGILQTVKVVDELVKVMGRHKPENIVIEMARENQTTQKGQKNSRERMKRIEEGIKELGSQILKEHPVENTQLQNEKLYLYYLQNGRDMYVDQELDINRLSDYDVDHIVPQSFLKDDSIDNKVLTRSDKARGKSDNVPSEEVVKKMKNYWRQLLNAKLITQRKFDNLTKAERGGLSELDKAGFIKRQLVETRQITKHVAQILDSRMNTKYDENDKLIREVKVITLKSKLVSDFRKDFQFYKVREINNYHHAHDAYLNAVVGTALIKKYPKLESEFVYGDYKVYDVRKMIAKSEQEIGKATAKYFFYSNIMNFFKTEITLANGEIRKRPLIETNGETGEIVWDKGRDFATVRKVLSMPQVNIVKKTEVQTGGFSKESILPKRNSDKLIARKKDWDPKKYGGFDSPTVAYSVLVVAKVEKGKSKKLKSVKELLGITIMERSSFEKNPIDFLEAKGYKEVKKDLIIKLPKYSLFELENGRKRMLASAGELQKGNELALPSKYVNFLYLASHYEKLKGSPEDNEQKQLFVEQHKHYLDEIIEQISEFSKRVILADANLDKVLSAYNKHRDKPIREQAENIIHLFTLTNLGAPAAFKYFDTTIDRKRYTSTKEVLDATLIHQSITGLYETRIDLSQLGGDGGPAPGGSGGGGGVLNLEEEYRLHEKPVPSSIDPSWLQLFPTVWAERAGMGLANQVPPVVVELRSGASPVAVRQYPMSKEAREGIRPHIQRFLDLGVLVPCQSPWNTPLLPVKKPGTNDYRPVQDLREINKRVQDIHPTVPNPYNLLSSLPPSHTWYSVLDLKDAFFCLKLHPNSQPLFAFEWRDPEKGNTGQLTWTRLPQGFKNSPTLFNEALHRDLAPFRALNPQVVLLQYVDDLLVAAPTYRDCKEGTQKLLQELSKLGYRVSAKKAQLCQKEVTYLGYLLKEGKRWLTPARKATVMKIPPPTTPRQVREFLGTAGFCRLWIPGFASLAAPLYPLTKPSIPFIWTEEHQKAFDRIKEALLSAPALALPDLTKPFTLYVDERAGVARGVLTQTLGPWRRPVAYLSKKLDPVASGWPTCLKAVAAVALLLKDADKLTLGQNVTVIASHSLESIVRQPPDRWMTNARMTHYQSLLLNERVSFAPPAVLNPATLLPVESEATPVHRCSEILAEETGTRRDLKDQPLPGVPAWYTDGSSFIAEGKRRAGAAIVDGKRTVWASSLPEGTSAQKAELVALTQALRLAEGKDINIYTDSRYAFATAHIHGAIYKQRGWLTSAGKDIKNKEEILALLEAIHLPKRVAIIHCPGHQKGNDPVATGNRRADEAAKQAALSTRVLAETTKPAGKRTADGSEFEKRTADGSEFESPKKKAKVE

SEQ ID NO: 859 - protein, 2089 aa, synthetic construct
MPAAKRVKLDGGDKKYSIGLDIGTNSVGWAVITDEYKVPSKKFKVLGNTDRHSIKKNLIGALLFDSGETAEATRLKRTARRRYTRRKNRICYLQEIFSNEMAKVDDSFFHRLEESFLVEEDKKHERHPIFGNIVDEVAYHEKYPTIYHLRKKLVDSTDKADLRLIYLALAHMIKFRGHFLIEGDLNPDNSDVDKLFIQLVQTYNQLFEENPINASGVDAKAILSARLSKSRRLENLIAQLPGEKKNGLFGNLIALSLGLTPNFKSNFDLAEDAKLQLSKDTYDDDLDNLLAQIGDQYADLFLAAKNLSDAILLSDILRVNTEITKAPLSASMIKRYDEHHQDLTLLKALVRQQLPEKYKEIFFDQSKNGYAGYIDGGASQEEFYKFIKPILEKMDGTEELLVKLNREDLLRKQRTFDNGSIPHQIHLGELHAILRRQEDFYPFLKDNREKIEKILTFRIPYYVGPLARGNSRFAWMTRKSEETITPWNFEEVVDKGASAQSFIERMTNFDKNLPNEKVLPKHSLLYEYFTVYNELTKVKYVTEGMRKPAFLSGEQKKAIVDLLFKTNRKVTVKQLKEDYFKKIECFDSVEISGVEDRFNASLGTYHDLLKIIKDKDFLDNEENEDILEDIVLTLTLFEDREMIEERLKTYAHLFDDKVMKQLKRRRYTGWGRLSRKLINGIRDKQSGKTILDFLKSDGFANRNFMQLIHDDSLTFKEDIQKAQVSGQGDSLHEHIANLAGSPAIKKGILQTVKVVDELVKVMGRHKPENIVIEMARENQTTQKGQKNSRERMKRIEEGIKELGSQILKEHPVENTQLQNEKLYLYYLQNGRDMYVDQELDINRLSDYDVDHIVPQSFLKDDSIDNKVLTRSDKARGKSDNVPSEEVVKKMKNYWRQLLNAKLITQRKFDNLTKAERGGLSELDKAGFIKRQLVETRQITKHVAQILDSRMNTKYDENDKLIREVKVITLKSKLVSDFRKDFQFYKVREINNYHHAHDAYLNAVVGTALIKKYPKLESEFVYGDYKVYDVRKMIAKSEQEIGKATAKYFFYSNIMNFFKTEITLANGEIRKRPLIETNGETGEIVWDKGRDFATVRKVLSMPQVNIVKKTEVQTGGFSKESILPKRNSDKLIARKKDWDPKKYGGFDSPTVAYSVLVVAKVEKGKSKKLKSVKELLGITIMERSSFEKNPIDFLEAKGYKEVKKDLIIKLPKYSLFELENGRKRMLASAGELQKGNELALPSKYVNFLYLASHYEKLKGSPEDNEQKQLFVEQHKHYLDEIIEQISEFSKRVILADANLDKVLSAYNKHRDKPIREQAENIIHLFTLTNLGAPAAFKYFDTTIDRKRYTSTKEVLDATLIHQSITGLYETRIDLSQLGGDGGPAPGSSGGVLNLEEEYRLHEKPVPSSIDPSWLQLFPTVWAERAGMGLANQVPPVVVELRSGASPVAVRQYPMSKEAREGIRPHIQRFLDLGVLVPCQSPWNTPLLPVKKPGTNDYRPVQDLREINKRVQDIHPTVPNPYNLLSSLPPSHTWYSVLDLKDAFFCLKLHPNSQPLFAFEWRDPEKGNTGQLTWTRLPQGFKNSPTLFNEALHRDLAPFRALNPQVVLLQYVDDLLVAAPTYRDCKEGTQKLLQELSKLGYRVSAKKAQLCQKEVTYLGYLLKEGKRWLTPARKATVMKIPPPTTPRQVREFLGTAGFCRLWIPGFASLAAPLYPLTKPSIPFIWTEEHQKAFDRIKEALLSAPALALPDLTKPFTLYVDERAGVARGVLTQTLGPWRRPVAYLSKKLDPVASGWPTCLKAVAAVALLLKDADKLTLGQNVTVIASHSLESIVRQPPDRWMTNARMTHYQSLLLNERVSFAPPAVLNPATLLPVESEATPVHRCSEILAEETGTRRDLKDQPLPGVPAWYTDGSSFIAEGKRRAGAAIVDGKRTVWASSLPEGTSAQKAELVALTQALRLAEGKDINIYTDSRYAFATAHIHGAIYKQRGWLTSAGKDIKNKEEILALLEAIHLPKRVAIIHCPGHQKGNDPVATGNRRADEAAKQAALSTRVLAETTKPAGKRTADGSEFEKRTADGSEFESPKKKAKVE

SEQ ID NO: 860 - protein, 2090 aa, synthetic construct
MPAAKRVKLDGGDKKYSIGLDIGTNSVGWAVITDEYKVPSKKFKVLGNTDRHSIKKNLIGALLFDSGETAEATRLKRTARRRYTRRKNRICYLQEIFSNEMAKVDDSFFHRLEESFLVEEDKKHERHPIFGNIVDEVAYHEKYPTIYHLRKKLVDSTDKADLRLIYLALAHMIKFRGHFLIEGDLNPDNSDVDKLFIQLVQTYNQLFEENPINASGVDAKAILSARLSKSRRLENLIAQLPGEKKNGLFGNLIALSLGLTPNFKSNFDLAEDAKLQLSKDTYDDDLDNLLAQIGDQYADLFLAAKNLSDAILLSDILRVNTEITKAPLSASMIKRYDEHHQDLTLLKALVRQQLPEKYKEIFFDQSKNGYAGYIDGGASQEEFYKFIKPILEKMDGTEELLVKLNREDLLRKQRTFDNGSIPHQIHLGELHAILRRQEDFYPFLKDNREKIEKILTFRIPYYVGPLARGNSRFAWMTRKSEETITPWNFEEVVDKGASAQSFIERMTNFDKNLPNEKVLPKHSLLYEYFTVYNELTKVKYVTEGMRKPAFLSGEQKKAIVDLLFKTNRKVTVKQLKEDYFKKIECFDSVEISGVEDRFNASLGTYHDLLKIIKDKDFLDNEENEDILEDIVLTLTLFEDREMIEERLKTYAHLFDDKVMKQLKRRRYTGWGRLSRKLINGIRDKQSGKTILDFLKSDGFANRNFMQLIHDDSLTFKEDIQKAQVSGQGDSLHEHIANLAGSPAIKKGILQTVKVVDELVKVMGRHKPENIVIEMARENQTTQKGQKNSRERMKRIEEGIKELGSQILKEHPVENTQLQNEKLYLYYLQNGRDMYVDQELDINRLSDYDVDHIVPQSFLKDDSIDNKVLTRSDKARGKSDNVPSEEVVKKMKNYWRQLLNAKLITQRKFDNLTKAERGGLSELDKAGFIKRQLVETRQITKHVAQILDSRMNTKYDENDKLIREVKVITLKSKLVSDFRKDFQFYKVREINNYHHAHDAYLNAVVGTALIKKYPKLESEFVYGDYKVYDVRKMIAKSEQEIGKATAKYFFYSNIMNFFKTEITLANGEIRKRPLIETNGETGEIVWDKGRDFATVRKVLSMPQVNIVKKTEVQTGGFSKESILPKRNSDKLIARKKDWDPKKYGGFDSPTVAYSVLVVAKVEKGKSKKLKSVKELLGITIMERSSFEKNPIDFLEAKGYKEVKKDLIIKLPKYSLFELENGRKRMLASAGELQKGNELALPSKYVNFLYLASHYEKLKGSPEDNEQKQLFVEQHKHYLDEIIEQISEFSKRVILADANLDKVLSAYNKHRDKPIREQAENIIHLFTLTNLGAPAAFKYFDTTIDRKRYTSTKEVLDATLIHQSITGLYETRIDLSQLGGDGGPAPAPAPGGVLNLEEEYRLHEKPVPSSIDPSWLQLFPTVWAERAGMGLANQVPPVVVELRSGASPVAVRQYPMSKEAREGIRPHIQRFLDLGVLVPCQSPWNTPLLPVKKPGTNDYRPVQDLREINKRVQDIHPTVPNPYNLLSSLPPSHTWYSVLDLKDAFFCLKLHPNSQPLFAFEWRDPEKGNTGQLTWTRLPQGFKNSPTLFNEALHRDLAPFRALNPQVVLLQYVDDLLVAAPTYRDCKEGTQKLLQELSKLGYRVSAKKAQLCQKEVTYLGYLLKEGKRWLTPARKATVMKIPPPTTPRQVREFLGTAGFCRLWIPGFASLAAPLYPLTKPSIPFIWTEEHQKAFDRIKEALLSAPALALPDLTKPFTLYVDERAGVARGVLTQTLGPWRRPVAYLSKKLDPVASGWPTCLKAVAAVALLLKDADKLTLGQNVTVIASHSLESIVRQPPDRWMTNARMTHYQSLLLNERVSFAPPAVLNPATLLPVESEATPVHRCSEILAEETGTRRDLKDQPLPGVPAWYTDGSSFIAEGKRRAGAAIVDGKRTVWASSLPEGTSAQKAELVALTQALRLAEGKDINIYTDSRYAFATAHIHGAIYKQRGWLTSAGKDIKNKEEILALLEAIHLPKRVAIIHCPGHQKGNDPVATGNRRADEAAKQAALSTRVLAETTKPAGKRTADGSEFEKRTADGSEFESPKKKAKVE

SEQ ID NO: 861 - protein, 2094 aa, synthetic construct
MPAAKRVKLDGGDKKYSIGLDIGTNSVGWAVITDEYKVPSKKFKVLGNTDRHSIKKNLIGALLFDSGETAEATRLKRTARRRYTRRKNRICYLQEIFSNEMAKVDDSFFHRLEESFLVEEDKKHERHPIFGNIVDEVAYHEKYPTIYHLRKKLVDSTDKADLRLIYLALAHMIKFRGHFLIEGDLNPDNSDVDKLFIQLVQTYNQLFEENPINASGVDAKAILSARLSKSRRLENLIAQLPGEKKNGLFGNLIALSLGLTPNFKSNFDLAEDAKLQLSKDTYDDDLDNLLAQIGDQYADLFLAAKNLSDAILLSDILRVNTEITKAPLSASMIKRYDEHHQDLTLLKALVRQQLPEKYKEIFFDQSKNGYAGYIDGGASQEEFYKFIKPILEKMDGTEELLVKLNREDLLRKQRTFDNGSIPHQIHLGELHAILRRQEDFYPFLKDNREKIEKILTFRIPYYVGPLARGNSRFAWMTRKSEETITPWNFEEVVDKGASAQSFIERMTNFDKNLPNEKVLPKHSLLYEYFTVYNELTKVKYVTEGMRKPAFLSGEQKKAIVDLLFKTNRKVTVKQLKEDYFKKIECFDSVEISGVEDRFNASLGTYHDLLKIIKDKDFLDNEENEDILEDIVLTLTLFEDREMIEERLKTYAHLFDDKVMKQLKRRRYTGWGRLSRKLINGIRDKQSGKTILDFLKSDGFANRNFMQLIHDDSLTFKEDIQKAQVSGQGDSLHEHIANLAGSPAIKKGILQTVKVVDELVKVMGRHKPENIVIEMARENQTTQKGQKNSRERMKRIEEGIKELGSQILKEHPVENTQLQNEKLYLYYLQNGRDMYVDQELDINRLSDYDVDHIVPQSFLKDDSIDNKVLTRSDKARGKSDNVPSEEVVKKMKNYWRQLLNAKLITQRKFDNLTKAERGGLSELDKAGFIKRQLVETRQITKHVAQILDSRMNTKYDENDKLIREVKVITLKSKLVSDFRKDFQFYKVREINNYHHAHDAYLNAVVGTALIKKYPKLESEFVYGDYKVYDVRKMIAKSEQEIGKATAKYFFYSNIMNFFKTEITLANGEIRKRPLIETNGETGEIVWDKGRDFATVRKVLSMPQVNIVKKTEVQTGGFSKESILPKRNSDKLIARKKDWDPKKYGGFDSPTVAYSVLVVAKVEKGKSKKLKSVKELLGITIMERSSFEKNPIDFLEAKGYKEVKKDLIIKLPKYSLFELENGRKRMLASAGELQKGNELALPSKYVNFLYLASHYEKLKGSPEDNEQKQLFVEQHKHYLDEIIEQISEFSKRVILADANLDKVLSAYNKHRDKPIREQAENIIHLFTLTNLGAPAAFKYFDTTIDRKRYTSTKEVLDATLIHQSITGLYETRIDLSQLGGDGGGGSGGGEAAAKGGVLNLEEEYRLHEKPVPSSIDPSWLQLFPTVWAERAGMGLANQVPPVVVELRSGASPVAVRQYPMSKEAREGIRPHIQRFLDLGVLVPCQSPWNTPLLPVKKPGTNDYRPVQDLREINKRVQDIHPTVPNPYNLLSSLPPSHTWYSVLDLKDAFFCLKLHPNSQPLFAFEWRDPEKGNTGQLTWTRLPQGFKNSPTLFNEALHRDLAPFRALNPQVVLLQYVDDLLVAAPTYRDCKEGTQKLLQELSKLGYRVSAKKAQLCQKEVTYLGYLLKEGKRWLTPARKATVMKIPPPTTPRQVREFLGTAGFCRLWIPGFASLAAPLYPLTKPSIPFIWTEEHQKAFDRIKEALLSAPALALPDLTKPFTLYVDERAGVARGVLTQTLGPWRRPVAYLSKKLDPVASGWPTCLKAVAAVALLLKDADKLTLGQNVTVIASHSLESIVRQPPDRWMTNARMTHYQSLLLNERVSFAPPAVLNPATLLPVESEATPVHRCSEILAEETGTRRDLKDQPLPGVPAWYTDGSSFIAEGKRRAGAAIVDGKRTVWASSLPEGTSAQKAELVALTQALRLAEGKDINIYTDSRYAFATAHIHGAIYKQRGWLTSAGKDIKNKEEILALLEAIHLPKRVAIIHCPGHQKGNDPVATGNRRADEAAKQAALSTRVLAETTKPAGKRTADGSEFEKRTADGSEFESPKKKAKVE

SEQ ID NO: 862 - protein, 2095 aa, synthetic construct
MPAAKRVKLDGGDKKYSIGLDIGTNSVGWAVITDEYKVPSKKFKVLGNTDRHSIKKNLIGALLFDSGETAEATRLKRTARRRYTRRKNRICYLQEIFSNEMAKVDDSFFHRLEESFLVEEDKKHERHPIFGNIVDEVAYHEKYPTIYHLRKKLVDSTDKADLRLIYLALAHMIKFRGHFLIEGDLNPDNSDVDKLFIQLVQTYNQLFEENPINASGVDAKAILSARLSKSRRLENLIAQLPGEKKNGLFGNLIALSLGLTPNFKSNFDLAEDAKLQLSKDTYDDDLDNLLAQIGDQYADLFLAAKNLSDAILLSDILRVNTEITKAPLSASMIKRYDEHHQDLTLLKALVRQQLPEKYKEIFFDQSKNGYAGYIDGGASQEEFYKFIKPILEKMDGTEELLVKLNREDLLRKQRTFDNGSIPHQIHLGELHAILRRQEDFYPFLKDNREKIEKILTFRIPYYVGPLARGNSRFAWMTRKSEETITPWNFEEVVDKGASAQSFIERMTNFDKNLPNEKVLPKHSLLYEYFTVYNELTKVKYVTEGMRKPAFLSGEQKKAIVDLLFKTNRKVTVKQLKEDYFKKIECFDSVEISGVEDRFNASLGTYHDLLKIIKDKDFLDNEENEDILEDIVLTLTLFEDREMIEERLKTYAHLFDDKVMKQLKRRRYTGWGRLSRKLINGIRDKQSGKTILDFLKSDGFANRNFMQLIHDDSLTFKEDIQKAQVSGQGDSLHEHIANLAGSPAIKKGILQTVKVVDELVKVMGRHKPENIVIEMARENQTTQKGQKNSRERMKRIEEGIKELGSQILKEHPVENTQLQNEKLYLYYLQNGRDMYVDQELDINRLSDYDVDHIVPQSFLKDDSIDNKVLTRSDKARGKSDNVPSEEVVKKMKNYWRQLLNAKLITQRKFDNLTKAERGGLSELDKAGFIKRQLVETRQITKHVAQILDSRMNTKYDENDKLIREVKVITLKSKLVSDFRKDFQFYKVREINNYHHAHDAYLNAVVGTALIKKYPKLESEFVYGDYKVYDVRKMIAKSEQEIGKATAKYFFYSNIMNFFKTEITLANGEIRKRPLIETNGETGEIVWDKGRDFATVRKVLSMPQVNIVKKTEVQTGGFSKESILPKRNSDKLIARKKDWDPKKYGGFDSPTVAYSVLVVAKVEKGKSKKLKSVKELLGITIMERSSFEKNPIDFLEAKGYKEVKKDLIIKLPKYSLFELENGRKRMLASAGELQKGNELALPSKYVNFLYLASHYEKLKGSPEDNEQKQLFVEQHKHYLDEIIEQISEFSKRVILADANLDKVLSAYNKHRDKPIREQAENIIHLFTLTNLGAPAAFKYFDTTIDRKRYTSTKEVLDATLIHQSITGLYETRIDLSQLGGDGGGSAGSAAGSGEFGGVLNLEEEYRLHEKPVPSSIDPSWLQLFPTVWAERAGMGLANQVPPVVVELRSGASPVAVRQYPMSKEAREGIRPHIQRFLDLGVLVPCQSPWNTPLLPVKKPGTNDYRPVQDLREINKRVQDIHPTVPNPYNLLSSLPPSHTWYSVLDLKDAFFCLKLHPNSQPLFAFEWRDPEKGNTGQLTWTRLPQGFKNSPTLFNEALHRDLAPFRALNPQVVLLQYVDDLLVAAPTYRDCKEGTQKLLQELSKLGYRVSAKKAQLCQKEVTYLGYLLKEGKRWLTPARKATVMKIPPPTTPRQVREFLGTAGFCRLWIPGFASLAAPLYPLTKPSIPFIWTEEHQKAFDRIKEALLSAPALALPDLTKPFTLYVDERAGVARGVLTQTLGPWRRPVAYLSKKLDPVASGWPTCLKAVAAVALLLKDADKLTLGQNVTVIASHSLESIVRQPPDRWMTNARMTHYQSLLLNERVSFAPPAVLNPATLLPVESEATPVHRCSEILAEETGTRRDLKDQPLPGVPAWYTDGSSFIAEGKRRAGAAIVDGKRTVWASSLPEGTSAQKAELVALTQALRLAEGKDINIYTDSRYAFATAHIHGAIYKQRGWLTSAGKDIKNKEEILALLEAIHLPKRVAIIHCPGHQKGNDPVATGNRRADEAAKQAALSTRVLAETTKPAGKRTADGSEFEKRTADGSEFESPKKKAKVE

SEQ ID NO: 863 - protein, 2094 aa, synthetic construct
MPAAKRVKLDGGDKKYSIGLDIGTNSVGWAVITDEYKVPSKKFKVLGNTDRHSIKKNLIGALLFDSGETAEATRLKRTARRRYTRRKNRICYLQEIFSNEMAKVDDSFFHRLEESFLVEEDKKHERHPIFGNIVDEVAYHEKYPTIYHLRKKLVDSTDKADLRLIYLALAHMIKFRGHFLIEGDLNPDNSDVDKLFIQLVQTYNQLFEENPINASGVDAKAILSARLSKSRRLENLIAQLPGEKKNGLFGNLIALSLGLTPNFKSNFDLAEDAKLQLSKDTYDDDLDNLLAQIGDQYADLFLAAKNLSDAILLSDILRVNTEITKAPLSASMIKRYDEHHQDLTLLKALVRQQLPEKYKEIFFDQSKNGYAGYIDGGASQEEFYKFIKPILEKMDGTEELLVKLNREDLLRKQRTFDNGSIPHQIHLGELHAILRRQEDFYPFLKDNREKIEKILTFRIPYYVGPLARGNSRFAWMTRKSEETITPWNFEEVVDKGASAQSFIERMTNFDKNLPNEKVLPKHSLLYEYFTVYNELTKVKYVTEGMRKPAFLSGEQKKAIVDLLFKTNRKVTVKQLKEDYFKKIECFDSVEISGVEDRFNASLGTYHDLLKIIKDKDFLDNEENEDILEDIVLTLTLFEDREMIEERLKTYAHLFDDKVMKQLKRRRYTGWGRLSRKLINGIRDKQSGKTILDFLKSDGFANRNFMQLIHDDSLTFKEDIQKAQVSGQGDSLHEHIANLAGSPAIKKGILQTVKVVDELVKVMGRHKPENIVIEMARENQTTQKGQKNSRERMKRIEEGIKELGSQILKEHPVENTQLQNEKLYLYYLQNGRDMYVDQELDINRLSDYDVDHIVPQSFLKDDSIDNKVLTRSDKARGKSDNVPSEEVVKKMKNYWRQLLNAKLITQRKFDNLTKAERGGLSELDKAGFIKRQLVETRQITKHVAQILDSRMNTKYDENDKLIREVKVITLKSKLVSDFRKDFQFYKVREINNYHHAHDAYLNAVVGTALIKKYPKLESEFVYGDYKVYDVRKMIAKSEQEIGKATAKYFFYSNIMNFFKTEITLANGEIRKRPLIETNGETGEIVWDKGRDFATVRKVLSMPQVNIVKKTEVQTGGFSKESILPKRNSDKLIARKKDWDPKKYGGFDSPTVAYSVLVVAKVEKGKSKKLKSVKELLGITIMERSSFEKNPIDFLEAKGYKEVKKDLIIKLPKYSLFELENGRKRMLASAGELQKGNELALPSKYVNFLYLASHYEKLKGSPEDNEQKQLFVEQHKHYLDEIIEQISEFSKRVILADANLDKVLSAYNKHRDKPIREQAENIIHLFTLTNLGAPAAFKYFDTTIDRKRYTSTKEVLDATLIHQSITGLYETRIDLSQLGGDGGPAPEAAAKGGSGGVLNLEEEYRLHEKPVPSSIDPSWLQLFPTVWAERAGMGLANQVPPVVVELRSGASPVAVRQYPMSKEAREGIRPHIQRFLDLGVLVPCQSPWNTPLLPVKKPGTNDYRPVQDLREINKRVQDIHPTVPNPYNLLSSLPPSHTWYSVLDLKDAFFCLKLHPNSQPLFAFEWRDPEKGNTGQLTWTRLPQGFKNSPTLFNEALHRDLAPFRALNPQVVLLQYVDDLLVAAPTYRDCKEGTQKLLQELSKLGYRVSAKKAQLCQKEVTYLGYLLKEGKRWLTPARKATVMKIPPPTTPRQVREFLGTAGFCRLWIPGFASLAAPLYPLTKPSIPFIWTEEHQKAFDRIKEALLSAPALALPDLTKPFTLYVDERAGVARGVLTQTLGPWRRPVAYLSKKLDPVASGWPTCLKAVAAVALLLKDADKLTLGQNVTVIASHSLESIVRQPPDRWMTNARMTHYQSLLLNERVSFAPPAVLNPATLLPVESEATPVHRCSEILAEETGTRRDLKDQPLPGVPAWYTDGSSFIAEGKRRAGAAIVDGKRTVWASSLPEGTSAQKAELVALTQALRLAEGKDINIYTDSRYAFATAHIHGAIYKQRGWLTSAGKDIKNKEEILALLEAIHLPKRVAIIHCPGHQKGNDPVATGNRRADEAAKQAALSTRVLAETTKPAGKRTADGSEFEKRTADGSEFESPKKKAKVE

SEQ ID NO: 864 - protein, 2092 aa, synthetic construct
MPAAKRVKLDGGDKKYSIGLDIGTNSVGWAVITDEYKVPSKKFKVLGNTDRHSIKKNLIGALLFDSGETAEATRLKRTARRRYTRRKNRICYLQEIFSNEMAKVDDSFFHRLEESFLVEEDKKHERHPIFGNIVDEVAYHEKYPTIYHLRKKLVDSTDKADLRLIYLALAHMIKFRGHFLIEGDLNPDNSDVDKLFIQLVQTYNQLFEENPINASGVDAKAILSARLSKSRRLENLIAQLPGEKKNGLFGNLIALSLGLTPNFKSNFDLAEDAKLQLSKDTYDDDLDNLLAQIGDQYADLFLAAKNLSDAILLSDILRVNTEITKAPLSASMIKRYDEHHQDLTLLKALVRQQLPEKYKEIFFDQSKNGYAGYIDGGASQEEFYKFIKPILEKMDGTEELLVKLNREDLLRKQRTFDNGSIPHQIHLGELHAILRRQEDFYPFLKDNREKIEKILTFRIPYYVGPLARGNSRFAWMTRKSEETITPWNFEEVVDKGASAQSFIERMTNFDKNLPNEKVLPKHSLLYEYFTVYNELTKVKYVTEGMRKPAFLSGEQKKAIVDLLFKTNRKVTVKQLKEDYFKKIECFDSVEISGVEDRFNASLGTYHDLLKIIKDKDFLDNEENEDILEDIVLTLTLFEDREMIEERLKTYAHLFDDKVMKQLKRRRYTGWGRLSRKLINGIRDKQSGKTILDFLKSDGFANRNFMQLIHDDSLTFKEDIQKAQVSGQGDSLHEHIANLAGSPAIKKGILQTVKVVDELVKVMGRHKPENIVIEMARENQTTQKGQKNSRERMKRIEEGIKELGSQILKEHPVENTQLQNEKLYLYYLQNGRDMYVDQELDINRLSDYDVDHIVPQSFLKDDSIDNKVLTRSDKARGKSDNVPSEEVVKKMKNYWRQLLNAKLITQRKFDNLTKAERGGLSELDKAGFIKRQLVETRQITKHVAQILDSRMNTKYDENDKLIREVKVITLKSKLVSDFRKDFQFYKVREINNYHHAHDAYLNAVVGTALIKKYPKLESEFVYGDYKVYDVRKMIAKSEQEIGKATAKYFFYSNIMNFFKTEITLANGEIRKRPLIETNGETGEIVWDKGRDFATVRKVLSMPQVNIVKKTEVQTGGFSKESILPKRNSDKLIARKKDWDPKKYGGFDSPTVAYSVLVVAKVEKGKSKKLKSVKELLGITIMERSSFEKNPIDFLEAKGYKEVKKDLIIKLPKYSLFELENGRKRMLASAGELQKGNELALPSKYVNFLYLASHYEKLKGSPEDNEQKQLFVEQHKHYLDEIIEQISEFSKRVILADANLDKVLSAYNKHRDKPIREQAENIIHLFTLTNLGAPAAFKYFDTTIDRKRYTSTKEVLDATLIHQSITGLYETRIDLSQLGGDGGPAPGSSGGGGGVLNLEEEYRLHEKPVPSSIDPSWLQLFPTVWAERAGMGLANQVPPVVVELRSGASPVAVRQYPMSKEAREGIRPHIQRFLDLGVLVPCQSPWNTPLLPVKKPGTNDYRPVQDLREINKRVQDIHPTVPNPYNLLSSLPPSHTWYSVLDLKDAFFCLKLHPNSQPLFAFEWRDPEKGNTGQLTWTRLPQGFKNSPTLFNEALHRDLAPFRALNPQVVLLQYVDDLLVAAPTYRDCKEGTQKLLQELSKLGYRVSAKKAQLCQKEVTYLGYLLKEGKRWLTPARKATVMKIPPPTTPRQVREFLGTAGFCRLWIPGFASLAAPLYPLTKPSIPFIWTEEHQKAFDRIKEALLSAPALALPDLTKPFTLYVDERAGVARGVLTQTLGPWRRPVAYLSKKLDPVASGWPTCLKAVAAVALLLKDADKLTLGQNVTVIASHSLESIVRQPPDRWMTNARMTHYQSLLLNERVSFAPPAVLNPATLLPVESEATPVHRCSEILAEETGTRRDLKDQPLPGVPAWYTDGSSFIAEGKRRAGAAIVDGKRTVWASSLPEGTSAQKAELVALTQALRLAEGKDINIYTDSRYAFATAHIHGAIYKQRGWLTSAGKDIKNKEEILALLEAIHLPKRVAIIHCPGHQKGNDPVATGNRRADEAAKQAALSTRVLAETTKPAGKRTADGSEFEKRTADGSEFESPKKKAKVE

SEQ ID NO: 865 - protein, 2092 aa, synthetic construct
MPAAKRVKLDGGDKKYSIGLDIGTNSVGWAVITDEYKVPSKKFKVLGNTDRHSIKKNLIGALLFDSGETAEATRLKRTARRRYTRRKNRICYLQEIFSNEMAKVDDSFFHRLEESFLVEEDKKHERHPIFGNIVDEVAYHEKYPTIYHLRKKLVDSTDKADLRLIYLALAHMIKFRGHFLIEGDLNPDNSDVDKLFIQLVQTYNQLFEENPINASGVDAKAILSARLSKSRRLENLIAQLPGEKKNGLFGNLIALSLGLTPNFKSNFDLAEDAKLQLSKDTYDDDLDNLLAQIGDQYADLFLAAKNLSDAILLSDILRVNTEITKAPLSASMIKRYDEHHQDLTLLKALVRQQLPEKYKEIFFDQSKNGYAGYIDGGASQEEFYKFIKPILEKMDGTEELLVKLNREDLLRKQRTFDNGSIPHQIHLGELHAILRRQEDFYPFLKDNREKIEKILTFRIPYYVGPLARGNSRFAWMTRKSEETITPWNFEEVVDKGASAQSFIERMTNFDKNLPNEKVLPKHSLLYEYFTVYNELTKVKYVTEGMRKPAFLSGEQKKAIVDLLFKTNRKVTVKQLKEDYFKKIECFDSVEISGVEDRFNASLGTYHDLLKIIKDKDFLDNEENEDILEDIVLTLTLFEDREMIEERLKTYAHLFDDKVMKQLKRRRYTGWGRLSRKLINGIRDKQSGKTILDFLKSDGFANRNFMQLIHDDSLTFKEDIQKAQVSGQGDSLHEHIANLAGSPAIKKGILQTVKVVDELVKVMGRHKPENIVIEMARENQTTQKGQKNSRERMKRIEEGIKELGSQILKEHPVENTQLQNEKLYLYYLQNGRDMYVDQELDINRLSDYDVDHIVPQSFLKDDSIDNKVLTRSDKARGKSDNVPSEEVVKKMKNYWRQLLNAKLITQRKFDNLTKAERGGLSELDKAGFIKRQLVETRQITKHVAQILDSRMNTKYDENDKLIREVKVITLKSKLVSDFRKDFQFYKVREINNYHHAHDAYLNAVVGTALIKKYPKLESEFVYGDYKVYDVRKMIAKSEQEIGKATAKYFFYSNIMNFFKTEITLANGEIRKRPLIETNGETGEIVWDKGRDFATVRKVLSMPQVNIVKKTEVQTGGFSKESILPKRNSDKLIARKKDWDPKKYGGFDSPTVAYSVLVVAKVEKGKSKKLKSVKELLGITIMERSSFEKNPIDFLEAKGYKEVKKDLIIKLPKYSLFELENGRKRMLASAGELQKGNELALPSKYVNFLYLASHYEKLKGSPEDNEQKQLFVEQHKHYLDEIIEQISEFSKRVILADANLDKVLSAYNKHRDKPIREQAENIIHLFTLTNLGAPAAFKYFDTTIDRKRYTSTKEVLDATLIHQSITGLYETRIDLSQLGGDGGGGSGSSGGGGGVLNLEEEYRLHEKPVPSSIDPSWLQLFPTVWAERAGMGLANQVPPVVVELRSGASPVAVRQYPMSKEAREGIRPHIQRFLDLGVLVPCQSPWNTPLLPVKKPGTNDYRPVQDLREINKRVQDIHPTVPNPYNLLSSLPPSHTWYSVLDLKDAFFCLKLHPNSQPLFAFEWRDPEKGNTGQLTWTRLPQGFKNSPTLFNEALHRDLAPFRALNPQVVLLQYVDDLLVAAPTYRDCKEGTQKLLQELSKLGYRVSAKKAQLCQKEVTYLGYLLKEGKRWLTPARKATVMKIPPPTTPRQVREFLGTAGFCRLWIPGFASLAAPLYPLTKPSIPFIWTEEHQKAFDRIKEALLSAPALALPDLTKPFTLYVDERAGVARGVLTQTLGPWRRPVAYLSKKLDPVASGWPTCLKAVAAVALLLKDADKLTLGQNVTVIASHSLESIVRQPPDRWMTNARMTHYQSLLLNERVSFAPPAVLNPATLLPVESEATPVHRCSEILAEETGTRRDLKDQPLPGVPAWYTDGSSFIAEGKRRAGAAIVDGKRTVWASSLPEGTSAQKAELVALTQALRLAEGKDINIYTDSRYAFATAHIHGAIYKQRGWLTSAGKDIKNKEEILALLEAIHLPKRVAIIHCPGHQKGNDPVATGNRRADEAAKQAALSTRVLAETTKPAGKRTADGSEFEKRTADGSEFESPKKKAKVE

SEQ ID NO: 866 - protein, 2094 aa, synthetic construct
MPAAKRVKLDGGDKKYSIGLDIGTNSVGWAVITDEYKVPSKKFKVLGNTDRHSIKKNLIGALLFDSGETAEATRLKRTARRRYTRRKNRICYLQEIFSNEMAKVDDSFFHRLEESFLVEEDKKHERHPIFGNIVDEVAYHEKYPTIYHLRKKLVDSTDKADLRLIYLALAHMIKFRGHFLIEGDLNPDNSDVDKLFIQLVQTYNQLFEENPINASGVDAKAILSARLSKSRRLENLIAQLPGEKKNGLFGNLIALSLGLTPNFKSNFDLAEDAKLQLSKDTYDDDLDNLLAQIGDQYADLFLAAKNLSDAILLSDILRVNTEITKAPLSASMIKRYDEHHQDLTLLKALVRQQLPEKYKEIFFDQSKNGYAGYIDGGASQEEFYKFIKPILEKMDGTEELLVKLNREDLLRKQRTFDNGSIPHQIHLGELHAILRRQEDFYPFLKDNREKIEKILTFRIPYYVGPLARGNSRFAWMTRKSEETITPWNFEEVVDKGASAQSFIERMTNFDKNLPNEKVLPKHSLLYEYFTVYNELTKVKYVTEGMRKPAFLSGEQKKAIVDLLFKTNRKVTVKQLKEDYFKKIECFDSVEISGVEDRFNASLGTYHDLLKIIKDKDFLDNEENEDILEDIVLTLTLFEDREMIEERLKTYAHLFDDKVMKQLKRRRYTGWGRLSRKLINGIRDKQSGKTILDFLKSDGFANRNFMQLIHDDSLTFKEDIQKAQVSGQGDSLHEHIANLAGSPAIKKGILQTVKVVDELVKVMGRHKPENIVIEMARENQTTQKGQKNSRERMKRIEEGIKELGSQILKEHPVENTQLQNEKLYLYYLQNGRDMYVDQELDINRLSDYDVDHIVPQSFLKDDSIDNKVLTRSDKARGKSDNVPSEEVVKKMKNYWRQLLNAKLITQRKFDNLTKAERGGLSELDKAGFIKRQLVETRQITKHVAQILDSRMNTKYDENDKLIREVKVITLKSKLVSDFRKDFQFYKVREINNYHHAHDAYLNAVVGTALIKKYPKLESEFVYGDYKVYDVRKMIAKSEQEIGKATAKYFFYSNIMNFFKTEITLANGEIRKRPLIETNGETGEIVWDKGRDFATVRKVLSMPQVNIVKKTEVQTGGFSKESILPKRNSDKLIARKKDWDPKKYGGFDSPTVAYSVLVVAKVEKGKSKKLKSVKELLGITIMERSSFEKNPIDFLEAKGYKEVKKDLIIKLPKYSLFELENGRKRMLASAGELQKGNELALPSKYVNFLYLASHYEKLKGSPEDNEQKQLFVEQHKHYLDEIIEQISEFSKRVILADANLDKVLSAYNKHRDKPIREQAENIIHLFTLTNLGAPAAFKYFDTTIDRKRYTSTKEVLDATLIHQSITGLYETRIDLSQLGGDGGPAPEAAAKGGGGGVLNLEEEYRLHEKPVPSSIDPSWLQLFPTVWAERAGMGLANQVPPVVVELRSGASPVAVRQYPMSKEAREGIRPHIQRFLDLGVLVPCQSPWNTPLLPVKKPGTNDYRPVQDLREINKRVQDIHPTVPNPYNLLSSLPPSHTWYSVLDLKDAFFCLKLHPNSQPLFAFEWRDPEKGNTGQLTWTRLPQGFKNSPTLFNEALHRDLAPFRALNPQVVLLQYVDDLLVAAPTYRDCKEGTQKLLQELSKLGYRVSAKKAQLCQKEVTYLGYLLKEGKRWLTPARKATVMKIPPPTTPRQVREFLGTAGFCRLWIPGFASLAAPLYPLTKPSIPFIWTEEHQKAFDRIKEALLSAPALALPDLTKPFTLYVDERAGVARGVLTQTLGPWRRPVAYLSKKLDPVASGWPTCLKAVAAVALLLKDADKLTLGQNVTVIASHSLESIVRQPPDRWMTNARMTHYQSLLLNERVSFAPPAVLNPATLLPVESEATPVHRCSEILAEETGTRRDLKDQPLPGVPAWYTDGSSFIAEGKRRAGAAIVDGKRTVWASSLPEGTSAQKAELVALTQALRLAEGKDINIYTDSRYAFATAHIHGAIYKQRGWLTSAGKDIKNKEEILALLEAIHLPKRVAIIHCPGHQKGNDPVATGNRRADEAAKQAALSTRVLAETTKPAGKRTADGSEFEKRTADGSEFESPKKKAKVE

SEQ ID NO: 867 - protein, 2089 aa, synthetic construct
MPAAKRVKLDGGDKKYSIGLDIGTNSVGWAVITDEYKVPSKKFKVLGNTDRHSIKKNLIGALLFDSGETAEATRLKRTARRRYTRRKNRICYLQEIFSNEMAKVDDSFFHRLEESFLVEEDKKHERHPIFGNIVDEVAYHEKYPTIYHLRKKLVDSTDKADLRLIYLALAHMIKFRGHFLIEGDLNPDNSDVDKLFIQLVQTYNQLFEENPINASGVDAKAILSARLSKSRRLENLIAQLPGEKKNGLFGNLIALSLGLTPNFKSNFDLAEDAKLQLSKDTYDDDLDNLLAQIGDQYADLFLAAKNLSDAILLSDILRVNTEITKAPLSASMIKRYDEHHQDLTLLKALVRQQLPEKYKEIFFDQSKNGYAGYIDGGASQEEFYKFIKPILEKMDGTEELLVKLNREDLLRKQRTFDNGSIPHQIHLGELHAILRRQEDFYPFLKDNREKIEKILTFRIPYYVGPLARGNSRFAWMTRKSEETITPWNFEEVVDKGASAQSFIERMTNFDKNLPNEKVLPKHSLLYEYFTVYNELTKVKYVTEGMRKPAFLSGEQKKAIVDLLFKTNRKVTVKQLKEDYFKKIECFDSVEISGVEDRFNASLGTYHDLLKIIKDKDFLDNEENEDILEDIVLTLTLFEDREMIEERLKTYAHLFDDKVMKQLKRRRYTGWGRLSRKLINGIRDKQSGKTILDFLKSDGFANRNFMQLIHDDSLTFKEDIQKAQVSGQGDSLHEHIANLAGSPAIKKGILQTVKVVDELVKVMGRHKPENIVIEMARENQTTQKGQKNSRERMKRIEEGIKELGSQILKEHPVENTQLQNEKLYLYYLQNGRDMYVDQELDINRLSDYDVDHIVPQSFLKDDSIDNKVLTRSDKARGKSDNVPSEEVVKKMKNYWRQLLNAKLITQRKFDNLTKAERGGLSELDKAGFIKRQLVETRQITKHVAQILDSRMNTKYDENDKLIREVKVITLKSKLVSDFRKDFQFYKVREINNYHHAHDAYLNAVVGTALIKKYPKLESEFVYGDYKVYDVRKMIAKSEQEIGKATAKYFFYSNIMNFFKTEITLANGEIRKRPLIETNGETGEIVWDKGRDFATVRKVLSMPQVNIVKKTEVQTGGFSKESILPKRNSDKLIARKKDWDPKKYGGFDSPTVAYSVLVVAKVEKGKSKKLKSVKELLGITIMERSSFEKNPIDFLEAKGYKEVKKDLIIKLPKYSLFELENGRKRMLASAGELQKGNELALPSKYVNFLYLASHYEKLKGSPEDNEQKQLFVEQHKHYLDEIIEQISEFSKRVILADANLDKVLSAYNKHRDKPIREQAENIIHLFTLTNLGAPAAFKYFDTTIDRKRYTSTKEVLDATLIHQSITGLYETRIDLSQLGGDGGGSSPAPGGVLNLEEEYRLHEKPVPSSIDPSWLQLFPTVWAERAGMGLANQVPPVVVELRSGASPVAVRQYPMSKEAREGIRPHIQRFLDLGVLVPCQSPWNTPLLPVKKPGTNDYRPVQDLREINKRVQDIHPTVPNPYNLLSSLPPSHTWYSVLDLKDAFFCLKLHPNSQPLFAFEWRDPEKGNTGQLTWTRLPQGFKNSPTLFNEALHRDLAPFRALNPQVVLLQYVDDLLVAAPTYRDCKEGTQKLLQELSKLGYRVSAKKAQLCQKEVTYLGYLLKEGKRWLTPARKATVMKIPPPTTPRQVREFLGTAGFCRLWIPGFASLAAPLYPLTKPSIPFIWTEEHQKAFDRIKEALLSAPALALPDLTKPFTLYVDERAGVARGVLTQTLGPWRRPVAYLSKKLDPVASGWPTCLKAVAAVALLLKDADKLTLGQNVTVIASHSLESIVRQPPDRWMTNARMTHYQSLLLNERVSFAPPAVLNPATLLPVESEATPVHRCSEILAEETGTRRDLKDQPLPGVPAWYTDGSSFIAEGKRRAGAAIVDGKRTVWASSLPEGTSAQKAELVALTQALRLAEGKDINIYTDSRYAFATAHIHGAIYKQRGWLTSAGKDIKNKEEILALLEAIHLPKRVAIIHCPGHQKGNDPVATGNRRADEAAKQAALSTRVLAETTKPAGKRTADGSEFEKRTADGSEFESPKKKAKVE

SEQ ID NO: 868 - protein, 2092 aa, synthetic construct
MPAAKRVKLDGGDKKYSIGLDIGTNSVGWAVITDEYKVPSKKFKVLGNTDRHSIKKNLIGALLFDSGETAEATRLKRTARRRYTRRKNRICYLQEIFSNEMAKVDDSFFHRLEESFLVEEDKKHERHPIFGNIVDEVAYHEKYPTIYHLRKKLVDSTDKADLRLIYLALAHMIKFRGHFLIEGDLNPDNSDVDKLFIQLVQTYNQLFEENPINASGVDAKAILSARLSKSRRLENLIAQLPGEKKNGLFGNLIALSLGLTPNFKSNFDLAEDAKLQLSKDTYDDDLDNLLAQIGDQYADLFLAAKNLSDAILLSDILRVNTEITKAPLSASMIKRYDEHHQDLTLLKALVRQQLPEKYKEIFFDQSKNGYAGYIDGGASQEEFYKFIKPILEKMDGTEELLVKLNREDLLRKQRTFDNGSIPHQIHLGELHAILRRQEDFYPFLKDNREKIEKILTFRIPYYVGPLARGNSRFAWMTRKSEETITPWNFEEVVDKGASAQSFIERMTNFDKNLPNEKVLPKHSLLYEYFTVYNELTKVKYVTEGMRKPAFLSGEQKKAIVDLLFKTNRKVTVKQLKEDYFKKIECFDSVEISGVEDRFNASLGTYHDLLKIIKDKDFLDNEENEDILEDIVLTLTLFEDREMIEERLKTYAHLFDDKVMKQLKRRRYTGWGRLSRKLINGIRDKQSGKTILDFLKSDGFANRNFMQLIHDDSLTFKEDIQKAQVSGQGDSLHEHIANLAGSPAIKKGILQTVKVVDELVKVMGRHKPENIVIEMARENQTTQKGQKNSRERMKRIEEGIKELGSQILKEHPVENTQLQNEKLYLYYLQNGRDMYVDQELDINRLSDYDVDHIVPQSFLKDDSIDNKVLTRSDKARGKSDNVPSEEVVKKMKNYWRQLLNAKLITQRKFDNLTKAERGGLSELDKAGFIKRQLVETRQITKHVAQILDSRMNTKYDENDKLIREVKVITLKSKLVSDFRKDFQFYKVREINNYHHAHDAYLNAVVGTALIKKYPKLESEFVYGDYKVYDVRKMIAKSEQEIGKATAKYFFYSNIMNFFKTEITLANGEIRKRPLIETNGETGEIVWDKGRDFATVRKVLSMPQVNIVKKTEVQTGGFSKESILPKRNSDKLIARKKDWDPKKYGGFDSPTVAYSVLVVAKVEKGKSKKLKSVKELLGITIMERSSFEKNPIDFLEAKGYKEVKKDLIIKLPKYSLFELENGRKRMLASAGELQKGNELALPSKYVNFLYLASHYEKLKGSPEDNEQKQLFVEQHKHYLDEIIEQISEFSKRVILADANLDKVLSAYNKHRDKPIREQAENIIHLFTLTNLGAPAAFKYFDTTIDRKRYTSTKEVLDATLIHQSITGLYETRIDLSQLGGDGGGSSGGGPAPGGVLNLEEEYRLHEKPVPSSIDPSWLQLFPTVWAERAGMGLANQVPPVVVELRSGASPVAVRQYPMSKEAREGIRPHIQRFLDLGVLVPCQSPWNTPLLPVKKPGTNDYRPVQDLREINKRVQDIHPTVPNPYNLLSSLPPSHTWYSVLDLKDAFFCLKLHPNSQPLFAFEWRDPEKGNTGQLTWTRLPQGFKNSPTLFNEALHRDLAPFRALNPQVVLLQYVDDLLVAAPTYRDCKEGTQKLLQELSKLGYRVSAKKAQLCQKEVTYLGYLLKEGKRWLTPARKATVMKIPPPTTPRQVREFLGTAGFCRLWIPGFASLAAPLYPLTKPSIPFIWTEEHQKAFDRIKEALLSAPALALPDLTKPFTLYVDERAGVARGVLTQTLGPWRRPVAYLSKKLDPVASGWPTCLKAVAAVALLLKDADKLTLGQNVTVIASHSLESIVRQPPDRWMTNARMTHYQSLLLNERVSFAPPAVLNPATLLPVESEATPVHRCSEILAEETGTRRDLKDQPLPGVPAWYTDGSSFIAEGKRRAGAAIVDGKRTVWASSLPEGTSAQKAELVALTQALRLAEGKDINIYTDSRYAFATAHIHGAIYKQRGWLTSAGKDIKNKEEILALLEAIHLPKRVAIIHCPGHQKGNDPVATGNRRADEAAKQAALSTRVLAETTKPAGKRTADGSEFEKRTADGSEFESPKKKAKVE

SEQ ID NO: 869 - protein, 2089 aa, synthetic construct
MPAAKRVKLDGGDKKYSIGLDIGTNSVGWAVITDEYKVPSKKFKVLGNTDRHSIKKNLIGALLFDSGETAEATRLKRTARRRYTRRKNRICYLQEIFSNEMAKVDDSFFHRLEESFLVEEDKKHERHPIFGNIVDEVAYHEKYPTIYHLRKKLVDSTDKADLRLIYLALAHMIKFRGHFLIEGDLNPDNSDVDKLFIQLVQTYNQLFEENPINASGVDAKAILSARLSKSRRLENLIAQLPGEKKNGLFGNLIALSLGLTPNFKSNFDLAEDAKLQLSKDTYDDDLDNLLAQIGDQYADLFLAAKNLSDAILLSDILRVNTEITKAPLSASMIKRYDEHHQDLTLLKALVRQQLPEKYKEIFFDQSKNGYAGYIDGGASQEEFYKFIKPILEKMDGTEELLVKLNREDLLRKQRTFDNGSIPHQIHLGELHAILRRQEDFYPFLKDNREKIEKILTFRIPYYVGPLARGNSRFAWMTRKSEETITPWNFEEVVDKGASAQSFIERMTNFDKNLPNEKVLPKHSLLYEYFTVYNELTKVKYVTEGMRKPAFLSGEQKKAIVDLLFKTNRKVTVKQLKEDYFKKIECFDSVEISGVEDRFNASLGTYHDLLKIIKDKDFLDNEENEDILEDIVLTLTLFEDREMIEERLKTYAHLFDDKVMKQLKRRRYTGWGRLSRKLINGIRDKQSGKTILDFLKSDGFANRNFMQLIHDDSLTFKEDIQKAQVSGQGDSLHEHIANLAGSPAIKKGILQTVKVVDELVKVMGRHKPENIVIEMARENQTTQKGQKNSRERMKRIEEGIKELGSQILKEHPVENTQLQNEKLYLYYLQNGRDMYVDQELDINRLSDYDVDHIVPQSFLKDDSIDNKVLTRSDKARGKSDNVPSEEVVKKMKNYWRQLLNAKLITQRKFDNLTKAERGGLSELDKAGFIKRQLVETRQITKHVAQILDSRMNTKYDENDKLIREVKVITLKSKLVSDFRKDFQFYKVREINNYHHAHDAYLNAVVGTALIKKYPKLESEFVYGDYKVYDVRKMIAKSEQEIGKATAKYFFYSNIMNFFKTEITLANGEIRKRPLIETNGETGEIVWDKGRDFATVRKVLSMPQVNIVKKTEVQTGGFSKESILPKRNSDKLIARKKDWDPKKYGGFDSPTVAYSVLVVAKVEKGKSKKLKSVKELLGITIMERSSFEKNPIDFLEAKGYKEVKKDLIIKLPKYSLFELENGRKRMLASAGELQKGNELALPSKYVNFLYLASHYEKLKGSPEDNEQKQLFVEQHKHYLDEIIEQISEFSKRVILADANLDKVLSAYNKHRDKPIREQAENIIHLFTLTNLGAPAAFKYFDTTIDRKRYTSTKEVLDATLIHQSITGLYETRIDLSQLGGDGGGGSGGSGGVLNLEEEYRLHEKPVPSSIDPSWLQLFPTVWAERAGMGLANQVPPVVVELRSGASPVAVRQYPMSKEAREGIRPHIQRFLDLGVLVPCQSPWNTPLLPVKKPGTNDYRPVQDLREINKRVQDIHPTVPNPYNLLSSLPPSHTWYSVLDLKDAFFCLKLHPNSQPLFAFEWRDPEKGNTGQLTWTRLPQGFKNSPTLFNEALHRDLAPFRALNPQVVLLQYVDDLLVAAPTYRDCKEGTQKLLQELSKLGYRVSAKKAQLCQKEVTYLGYLLKEGKRWLTPARKATVMKIPPPTTPRQVREFLGTAGFCRLWIPGFASLAAPLYPLTKPSIPFIWTEEHQKAFDRIKEALLSAPALALPDLTKPFTLYVDERAGVARGVLTQTLGPWRRPVAYLSKKLDPVASGWPTCLKAVAAVALLLKDADKLTLGQNVTVIASHSLESIVRQPPDRWMTNARMTHYQSLLLNERVSFAPPAVLNPATLLPVESEATPVHRCSEILAEETGTRRDLKDQPLPGVPAWYTDGSSFIAEGKRRAGAAIVDGKRTVWASSLPEGTSAQKAELVALTQALRLAEGKDINIYTDSRYAFATAHIHGAIYKQRGWLTSAGKDIKNKEEILALLEAIHLPKRVAIIHCPGHQKGNDPVATGNRRADEAAKQAALSTRVLAETTKPAGKRTADGSEFEKRTADGSEFESPKKKAKVE

SEQ ID NO: 870 - protein, 2094 aa, synthetic construct
MPAAKRVKLDGGDKKYSIGLDIGTNSVGWAVITDEYKVPSKKFKVLGNTDRHSIKKNLIGALLFDSGETAEATRLKRTARRRYTRRKNRICYLQEIFSNEMAKVDDSFFHRLEESFLVEEDKKHERHPIFGNIVDEVAYHEKYPTIYHLRKKLVDSTDKADLRLIYLALAHMIKFRGHFLIEGDLNPDNSDVDKLFIQLVQTYNQLFEENPINASGVDAKAILSARLSKSRRLENLIAQLPGEKKNGLFGNLIALSLGLTPNFKSNFDLAEDAKLQLSKDTYDDDLDNLLAQIGDQYADLFLAAKNLSDAILLSDILRVNTEITKAPLSASMIKRYDEHHQDLTLLKALVRQQLPEKYKEIFFDQSKNGYAGYIDGGASQEEFYKFIKPILEKMDGTEELLVKLNREDLLRKQRTFDNGSIPHQIHLGELHAILRRQEDFYPFLKDNREKIEKILTFRIPYYVGPLARGNSRFAWMTRKSEETITPWNFEEVVDKGASAQSFIERMTNFDKNLPNEKVLPKHSLLYEYFTVYNELTKVKYVTEGMRKPAFLSGEQKKAIVDLLFKTNRKVTVKQLKEDYFKKIECFDSVEISGVEDRFNASLGTYHDLLKIIKDKDFLDNEENEDILEDIVLTLTLFEDREMIEERLKTYAHLFDDKVMKQLKRRRYTGWGRLSRKLINGIRDKQSGKTILDFLKSDGFANRNFMQLIHDDSLTFKEDIQKAQVSGQGDSLHEHIANLAGSPAIKKGILQTVKVVDELVKVMGRHKPENIVIEMARENQTTQKGQKNSRERMKRIEEGIKELGSQILKEHPVENTQLQNEKLYLYYLQNGRDMYVDQELDINRLSDYDVDHIVPQSFLKDDSIDNKVLTRSDKARGKSDNVPSEEVVKKMKNYWRQLLNAKLITQRKFDNLTKAERGGLSELDKAGFIKRQLVETRQITKHVAQILDSRMNTKYDENDKLIREVKVITLKSKLVSDFRKDFQFYKVREINNYHHAHDAYLNAVVGTALIKKYPKLESEFVYGDYKVYDVRKMIAKSEQEIGKATAKYFFYSNIMNFFKTEITLANGEIRKRPLIETNGETGEIVWDKGRDFATVRKVLSMPQVNIVKKTEVQTGGFSKESILPKRNSDKLIARKKDWDPKKYGGFDSPTVAYSVLVVAKVEKGKSKKLKSVKELLGITIMERSSFEKNPIDFLEAKGYKEVKKDLIIKLPKYSLFELENGRKRMLASAGELQKGNELALPSKYVNFLYLASHYEKLKGSPEDNEQKQLFVEQHKHYLDEIIEQISEFSKRVILADANLDKVLSAYNKHRDKPIREQAENIIHLFTLTNLGAPAAFKYFDTTIDRKRYTSTKEVLDATLIHQSITGLYETRIDLSQLGGDGGGGGPAPEAAAKGGVLNLEEEYRLHEKPVPSSIDPSWLQLFPTVWAERAGMGLANQVPPVVVELRSGASPVAVRQYPMSKEAREGIRPHIQRFLDLGVLVPCQSPWNTPLLPVKKPGTNDYRPVQDLREINKRVQDIHPTVPNPYNLLSSLPPSHTWYSVLDLKDAFFCLKLHPNSQPLFAFEWRDPEKGNTGQLTWTRLPQGFKNSPTLFNEALHRDLAPFRALNPQVVLLQYVDDLLVAAPTYRDCKEGTQKLLQELSKLGYRVSAKKAQLCQKEVTYLGYLLKEGKRWLTPARKATVMKIPPPTTPRQVREFLGTAGFCRLWIPGFASLAAPLYPLTKPSIPFIWTEEHQKAFDRIKEALLSAPALALPDLTKPFTLYVDERAGVARGVLTQTLGPWRRPVAYLSKKLDPVASGWPTCLKAVAAVALLLKDADKLTLGQNVTVIASHSLESIVRQPPDRWMTNARMTHYQSLLLNERVSFAPPAVLNPATLLPVESEATPVHRCSEILAEETGTRRDLKDQPLPGVPAWYTDGSSFIAEGKRRAGAAIVDGKRTVWASSLPEGTSAQKAELVALTQALRLAEGKDINIYTDSRYAFATAHIHGAIYKQRGWLTSAGKDIKNKEEILALLEAIHLPKRVAIIHCPGHQKGNDPVATGNRRADEAAKQAALSTRVLAETTKPAGKRTADGSEFEKRTADGSEFESPKKKAKVE

SEQ ID NO: 871 - protein, 2129 aa, synthetic construct
MPAAKRVKLDGGDKKYSIGLDIGTNSVGWAVITDEYKVPSKKFKVLGNTDRHSIKKNLIGALLFDSGETAEATRLKRTARRRYTRRKNRICYLQEIFSNEMAKVDDSFFHRLEESFLVEEDKKHERHPIFGNIVDEVAYHEKYPTIYHLRKKLVDSTDKADLRLIYLALAHMIKFRGHFLIEGDLNPDNSDVDKLFIQLVQTYNQLFEENPINASGVDAKAILSARLSKSRRLENLIAQLPGEKKNGLFGNLIALSLGLTPNFKSNFDLAEDAKLQLSKDTYDDDLDNLLAQIGDQYADLFLAAKNLSDAILLSDILRVNTEITKAPLSASMIKRYDEHHQDLTLLKALVRQQLPEKYKEIFFDQSKNGYAGYIDGGASQEEFYKFIKPILEKMDGTEELLVKLNREDLLRKQRTFDNGSIPHQIHLGELHAILRRQEDFYPFLKDNREKIEKILTFRIPYYVGPLARGNSRFAWMTRKSEETITPWNFEEVVDKGASAQSFIERMTNFDKNLPNEKVLPKHSLLYEYFTVYNELTKVKYVTEGMRKPAFLSGEQKKAIVDLLFKTNRKVTVKQLKEDYFKKIECFDSVEISGVEDRFNASLGTYHDLLKIIKDKDFLDNEENEDILEDIVLTLTLFEDREMIEERLKTYAHLFDDKVMKQLKRRRYTGWGRLSRKLINGIRDKQSGKTILDFLKSDGFANRNFMQLIHDDSLTFKEDIQKAQVSGQGDSLHEHIANLAGSPAIKKGILQTVKVVDELVKVMGRHKPENIVIEMARENQTTQKGQKNSRERMKRIEEGIKELGSQILKEHPVENTQLQNEKLYLYYLQNGRDMYVDQELDINRLSDYDVDHIVPQSFLKDDSIDNKVLTRSDKARGKSDNVPSEEVVKKMKNYWRQLLNAKLITQRKFDNLTKAERGGLSELDKAGFIKRQLVETRQITKHVAQILDSRMNTKYDENDKLIREVKVITLKSKLVSDFRKDFQFYKVREINNYHHAHDAYLNAVVGTALIKKYPKLESEFVYGDYKVYDVRKMIAKSEQEIGKATAKYFFYSNIMNFFKTEITLANGEIRKRPLIETNGETGEIVWDKGRDFATVRKVLSMPQVNIVKKTEVQTGGFSKESILPKRNSDKLIARKKDWDPKKYGGFDSPTVAYSVLVVAKVEKGKSKKLKSVKELLGITIMERSSFEKNPIDFLEAKGYKEVKKDLIIKLPKYSLFELENGRKRMLASAGELQKGNELALPSKYVNFLYLASHYEKLKGSPEDNEQKQLFVEQHKHYLDEIIEQISEFSKRVILADANLDKVLSAYNKHRDKPIREQAENIIHLFTLTNLGAPAAFKYFDTTIDRKRYTSTKEVLDATLIHQSITGLYETRIDLSQLGGDGGAEAAAKEAAAKEAAAKEAAAKALEAEAAAKEAAAKEAAAKEAAAKAGGVLNLEEEYRLHEKPVPSSIDPSWLQLFPTVWAERAGMGLANQVPPVVVELRSGASPVAVRQYPMSKEAREGIRPHIQRFLDLGVLVPCQSPWNTPLLPVKKPGTNDYRPVQDLREINKRVQDIHPTVPNPYNLLSSLPPSHTWYSVLDLKDAFFCLKLHPNSQPLFAFEWRDPEKGNTGQLTWTRLPQGFKNSPTLFNEALHRDLAPFRALNPQVVLLQYVDDLLVAAPTYRDCKEGTQKLLQELSKLGYRVSAKKAQLCQKEVTYLGYLLKEGKRWLTPARKATVMKIPPPTTPRQVREFLGKAGFCRLFIPGFASLAAPLYPLTKPSIPFIWTEEHQKAFDRIKEALLSAPALALPDLTKPFTLYVDERAGVARGVLTQTLGPWRRPVAYLSKKLDPVASGWPTCLKAVAAVALLLKDADKLTLGQNVTVIASHSLESIVRQPPDRWMTNARMTHYQSLLLNERVSFAPPAVLNPATLLPVESEATPVHRCSEILAEETGTRRDLKDQPLPGVPAWYTDGSSFIAEGKRRAGAAIVDGKRTVWASSLPEGTSAQKAELVALTQALRLAEGKDINIYTDSRYAFATAHIHGAIYKQRGWLTSAGKDIKNKEEILALLEAIHLPKRVAIIHCPGHQKGNDPVATGNRRADEAAKQAALSTRVLAETTKPAGKRTADGSEFEKRTADGSEFESPKKKAKVE

SEQ ID NO: 872 - protein, 2092 aa, synthetic construct
MPAAKRVKLDGGDKKYSIGLDIGTNSVGWAVITDEYKVPSKKFKVLGNTDRHSIKKNLIGALLFDSGETAEATRLKRTARRRYTRRKNRICYLQEIFSNEMAKVDDSFFHRLEESFLVEEDKKHERHPIFGNIVDEVAYHEKYPTIYHLRKKLVDSTDKADLRLIYLALAHMIKFRGHFLIEGDLNPDNSDVDKLFIQLVQTYNQLFEENPINASGVDAKAILSARLSKSRRLENLIAQLPGEKKNGLFGNLIALSLGLTPNFKSNFDLAEDAKLQLSKDTYDDDLDNLLAQIGDQYADLFLAAKNLSDAILLSDILRVNTEITKAPLSASMIKRYDEHHQDLTLLKALVRQQLPEKYKEIFFDQSKNGYAGYIDGGASQEEFYKFIKPILEKMDGTEELLVKLNREDLLRKQRTFDNGSIPHQIHLGELHAILRRQEDFYPFLKDNREKIEKILTFRIPYYVGPLARGNSRFAWMTRKSEETITPWNFEEVVDKGASAQSFIERMTNFDKNLPNEKVLPKHSLLYEYFTVYNELTKVKYVTEGMRKPAFLSGEQKKAIVDLLFKTNRKVTVKQLKEDYFKKIECFDSVEISGVEDRFNASLGTYHDLLKIIKDKDFLDNEENEDILEDIVLTLTLFEDREMIEERLKTYAHLFDDKVMKQLKRRRYTGWGRLSRKLINGIRDKQSGKTILDFLKSDGFANRNFMQLIHDDSLTFKEDIQKAQVSGQGDSLHEHIANLAGSPAIKKGILQTVKVVDELVKVMGRHKPENIVIEMARENQTTQKGQKNSRERMKRIEEGIKELGSQILKEHPVENTQLQNEKLYLYYLQNGRDMYVDQELDINRLSDYDVDHIVPQSFLKDDSIDNKVLTRSDKARGKSDNVPSEEVVKKMKNYWRQLLNAKLITQRKFDNLTKAERGGLSELDKAGFIKRQLVETRQITKHVAQILDSRMNTKYDENDKLIREVKVITLKSKLVSDFRKDFQFYKVREINNYHHAHDAYLNAVVGTALIKKYPKLESEFVYGDYKVYDVRKMIAKSEQEIGKATAKYFFYSNIMNFFKTEITLANGEIRKRPLIETNGETGEIVWDKGRDFATVRKVLSMPQVNIVKKTEVQTGGFSKESILPKRNSDKLIARKKDWDPKKYGGFDSPTVAYSVLVVAKVEKGKSKKLKSVKELLGITIMERSSFEKNPIDFLEAKGYKEVKKDLIIKLPKYSLFELENGRKRMLASAGELQKGNELALPSKYVNFLYLASHYEKLKGSPEDNEQKQLFVEQHKHYLDEIIEQISEFSKRVILADANLDKVLSAYNKHRDKPIREQAENIIHLFTLTNLGAPAAFKYFDTTIDRKRYTSTKEVLDATLIHQSITGLYETRIDLSQLGGDGGPAPGGGGSSGGVLNLEEEYRLHEKPVPSSIDPSWLQLFPTVWAERAGMGLANQVPPVVVELRSGASPVAVRQYPMSKEAREGIRPHIQRFLDLGVLVPCQSPWNTPLLPVKKPGTNDYRPVQDLREINKRVQDIHPTVPNPYNLLSSLPPSHTWYSVLDLKDAFFCLKLHPNSQPLFAFEWRDPEKGNTGQLTWTRLPQGFKNSPTLFNEALHRDLAPFRALNPQVVLLQYVDDLLVAAPTYRDCKEGTQKLLQELSKLGYRVSAKKAQLCQKEVTYLGYLLKEGKRWLTPARKATVMKIPPPTTPRQVREFLGKAGFCRLFIPGFASLAAPLYPLTKPSIPFIWTEEHQKAFDRIKEALLSAPALALPDLTKPFTLYVDERAGVARGVLTQTLGPWRRPVAYLSKKLDPVASGWPTCLKAVAAVALLLKDADKLTLGQNVTVIASHSLESIVRQPPDRWMTNARMTHYQSLLLNERVSFAPPAVLNPATLLPVESEATPVHRCSEILAEETGTRRDLKDQPLPGVPAWYTDGSSFIAEGKRRAGAAIVDGKRTVWASSLPEGTSAQKAELVALTQALRLAEGKDINIYTDSRYAFATAHIHGAIYKQRGWLTSAGKDIKNKEEILALLEAIHLPKRVAIIHCPGHQKGNDPVATGNRRADEAAKQAALSTRVLAETTKPAGKRTADGSEFEKRTADGSEFESPKKKAKVE

SEQ ID NO: 873 - protein, 2108 aa, synthetic construct
MPAAKRVKLDGGDKKYSIGLDIGTNSVGWAVITDEYKVPSKKFKVLGNTDRHSIKKNLIGALLFDSGETAEATRLKRTARRRYTRRKNRICYLQEIFSNEMAKVDDSFFHRLEESFLVEEDKKHERHPIFGNIVDEVAYHEKYPTIYHLRKKLVDSTDKADLRLIYLALAHMIKFRGHFLIEGDLNPDNSDVDKLFIQLVQTYNQLFEENPINASGVDAKAILSARLSKSRRLENLIAQLPGEKKNGLFGNLIALSLGLTPNFKSNFDLAEDAKLQLSKDTYDDDLDNLLAQIGDQYADLFLAAKNLSDAILLSDILRVNTEITKAPLSASMIKRYDEHHQDLTLLKALVRQQLPEKYKEIFFDQSKNGYAGYIDGGASQEEFYKFIKPILEKMDGTEELLVKLNREDLLRKQRTFDNGSIPHQIHLGELHAILRRQEDFYPFLKDNREKIEKILTFRIPYYVGPLARGNSRFAWMTRKSEETITPWNFEEVVDKGASAQSFIERMTNFDKNLPNEKVLPKHSLLYEYFTVYNELTKVKYVTEGMRKPAFLSGEQKKAIVDLLFKTNRKVTVKQLKEDYFKKIECFDSVEISGVEDRFNASLGTYHDLLKIIKDKDFLDNEENEDILEDIVLTLTLFEDREMIEERLKTYAHLFDDKVMKQLKRRRYTGWGRLSRKLINGIRDKQSGKTILDFLKSDGFANRNFMQLIHDDSLTFKEDIQKAQVSGQGDSLHEHIANLAGSPAIKKGILQTVKVVDELVKVMGRHKPENIVIEMARENQTTQKGQKNSRERMKRIEEGIKELGSQILKEHPVENTQLQNEKLYLYYLQNGRDMYVDQELDINRLSDYDVDHIVPQSFLKDDSIDNKVLTRSDKARGKSDNVPSEEVVKKMKNYWRQLLNAKLITQRKFDNLTKAERGGLSELDKAGFIKRQLVETRQITKHVAQILDSRMNTKYDENDKLIREVKVITLKSKLVSDFRKDFQFYKVREINNYHHAHDAYLNAVVGTALIKKYPKLESEFVYGDYKVYDVRKMIAKSEQEIGKATAKYFFYSNIMNFFKTEITLANGEIRKRPLIETNGETGEIVWDKGRDFATVRKVLSMPQVNIVKKTEVQTGGFSKESILPKRNSDKLIARKKDWDPKKYGGFDSPTVAYSVLVVAKVEKGKSKKLKSVKELLGITIMERSSFEKNPIDFLEAKGYKEVKKDLIIKLPKYSLFELENGRKRMLASAGELQKGNELALPSKYVNFLYLASHYEKLKGSPEDNEQKQLFVEQHKHYLDEIIEQISEFSKRVILADANLDKVLSAYNKHRDKPIREQAENIIHLFTLTNLGAPAAFKYFDTTIDRKRYTSTKEVLDATLIHQSITGLYETRIDLSQLGGDGGGGGGSGGGGSGGGGSGGGGSGGGGSGGVLNLEEEYRLHEKPVPSSIDPSWLQLFPTVWAERAGMGLANQVPPVVVELRSGASPVAVRQYPMSKEAREGIRPHIQRFLDLGVLVPCQSPWNTPLLPVKKPGTNDYRPVQDLREINKRVQDIHPTVPNPYNLLSSLPPSHTWYSVLDLKDAFFCLKLHPNSQPLFAFEWRDPEKGNTGQLTWTRLPQGFKNSPTLFNEALHRDLAPFRALNPQVVLLQYVDDLLVAAPTYRDCKEGTQKLLQELSKLGYRVSAKKAQLCQKEVTYLGYLLKEGKRWLTPARKATVMKIPPPTTPRQVREFLGKAGFCRLFIPGFASLAAPLYPLTKPSIPFIWTEEHQKAFDRIKEALLSAPALALPDLTKPFTLYVDERAGVARGVLTQTLGPWRRPVAYLSKKLDPVASGWPTCLKAVAAVALLLKDADKLTLGQNVTVIASHSLESIVRQPPDRWMTNARMTHYQSLLLNERVSFAPPAVLNPATLLPVESEATPVHRCSEILAEETGTRRDLKDQPLPGVPAWYTDGSSFIAEGKRRAGAAIVDGKRTVWASSLPEGTSAQKAELVALTQALRLAEGKDINIYTDSRYAFATAHIHGAIYKQRGWLTSAGKDIKNKEEILALLEAIHLPKRVAIIHCPGHQKGNDPVATGNRRADEAAKQAALSTRVLAETTKPAGKRTADGSEFEKRTADGSEFESPKKKAKVE

SEQ ID NO: 874 - protein, 2094 aa, synthetic construct
MPAAKRVKLDGGDKKYSIGLDIGTNSVGWAVITDEYKVPSKKFKVLGNTDRHSIKKNLIGALLFDSGETAEATRLKRTARRRYTRRKNRICYLQEIFSNEMAKVDDSFFHRLEESFLVEEDKKHERHPIFGNIVDEVAYHEKYPTIYHLRKKLVDSTDKADLRLIYLALAHMIKFRGHFLIEGDLNPDNSDVDKLFIQLVQTYNQLFEENPINASGVDAKAILSARLSKSRRLENLIAQLPGEKKNGLFGNLIALSLGLTPNFKSNFDLAEDAKLQLSKDTYDDDLDNLLAQIGDQYADLFLAAKNLSDAILLSDILRVNTEITKAPLSASMIKRYDEHHQDLTLLKALVRQQLPEKYKEIFFDQSKNGYAGYIDGGASQEEFYKFIKPILEKMDGTEELLVKLNREDLLRKQRTFDNGSIPHQIHLGELHAILRRQEDFYPFLKDNREKIEKILTFRIPYYVGPLARGNSRFAWMTRKSEETITPWNFEEVVDKGASAQSFIERMTNFDKNLPNEKVLPKHSLLYEYFTVYNELTKVKYVTEGMRKPAFLSGEQKKAIVDLLFKTNRKVTVKQLKEDYFKKIECFDSVEISGVEDRFNASLGTYHDLLKIIKDKDFLDNEENEDILEDIVLTLTLFEDREMIEERLKTYAHLFDDKVMKQLKRRRYTGWGRLSRKLINGIRDKQSGKTILDFLKSDGFANRNFMQLIHDDSLTFKEDIQKAQVSGQGDSLHEHIANLAGSPAIKKGILQTVKVVDELVKVMGRHKPENIVIEMARENQTTQKGQKNSRERMKRIEEGIKELGSQILKEHPVENTQLQNEKLYLYYLQNGRDMYVDQELDINRLSDYDVDHIVPQSFLKDDSIDNKVLTRSDKARGKSDNVPSEEVVKKMKNYWRQLLNAKLITQRKFDNLTKAERGGLSELDKAGFIKRQLVETRQITKHVAQILDSRMNTKYDENDKLIREVKVITLKSKLVSDFRKDFQFYKVREINNYHHAHDAYLNAVVGTALIKKYPKLESEFVYGDYKVYDVRKMIAKSEQEIGKATAKYFFYSNIMNFFKTEITLANGEIRKRPLIETNGETGEIVWDKGRDFATVRKVLSMPQVNIVKKTEVQTGGFSKESILPKRNSDKLIARKKDWDPKKYGGFDSPTVAYSVLVVAKVEKGKSKKLKSVKELLGITIMERSSFEKNPIDFLEAKGYKEVKKDLIIKLPKYSLFELENGRKRMLASAGELQKGNELALPSKYVNFLYLASHYEKLKGSPEDNEQKQLFVEQHKHYLDEIIEQISEFSKRVILADANLDKVLSAYNKHRDKPIREQAENIIHLFTLTNLGAPAAFKYFDTTIDRKRYTSTKEVLDATLIHQSITGLYETRIDLSQLGGDGGEAAAKPAPGSSGGVLNLEEEYRLHEKPVPSSIDPSWLQLFPTVWAERAGMGLANQVPPVVVELRSGASPVAVRQYPMSKEAREGIRPHIQRFLDLGVLVPCQSPWNTPLLPVKKPGTNDYRPVQDLREINKRVQDIHPTVPNPYNLLSSLPPSHTWYSVLDLKDAFFCLKLHPNSQPLFAFEWRDPEKGNTGQLTWTRLPQGFKNSPTLFNEALHRDLAPFRALNPQVVLLQYVDDLLVAAPTYRDCKEGTQKLLQELSKLGYRVSAKKAQLCQKEVTYLGYLLKEGKRWLTPARKATVMKIPPPTTPRQVREFLGKAGFCRLFIPGFASLAAPLYPLTKPSIPFIWTEEHQKAFDRIKEALLSAPALALPDLTKPFTLYVDERAGVARGVLTQTLGPWRRPVAYLSKKLDPVASGWPTCLKAVAAVALLLKDADKLTLGQNVTVIASHSLESIVRQPPDRWMTNARMTHYQSLLLNERVSFAPPAVLNPATLLPVESEATPVHRCSEILAEETGTRRDLKDQPLPGVPAWYTDGSSFIAEGKRRAGAAIVDGKRTVWASSLPEGTSAQKAELVALTQALRLAEGKDINIYTDSRYAFATAHIHGAIYKQRGWLTSAGKDIKNKEEILALLEAIHLPKRVAIIHCPGHQKGNDPVATGNRRADEAAKQAALSTRVLAETTKPAGKRTADGSEFEKRTADGSEFESPKKKAKVE

SEQ ID NO: 875 - protein, 2092 aa, synthetic construct
MPAAKRVKLDGGDKKYSIGLDIGTNSVGWAVITDEYKVPSKKFKVLGNTDRHSIKKNLIGALLFDSGETAEATRLKRTARRRYTRRKNRICYLQEIFSNEMAKVDDSFFHRLEESFLVEEDKKHERHPIFGNIVDEVAYHEKYPTIYHLRKKLVDSTDKADLRLIYLALAHMIKFRGHFLIEGDLNPDNSDVDKLFIQLVQTYNQLFEENPINASGVDAKAILSARLSKSRRLENLIAQLPGEKKNGLFGNLIALSLGLTPNFKSNFDLAEDAKLQLSKDTYDDDLDNLLAQIGDQYADLFLAAKNLSDAILLSDILRVNTEITKAPLSASMIKRYDEHHQDLTLLKALVRQQLPEKYKEIFFDQSKNGYAGYIDGGASQEEFYKFIKPILEKMDGTEELLVKLNREDLLRKQRTFDNGSIPHQIHLGELHAILRRQEDFYPFLKDNREKIEKILTFRIPYYVGPLARGNSRFAWMTRKSEETITPWNFEEVVDKGASAQSFIERMTNFDKNLPNEKVLPKHSLLYEYFTVYNELTKVKYVTEGMRKPAFLSGEQKKAIVDLLFKTNRKVTVKQLKEDYFKKIECFDSVEISGVEDRFNASLGTYHDLLKIIKDKDFLDNEENEDILEDIVLTLTLFEDREMIEERLKTYAHLFDDKVMKQLKRRRYTGWGRLSRKLINGIRDKQSGKTILDFLKSDGFANRNFMQLIHDDSLTFKEDIQKAQVSGQGDSLHEHIANLAGSPAIKKGILQTVKVVDELVKVMGRHKPENIVIEMARENQTTQKGQKNSRERMKRIEEGIKELGSQILKEHPVENTQLQNEKLYLYYLQNGRDMYVDQELDINRLSDYDVDHIVPQSFLKDDSIDNKVLTRSDKARGKSDNVPSEEVVKKMKNYWRQLLNAKLITQRKFDNLTKAERGGLSELDKAGFIKRQLVETRQITKHVAQILDSRMNTKYDENDKLIREVKVITLKSKLVSDFRKDFQFYKVREINNYHHAHDAYLNAVVGTALIKKYPKLESEFVYGDYKVYDVRKMIAKSEQEIGKATAKYFFYSNIMNFFKTEITLANGEIRKRPLIETNGETGEIVWDKGRDFATVRKVLSMPQVNIVKKTEVQTGGFSKESILPKRNSDKLIARKKDWDPKKYGGFDSPTVAYSVLVVAKVEKGKSKKLKSVKELLGITIMERSSFEKNPIDFLEAKGYKEVKKDLIIKLPKYSLFELENGRKRMLASAGELQKGNELALPSKYVNFLYLASHYEKLKGSPEDNEQKQLFVEQHKHYLDEIIEQISEFSKRVILADANLDKVLSAYNKHRDKPIREQAENIIHLFTLTNLGAPAAFKYFDTTIDRKRYTSTKEVLDATLIHQSITGLYETRIDLSQLGGDGGGGSPAPGSSGGVLNLEEEYRLHEKPVPSSIDPSWLQLFPTVWAERAGMGLANQVPPVVVELRSGASPVAVRQYPMSKEAREGIRPHIQRFLDLGVLVPCQSPWNTPLLPVKKPGTNDYRPVQDLREINKRVQDIHPTVPNPYNLLSSLPPSHTWYSVLDLKDAFFCLKLHPNSQPLFAFEWRDPEKGNTGQLTWTRLPQGFKNSPTLFNEALHRDLAPFRALNPQVVLLQYVDDLLVAAPTYRDCKEGTQKLLQELSKLGYRVSAKKAQLCQKEVTYLGYLLKEGKRWLTPARKATVMKIPPPTTPRQVREFLGKAGFCRLFIPGFASLAAPLYPLTKPSIPFIWTEEHQKAFDRIKEALLSAPALALPDLTKPFTLYVDERAGVARGVLTQTLGPWRRPVAYLSKKLDPVASGWPTCLKAVAAVALLLKDADKLTLGQNVTVIASHSLESIVRQPPDRWMTNARMTHYQSLLLNERVSFAPPAVLNPATLLPVESEATPVHRCSEILAEETGTRRDLKDQPLPGVPAWYTDGSSFIAEGKRRAGAAIVDGKRTVWASSLPEGTSAQKAELVALTQALRLAEGKDINIYTDSRYAFATAHIHGAIYKQRGWLTSAGKDIKNKEEILALLEAIHLPKRVAIIHCPGHQKGNDPVATGNRRADEAAKQAALSTRVLAETTKPAGKRTADGSEFEKRTADGSEFESPKKKAKVE

SEQ ID NO: 876 - protein, 2086 aa, synthetic construct
MPAAKRVKLDGGDKKYSIGLDIGTNSVGWAVITDEYKVPSKKFKVLGNTDRHSIKKNLIGALLFDSGETAEATRLKRTARRRYTRRKNRICYLQEIFSNEMAKVDDSFFHRLEESFLVEEDKKHERHPIFGNIVDEVAYHEKYPTIYHLRKKLVDSTDKADLRLIYLALAHMIKFRGHFLIEGDLNPDNSDVDKLFIQLVQTYNQLFEENPINASGVDAKAILSARLSKSRRLENLIAQLPGEKKNGLFGNLIALSLGLTPNFKSNFDLAEDAKLQLSKDTYDDDLDNLLAQIGDQYADLFLAAKNLSDAILLSDILRVNTEITKAPLSASMIKRYDEHHQDLTLLKALVRQQLPEKYKEIFFDQSKNGYAGYIDGGASQEEFYKFIKPILEKMDGTEELLVKLNREDLLRKQRTFDNGSIPHQIHLGELHAILRRQEDFYPFLKDNREKIEKILTFRIPYYVGPLARGNSRFAWMTRKSEETITPWNFEEVVDKGASAQSFIERMTNFDKNLPNEKVLPKHSLLYEYFTVYNELTKVKYVTEGMRKPAFLSGEQKKAIVDLLFKTNRKVTVKQLKEDYFKKIECFDSVEISGVEDRFNASLGTYHDLLKIIKDKDFLDNEENEDILEDIVLTLTLFEDREMIEERLKTYAHLFDDKVMKQLKRRRYTGWGRLSRKLINGIRDKQSGKTILDFLKSDGFANRNFMQLIHDDSLTFKEDIQKAQVSGQGDSLHEHIANLAGSPAIKKGILQTVKVVDELVKVMGRHKPENIVIEMARENQTTQKGQKNSRERMKRIEEGIKELGSQILKEHPVENTQLQNEKLYLYYLQNGRDMYVDQELDINRLSDYDVDHIVPQSFLKDDSIDNKVLTRSDKARGKSDNVPSEEVVKKMKNYWRQLLNAKLITQRKFDNLTKAERGGLSELDKAGFIKRQLVETRQITKHVAQILDSRMNTKYDENDKLIREVKVITLKSKLVSDFRKDFQFYKVREINNYHHAHDAYLNAVVGTALIKKYPKLESEFVYGDYKVYDVRKMIAKSEQEIGKATAKYFFYSNIMNFFKTEITLANGEIRKRPLIETNGETGEIVWDKGRDFATVRKVLSMPQVNIVKKTEVQTGGFSKESILPKRNSDKLIARKKDWDPKKYGGFDSPTVAYSVLVVAKVEKGKSKKLKSVKELLGITIMERSSFEKNPIDFLEAKGYKEVKKDLIIKLPKYSLFELENGRKRMLASAGELQKGNELALPSKYVNFLYLASHYEKLKGSPEDNEQKQLFVEQHKHYLDEIIEQISEFSKRVILADANLDKVLSAYNKHRDKPIREQAENIIHLFTLTNLGAPAAFKYFDTTIDRKRYTSTKEVLDATLIHQSITGLYETRIDLSQLGGDGGGSSGGVLNLEEEYRLHEKPVPSSIDPSWLQLFPTVWAERAGMGLANQVPPVVVELRSGASPVAVRQYPMSKEAREGIRPHIQRFLDLGVLVPCQSPWNTPLLPVKKPGTNDYRPVQDLREINKRVQDIHPTVPNPYNLLSSLPPSHTWYSVLDLKDAFFCLKLHPNSQPLFAFEWRDPEKGNTGQLTWTRLPQGFKNSPTLFNEALHRDLAPFRALNPQVVLLQYVDDLLVAAPTYRDCKEGTQKLLQELSKLGYRVSAKKAQLCQKEVTYLGYLLKEGKRWLTPARKATVMKIPPPTTPRQVREFLGKAGFCRLFIPGFASLAAPLYPLTKPSIPFIWTEEHQKAFDRIKEALLSAPALALPDLTKPFTLYVDERAGVARGVLTQTLGPWRRPVAYLSKKLDPVASGWPTCLKAVAAVALLLKDADKLTLGQNVTVIASHSLESIVRQPPDRWMTNARMTHYQSLLLNERVSFAPPAVLNPATLLPVESEATPVHRCSEILAEETGTRRDLKDQPLPGVPAWYTDGSSFIAEGKRRAGAAIVDGKRTVWASSLPEGTSAQKAELVALTQALRLAEGKDINIYTDSRYAFATAHIHGAIYKQRGWLTSAGKDIKNKEEILALLEAIHLPKRVAIIHCPGHQKGNDPVATGNRRADEAAKQAALSTRVLAETTKPAGKRTADGSEFEKRTADGSEFESPKKKAKVE

SEQ ID NO: 877 - protein, 2099 aa, synthetic construct
MPAAKRVKLDGGDKKYSIGLDIGTNSVGWAVITDEYKVPSKKFKVLGNTDRHSIKKNLIGALLFDSGETAEATRLKRTARRRYTRRKNRICYLQEIFSNEMAKVDDSFFHRLEESFLVEEDKKHERHPIFGNIVDEVAYHEKYPTIYHLRKKLVDSTDKADLRLIYLALAHMIKFRGHFLIEGDLNPDNSDVDKLFIQLVQTYNQLFEENPINASGVDAKAILSARLSKSRRLENLIAQLPGEKKNGLFGNLIALSLGLTPNFKSNFDLAEDAKLQLSKDTYDDDLDNLLAQIGDQYADLFLAAKNLSDAILLSDILRVNTEITKAPLSASMIKRYDEHHQDLTLLKALVRQQLPEKYKEIFFDQSKNGYAGYIDGGASQEEFYKFIKPILEKMDGTEELLVKLNREDLLRKQRTFDNGSIPHQIHLGELHAILRRQEDFYPFLKDNREKIEKILTFRIPYYVGPLARGNSRFAWMTRKSEETITPWNFEEVVDKGASAQSFIERMTNFDKNLPNEKVLPKHSLLYEYFTVYNELTKVKYVTEGMRKPAFLSGEQKKAIVDLLFKTNRKVTVKQLKEDYFKKIECFDSVEISGVEDRFNASLGTYHDLLKIIKDKDFLDNEENEDILEDIVLTLTLFEDREMIEERLKTYAHLFDDKVMKQLKRRRYTGWGRLSRKLINGIRDKQSGKTILDFLKSDGFANRNFMQLIHDDSLTFKEDIQKAQVSGQGDSLHEHIANLAGSPAIKKGILQTVKVVDELVKVMGRHKPENIVIEMARENQTTQKGQKNSRERMKRIEEGIKELGSQILKEHPVENTQLQNEKLYLYYLQNGRDMYVDQELDINRLSDYDVDHIVPQSFLKDDSIDNKVLTRSDKARGKSDNVPSEEVVKKMKNYWRQLLNAKLITQRKFDNLTKAERGGLSELDKAGFIKRQLVETRQITKHVAQILDSRMNTKYDENDKLIREVKVITLKSKLVSDFRKDFQFYKVREINNYHHAHDAYLNAVVGTALIKKYPKLESEFVYGDYKVYDVRKMIAKSEQEIGKATAKYFFYSNIMNFFKTEITLANGEIRKRPLIETNGETGEIVWDKGRDFATVRKVLSMPQVNIVKKTEVQTGGFSKESILPKRNSDKLIARKKDWDPKKYGGFDSPTVAYSVLVVAKVEKGKSKKLKSVKELLGITIMERSSFEKNPIDFLEAKGYKEVKKDLIIKLPKYSLFELENGRKRMLASAGELQKGNELALPSKYVNFLYLASHYEKLKGSPEDNEQKQLFVEQHKHYLDEIIEQISEFSKRVILADANLDKVLSAYNKHRDKPIREQAENIIHLFTLTNLGAPAAFKYFDTTIDRKRYTSTKEVLDATLIHQSITGLYETRIDLSQLGGDGGSGSETPGTSESATPESGGVLNLEEEYRLHEKPVPSSIDPSWLQLFPTVWAERAGMGLANQVPPVVVELRSGASPVAVRQYPMSKEAREGIRPHIQRFLDLGVLVPCQSPWNTPLLPVKKPGTNDYRPVQDLREINKRVQDIHPTVPNPYNLLSSLPPSHTWYSVLDLKDAFFCLKLHPNSQPLFAFEWRDPEKGNTGQLTWTRLPQGFKNSPTLFNEALHRDLAPFRALNPQVVLLQYVDDLLVAAPTYRDCKEGTQKLLQELSKLGYRVSAKKAQLCQKEVTYLGYLLKEGKRWLTPARKATVMKIPPPTTPRQVREFLGKAGFCRLFIPGFASLAAPLYPLTKPSIPFIWTEEHQKAFDRIKEALLSAPALALPDLTKPFTLYVDERAGVARGVLTQTLGPWRRPVAYLSKKLDPVASGWPTCLKAVAAVALLLKDADKLTLGQNVTVIASHSLESIVRQPPDRWMTNARMTHYQSLLLNERVSFAPPAVLNPATLLPVESEATPVHRCSEILAEETGTRRDLKDQPLPGVPAWYTDGSSFIAEGKRRAGAAIVDGKRTVWASSLPEGTSAQKAELVALTQALRLAEGKDINIYTDSRYAFATAHIHGAIYKQRGWLTSAGKDIKNKEEILALLEAIHLPKRVAIIHCPGHQKGNDPVATGNRRADEAAKQAALSTRVLAETTKPAGKRTADGSEFEKRTADGSEFESPKKKAKVE

SEQ ID NO: 878 - protein, 2092 aa, synthetic construct
MPAAKRVKLDGGDKKYSIGLDIGTNSVGWAVITDEYKVPSKKFKVLGNTDRHSIKKNLIGALLFDSGETAEATRLKRTARRRYTRRKNRICYLQEIFSNEMAKVDDSFFHRLEESFLVEEDKKHERHPIFGNIVDEVAYHEKYPTIYHLRKKLVDSTDKADLRLIYLALAHMIKFRGHFLIEGDLNPDNSDVDKLFIQLVQTYNQLFEENPINASGVDAKAILSARLSKSRRLENLIAQLPGEKKNGLFGNLIALSLGLTPNFKSNFDLAEDAKLQLSKDTYDDDLDNLLAQIGDQYADLFLAAKNLSDAILLSDILRVNTEITKAPLSASMIKRYDEHHQDLTLLKALVRQQLPEKYKEIFFDQSKNGYAGYIDGGASQEEFYKFIKPILEKMDGTEELLVKLNREDLLRKQRTFDNGSIPHQIHLGELHAILRRQEDFYPFLKDNREKIEKILTFRIPYYVGPLARGNSRFAWMTRKSEETITPWNFEEVVDKGASAQSFIERMTNFDKNLPNEKVLPKHSLLYEYFTVYNELTKVKYVTEGMRKPAFLSGEQKKAIVDLLFKTNRKVTVKQLKEDYFKKIECFDSVEISGVEDRFNASLGTYHDLLKIIKDKDFLDNEENEDILEDIVLTLTLFEDREMIEERLKTYAHLFDDKVMKQLKRRRYTGWGRLSRKLINGIRDKQSGKTILDFLKSDGFANRNFMQLIHDDSLTFKEDIQKAQVSGQGDSLHEHIANLAGSPAIKKGILQTVKVVDELVKVMGRHKPENIVIEMARENQTTQKGQKNSRERMKRIEEGIKELGSQILKEHPVENTQLQNEKLYLYYLQNGRDMYVDQELDINRLSDYDVDHIVPQSFLKDDSIDNKVLTRSDKARGKSDNVPSEEVVKKMKNYWRQLLNAKLITQRKFDNLTKAERGGLSELDKAGFIKRQLVETRQITKHVAQILDSRMNTKYDENDKLIREVKVITLKSKLVSDFRKDFQFYKVREINNYHHAHDAYLNAVVGTALIKKYPKLESEFVYGDYKVYDVRKMIAKSEQEIGKATAKYFFYSNIMNFFKTEITLANGEIRKRPLIETNGETGEIVWDKGRDFATVRKVLSMPQVNIVKKTEVQTGGFSKESILPKRNSDKLIARKKDWDPKKYGGFDSPTVAYSVLVVAKVEKGKSKKLKSVKELLGITIMERSSFEKNPIDFLEAKGYKEVKKDLIIKLPKYSLFELENGRKRMLASAGELQKGNELALPSKYVNFLYLASHYEKLKGSPEDNEQKQLFVEQHKHYLDEIIEQISEFSKRVILADANLDKVLSAYNKHRDKPIREQAENIIHLFTLTNLGAPAAFKYFDTTIDRKRYTSTKEVLDATLIHQSITGLYETRIDLSQLGGDGGGGGPAPGGSGGVLNLEEEYRLHEKPVPSSIDPSWLQLFPTVWAERAGMGLANQVPPVVVELRSGASPVAVRQYPMSKEAREGIRPHIQRFLDLGVLVPCQSPWNTPLLPVKKPGTNDYRPVQDLREINKRVQDIHPTVPNPYNLLSSLPPSHTWYSVLDLKDAFFCLKLHPNSQPLFAFEWRDPEKGNTGQLTWTRLPQGFKNSPTLFNEALHRDLAPFRALNPQVVLLQYVDDLLVAAPTYRDCKEGTQKLLQELSKLGYRVSAKKAQLCQKEVTYLGYLLKEGKRWLTPARKATVMKIPPPTTPRQVREFLGKAGFCRLFIPGFASLAAPLYPLTKPSIPFIWTEEHQKAFDRIKEALLSAPALALPDLTKPFTLYVDERAGVARGVLTQTLGPWRRPVAYLSKKLDPVASGWPTCLKAVAAVALLLKDADKLTLGQNVTVIASHSLESIVRQPPDRWMTNARMTHYQSLLLNERVSFAPPAVLNPATLLPVESEATPVHRCSEILAEETGTRRDLKDQPLPGVPAWYTDGSSFIAEGKRRAGAAIVDGKRTVWASSLPEGTSAQKAELVALTQALRLAEGKDINIYTDSRYAFATAHIHGAIYKQRGWLTSAGKDIKNKEEILALLEAIHLPKRVAIIHCPGHQKGNDPVATGNRRADEAAKQAALSTRVLAETTKPAGKRTADGSEFEKRTADGSEFESPKKKAKVE

SEQ ID NO: 879 - protein, 2108 aa, synthetic construct
MPAAKRVKLDGGDKKYSIGLDIGTNSVGWAVITDEYKVPSKKFKVLGNTDRHSIKKNLIGALLFDSGETAEATRLKRTARRRYTRRKNRICYLQEIFSNEMAKVDDSFFHRLEESFLVEEDKKHERHPIFGNIVDEVAYHEKYPTIYHLRKKLVDSTDKADLRLIYLALAHMIKFRGHFLIEGDLNPDNSDVDKLFIQLVQTYNQLFEENPINASGVDAKAILSARLSKSRRLENLIAQLPGEKKNGLFGNLIALSLGLTPNFKSNFDLAEDAKLQLSKDTYDDDLDNLLAQIGDQYADLFLAAKNLSDAILLSDILRVNTEITKAPLSASMIKRYDEHHQDLTLLKALVRQQLPEKYKEIFFDQSKNGYAGYIDGGASQEEFYKFIKPILEKMDGTEELLVKLNREDLLRKQRTFDNGSIPHQIHLGELHAILRRQEDFYPFLKDNREKIEKILTFRIPYYVGPLARGNSRFAWMTRKSEETITPWNFEEVVDKGASAQSFIERMTNFDKNLPNEKVLPKHSLLYEYFTVYNELTKVKYVTEGMRKPAFLSGEQKKAIVDLLFKTNRKVTVKQLKEDYFKKIECFDSVEISGVEDRFNASLGTYHDLLKIIKDKDFLDNEENEDILEDIVLTLTLFEDREMIEERLKTYAHLFDDKVMKQLKRRRYTGWGRLSRKLINGIRDKQSGKTILDFLKSDGFANRNFMQLIHDDSLTFKEDIQKAQVSGQGDSLHEHIANLAGSPAIKKGILQTVKVVDELVKVMGRHKPENIVIEMARENQTTQKGQKNSRERMKRIEEGIKELGSQILKEHPVENTQLQNEKLYLYYLQNGRDMYVDQELDINRLSDYDVDHIVPQSFLKDDSIDNKVLTRSDKARGKSDNVPSEEVVKKMKNYWRQLLNAKLITQRKFDNLTKAERGGLSELDKAGFIKRQLVETRQITKHVAQILDSRMNTKYDENDKLIREVKVITLKSKLVSDFRKDFQFYKVREINNYHHAHDAYLNAVVGTALIKKYPKLESEFVYGDYKVYDVRKMIAKSEQEIGKATAKYFFYSNIMNFFKTEITLANGEIRKRPLIETNGETGEIVWDKGRDFATVRKVLSMPQVNIVKKTEVQTGGFSKESILPKRNSDKLIARKKDWDPKKYGGFDSPTVAYSVLVVAKVEKGKSKKLKSVKELLGITIMERSSFEKNPIDFLEAKGYKEVKKDLIIKLPKYSLFELENGRKRMLASAGELQKGNELALPSKYVNFLYLASHYEKLKGSPEDNEQKQLFVEQHKHYLDEIIEQISEFSKRVILADANLDKVLSAYNKHRDKPIREQAENIIHLFTLTNLGAPAAFKYFDTTIDRKRYTSTKEVLDATLIHQSITGLYETRIDLSQLGGDGGEAAAKEAAAKEAAAKEAAAKEAAAKGGVLNLEEEYRLHEKPVPSSIDPSWLQLFPTVWAERAGMGLANQVPPVVVELRSGASPVAVRQYPMSKEAREGIRPHIQRFLDLGVLVPCQSPWNTPLLPVKKPGTNDYRPVQDLREINKRVQDIHPTVPNPYNLLSSLPPSHTWYSVLDLKDAFFCLKLHPNSQPLFAFEWRDPEKGNTGQLTWTRLPQGFKNSPTLFNEALHRDLAPFRALNPQVVLLQYVDDLLVAAPTYRDCKEGTQKLLQELSKLGYRVSAKKAQLCQKEVTYLGYLLKEGKRWLTPARKATVMKIPPPTTPRQVREFLGKAGFCRLFIPGFASLAAPLYPLTKPSIPFIWTEEHQKAFDRIKEALLSAPALALPDLTKPFTLYVDERAGVARGVLTQTLGPWRRPVAYLSKKLDPVASGWPTCLKAVAAVALLLKDADKLTLGQNVTVIASHSLESIVRQPPDRWMTNARMTHYQSLLLNERVSFAPPAVLNPATLLPVESEATPVHRCSEILAEETGTRRDLKDQPLPGVPAWYTDGSSFIAEGKRRAGAAIVDGKRTVWASSLPEGTSAQKAELVALTQALRLAEGKDINIYTDSRYAFATAHIHGAIYKQRGWLTSAGKDIKNKEEILALLEAIHLPKRVAIIHCPGHQKGNDPVATGNRRADEAAKQAALSTRVLAETTKPAGKRTADGSEFEKRTADGSEFESPKKKAKVE

SEQ ID NO: 880 - protein, 2092 aa, synthetic construct
MPAAKRVKLDGGDKKYSIGLDIGTNSVGWAVITDEYKVPSKKFKVLGNTDRHSIKKNLIGALLFDSGETAEATRLKRTARRRYTRRKNRICYLQEIFSNEMAKVDDSFFHRLEESFLVEEDKKHERHPIFGNIVDEVAYHEKYPTIYHLRKKLVDSTDKADLRLIYLALAHMIKFRGHFLIEGDLNPDNSDVDKLFIQLVQTYNQLFEENPINASGVDAKAILSARLSKSRRLENLIAQLPGEKKNGLFGNLIALSLGLTPNFKSNFDLAEDAKLQLSKDTYDDDLDNLLAQIGDQYADLFLAAKNLSDAILLSDILRVNTEITKAPLSASMIKRYDEHHQDLTLLKALVRQQLPEKYKEIFFDQSKNGYAGYIDGGASQEEFYKFIKPILEKMDGTEELLVKLNREDLLRKQRTFDNGSIPHQIHLGELHAILRRQEDFYPFLKDNREKIEKILTFRIPYYVGPLARGNSRFAWMTRKSEETITPWNFEEVVDKGASAQSFIERMTNFDKNLPNEKVLPKHSLLYEYFTVYNELTKVKYVTEGMRKPAFLSGEQKKAIVDLLFKTNRKVTVKQLKEDYFKKIECFDSVEISGVEDRFNASLGTYHDLLKIIKDKDFLDNEENEDILEDIVLTLTLFEDREMIEERLKTYAHLFDDKVMKQLKRRRYTGWGRLSRKLINGIRDKQSGKTILDFLKSDGFANRNFMQLIHDDSLTFKEDIQKAQVSGQGDSLHEHIANLAGSPAIKKGILQTVKVVDELVKVMGRHKPENIVIEMARENQTTQKGQKNSRERMKRIEEGIKELGSQILKEHPVENTQLQNEKLYLYYLQNGRDMYVDQELDINRLSDYDVDHIVPQSFLKDDSIDNKVLTRSDKARGKSDNVPSEEVVKKMKNYWRQLLNAKLITQRKFDNLTKAERGGLSELDKAGFIKRQLVETRQITKHVAQILDSRMNTKYDENDKLIREVKVITLKSKLVSDFRKDFQFYKVREINNYHHAHDAYLNAVVGTALIKKYPKLESEFVYGDYKVYDVRKMIAKSEQEIGKATAKYFFYSNIMNFFKTEITLANGEIRKRPLIETNGETGEIVWDKGRDFATVRKVLSMPQVNIVKKTEVQTGGFSKESILPKRNSDKLIARKKDWDPKKYGGFDSPTVAYSVLVVAKVEKGKSKKLKSVKELLGITIMERSSFEKNPIDFLEAKGYKEVKKDLIIKLPKYSLFELENGRKRMLASAGELQKGNELALPSKYVNFLYLASHYEKLKGSPEDNEQKQLFVEQHKHYLDEIIEQISEFSKRVILADANLDKVLSAYNKHRDKPIREQAENIIHLFTLTNLGAPAAFKYFDTTIDRKRYTSTKEVLDATLIHQSITGLYETRIDLSQLGGDGGPAPGGSGSSGGVLNLEEEYRLHEKPVPSSIDPSWLQLFPTVWAERAGMGLANQVPPVVVELRSGASPVAVRQYPMSKEAREGIRPHIQRFLDLGVLVPCQSPWNTPLLPVKKPGTNDYRPVQDLREINKRVQDIHPTVPNPYNLLSSLPPSHTWYSVLDLKDAFFCLKLHPNSQPLFAFEWRDPEKGNTGQLTWTRLPQGFKNSPTLFNEALHRDLAPFRALNPQVVLLQYVDDLLVAAPTYRDCKEGTQKLLQELSKLGYRVSAKKAQLCQKEVTYLGYLLKEGKRWLTPARKATVMKIPPPTTPRQVREFLGKAGFCRLFIPGFASLAAPLYPLTKPSIPFIWTEEHQKAFDRIKEALLSAPALALPDLTKPFTLYVDERAGVARGVLTQTLGPWRRPVAYLSKKLDPVASGWPTCLKAVAAVALLLKDADKLTLGQNVTVIASHSLESIVRQPPDRWMTNARMTHYQSLLLNERVSFAPPAVLNPATLLPVESEATPVHRCSEILAEETGTRRDLKDQPLPGVPAWYTDGSSFIAEGKRRAGAAIVDGKRTVWASSLPEGTSAQKAELVALTQALRLAEGKDINIYTDSRYAFATAHIHGAIYKQRGWLTSAGKDIKNKEEILALLEAIHLPKRVAIIHCPGHQKGNDPVATGNRRADEAAKQAALSTRVLAETTKPAGKRTADGSEFEKRTADGSEFESPKKKAKVE

SEQ ID NO: 881 - protein, 2089 aa, synthetic construct
MPAAKRVKLDGGDKKYSIGLDIGTNSVGWAVITDEYKVPSKKFKVLGNTDRHSIKKNLIGALLFDSGETAEATRLKRTARRRYTRRKNRICYLQEIFSNEMAKVDDSFFHRLEESFLVEEDKKHERHPIFGNIVDEVAYHEKYPTIYHLRKKLVDSTDKADLRLIYLALAHMIKFRGHFLIEGDLNPDNSDVDKLFIQLVQTYNQLFEENPINASGVDAKAILSARLSKSRRLENLIAQLPGEKKNGLFGNLIALSLGLTPNFKSNFDLAEDAKLQLSKDTYDDDLDNLLAQIGDQYADLFLAAKNLSDAILLSDILRVNTEITKAPLSASMIKRYDEHHQDLTLLKALVRQQLPEKYKEIFFDQSKNGYAGYIDGGASQEEFYKFIKPILEKMDGTEELLVKLNREDLLRKQRTFDNGSIPHQIHLGELHAILRRQEDFYPFLKDNREKIEKILTFRIPYYVGPLARGNSRFAWMTRKSEETITPWNFEEVVDKGASAQSFIERMTNFDKNLPNEKVLPKHSLLYEYFTVYNELTKVKYVTEGMRKPAFLSGEQKKAIVDLLFKTNRKVTVKQLKEDYFKKIECFDSVEISGVEDRFNASLGTYHDLLKIIKDKDFLDNEENEDILEDIVLTLTLFEDREMIEERLKTYAHLFDDKVMKQLKRRRYTGWGRLSRKLINGIRDKQSGKTILDFLKSDGFANRNFMQLIHDDSLTFKEDIQKAQVSGQGDSLHEHIANLAGSPAIKKGILQTVKVVDELVKVMGRHKPENIVIEMARENQTTQKGQKNSRERMKRIEEGIKELGSQILKEHPVENTQLQNEKLYLYYLQNGRDMYVDQELDINRLSDYDVDHIVPQSFLKDDSIDNKVLTRSDKARGKSDNVPSEEVVKKMKNYWRQLLNAKLITQRKFDNLTKAERGGLSELDKAGFIKRQLVETRQITKHVAQILDSRMNTKYDENDKLIREVKVITLKSKLVSDFRKDFQFYKVREINNYHHAHDAYLNAVVGTALIKKYPKLESEFVYGDYKVYDVRKMIAKSEQEIGKATAKYFFYSNIMNFFKTEITLANGEIRKRPLIETNGETGEIVWDKGRDFATVRKVLSMPQVNIVKKTEVQTGGFSKESILPKRNSDKLIARKKDWDPKKYGGFDSPTVAYSVLVVAKVEKGKSKKLKSVKELLGITIMERSSFEKNPIDFLEAKGYKEVKKDLIIKLPKYSLFELENGRKRMLASAGELQKGNELALPSKYVNFLYLASHYEKLKGSPEDNEQKQLFVEQHKHYLDEIIEQISEFSKRVILADANLDKVLSAYNKHRDKPIREQAENIIHLFTLTNLGAPAAFKYFDTTIDRKRYTSTKEVLDATLIHQSITGLYETRIDLSQLGGDGGGGSGSSGGVLNLEEEYRLHEKPVPSSIDPSWLQLFPTVWAERAGMGLANQVPPVVVELRSGASPVAVRQYPMSKEAREGIRPHIQRFLDLGVLVPCQSPWNTPLLPVKKPGTNDYRPVQDLREINKRVQDIHPTVPNPYNLLSSLPPSHTWYSVLDLKDAFFCLKLHPNSQPLFAFEWRDPEKGNTGQLTWTRLPQGFKNSPTLFNEALHRDLAPFRALNPQVVLLQYVDDLLVAAPTYRDCKEGTQKLLQELSKLGYRVSAKKAQLCQKEVTYLGYLLKEGKRWLTPARKATVMKIPPPTTPRQVREFLGKAGFCRLFIPGFASLAAPLYPLTKPSIPFIWTEEHQKAFDRIKEALLSAPALALPDLTKPFTLYVDERAGVARGVLTQTLGPWRRPVAYLSKKLDPVASGWPTCLKAVAAVALLLKDADKLTLGQNVTVIASHSLESIVRQPPDRWMTNARMTHYQSLLLNERVSFAPPAVLNPATLLPVESEATPVHRCSEILAEETGTRRDLKDQPLPGVPAWYTDGSSFIAEGKRRAGAAIVDGKRTVWASSLPEGTSAQKAELVALTQALRLAEGKDINIYTDSRYAFATAHIHGAIYKQRGWLTSAGKDIKNKEEILALLEAIHLPKRVAIIHCPGHQKGNDPVATGNRRADEAAKQAALSTRVLAETTKPAGKRTADGSEFEKRTADGSEFESPKKKAKVE

SEQ ID NO: 882 - protein, 2089 aa, synthetic construct
MPAAKRVKLDGGDKKYSIGLDIGTNSVGWAVITDEYKVPSKKFKVLGNTDRHSIKKNLIGALLFDSGETAEATRLKRTARRRYTRRKNRICYLQEIFSNEMAKVDDSFFHRLEESFLVEEDKKHERHPIFGNIVDEVAYHEKYPTIYHLRKKLVDSTDKADLRLIYLALAHMIKFRGHFLIEGDLNPDNSDVDKLFIQLVQTYNQLFEENPINASGVDAKAILSARLSKSRRLENLIAQLPGEKKNGLFGNLIALSLGLTPNFKSNFDLAEDAKLQLSKDTYDDDLDNLLAQIGDQYADLFLAAKNLSDAILLSDILRVNTEITKAPLSASMIKRYDEHHQDLTLLKALVRQQLPEKYKEIFFDQSKNGYAGYIDGGASQEEFYKFIKPILEKMDGTEELLVKLNREDLLRKQRTFDNGSIPHQIHLGELHAILRRQEDFYPFLKDNREKIEKILTFRIPYYVGPLARGNSRFAWMTRKSEETITPWNFEEVVDKGASAQSFIERMTNFDKNLPNEKVLPKHSLLYEYFTVYNELTKVKYVTEGMRKPAFLSGEQKKAIVDLLFKTNRKVTVKQLKEDYFKKIECFDSVEISGVEDRFNASLGTYHDLLKIIKDKDFLDNEENEDILEDIVLTLTLFEDREMIEERLKTYAHLFDDKVMKQLKRRRYTGWGRLSRKLINGIRDKQSGKTILDFLKSDGFANRNFMQLIHDDSLTFKEDIQKAQVSGQGDSLHEHIANLAGSPAIKKGILQTVKVVDELVKVMGRHKPENIVIEMARENQTTQKGQKNSRERMKRIEEGIKELGSQILKEHPVENTQLQNEKLYLYYLQNGRDMYVDQELDINRLSDYDVDHIVPQSFLKDDSIDNKVLTRSDKARGKSDNVPSEEVVKKMKNYWRQLLNAKLITQRKFDNLTKAERGGLSELDKAGFIKRQLVETRQITKHVAQILDSRMNTKYDENDKLIREVKVITLKSKLVSDFRKDFQFYKVREINNYHHAHDAYLNAVVGTALIKKYPKLESEFVYGDYKVYDVRKMIAKSEQEIGKATAKYFFYSNIMNFFKTEITLANGEIRKRPLIETNGETGEIVWDKGRDFATVRKVLSMPQVNIVKKTEVQTGGFSKESILPKRNSDKLIARKKDWDPKKYGGFDSPTVAYSVLVVAKVEKGKSKKLKSVKELLGITIMERSSFEKNPIDFLEAKGYKEVKKDLIIKLPKYSLFELENGRKRMLASAGELQKGNELALPSKYVNFLYLASHYEKLKGSPEDNEQKQLFVEQHKHYLDEIIEQISEFSKRVILADANLDKVLSAYNKHRDKPIREQAENIIHLFTLTNLGAPAAFKYFDTTIDRKRYTSTKEVLDATLIHQSITGLYETRIDLSQLGGDGGGGGGGGGGVLNLEEEYRLHEKPVPSSIDPSWLQLFPTVWAERAGMGLANQVPPVVVELRSGASPVAVRQYPMSKEAREGIRPHIQRFLDLGVLVPCQSPWNTPLLPVKKPGTNDYRPVQDLREINKRVQDIHPTVPNPYNLLSSLPPSHTWYSVLDLKDAFFCLKLHPNSQPLFAFEWRDPEKGNTGQLTWTRLPQGFKNSPTLFNEALHRDLAPFRALNPQVVLLQYVDDLLVAAPTYRDCKEGTQKLLQELSKLGYRVSAKKAQLCQKEVTYLGYLLKEGKRWLTPARKATVMKIPPPTTPRQVREFLGKAGFCRLFIPGFASLAAPLYPLTKPSIPFIWTEEHQKAFDRIKEALLSAPALALPDLTKPFTLYVDERAGVARGVLTQTLGPWRRPVAYLSKKLDPVASGWPTCLKAVAAVALLLKDADKLTLGQNVTVIASHSLESIVRQPPDRWMTNARMTHYQSLLLNERVSFAPPAVLNPATLLPVESEATPVHRCSEILAEETGTRRDLKDQPLPGVPAWYTDGSSFIAEGKRRAGAAIVDGKRTVWASSLPEGTSAQKAELVALTQALRLAEGKDINIYTDSRYAFATAHIHGAIYKQRGWLTSAGKDIKNKEEILALLEAIHLPKRVAIIHCPGHQKGNDPVATGNRRADEAAKQAALSTRVLAETTKPAGKRTADGSEFEKRTADGSEFESPKKKAKVE

SEQ ID NO: 883 - protein, 2091 aa, synthetic construct
MPAAKRVKLDGGDKKYSIGLDIGTNSVGWAVITDEYKVPSKKFKVLGNTDRHSIKKNLIGALLFDSGETAEATRLKRTARRRYTRRKNRICYLQEIFSNEMAKVDDSFFHRLEESFLVEEDKKHERHPIFGNIVDEVAYHEKYPTIYHLRKKLVDSTDKADLRLIYLALAHMIKFRGHFLIEGDLNPDNSDVDKLFIQLVQTYNQLFEENPINASGVDAKAILSARLSKSRRLENLIAQLPGEKKNGLFGNLIALSLGLTPNFKSNFDLAEDAKLQLSKDTYDDDLDNLLAQIGDQYADLFLAAKNLSDAILLSDILRVNTEITKAPLSASMIKRYDEHHQDLTLLKALVRQQLPEKYKEIFFDQSKNGYAGYIDGGASQEEFYKFIKPILEKMDGTEELLVKLNREDLLRKQRTFDNGSIPHQIHLGELHAILRRQEDFYPFLKDNREKIEKILTFRIPYYVGPLARGNSRFAWMTRKSEETITPWNFEEVVDKGASAQSFIERMTNFDKNLPNEKVLPKHSLLYEYFTVYNELTKVKYVTEGMRKPAFLSGEQKKAIVDLLFKTNRKVTVKQLKEDYFKKIECFDSVEISGVEDRFNASLGTYHDLLKIIKDKDFLDNEENEDILEDIVLTLTLFEDREMIEERLKTYAHLFDDKVMKQLKRRRYTGWGRLSRKLINGIRDKQSGKTILDFLKSDGFANRNFMQLIHDDSLTFKEDIQKAQVSGQGDSLHEHIANLAGSPAIKKGILQTVKVVDELVKVMGRHKPENIVIEMARENQTTQKGQKNSRERMKRIEEGIKELGSQILKEHPVENTQLQNEKLYLYYLQNGRDMYVDQELDINRLSDYDVDHIVPQSFLKDDSIDNKVLTRSDKARGKSDNVPSEEVVKKMKNYWRQLLNAKLITQRKFDNLTKAERGGLSELDKAGFIKRQLVETRQITKHVAQILDSRMNTKYDENDKLIREVKVITLKSKLVSDFRKDFQFYKVREINNYHHAHDAYLNAVVGTALIKKYPKLESEFVYGDYKVYDVRKMIAKSEQEIGKATAKYFFYSNIMNFFKTEITLANGEIRKRPLIETNGETGEIVWDKGRDFATVRKVLSMPQVNIVKKTEVQTGGFSKESILPKRNSDKLIARKKDWDPKKYGGFDSPTVAYSVLVVAKVEKGKSKKLKSVKELLGITIMERSSFEKNPIDFLEAKGYKEVKKDLIIKLPKYSLFELENGRKRMLASAGELQKGNELALPSKYVNFLYLASHYEKLKGSPEDNEQKQLFVEQHKHYLDEIIEQISEFSKRVILADANLDKVLSAYNKHRDKPIREQAENIIHLFTLTNLGAPAAFKYFDTTIDRKRYTSTKEVLDATLIHQSITGLYETRIDLSQLGGDGGGSSEAAAKGGVLNLEEEYRLHEKPVPSSIDPSWLQLFPTVWAERAGMGLANQVPPVVVELRSGASPVAVRQYPMSKEAREGIRPHIQRFLDLGVLVPCQSPWNTPLLPVKKPGTNDYRPVQDLREINKRVQDIHPTVPNPYNLLSSLPPSHTWYSVLDLKDAFFCLKLHPNSQPLFAFEWRDPEKGNTGQLTWTRLPQGFKNSPTLFNEALHRDLAPFRALNPQVVLLQYVDDLLVAAPTYRDCKEGTQKLLQELSKLGYRVSAKKAQLCQKEVTYLGYLLKEGKRWLTPARKATVMKIPPPTTPRQVREFLGKAGFCRLFIPGFASLAAPLYPLTKPSIPFIWTEEHQKAFDRIKEALLSAPALALPDLTKPFTLYVDERAGVARGVLTQTLGPWRRPVAYLSKKLDPVASGWPTCLKAVAAVALLLKDADKLTLGQNVTVIASHSLESIVRQPPDRWMTNARMTHYQSLLLNERVSFAPPAVLNPATLLPVESEATPVHRCSEILAEETGTRRDLKDQPLPGVPAWYTDGSSFIAEGKRRAGAAIVDGKRTVWASSLPEGTSAQKAELVALTQALRLAEGKDINIYTDSRYAFATAHIHGAIYKQRGWLTSAGKDIKNKEEILALLEAIHLPKRVAIIHCPGHQKGNDPVATGNRRADEAAKQAALSTRVLAETTKPAGKRTADGSEFEKRTADGSEFESPKKKAKVE

SEQ ID NO: 884 - protein, 2089 aa, synthetic construct
MPAAKRVKLDGGDKKYSIGLDIGTNSVGWAVITDEYKVPSKKFKVLGNTDRHSIKKNLIGALLFDSGETAEATRLKRTARRRYTRRKNRICYLQEIFSNEMAKVDDSFFHRLEESFLVEEDKKHERHPIFGNIVDEVAYHEKYPTIYHLRKKLVDSTDKADLRLIYLALAHMIKFRGHFLIEGDLNPDNSDVDKLFIQLVQTYNQLFEENPINASGVDAKAILSARLSKSRRLENLIAQLPGEKKNGLFGNLIALSLGLTPNFKSNFDLAEDAKLQLSKDTYDDDLDNLLAQIGDQYADLFLAAKNLSDAILLSDILRVNTEITKAPLSASMIKRYDEHHQDLTLLKALVRQQLPEKYKEIFFDQSKNGYAGYIDGGASQEEFYKFIKPILEKMDGTEELLVKLNREDLLRKQRTFDNGSIPHQIHLGELHAILRRQEDFYPFLKDNREKIEKILTFRIPYYVGPLARGNSRFAWMTRKSEETITPWNFEEVVDKGASAQSFIERMTNFDKNLPNEKVLPKHSLLYEYFTVYNELTKVKYVTEGMRKPAFLSGEQKKAIVDLLFKTNRKVTVKQLKEDYFKKIECFDSVEISGVEDRFNASLGTYHDLLKIIKDKDFLDNEENEDILEDIVLTLTLFEDREMIEERLKTYAHLFDDKVMKQLKRRRYTGWGRLSRKLINGIRDKQSGKTILDFLKSDGFANRNFMQLIHDDSLTFKEDIQKAQVSGQGDSLHEHIANLAGSPAIKKGILQTVKVVDELVKVMGRHKPENIVIEMARENQTTQKGQKNSRERMKRIEEGIKELGSQILKEHPVENTQLQNEKLYLYYLQNGRDMYVDQELDINRLSDYDVDHIVPQSFLKDDSIDNKVLTRSDKARGKSDNVPSEEVVKKMKNYWRQLLNAKLITQRKFDNLTKAERGGLSELDKAGFIKRQLVETRQITKHVAQILDSRMNTKYDENDKLIREVKVITLKSKLVSDFRKDFQFYKVREINNYHHAHDAYLNAVVGTALIKKYPKLESEFVYGDYKVYDVRKMIAKSEQEIGKATAKYFFYSNIMNFFKTEITLANGEIRKRPLIETNGETGEIVWDKGRDFATVRKVLSMPQVNIVKKTEVQTGGFSKESILPKRNSDKLIARKKDWDPKKYGGFDSPTVAYSVLVVAKVEKGKSKKLKSVKELLGITIMERSSFEKNPIDFLEAKGYKEVKKDLIIKLPKYSLFELENGRKRMLASAGELQKGNELALPSKYVNFLYLASHYEKLKGSPEDNEQKQLFVEQHKHYLDEIIEQISEFSKRVILADANLDKVLSAYNKHRDKPIREQAENIIHLFTLTNLGAPAAFKYFDTTIDRKRYTSTKEVLDATLIHQSITGLYETRIDLSQLGGDGGGSSPAPGGVLNLEEEYRLHEKPVPSSIDPSWLQLFPTVWAERAGMGLANQVPPVVVELRSGASPVAVRQYPMSKEAREGIRPHIQRFLDLGVLVPCQSPWNTPLLPVKKPGTNDYRPVQDLREINKRVQDIHPTVPNPYNLLSSLPPSHTWYSVLDLKDAFFCLKLHPNSQPLFAFEWRDPEKGNTGQLTWTRLPQGFKNSPTLFNEALHRDLAPFRALNPQVVLLQYVDDLLVAAPTYRDCKEGTQKLLQELSKLGYRVSAKKAQLCQKEVTYLGYLLKEGKRWLTPARKATVMKIPPPTTPRQVREFLGKAGFCRLFIPGFASLAAPLYPLTKPSIPFIWTEEHQKAFDRIKEALLSAPALALPDLTKPFTLYVDERAGVARGVLTQTLGPWRRPVAYLSKKLDPVASGWPTCLKAVAAVALLLKDADKLTLGQNVTVIASHSLESIVRQPPDRWMTNARMTHYQSLLLNERVSFAPPAVLNPATLLPVESEATPVHRCSEILAEETGTRRDLKDQPLPGVPAWYTDGSSFIAEGKRRAGAAIVDGKRTVWASSLPEGTSAQKAELVALTQALRLAEGKDINIYTDSRYAFATAHIHGAIYKQRGWLTSAGKDIKNKEEILALLEAIHLPKRVAIIHCPGHQKGNDPVATGNRRADEAAKQAALSTRVLAETTKPAGKRTADGSEFEKRTADGSEFESPKKKAKVE

SEQ ID NO: 885 - protein, 2092 aa, synthetic construct
MPAAKRVKLDGGDKKYSIGLDIGTNSVGWAVITDEYKVPSKKFKVLGNTDRHSIKKNLIGALLFDSGETAEATRLKRTARRRYTRRKNRICYLQEIFSNEMAKVDDSFFHRLEESFLVEEDKKHERHPIFGNIVDEVAYHEKYPTIYHLRKKLVDSTDKADLRLIYLALAHMIKFRGHFLIEGDLNPDNSDVDKLFIQLVQTYNQLFEENPINASGVDAKAILSARLSKSRRLENLIAQLPGEKKNGLFGNLIALSLGLTPNFKSNFDLAEDAKLQLSKDTYDDDLDNLLAQIGDQYADLFLAAKNLSDAILLSDILRVNTEITKAPLSASMIKRYDEHHQDLTLLKALVRQQLPEKYKEIFFDQSKNGYAGYIDGGASQEEFYKFIKPILEKMDGTEELLVKLNREDLLRKQRTFDNGSIPHQIHLGELHAILRRQEDFYPFLKDNREKIEKILTFRIPYYVGPLARGNSRFAWMTRKSEETITPWNFEEVVDKGASAQSFIERMTNFDKNLPNEKVLPKHSLLYEYFTVYNELTKVKYVTEGMRKPAFLSGEQKKAIVDLLFKTNRKVTVKQLKEDYFKKIECFDSVEISGVEDRFNASLGTYHDLLKIIKDKDFLDNEENEDILEDIVLTLTLFEDREMIEERLKTYAHLFDDKVMKQLKRRRYTGWGRLSRKLINGIRDKQSGKTILDFLKSDGFANRNFMQLIHDDSLTFKEDIQKAQVSGQGDSLHEHIANLAGSPAIKKGILQTVKVVDELVKVMGRHKPENIVIEMARENQTTQKGQKNSRERMKRIEEGIKELGSQILKEHPVENTQLQNEKLYLYYLQNGRDMYVDQELDINRLSDYDVDHIVPQSFLKDDSIDNKVLTRSDKARGKSDNVPSEEVVKKMKNYWRQLLNAKLITQRKFDNLTKAERGGLSELDKAGFIKRQLVETRQITKHVAQILDSRMNTKYDENDKLIREVKVITLKSKLVSDFRKDFQFYKVREINNYHHAHDAYLNAVVGTALIKKYPKLESEFVYGDYKVYDVRKMIAKSEQEIGKATAKYFFYSNIMNFFKTEITLANGEIRKRPLIETNGETGEIVWDKGRDFATVRKVLSMPQVNIVKKTEVQTGGFSKESILPKRNSDKLIARKKDWDPKKYGGFDSPTVAYSVLVVAKVEKGKSKKLKSVKELLGITIMERSSFEKNPIDFLEAKGYKEVKKDLIIKLPKYSLFELENGRKRMLASAGELQKGNELALPSKYVNFLYLASHYEKLKGSPEDNEQKQLFVEQHKHYLDEIIEQISEFSKRVILADANLDKVLSAYNKHRDKPIREQAENIIHLFTLTNLGAPAAFKYFDTTIDRKRYTSTKEVLDATLIHQSITGLYETRIDLSQLGGDGGGGSGGSGGSGGVLNLEEEYRLHEKPVPSSIDPSWLQLFPTVWAERAGMGLANQVPPVVVELRSGASPVAVRQYPMSKEAREGIRPHIQRFLDLGVLVPCQSPWNTPLLPVKKPGTNDYRPVQDLREINKRVQDIHPTVPNPYNLLSSLPPSHTWYSVLDLKDAFFCLKLHPNSQPLFAFEWRDPEKGNTGQLTWTRLPQGFKNSPTLFNEALHRDLAPFRALNPQVVLLQYVDDLLVAAPTYRDCKEGTQKLLQELSKLGYRVSAKKAQLCQKEVTYLGYLLKEGKRWLTPARKATVMKIPPPTTPRQVREFLGKAGFCRLFIPGFASLAAPLYPLTKPSIPFIWTEEHQKAFDRIKEALLSAPALALPDLTKPFTLYVDERAGVARGVLTQTLGPWRRPVAYLSKKLDPVASGWPTCLKAVAAVALLLKDADKLTLGQNVTVIASHSLESIVRQPPDRWMTNARMTHYQSLLLNERVSFAPPAVLNPATLLPVESEATPVHRCSEILAEETGTRRDLKDQPLPGVPAWYTDGSSFIAEGKRRAGAAIVDGKRTVWASSLPEGTSAQKAELVALTQALRLAEGKDINIYTDSRYAFATAHIHGAIYKQRGWLTSAGKDIKNKEEILALLEAIHLPKRVAIIHCPGHQKGNDPVATGNRRADEAAKQAALSTRVLAETTKPAGKRTADGSEFEKRTADGSEFESPKKKAKVE

SEQ ID NO: 886 - protein, 2095 aa, synthetic construct
MPAAKRVKLDGGDKKYSIGLDIGTNSVGWAVITDEYKVPSKKFKVLGNTDRHSIKKNLIGALLFDSGETAEATRLKRTARRRYTRRKNRICYLQEIFSNEMAKVDDSFFHRLEESFLVEEDKKHERHPIFGNIVDEVAYHEKYPTIYHLRKKLVDSTDKADLRLIYLALAHMIKFRGHFLIEGDLNPDNSDVDKLFIQLVQTYNQLFEENPINASGVDAKAILSARLSKSRRLENLIAQLPGEKKNGLFGNLIALSLGLTPNFKSNFDLAEDAKLQLSKDTYDDDLDNLLAQIGDQYADLFLAAKNLSDAILLSDILRVNTEITKAPLSASMIKRYDEHHQDLTLLKALVRQQLPEKYKEIFFDQSKNGYAGYIDGGASQEEFYKFIKPILEKMDGTEELLVKLNREDLLRKQRTFDNGSIPHQIHLGELHAILRRQEDFYPFLKDNREKIEKILTFRIPYYVGPLARGNSRFAWMTRKSEETITPWNFEEVVDKGASAQSFIERMTNFDKNLPNEKVLPKHSLLYEYFTVYNELTKVKYVTEGMRKPAFLSGEQKKAIVDLLFKTNRKVTVKQLKEDYFKKIECFDSVEISGVEDRFNASLGTYHDLLKIIKDKDFLDNEENEDILEDIVLTLTLFEDREMIEERLKTYAHLFDDKVMKQLKRRRYTGWGRLSRKLINGIRDKQSGKTILDFLKSDGFANRNFMQLIHDDSLTFKEDIQKAQVSGQGDSLHEHIANLAGSPAIKKGILQTVKVVDELVKVMGRHKPENIVIEMARENQTTQKGQKNSRERMKRIEEGIKELGSQILKEHPVENTQLQNEKLYLYYLQNGRDMYVDQELDINRLSDYDVDHIVPQSFLKDDSIDNKVLTRSDKARGKSDNVPSEEVVKKMKNYWRQLLNAKLITQRKFDNLTKAERGGLSELDKAGFIKRQLVETRQITKHVAQILDSRMNTKYDENDKLIREVKVITLKSKLVSDFRKDFQFYKVREINNYHHAHDAYLNAVVGTALIKKYPKLESEFVYGDYKVYDVRKMIAKSEQEIGKATAKYFFYSNIMNFFKTEITLANGEIRKRPLIETNGETGEIVWDKGRDFATVRKVLSMPQVNIVKKTEVQTGGFSKESILPKRNSDKLIARKKDWDPKKYGGFDSPTVAYSVLVVAKVEKGKSKKLKSVKELLGITIMERSSFEKNPIDFLEAKGYKEVKKDLIIKLPKYSLFELENGRKRMLASAGELQKGNELALPSKYVNFLYLASHYEKLKGSPEDNEQKQLFVEQHKHYLDEIIEQISEFSKRVILADANLDKVLSAYNKHRDKPIREQAENIIHLFTLTNLGAPAAFKYFDTTIDRKRYTSTKEVLDATLIHQSITGLYETRIDLSQLGGDGGGGSGGSGGSGGSGGVLNLEEEYRLHEKPVPSSIDPSWLQLFPTVWAERAGMGLANQVPPVVVELRSGASPVAVRQYPMSKEAREGIRPHIQRFLDLGVLVPCQSPWNTPLLPVKKPGTNDYRPVQDLREINKRVQDIHPTVPNPYNLLSSLPPSHTWYSVLDLKDAFFCLKLHPNSQPLFAFEWRDPEKGNTGQLTWTRLPQGFKNSPTLFNEALHRDLAPFRALNPQVVLLQYVDDLLVAAPTYRDCKEGTQKLLQELSKLGYRVSAKKAQLCQKEVTYLGYLLKEGKRWLTPARKATVMKIPPPTTPRQVREFLGKAGFCRLFIPGFASLAAPLYPLTKPSIPFIWTEEHQKAFDRIKEALLSAPALALPDLTKPFTLYVDERAGVARGVLTQTLGPWRRPVAYLSKKLDPVASGWPTCLKAVAAVALLLKDADKLTLGQNVTVIASHSLESIVRQPPDRWMTNARMTHYQSLLLNERVSFAPPAVLNPATLLPVESEATPVHRCSEILAEETGTRRDLKDQPLPGVPAWYTDGSSFIAEGKRRAGAAIVDGKRTVWASSLPEGTSAQKAELVALTQALRLAEGKDINIYTDSRYAFATAHIHGAIYKQRGWLTSAGKDIKNKEEILALLEAIHLPKRVAIIHCPGHQKGNDPVATGNRRADEAAKQAALSTRVLAETTKPAGKRTADGSEFEKRTADGSEFESPKKKAKVE

SEQ ID NO: 887 - protein, 2095 aa, synthetic construct
MPAAKRVKLDGGDKKYSIGLDIGTNSVGWAVITDEYKVPSKKFKVLGNTDRHSIKKNLIGALLFDSGETAEATRLKRTARRRYTRRKNRICYLQEIFSNEMAKVDDSFFHRLEESFLVEEDKKHERHPIFGNIVDEVAYHEKYPTIYHLRKKLVDSTDKADLRLIYLALAHMIKFRGHFLIEGDLNPDNSDVDKLFIQLVQTYNQLFEENPINASGVDAKAILSARLSKSRRLENLIAQLPGEKKNGLFGNLIALSLGLTPNFKSNFDLAEDAKLQLSKDTYDDDLDNLLAQIGDQYADLFLAAKNLSDAILLSDILRVNTEITKAPLSASMIKRYDEHHQDLTLLKALVRQQLPEKYKEIFFDQSKNGYAGYIDGGASQEEFYKFIKPILEKMDGTEELLVKLNREDLLRKQRTFDNGSIPHQIHLGELHAILRRQEDFYPFLKDNREKIEKILTFRIPYYVGPLARGNSRFAWMTRKSEETITPWNFEEVVDKGASAQSFIERMTNFDKNLPNEKVLPKHSLLYEYFTVYNELTKVKYVTEGMRKPAFLSGEQKKAIVDLLFKTNRKVTVKQLKEDYFKKIECFDSVEISGVEDRFNASLGTYHDLLKIIKDKDFLDNEENEDILEDIVLTLTLFEDREMIEERLKTYAHLFDDKVMKQLKRRRYTGWGRLSRKLINGIRDKQSGKTILDFLKSDGFANRNFMQLIHDDSLTFKEDIQKAQVSGQGDSLHEHIANLAGSPAIKKGILQTVKVVDELVKVMGRHKPENIVIEMARENQTTQKGQKNSRERMKRIEEGIKELGSQILKEHPVENTQLQNEKLYLYYLQNGRDMYVDQELDINRLSDYDVDHIVPQSFLKDDSIDNKVLTRSDKARGKSDNVPSEEVVKKMKNYWRQLLNAKLITQRKFDNLTKAERGGLSELDKAGFIKRQLVETRQITKHVAQILDSRMNTKYDENDKLIREVKVITLKSKLVSDFRKDFQFYKVREINNYHHAHDAYLNAVVGTALIKKYPKLESEFVYGDYKVYDVRKMIAKSEQEIGKATAKYFFYSNIMNFFKTEITLANGEIRKRPLIETNGETGEIVWDKGRDFATVRKVLSMPQVNIVKKTEVQTGGFSKESILPKRNSDKLIARKKDWDPKKYGGFDSPTVAYSVLVVAKVEKGKSKKLKSVKELLGITIMERSSFEKNPIDFLEAKGYKEVKKDLIIKLPKYSLFELENGRKRMLASAGELQKGNELALPSKYVNFLYLASHYEKLKGSPEDNEQKQLFVEQHKHYLDEIIEQISEFSKRVILADANLDKVLSAYNKHRDKPIREQAENIIHLFTLTNLGAPAAFKYFDTTIDRKRYTSTKEVLDATLIHQSITGLYETRIDLSQLGGDGGGSSGSSGSSGSSGGVLNLEEEYRLHEKPVPSSIDPSWLQLFPTVWAERAGMGLANQVPPVVVELRSGASPVAVRQYPMSKEAREGIRPHIQRFLDLGVLVPCQSPWNTPLLPVKKPGTNDYRPVQDLREINKRVQDIHPTVPNPYNLLSSLPPSHTWYSVLDLKDAFFCLKLHPNSQPLFAFEWRDPEKGNTGQLTWTRLPQGFKNSPTLFNEALHRDLAPFRALNPQVVLLQYVDDLLVAAPTYRDCKEGTQKLLQELSKLGYRVSAKKAQLCQKEVTYLGYLLKEGKRWLTPARKATVMKIPPPTTPRQVREFLGKAGFCRLFIPGFASLAAPLYPLTKPSIPFIWTEEHQKAFDRIKEALLSAPALALPDLTKPFTLYVDERAGVARGVLTQTLGPWRRPVAYLSKKLDPVASGWPTCLKAVAAVALLLKDADKLTLGQNVTVIASHSLESIVRQPPDRWMTNARMTHYQSLLLNERVSFAPPAVLNPATLLPVESEATPVHRCSEILAEETGTRRDLKDQPLPGVPAWYTDGSSFIAEGKRRAGAAIVDGKRTVWASSLPEGTSAQKAELVALTQALRLAEGKDINIYTDSRYAFATAHIHGAIYKQRGWLTSAGKDIKNKEEILALLEAIHLPKRVAIIHCPGHQKGNDPVATGNRRADEAAKQAALSTRVLAETTKPAGKRTADGSEFEKRTADGSEFESPKKKAKVE

SEQ ID NO: 888 - protein, 2092 aa, synthetic construct
MPAAKRVKLDGGDKKYSIGLDIGTNSVGWAVITDEYKVPSKKFKVLGNTDRHSIKKNLIGALLFDSGETAEATRLKRTARRRYTRRKNRICYLQEIFSNEMAKVDDSFFHRLEESFLVEEDKKHERHPIFGNIVDEVAYHEKYPTIYHLRKKLVDSTDKADLRLIYLALAHMIKFRGHFLIEGDLNPDNSDVDKLFIQLVQTYNQLFEENPINASGVDAKAILSARLSKSRRLENLIAQLPGEKKNGLFGNLIALSLGLTPNFKSNFDLAEDAKLQLSKDTYDDDLDNLLAQIGDQYADLFLAAKNLSDAILLSDILRVNTEITKAPLSASMIKRYDEHHQDLTLLKALVRQQLPEKYKEIFFDQSKNGYAGYIDGGASQEEFYKFIKPILEKMDGTEELLVKLNREDLLRKQRTFDNGSIPHQIHLGELHAILRRQEDFYPFLKDNREKIEKILTFRIPYYVGPLARGNSRFAWMTRKSEETITPWNFEEVVDKGASAQSFIERMTNFDKNLPNEKVLPKHSLLYEYFTVYNELTKVKYVTEGMRKPAFLSGEQKKAIVDLLFKTNRKVTVKQLKEDYFKKIECFDSVEISGVEDRFNASLGTYHDLLKIIKDKDFLDNEENEDILEDIVLTLTLFEDREMIEERLKTYAHLFDDKVMKQLKRRRYTGWGRLSRKLINGIRDKQSGKTILDFLKSDGFANRNFMQLIHDDSLTFKEDIQKAQVSGQGDSLHEHIANLAGSPAIKKGILQTVKVVDELVKVMGRHKPENIVIEMARENQTTQKGQKNSRERMKRIEEGIKELGSQILKEHPVENTQLQNEKLYLYYLQNGRDMYVDQELDINRLSDYDVDHIVPQSFLKDDSIDNKVLTRSDKARGKSDNVPSEEVVKKMKNYWRQLLNAKLITQRKFDNLTKAERGGLSELDKAGFIKRQLVETRQITKHVAQILDSRMNTKYDENDKLIREVKVITLKSKLVSDFRKDFQFYKVREINNYHHAHDAYLNAVVGTALIKKYPKLESEFVYGDYKVYDVRKMIAKSEQEIGKATAKYFFYSNIMNFFKTEITLANGEIRKRPLIETNGETGEIVWDKGRDFATVRKVLSMPQVNIVKKTEVQTGGFSKESILPKRNSDKLIARKKDWDPKKYGGFDSPTVAYSVLVVAKVEKGKSKKLKSVKELLGITIMERSSFEKNPIDFLEAKGYKEVKKDLIIKLPKYSLFELENGRKRMLASAGELQKGNELALPSKYVNFLYLASHYEKLKGSPEDNEQKQLFVEQHKHYLDEIIEQISEFSKRVILADANLDKVLSAYNKHRDKPIREQAENIIHLFTLTNLGAPAAFKYFDTTIDRKRYTSTKEVLDATLIHQSITGLYETRIDLSQLGGDGGGGGGSSPAPGGVLNLEEEYRLHEKPVPSSIDPSWLQLFPTVWAERAGMGLANQVPPVVVELRSGASPVAVRQYPMSKEAREGIRPHIQRFLDLGVLVPCQSPWNTPLLPVKKPGTNDYRPVQDLREINKRVQDIHPTVPNPYNLLSSLPPSHTWYSVLDLKDAFFCLKLHPNSQPLFAFEWRDPEKGNTGQLTWTRLPQGFKNSPTLFNEALHRDLAPFRALNPQVVLLQYVDDLLVAAPTYRDCKEGTQKLLQELSKLGYRVSAKKAQLCQKEVTYLGYLLKEGKRWLTPARKATVMKIPPPTTPRQVREFLGKAGFCRLFIPGFASLAAPLYPLTKPSIPFIWTEEHQKAFDRIKEALLSAPALALPDLTKPFTLYVDERAGVARGVLTQTLGPWRRPVAYLSKKLDPVASGWPTCLKAVAAVALLLKDADKLTLGQNVTVIASHSLESIVRQPPDRWMTNARMTHYQSLLLNERVSFAPPAVLNPATLLPVESEATPVHRCSEILAEETGTRRDLKDQPLPGVPAWYTDGSSFIAEGKRRAGAAIVDGKRTVWASSLPEGTSAQKAELVALTQALRLAEGKDINIYTDSRYAFATAHIHGAIYKQRGWLTSAGKDIKNKEEILALLEAIHLPKRVAIIHCPGHQKGNDPVATGNRRADEAAKQAALSTRVLAETTKPAGKRTADGSEFEKRTADGSEFESPKKKAKVE

SEQ ID NO: 889 - protein, 2092 aa, synthetic construct
MPAAKRVKLDGGDKKYSIGLDIGTNSVGWAVITDEYKVPSKKFKVLGNTDRHSIKKNLIGALLFDSGETAEATRLKRTARRRYTRRKNRICYLQEIFSNEMAKVDDSFFHRLEESFLVEEDKKHERHPIFGNIVDEVAYHEKYPTIYHLRKKLVDSTDKADLRLIYLALAHMIKFRGHFLIEGDLNPDNSDVDKLFIQLVQTYNQLFEENPINASGVDAKAILSARLSKSRRLENLIAQLPGEKKNGLFGNLIALSLGLTPNFKSNFDLAEDAKLQLSKDTYDDDLDNLLAQIGDQYADLFLAAKNLSDAILLSDILRVNTEITKAPLSASMIKRYDEHHQDLTLLKALVRQQLPEKYKEIFFDQSKNGYAGYIDGGASQEEFYKFIKPILEKMDGTEELLVKLNREDLLRKQRTFDNGSIPHQIHLGELHAILRRQEDFYPFLKDNREKIEKILTFRIPYYVGPLARGNSRFAWMTRKSEETITPWNFEEVVDKGASAQSFIERMTNFDKNLPNEKVLPKHSLLYEYFTVYNELTKVKYVTEGMRKPAFLSGEQKKAIVDLLFKTNRKVTVKQLKEDYFKKIECFDSVEISGVEDRFNASLGTYHDLLKIIKDKDFLDNEENEDILEDIVLTLTLFEDREMIEERLKTYAHLFDDKVMKQLKRRRYTGWGRLSRKLINGIRDKQSGKTILDFLKSDGFANRNFMQLIHDDSLTFKEDIQKAQVSGQGDSLHEHIANLAGSPAIKKGILQTVKVVDELVKVMGRHKPENIVIEMARENQTTQKGQKNSRERMKRIEEGIKELGSQILKEHPVENTQLQNEKLYLYYLQNGRDMYVDQELDINRLSDYDVDHIVPQSFLKDDSIDNKVLTRSDKARGKSDNVPSEEVVKKMKNYWRQLLNAKLITQRKFDNLTKAERGGLSELDKAGFIKRQLVETRQITKHVAQILDSRMNTKYDENDKLIREVKVITLKSKLVSDFRKDFQFYKVREINNYHHAHDAYLNAVVGTALIKKYPKLESEFVYGDYKVYDVRKMIAKSEQEIGKATAKYFFYSNIMNFFKTEITLANGEIRKRPLIETNGETGEIVWDKGRDFATVRKVLSMPQVNIVKKTEVQTGGFSKESILPKRNSDKLIARKKDWDPKKYGGFDSPTVAYSVLVVAKVEKGKSKKLKSVKELLGITIMERSSFEKNPIDFLEAKGYKEVKKDLIIKLPKYSLFELENGRKRMLASAGELQKGNELALPSKYVNFLYLASHYEKLKGSPEDNEQKQLFVEQHKHYLDEIIEQISEFSKRVILADANLDKVLSAYNKHRDKPIREQAENIIHLFTLTNLGAPAAFKYFDTTIDRKRYTSTKEVLDATLIHQSITGLYETRIDLSQLGGDGGPAPGGSGGGGGVLNLEEEYRLHEKPVPSSIDPSWLQLFPTVWAERAGMGLANQVPPVVVELRSGASPVAVRQYPMSKEAREGIRPHIQRFLDLGVLVPCQSPWNTPLLPVKKPGTNDYRPVQDLREINKRVQDIHPTVPNPYNLLSSLPPSHTWYSVLDLKDAFFCLKLHPNSQPLFAFEWRDPEKGNTGQLTWTRLPQGFKNSPTLFNEALHRDLAPFRALNPQVVLLQYVDDLLVAAPTYRDCKEGTQKLLQELSKLGYRVSAKKAQLCQKEVTYLGYLLKEGKRWLTPARKATVMKIPPPTTPRQVREFLGKAGFCRLFIPGFASLAAPLYPLTKPSIPFIWTEEHQKAFDRIKEALLSAPALALPDLTKPFTLYVDERAGVARGVLTQTLGPWRRPVAYLSKKLDPVASGWPTCLKAVAAVALLLKDADKLTLGQNVTVIASHSLESIVRQPPDRWMTNARMTHYQSLLLNERVSFAPPAVLNPATLLPVESEATPVHRCSEILAEETGTRRDLKDQPLPGVPAWYTDGSSFIAEGKRRAGAAIVDGKRTVWASSLPEGTSAQKAELVALTQALRLAEGKDINIYTDSRYAFATAHIHGAIYKQRGWLTSAGKDIKNKEEILALLEAIHLPKRVAIIHCPGHQKGNDPVATGNRRADEAAKQAALSTRVLAETTKPAGKRTADGSEFEKRTADGSEFESPKKKAKVE

SEQ ID NO: 890 - protein, 2096 aa, synthetic construct
MPAAKRVKLDGGDKKYSIGLDIGTNSVGWAVITDEYKVPSKKFKVLGNTDRHSIKKNLIGALLFDSGETAEATRLKRTARRRYTRRKNRICYLQEIFSNEMAKVDDSFFHRLEESFLVEEDKKHERHPIFGNIVDEVAYHEKYPTIYHLRKKLVDSTDKADLRLIYLALAHMIKFRGHFLIEGDLNPDNSDVDKLFIQLVQTYNQLFEENPINASGVDAKAILSARLSKSRRLENLIAQLPGEKKNGLFGNLIALSLGLTPNFKSNFDLAEDAKLQLSKDTYDDDLDNLLAQIGDQYADLFLAAKNLSDAILLSDILRVNTEITKAPLSASMIKRYDEHHQDLTLLKALVRQQLPEKYKEIFFDQSKNGYAGYIDGGASQEEFYKFIKPILEKMDGTEELLVKLNREDLLRKQRTFDNGSIPHQIHLGELHAILRRQEDFYPFLKDNREKIEKILTFRIPYYVGPLARGNSRFAWMTRKSEETITPWNFEEVVDKGASAQSFIERMTNFDKNLPNEKVLPKHSLLYEYFTVYNELTKVKYVTEGMRKPAFLSGEQKKAIVDLLFKTNRKVTVKQLKEDYFKKIECFDSVEISGVEDRFNASLGTYHDLLKIIKDKDFLDNEENEDILEDIVLTLTLFEDREMIEERLKTYAHLFDDKVMKQLKRRRYTGWGRLSRKLINGIRDKQSGKTILDFLKSDGFANRNFMQLIHDDSLTFKEDIQKAQVSGQGDSLHEHIANLAGSPAIKKGILQTVKVVDELVKVMGRHKPENIVIEMARENQTTQKGQKNSRERMKRIEEGIKELGSQILKEHPVENTQLQNEKLYLYYLQNGRDMYVDQELDINRLSDYDVDHIVPQSFLKDDSIDNKVLTRSDKARGKSDNVPSEEVVKKMKNYWRQLLNAKLITQRKFDNLTKAERGGLSELDKAGFIKRQLVETRQITKHVAQILDSRMNTKYDENDKLIREVKVITLKSKLVSDFRKDFQFYKVREINNYHHAHDAYLNAVVGTALIKKYPKLESEFVYGDYKVYDVRKMIAKSEQEIGKATAKYFFYSNIMNFFKTEITLANGEIRKRPLIETNGETGEIVWDKGRDFATVRKVLSMPQVNIVKKTEVQTGGFSKESILPKRNSDKLIARKKDWDPKKYGGFDSPTVAYSVLVVAKVEKGKSKKLKSVKELLGITIMERSSFEKNPIDFLEAKGYKEVKKDLIIKLPKYSLFELENGRKRMLASAGELQKGNELALPSKYVNFLYLASHYEKLKGSPEDNEQKQLFVEQHKHYLDEIIEQISEFSKRVILADANLDKVLSAYNKHRDKPIREQAENIIHLFTLTNLGAPAAFKYFDTTIDRKRYTSTKEVLDATLIHQSITGLYETRIDLSQLGGDGGPAPAPAPAPAPAPGGVLNLEEEYRLHEKPVPSSIDPSWLQLFPTVWAERAGMGLANQVPPVVVELRSGASPVAVRQYPMSKEAREGIRPHIQRFLDLGVLVPCQSPWNTPLLPVKKPGTNDYRPVQDLREINKRVQDIHPTVPNPYNLLSSLPPSHTWYSVLDLKDAFFCLKLHPNSQPLFAFEWRDPEKGNTGQLTWTRLPQGFKNSPTLFNEALHRDLAPFRALNPQVVLLQYVDDLLVAAPTYRDCKEGTQKLLQELSKLGYRVSAKKAQLCQKEVTYLGYLLKEGKRWLTPARKATVMKIPPPTTPRQVREFLGKAGFCRLFIPGFASLAAPLYPLTKPSIPFIWTEEHQKAFDRIKEALLSAPALALPDLTKPFTLYVDERAGVARGVLTQTLGPWRRPVAYLSKKLDPVASGWPTCLKAVAAVALLLKDADKLTLGQNVTVIASHSLESIVRQPPDRWMTNARMTHYQSLLLNERVSFAPPAVLNPATLLPVESEATPVHRCSEILAEETGTRRDLKDQPLPGVPAWYTDGSSFIAEGKRRAGAAIVDGKRTVWASSLPEGTSAQKAELVALTQALRLAEGKDINIYTDSRYAFATAHIHGAIYKQRGWLTSAGKDIKNKEEILALLEAIHLPKRVAIIHCPGHQKGNDPVATGNRRADEAAKQAALSTRVLAETTKPAGKRTADGSEFEKRTADGSEFESPKKKAKVE

SEQ ID NO: 891 - protein, 2094 aa, synthetic construct
MPAAKRVKLDGGDKKYSIGLDIGTNSVGWAVITDEYKVPSKKFKVLGNTDRHSIKKNLIGALLFDSGETAEATRLKRTARRRYTRRKNRICYLQEIFSNEMAKVDDSFFHRLEESFLVEEDKKHERHPIFGNIVDEVAYHEKYPTIYHLRKKLVDSTDKADLRLIYLALAHMIKFRGHFLIEGDLNPDNSDVDKLFIQLVQTYNQLFEENPINASGVDAKAILSARLSKSRRLENLIAQLPGEKKNGLFGNLIALSLGLTPNFKSNFDLAEDAKLQLSKDTYDDDLDNLLAQIGDQYADLFLAAKNLSDAILLSDILRVNTEITKAPLSASMIKRYDEHHQDLTLLKALVRQQLPEKYKEIFFDQSKNGYAGYIDGGASQEEFYKFIKPILEKMDGTEELLVKLNREDLLRKQRTFDNGSIPHQIHLGELHAILRRQEDFYPFLKDNREKIEKILTFRIPYYVGPLARGNSRFAWMTRKSEETITPWNFEEVVDKGASAQSFIERMTNFDKNLPNEKVLPKHSLLYEYFTVYNELTKVKYVTEGMRKPAFLSGEQKKAIVDLLFKTNRKVTVKQLKEDYFKKIECFDSVEISGVEDRFNASLGTYHDLLKIIKDKDFLDNEENEDILEDIVLTLTLFEDREMIEERLKTYAHLFDDKVMKQLKRRRYTGWGRLSRKLINGIRDKQSGKTILDFLKSDGFANRNFMQLIHDDSLTFKEDIQKAQVSGQGDSLHEHIANLAGSPAIKKGILQTVKVVDELVKVMGRHKPENIVIEMARENQTTQKGQKNSRERMKRIEEGIKELGSQILKEHPVENTQLQNEKLYLYYLQNGRDMYVDQELDINRLSDYDVDHIVPQSFLKDDSIDNKVLTRSDKARGKSDNVPSEEVVKKMKNYWRQLLNAKLITQRKFDNLTKAERGGLSELDKAGFIKRQLVETRQITKHVAQILDSRMNTKYDENDKLIREVKVITLKSKLVSDFRKDFQFYKVREINNYHHAHDAYLNAVVGTALIKKYPKLESEFVYGDYKVYDVRKMIAKSEQEIGKATAKYFFYSNIMNFFKTEITLANGEIRKRPLIETNGETGEIVWDKGRDFATVRKVLSMPQVNIVKKTEVQTGGFSKESILPKRNSDKLIARKKDWDPKKYGGFDSPTVAYSVLVVAKVEKGKSKKLKSVKELLGITIMERSSFEKNPIDFLEAKGYKEVKKDLIIKLPKYSLFELENGRKRMLASAGELQKGNELALPSKYVNFLYLASHYEKLKGSPEDNEQKQLFVEQHKHYLDEIIEQISEFSKRVILADANLDKVLSAYNKHRDKPIREQAENIIHLFTLTNLGAPAAFKYFDTTIDRKRYTSTKEVLDATLIHQSITGLYETRIDLSQLGGDGGEAAAKGSSGGGGGVLNLEEEYRLHEKPVPSSIDPSWLQLFPTVWAERAGMGLANQVPPVVVELRSGASPVAVRQYPMSKEAREGIRPHIQRFLDLGVLVPCQSPWNTPLLPVKKPGTNDYRPVQDLREINKRVQDIHPTVPNPYNLLSSLPPSHTWYSVLDLKDAFFCLKLHPNSQPLFAFEWRDPEKGNTGQLTWTRLPQGFKNSPTLFNEALHRDLAPFRALNPQVVLLQYVDDLLVAAPTYRDCKEGTQKLLQELSKLGYRVSAKKAQLCQKEVTYLGYLLKEGKRWLTPARKATVMKIPPPTTPRQVREFLGKAGFCRLFIPGFASLAAPLYPLTKPSIPFIWTEEHQKAFDRIKEALLSAPALALPDLTKPFTLYVDERAGVARGVLTQTLGPWRRPVAYLSKKLDPVASGWPTCLKAVAAVALLLKDADKLTLGQNVTVIASHSLESIVRQPPDRWMTNARMTHYQSLLLNERVSFAPPAVLNPATLLPVESEATPVHRCSEILAEETGTRRDLKDQPLPGVPAWYTDGSSFIAEGKRRAGAAIVDGKRTVWASSLPEGTSAQKAELVALTQALRLAEGKDINIYTDSRYAFATAHIHGAIYKQRGWLTSAGKDIKNKEEILALLEAIHLPKRVAIIHCPGHQKGNDPVATGNRRADEAAKQAALSTRVLAETTKPAGKRTADGSEFEKRTADGSEFESPKKKAKVE

SEQ ID NO: 892 - protein, 2094 aa, synthetic construct
MPAAKRVKLDGGDKKYSIGLDIGTNSVGWAVITDEYKVPSKKFKVLGNTDRHSIKKNLIGALLFDSGETAEATRLKRTARRRYTRRKNRICYLQEIFSNEMAKVDDSFFHRLEESFLVEEDKKHERHPIFGNIVDEVAYHEKYPTIYHLRKKLVDSTDKADLRLIYLALAHMIKFRGHFLIEGDLNPDNSDVDKLFIQLVQTYNQLFEENPINASGVDAKAILSARLSKSRRLENLIAQLPGEKKNGLFGNLIALSLGLTPNFKSNFDLAEDAKLQLSKDTYDDDLDNLLAQIGDQYADLFLAAKNLSDAILLSDILRVNTEITKAPLSASMIKRYDEHHQDLTLLKALVRQQLPEKYKEIFFDQSKNGYAGYIDGGASQEEFYKFIKPILEKMDGTEELLVKLNREDLLRKQRTFDNGSIPHQIHLGELHAILRRQEDFYPFLKDNREKIEKILTFRIPYYVGPLARGNSRFAWMTRKSEETITPWNFEEVVDKGASAQSFIERMTNFDKNLPNEKVLPKHSLLYEYFTVYNELTKVKYVTEGMRKPAFLSGEQKKAIVDLLFKTNRKVTVKQLKEDYFKKIECFDSVEISGVEDRFNASLGTYHDLLKIIKDKDFLDNEENEDILEDIVLTLTLFEDREMIEERLKTYAHLFDDKVMKQLKRRRYTGWGRLSRKLINGIRDKQSGKTILDFLKSDGFANRNFMQLIHDDSLTFKEDIQKAQVSGQGDSLHEHIANLAGSPAIKKGILQTVKVVDELVKVMGRHKPENIVIEMARENQTTQKGQKNSRERMKRIEEGIKELGSQILKEHPVENTQLQNEKLYLYYLQNGRDMYVDQELDINRLSDYDVDHIVPQSFLKDDSIDNKVLTRSDKARGKSDNVPSEEVVKKMKNYWRQLLNAKLITQRKFDNLTKAERGGLSELDKAGFIKRQLVETRQITKHVAQILDSRMNTKYDENDKLIREVKVITLKSKLVSDFRKDFQFYKVREINNYHHAHDAYLNAVVGTALIKKYPKLESEFVYGDYKVYDVRKMIAKSEQEIGKATAKYFFYSNIMNFFKTEITLANGEIRKRPLIETNGETGEIVWDKGRDFATVRKVLSMPQVNIVKKTEVQTGGFSKESILPKRNSDKLIARKKDWDPKKYGGFDSPTVAYSVLVVAKVEKGKSKKLKSVKELLGITIMERSSFEKNPIDFLEAKGYKEVKKDLIIKLPKYSLFELENGRKRMLASAGELQKGNELALPSKYVNFLYLASHYEKLKGSPEDNEQKQLFVEQHKHYLDEIIEQISEFSKRVILADANLDKVLSAYNKHRDKPIREQAENIIHLFTLTNLGAPAAFKYFDTTIDRKRYTSTKEVLDATLIHQSITGLYETRIDLSQLGGDGGPAPEAAAKGSSGGVLNLEEEYRLHEKPVPSSIDPSWLQLFPTVWAERAGMGLANQVPPVVVELRSGASPVAVRQYPMSKEAREGIRPHIQRFLDLGVLVPCQSPWNTPLLPVKKPGTNDYRPVQDLREINKRVQDIHPTVPNPYNLLSSLPPSHTWYSVLDLKDAFFCLKLHPNSQPLFAFEWRDPEKGNTGQLTWTRLPQGFKNSPTLFNEALHRDLAPFRALNPQVVLLQYVDDLLVAAPTYRDCKEGTQKLLQELSKLGYRVSAKKAQLCQKEVTYLGYLLKEGKRWLTPARKATVMKIPPPTTPRQVREFLGKAGFCRLFIPGFASLAAPLYPLTKPSIPFIWTEEHQKAFDRIKEALLSAPALALPDLTKPFTLYVDERAGVARGVLTQTLGPWRRPVAYLSKKLDPVASGWPTCLKAVAAVALLLKDADKLTLGQNVTVIASHSLESIVRQPPDRWMTNARMTHYQSLLLNERVSFAPPAVLNPATLLPVESEATPVHRCSEILAEETGTRRDLKDQPLPGVPAWYTDGSSFIAEGKRRAGAAIVDGKRTVWASSLPEGTSAQKAELVALTQALRLAEGKDINIYTDSRYAFATAHIHGAIYKQRGWLTSAGKDIKNKEEILALLEAIHLPKRVAIIHCPGHQKGNDPVATGNRRADEAAKQAALSTRVLAETTKPAGKRTADGSEFEKRTADGSEFESPKKKAKVE

SEQ ID NO: 893 - protein, 2113 aa, synthetic construct
MPAAKRVKLDGGDKKYSIGLDIGTNSVGWAVITDEYKVPSKKFKVLGNTDRHSIKKNLIGALLFDSGETAEATRLKRTARRRYTRRKNRICYLQEIFSNEMAKVDDSFFHRLEESFLVEEDKKHERHPIFGNIVDEVAYHEKYPTIYHLRKKLVDSTDKADLRLIYLALAHMIKFRGHFLIEGDLNPDNSDVDKLFIQLVQTYNQLFEENPINASGVDAKAILSARLSKSRRLENLIAQLPGEKKNGLFGNLIALSLGLTPNFKSNFDLAEDAKLQLSKDTYDDDLDNLLAQIGDQYADLFLAAKNLSDAILLSDILRVNTEITKAPLSASMIKRYDEHHQDLTLLKALVRQQLPEKYKEIFFDQSKNGYAGYIDGGASQEEFYKFIKPILEKMDGTEELLVKLNREDLLRKQRTFDNGSIPHQIHLGELHAILRRQEDFYPFLKDNREKIEKILTFRIPYYVGPLARGNSRFAWMTRKSEETITPWNFEEVVDKGASAQSFIERMTNFDKNLPNEKVLPKHSLLYEYFTVYNELTKVKYVTEGMRKPAFLSGEQKKAIVDLLFKTNRKVTVKQLKEDYFKKIECFDSVEISGVEDRFNASLGTYHDLLKIIKDKDFLDNEENEDILEDIVLTLTLFEDREMIEERLKTYAHLFDDKVMKQLKRRRYTGWGRLSRKLINGIRDKQSGKTILDFLKSDGFANRNFMQLIHDDSLTFKEDIQKAQVSGQGDSLHEHIANLAGSPAIKKGILQTVKVVDELVKVMGRHKPENIVIEMARENQTTQKGQKNSRERMKRIEEGIKELGSQILKEHPVENTQLQNEKLYLYYLQNGRDMYVDQELDINRLSDYDVDHIVPQSFLKDDSIDNKVLTRSDKARGKSDNVPSEEVVKKMKNYWRQLLNAKLITQRKFDNLTKAERGGLSELDKAGFIKRQLVETRQITKHVAQILDSRMNTKYDENDKLIREVKVITLKSKLVSDFRKDFQFYKVREINNYHHAHDAYLNAVVGTALIKKYPKLESEFVYGDYKVYDVRKMIAKSEQEIGKATAKYFFYSNIMNFFKTEITLANGEIRKRPLIETNGETGEIVWDKGRDFATVRKVLSMPQVNIVKKTEVQTGGFSKESILPKRNSDKLIARKKDWDPKKYGGFDSPTVAYSVLVVAKVEKGKSKKLKSVKELLGITIMERSSFEKNPIDFLEAKGYKEVKKDLIIKLPKYSLFELENGRKRMLASAGELQKGNELALPSKYVNFLYLASHYEKLKGSPEDNEQKQLFVEQHKHYLDEIIEQISEFSKRVILADANLDKVLSAYNKHRDKPIREQAENIIHLFTLTNLGAPAAFKYFDTTIDRKRYTSTKEVLDATLIHQSITGLYETRIDLSQLGGDGGEAAAKEAAAKEAAAKEAAAKEAAAKEAAAKGGVLNLEEEYRLHEKPVPSSIDPSWLQLFPTVWAERAGMGLANQVPPVVVELRSGASPVAVRQYPMSKEAREGIRPHIQRFLDLGVLVPCQSPWNTPLLPVKKPGTNDYRPVQDLREINKRVQDIHPTVPNPYNLLSSLPPSHTWYSVLDLKDAFFCLKLHPNSQPLFAFEWRDPEKGNTGQLTWTRLPQGFKNSPTLFNEALHRDLAPFRALNPQVVLLQYVDDLLVAAPTYRDCKEGTQKLLQELSKLGYRVSAKKAQLCQKEVTYLGYLLKEGKRWLTPARKATVMKIPPPTTPRQVREFLGKAGFCRLFIPGFASLAAPLYPLTKPSIPFIWTEEHQKAFDRIKEALLSAPALALPDLTKPFTLYVDERAGVARGVLTQTLGPWRRPVAYLSKKLDPVASGWPTCLKAVAAVALLLKDADKLTLGQNVTVIASHSLESIVRQPPDRWMTNARMTHYQSLLLNERVSFAPPAVLNPATLLPVESEATPVHRCSEILAEETGTRRDLKDQPLPGVPAWYTDGSSFIAEGKRRAGAAIVDGKRTVWASSLPEGTSAQKAELVALTQALRLAEGKDINIYTDSRYAFATAHIHGAIYKQRGWLTSAGKDIKNKEEILALLEAIHLPKRVAIIHCPGHQKGNDPVATGNRRADEAAKQAALSTRVLAETTKPAGKRTADGSEFEKRTADGSEFESPKKKAKVE

SEQ ID NO: 894 - protein, 2088 aa, synthetic construct
MPAAKRVKLDGGDKKYSIGLDIGTNSVGWAVITDEYKVPSKKFKVLGNTDRHSIKKNLIGALLFDSGETAEATRLKRTARRRYTRRKNRICYLQEIFSNEMAKVDDSFFHRLEESFLVEEDKKHERHPIFGNIVDEVAYHEKYPTIYHLRKKLVDSTDKADLRLIYLALAHMIKFRGHFLIEGDLNPDNSDVDKLFIQLVQTYNQLFEENPINASGVDAKAILSARLSKSRRLENLIAQLPGEKKNGLFGNLIALSLGLTPNFKSNFDLAEDAKLQLSKDTYDDDLDNLLAQIGDQYADLFLAAKNLSDAILLSDILRVNTEITKAPLSASMIKRYDEHHQDLTLLKALVRQQLPEKYKEIFFDQSKNGYAGYIDGGASQEEFYKFIKPILEKMDGTEELLVKLNREDLLRKQRTFDNGSIPHQIHLGELHAILRRQEDFYPFLKDNREKIEKILTFRIPYYVGPLARGNSRFAWMTRKSEETITPWNFEEVVDKGASAQSFIERMTNFDKNLPNEKVLPKHSLLYEYFTVYNELTKVKYVTEGMRKPAFLSGEQKKAIVDLLFKTNRKVTVKQLKEDYFKKIECFDSVEISGVEDRFNASLGTYHDLLKIIKDKDFLDNEENEDILEDIVLTLTLFEDREMIEERLKTYAHLFDDKVMKQLKRRRYTGWGRLSRKLINGIRDKQSGKTILDFLKSDGFANRNFMQLIHDDSLTFKEDIQKAQVSGQGDSLHEHIANLAGSPAIKKGILQTVKVVDELVKVMGRHKPENIVIEMARENQTTQKGQKNSRERMKRIEEGIKELGSQILKEHPVENTQLQNEKLYLYYLQNGRDMYVDQELDINRLSDYDVDHIVPQSFLKDDSIDNKVLTRSDKARGKSDNVPSEEVVKKMKNYWRQLLNAKLITQRKFDNLTKAERGGLSELDKAGFIKRQLVETRQITKHVAQILDSRMNTKYDENDKLIREVKVITLKSKLVSDFRKDFQFYKVREINNYHHAHDAYLNAVVGTALIKKYPKLESEFVYGDYKVYDVRKMIAKSEQEIGKATAKYFFYSNIMNFFKTEITLANGEIRKRPLIETNGETGEIVWDKGRDFATVRKVLSMPQVNIVKKTEVQTGGFSKESILPKRNSDKLIARKKDWDPKKYGGFDSPTVAYSVLVVAKVEKGKSKKLKSVKELLGITIMERSSFEKNPIDFLEAKGYKEVKKDLIIKLPKYSLFELENGRKRMLASAGELQKGNELALPSKYVNFLYLASHYEKLKGSPEDNEQKQLFVEQHKHYLDEIIEQISEFSKRVILADANLDKVLSAYNKHRDKPIREQAENIIHLFTLTNLGAPAAFKYFDTTIDRKRYTSTKEVLDATLIHQSITGLYETRIDLSQLGGDGGEAAAKGGVLNLEEEYRLHEKPVPSSIDPSWLQLFPTVWAERAGMGLANQVPPVVVELRSGASPVAVRQYPMSKEAREGIRPHIQRFLDLGVLVPCQSPWNTPLLPVKKPGTNDYRPVQDLREINKRVQDIHPTVPNPYNLLSSLPPSHTWYSVLDLKDAFFCLKLHPNSQPLFAFEWRDPEKGNTGQLTWTRLPQGFKNSPTLFNEALHRDLAPFRALNPQVVLLQYVDDLLVAAPTYRDCKEGTQKLLQELSKLGYRVSAKKAQLCQKEVTYLGYLLKEGKRWLTPARKATVMKIPPPTTPRQVREFLGKAGFCRLFIPGFASLAAPLYPLTKPSIPFIWTEEHQKAFDRIKEALLSAPALALPDLTKPFTLYVDERAGVARGVLTQTLGPWRRPVAYLSKKLDPVASGWPTCLKAVAAVALLLKDADKLTLGQNVTVIASHSLESIVRQPPDRWMTNARMTHYQSLLLNERVSFAPPAVLNPATLLPVESEATPVHRCSEILAEETGTRRDLKDQPLPGVPAWYTDGSSFIAEGKRRAGAAIVDGKRTVWASSLPEGTSAQKAELVALTQALRLAEGKDINIYTDSRYAFATAHIHGAIYKQRGWLTSAGKDIKNKEEILALLEAIHLPKRVAIIHCPGHQKGNDPVATGNRRADEAAKQAALSTRVLAETTKPAGKRTADGSEFEKRTADGSEFESPKKKAKVE

SEQ ID NO: 895 - protein, 2088 aa, synthetic construct
MPAAKRVKLDGGDKKYSIGLDIGTNSVGWAVITDEYKVPSKKFKVLGNTDRHSIKKNLIGALLFDSGETAEATRLKRTARRRYTRRKNRICYLQEIFSNEMAKVDDSFFHRLEESFLVEEDKKHERHPIFGNIVDEVAYHEKYPTIYHLRKKLVDSTDKADLRLIYLALAHMIKFRGHFLIEGDLNPDNSDVDKLFIQLVQTYNQLFEENPINASGVDAKAILSARLSKSRRLENLIAQLPGEKKNGLFGNLIALSLGLTPNFKSNFDLAEDAKLQLSKDTYDDDLDNLLAQIGDQYADLFLAAKNLSDAILLSDILRVNTEITKAPLSASMIKRYDEHHQDLTLLKALVRQQLPEKYKEIFFDQSKNGYAGYIDGGASQEEFYKFIKPILEKMDGTEELLVKLNREDLLRKQRTFDNGSIPHQIHLGELHAILRRQEDFYPFLKDNREKIEKILTFRIPYYVGPLARGNSRFAWMTRKSEETITPWNFEEVVDKGASAQSFIERMTNFDKNLPNEKVLPKHSLLYEYFTVYNELTKVKYVTEGMRKPAFLSGEQKKAIVDLLFKTNRKVTVKQLKEDYFKKIECFDSVEISGVEDRFNASLGTYHDLLKIIKDKDFLDNEENEDILEDIVLTLTLFEDREMIEERLKTYAHLFDDKVMKQLKRRRYTGWGRLSRKLINGIRDKQSGKTILDFLKSDGFANRNFMQLIHDDSLTFKEDIQKAQVSGQGDSLHEHIANLAGSPAIKKGILQTVKVVDELVKVMGRHKPENIVIEMARENQTTQKGQKNSRERMKRIEEGIKELGSQILKEHPVENTQLQNEKLYLYYLQNGRDMYVDQELDINRLSDYDVDHIVPQSFLKDDSIDNKVLTRSDKARGKSDNVPSEEVVKKMKNYWRQLLNAKLITQRKFDNLTKAERGGLSELDKAGFIKRQLVETRQITKHVAQILDSRMNTKYDENDKLIREVKVITLKSKLVSDFRKDFQFYKVREINNYHHAHDAYLNAVVGTALIKKYPKLESEFVYGDYKVYDVRKMIAKSEQEIGKATAKYFFYSNIMNFFKTEITLANGEIRKRPLIETNGETGEIVWDKGRDFATVRKVLSMPQVNIVKKTEVQTGGFSKESILPKRNSDKLIARKKDWDPKKYGGFDSPTVAYSVLVVAKVEKGKSKKLKSVKELLGITIMERSSFEKNPIDFLEAKGYKEVKKDLIIKLPKYSLFELENGRKRMLASAGELQKGNELALPSKYVNFLYLASHYEKLKGSPEDNEQKQLFVEQHKHYLDEIIEQISEFSKRVILADANLDKVLSAYNKHRDKPIREQAENIIHLFTLTNLGAPAAFKYFDTTIDRKRYTSTKEVLDATLIHQSITGLYETRIDLSQLGGDGGGGGGGGGVLNLEEEYRLHEKPVPSSIDPSWLQLFPTVWAERAGMGLANQVPPVVVELRSGASPVAVRQYPMSKEAREGIRPHIQRFLDLGVLVPCQSPWNTPLLPVKKPGTNDYRPVQDLREINKRVQDIHPTVPNPYNLLSSLPPSHTWYSVLDLKDAFFCLKLHPNSQPLFAFEWRDPEKGNTGQLTWTRLPQGFKNSPTLFNEALHRDLAPFRALNPQVVLLQYVDDLLVAAPTYRDCKEGTQKLLQELSKLGYRVSAKKAQLCQKEVTYLGYLLKEGKRWLTPARKATVMKIPPPTTPRQVREFLGKAGFCRLFIPGFASLAAPLYPLTKPSIPFIWTEEHQKAFDRIKEALLSAPALALPDLTKPFTLYVDERAGVARGVLTQTLGPWRRPVAYLSKKLDPVASGWPTCLKAVAAVALLLKDADKLTLGQNVTVIASHSLESIVRQPPDRWMTNARMTHYQSLLLNERVSFAPPAVLNPATLLPVESEATPVHRCSEILAEETGTRRDLKDQPLPGVPAWYTDGSSFIAEGKRRAGAAIVDGKRTVWASSLPEGTSAQKAELVALTQALRLAEGKDINIYTDSRYAFATAHIHGAIYKQRGWLTSAGKDIKNKEEILALLEAIHLPKRVAIIHCPGHQKGNDPVATGNRRADEAAKQAALSTRVLAETTKPAGKRTADGSEFEKRTADGSEFESPKKKAKVE

SEQ ID NO: 896 - protein, 2094 aa, synthetic construct
MPAAKRVKLDGGDKKYSIGLDIGTNSVGWAVITDEYKVPSKKFKVLGNTDRHSIKKNLIGALLFDSGETAEATRLKRTARRRYTRRKNRICYLQEIFSNEMAKVDDSFFHRLEESFLVEEDKKHERHPIFGNIVDEVAYHEKYPTIYHLRKKLVDSTDKADLRLIYLALAHMIKFRGHFLIEGDLNPDNSDVDKLFIQLVQTYNQLFEENPINASGVDAKAILSARLSKSRRLENLIAQLPGEKKNGLFGNLIALSLGLTPNFKSNFDLAEDAKLQLSKDTYDDDLDNLLAQIGDQYADLFLAAKNLSDAILLSDILRVNTEITKAPLSASMIKRYDEHHQDLTLLKALVRQQLPEKYKEIFFDQSKNGYAGYIDGGASQEEFYKFIKPILEKMDGTEELLVKLNREDLLRKQRTFDNGSIPHQIHLGELHAILRRQEDFYPFLKDNREKIEKILTFRIPYYVGPLARGNSRFAWMTRKSEETITPWNFEEVVDKGASAQSFIERMTNFDKNLPNEKVLPKHSLLYEYFTVYNELTKVKYVTEGMRKPAFLSGEQKKAIVDLLFKTNRKVTVKQLKEDYFKKIECFDSVEISGVEDRFNASLGTYHDLLKIIKDKDFLDNEENEDILEDIVLTLTLFEDREMIEERLKTYAHLFDDKVMKQLKRRRYTGWGRLSRKLINGIRDKQSGKTILDFLKSDGFANRNFMQLIHDDSLTFKEDIQKAQVSGQGDSLHEHIANLAGSPAIKKGILQTVKVVDELVKVMGRHKPENIVIEMARENQTTQKGQKNSRERMKRIEEGIKELGSQILKEHPVENTQLQNEKLYLYYLQNGRDMYVDQELDINRLSDYDVDHIVPQSFLKDDSIDNKVLTRSDKARGKSDNVPSEEVVKKMKNYWRQLLNAKLITQRKFDNLTKAERGGLSELDKAGFIKRQLVETRQITKHVAQILDSRMNTKYDENDKLIREVKVITLKSKLVSDFRKDFQFYKVREINNYHHAHDAYLNAVVGTALIKKYPKLESEFVYGDYKVYDVRKMIAKSEQEIGKATAKYFFYSNIMNFFKTEITLANGEIRKRPLIETNGETGEIVWDKGRDFATVRKVLSMPQVNIVKKTEVQTGGFSKESILPKRNSDKLIARKKDWDPKKYGGFDSPTVAYSVLVVAKVEKGKSKKLKSVKELLGITIMERSSFEKNPIDFLEAKGYKEVKKDLIIKLPKYSLFELENGRKRMLASAGELQKGNELALPSKYVNFLYLASHYEKLKGSPEDNEQKQLFVEQHKHYLDEIIEQISEFSKRVILADANLDKVLSAYNKHRDKPIREQAENIIHLFTLTNLGAPAAFKYFDTTIDRKRYTSTKEVLDATLIHQSITGLYETRIDLSQLGGDGGPAPEAAAKGGGGGVLNLEEEYRLHEKPVPSSIDPSWLQLFPTVWAERAGMGLANQVPPVVVELRSGASPVAVRQYPMSKEAREGIRPHIQRFLDLGVLVPCQSPWNTPLLPVKKPGTNDYRPVQDLREINKRVQDIHPTVPNPYNLLSSLPPSHTWYSVLDLKDAFFCLKLHPNSQPLFAFEWRDPEKGNTGQLTWTRLPQGFKNSPTLFNEALHRDLAPFRALNPQVVLLQYVDDLLVAAPTYRDCKEGTQKLLQELSKLGYRVSAKKAQLCQKEVTYLGYLLKEGKRWLTPARKATVMKIPPPTTPRQVREFLGKAGFCRLFIPGFASLAAPLYPLTKPSIPFIWTEEHQKAFDRIKEALLSAPALALPDLTKPFTLYVDERAGVARGVLTQTLGPWRRPVAYLSKKLDPVASGWPTCLKAVAAVALLLKDADKLTLGQNVTVIASHSLESIVRQPPDRWMTNARMTHYQSLLLNERVSFAPPAVLNPATLLPVESEATPVHRCSEILAEETGTRRDLKDQPLPGVPAWYTDGSSFIAEGKRRAGAAIVDGKRTVWASSLPEGTSAQKAELVALTQALRLAEGKDINIYTDSRYAFATAHIHGAIYKQRGWLTSAGKDIKNKEEILALLEAIHLPKRVAIIHCPGHQKGNDPVATGNRRADEAAKQAALSTRVLAETTKPAGKRTADGSEFEKRTADGSEFESPKKKAKVE

SEQ ID NO: 897 - protein, 2091 aa, synthetic construct
MPAAKRVKLDGGDKKYSIGLDIGTNSVGWAVITDEYKVPSKKFKVLGNTDRHSIKKNLIGALLFDSGETAEATRLKRTARRRYTRRKNRICYLQEIFSNEMAKVDDSFFHRLEESFLVEEDKKHERHPIFGNIVDEVAYHEKYPTIYHLRKKLVDSTDKADLRLIYLALAHMIKFRGHFLIEGDLNPDNSDVDKLFIQLVQTYNQLFEENPINASGVDAKAILSARLSKSRRLENLIAQLPGEKKNGLFGNLIALSLGLTPNFKSNFDLAEDAKLQLSKDTYDDDLDNLLAQIGDQYADLFLAAKNLSDAILLSDILRVNTEITKAPLSASMIKRYDEHHQDLTLLKALVRQQLPEKYKEIFFDQSKNGYAGYIDGGASQEEFYKFIKPILEKMDGTEELLVKLNREDLLRKQRTFDNGSIPHQIHLGELHAILRRQEDFYPFLKDNREKIEKILTFRIPYYVGPLARGNSRFAWMTRKSEETITPWNFEEVVDKGASAQSFIERMTNFDKNLPNEKVLPKHSLLYEYFTVYNELTKVKYVTEGMRKPAFLSGEQKKAIVDLLFKTNRKVTVKQLKEDYFKKIECFDSVEISGVEDRFNASLGTYHDLLKIIKDKDFLDNEENEDILEDIVLTLTLFEDREMIEERLKTYAHLFDDKVMKQLKRRRYTGWGRLSRKLINGIRDKQSGKTILDFLKSDGFANRNFMQLIHDDSLTFKEDIQKAQVSGQGDSLHEHIANLAGSPAIKKGILQTVKVVDELVKVMGRHKPENIVIEMARENQTTQKGQKNSRERMKRIEEGIKELGSQILKEHPVENTQLQNEKLYLYYLQNGRDMYVDQELDINRLSDYDVDHIVPQSFLKDDSIDNKVLTRSDKARGKSDNVPSEEVVKKMKNYWRQLLNAKLITQRKFDNLTKAERGGLSELDKAGFIKRQLVETRQITKHVAQILDSRMNTKYDENDKLIREVKVITLKSKLVSDFRKDFQFYKVREINNYHHAHDAYLNAVVGTALIKKYPKLESEFVYGDYKVYDVRKMIAKSEQEIGKATAKYFFYSNIMNFFKTEITLANGEIRKRPLIETNGETGEIVWDKGRDFATVRKVLSMPQVNIVKKTEVQTGGFSKESILPKRNSDKLIARKKDWDPKKYGGFDSPTVAYSVLVVAKVEKGKSKKLKSVKELLGITIMERSSFEKNPIDFLEAKGYKEVKKDLIIKLPKYSLFELENGRKRMLASAGELQKGNELALPSKYVNFLYLASHYEKLKGSPEDNEQKQLFVEQHKHYLDEIIEQISEFSKRVILADANLDKVLSAYNKHRDKPIREQAENIIHLFTLTNLGAPAAFKYFDTTIDRKRYTSTKEVLDATLIHQSITGLYETRIDLSQLGGDGGEAAAKGGSGGVLNLEEEYRLHEKPVPSSIDPSWLQLFPTVWAERAGMGLANQVPPVVVELRSGASPVAVRQYPMSKEAREGIRPHIQRFLDLGVLVPCQSPWNTPLLPVKKPGTNDYRPVQDLREINKRVQDIHPTVPNPYNLLSSLPPSHTWYSVLDLKDAFFCLKLHPNSQPLFAFEWRDPEKGNTGQLTWTRLPQGFKNSPTLFNEALHRDLAPFRALNPQVVLLQYVDDLLVAAPTYRDCKEGTQKLLQELSKLGYRVSAKKAQLCQKEVTYLGYLLKEGKRWLTPARKATVMKIPPPTTPRQVREFLGKAGFCRLFIPGFASLAAPLYPLTKPSIPFIWTEEHQKAFDRIKEALLSAPALALPDLTKPFTLYVDERAGVARGVLTQTLGPWRRPVAYLSKKLDPVASGWPTCLKAVAAVALLLKDADKLTLGQNVTVIASHSLESIVRQPPDRWMTNARMTHYQSLLLNERVSFAPPAVLNPATLLPVESEATPVHRCSEILAEETGTRRDLKDQPLPGVPAWYTDGSSFIAEGKRRAGAAIVDGKRTVWASSLPEGTSAQKAELVALTQALRLAEGKDINIYTDSRYAFATAHIHGAIYKQRGWLTSAGKDIKNKEEILALLEAIHLPKRVAIIHCPGHQKGNDPVATGNRRADEAAKQAALSTRVLAETTKPAGKRTADGSEFEKRTADGSEFESPKKKAKVE

SEQ ID NO: 898 - protein, 2094 aa, synthetic construct
MPAAKRVKLDGGDKKYSIGLDIGTNSVGWAVITDEYKVPSKKFKVLGNTDRHSIKKNLIGALLFDSGETAEATRLKRTARRRYTRRKNRICYLQEIFSNEMAKVDDSFFHRLEESFLVEEDKKHERHPIFGNIVDEVAYHEKYPTIYHLRKKLVDSTDKADLRLIYLALAHMIKFRGHFLIEGDLNPDNSDVDKLFIQLVQTYNQLFEENPINASGVDAKAILSARLSKSRRLENLIAQLPGEKKNGLFGNLIALSLGLTPNFKSNFDLAEDAKLQLSKDTYDDDLDNLLAQIGDQYADLFLAAKNLSDAILLSDILRVNTEITKAPLSASMIKRYDEHHQDLTLLKALVRQQLPEKYKEIFFDQSKNGYAGYIDGGASQEEFYKFIKPILEKMDGTEELLVKLNREDLLRKQRTFDNGSIPHQIHLGELHAILRRQEDFYPFLKDNREKIEKILTFRIPYYVGPLARGNSRFAWMTRKSEETITPWNFEEVVDKGASAQSFIERMTNFDKNLPNEKVLPKHSLLYEYFTVYNELTKVKYVTEGMRKPAFLSGEQKKAIVDLLFKTNRKVTVKQLKEDYFKKIECFDSVEISGVEDRFNASLGTYHDLLKIIKDKDFLDNEENEDILEDIVLTLTLFEDREMIEERLKTYAHLFDDKVMKQLKRRRYTGWGRLSRKLINGIRDKQSGKTILDFLKSDGFANRNFMQLIHDDSLTFKEDIQKAQVSGQGDSLHEHIANLAGSPAIKKGILQTVKVVDELVKVMGRHKPENIVIEMARENQTTQKGQKNSRERMKRIEEGIKELGSQILKEHPVENTQLQNEKLYLYYLQNGRDMYVDQELDINRLSDYDVDHIVPQSFLKDDSIDNKVLTRSDKARGKSDNVPSEEVVKKMKNYWRQLLNAKLITQRKFDNLTKAERGGLSELDKAGFIKRQLVETRQITKHVAQILDSRMNTKYDENDKLIREVKVITLKSKLVSDFRKDFQFYKVREINNYHHAHDAYLNAVVGTALIKKYPKLESEFVYGDYKVYDVRKMIAKSEQEIGKATAKYFFYSNIMNFFKTEITLANGEIRKRPLIETNGETGEIVWDKGRDFATVRKVLSMPQVNIVKKTEVQTGGFSKESILPKRNSDKLIARKKDWDPKKYGGFDSPTVAYSVLVVAKVEKGKSKKLKSVKELLGITIMERSSFEKNPIDFLEAKGYKEVKKDLIIKLPKYSLFELENGRKRMLASAGELQKGNELALPSKYVNFLYLASHYEKLKGSPEDNEQKQLFVEQHKHYLDEIIEQISEFSKRVILADANLDKVLSAYNKHRDKPIREQAENIIHLFTLTNLGAPAAFKYFDTTIDRKRYTSTKEVLDATLIHQSITGLYETRIDLSQLGGDGGGGSPAPEAAAKGGVLNLEEEYRLHEKPVPSSIDPSWLQLFPTVWAERAGMGLANQVPPVVVELRSGASPVAVRQYPMSKEAREGIRPHIQRFLDLGVLVPCQSPWNTPLLPVKKPGTNDYRPVQDLREINKRVQDIHPTVPNPYNLLSSLPPSHTWYSVLDLKDAFFCLKLHPNSQPLFAFEWRDPEKGNTGQLTWTRLPQGFKNSPTLFNEALHRDLAPFRALNPQVVLLQYVDDLLVAAPTYRDCKEGTQKLLQELSKLGYRVSAKKAQLCQKEVTYLGYLLKEGKRWLTPARKATVMKIPPPTTPRQVREFLGKAGFCRLFIPGFASLAAPLYPLTKPSIPFIWTEEHQKAFDRIKEALLSAPALALPDLTKPFTLYVDERAGVARGVLTQTLGPWRRPVAYLSKKLDPVASGWPTCLKAVAAVALLLKDADKLTLGQNVTVIASHSLESIVRQPPDRWMTNARMTHYQSLLLNERVSFAPPAVLNPATLLPVESEATPVHRCSEILAEETGTRRDLKDQPLPGVPAWYTDGSSFIAEGKRRAGAAIVDGKRTVWASSLPEGTSAQKAELVALTQALRLAEGKDINIYTDSRYAFATAHIHGAIYKQRGWLTSAGKDIKNKEEILALLEAIHLPKRVAIIHCPGHQKGNDPVATGNRRADEAAKQAALSTRVLAETTKPAGKRTADGSEFEKRTADGSEFESPKKKAKVE

SEQ ID NO: 899 - protein, 2101 aa, synthetic construct
MPAAKRVKLDGGDKKYSIGLDIGTNSVGWAVITDEYKVPSKKFKVLGNTDRHSIKKNLIGALLFDSGETAEATRLKRTARRRYTRRKNRICYLQEIFSNEMAKVDDSFFHRLEESFLVEEDKKHERHPIFGNIVDEVAYHEKYPTIYHLRKKLVDSTDKADLRLIYLALAHMIKFRGHFLIEGDLNPDNSDVDKLFIQLVQTYNQLFEENPINASGVDAKAILSARLSKSRRLENLIAQLPGEKKNGLFGNLIALSLGLTPNFKSNFDLAEDAKLQLSKDTYDDDLDNLLAQIGDQYADLFLAAKNLSDAILLSDILRVNTEITKAPLSASMIKRYDEHHQDLTLLKALVRQQLPEKYKEIFFDQSKNGYAGYIDGGASQEEFYKFIKPILEKMDGTEELLVKLNREDLLRKQRTFDNGSIPHQIHLGELHAILRRQEDFYPFLKDNREKIEKILTFRIPYYVGPLARGNSRFAWMTRKSEETITPWNFEEVVDKGASAQSFIERMTNFDKNLPNEKVLPKHSLLYEYFTVYNELTKVKYVTEGMRKPAFLSGEQKKAIVDLLFKTNRKVTVKQLKEDYFKKIECFDSVEISGVEDRFNASLGTYHDLLKIIKDKDFLDNEENEDILEDIVLTLTLFEDREMIEERLKTYAHLFDDKVMKQLKRRRYTGWGRLSRKLINGIRDKQSGKTILDFLKSDGFANRNFMQLIHDDSLTFKEDIQKAQVSGQGDSLHEHIANLAGSPAIKKGILQTVKVVDELVKVMGRHKPENIVIEMARENQTTQKGQKNSRERMKRIEEGIKELGSQILKEHPVENTQLQNEKLYLYYLQNGRDMYVDQELDINRLSDYDVDHIVPQSFLKDDSIDNKVLTRSDKARGKSDNVPSEEVVKKMKNYWRQLLNAKLITQRKFDNLTKAERGGLSELDKAGFIKRQLVETRQITKHVAQILDSRMNTKYDENDKLIREVKVITLKSKLVSDFRKDFQFYKVREINNYHHAHDAYLNAVVGTALIKKYPKLESEFVYGDYKVYDVRKMIAKSEQEIGKATAKYFFYSNIMNFFKTEITLANGEIRKRPLIETNGETGEIVWDKGRDFATVRKVLSMPQVNIVKKTEVQTGGFSKESILPKRNSDKLIARKKDWDPKKYGGFDSPTVAYSVLVVAKVEKGKSKKLKSVKELLGITIMERSSFEKNPIDFLEAKGYKEVKKDLIIKLPKYSLFELENGRKRMLASAGELQKGNELALPSKYVNFLYLASHYEKLKGSPEDNEQKQLFVEQHKHYLDEIIEQISEFSKRVILADANLDKVLSAYNKHRDKPIREQAENIIHLFTLTNLGAPAAFKYFDTTIDRKRYTSTKEVLDATLIHQSITGLYETRIDLSQLGGDGGGGSGGSGGSGGSGGSGGSGGVLNLEEEYRLHEKPVPSSIDPSWLQLFPTVWAERAGMGLANQVPPVVVELRSGASPVAVRQYPMSKEAREGIRPHIQRFLDLGVLVPCQSPWNTPLLPVKKPGTNDYRPVQDLREINKRVQDIHPTVPNPYNLLSSLPPSHTWYSVLDLKDAFFCLKLHPNSQPLFAFEWRDPEKGNTGQLTWTRLPQGFKNSPTLFNEALHRDLAPFRALNPQVVLLQYVDDLLVAAPTYRDCKEGTQKLLQELSKLGYRVSAKKAQLCQKEVTYLGYLLKEGKRWLTPARKATVMKIPPPTTPRQVREFLGKAGFCRLFIPGFASLAAPLYPLTKPSIPFIWTEEHQKAFDRIKEALLSAPALALPDLTKPFTLYVDERAGVARGVLTQTLGPWRRPVAYLSKKLDPVASGWPTCLKAVAAVALLLKDADKLTLGQNVTVIASHSLESIVRQPPDRWMTNARMTHYQSLLLNERVSFAPPAVLNPATLLPVESEATPVHRCSEILAEETGTRRDLKDQPLPGVPAWYTDGSSFIAEGKRRAGAAIVDGKRTVWASSLPEGTSAQKAELVALTQALRLAEGKDINIYTDSRYAFATAHIHGAIYKQRGWLTSAGKDIKNKEEILALLEAIHLPKRVAIIHCPGHQKGNDPVATGNRRADEAAKQAALSTRVLAETTKPAGKRTADGSEFEKRTADGSEFESPKKKAKVE

SEQ ID NO: 900 - protein, 2098 aa, synthetic construct
MPAAKRVKLDGGDKKYSIGLDIGTNSVGWAVITDEYKVPSKKFKVLGNTDRHSIKKNLIGALLFDSGETAEATRLKRTARRRYTRRKNRICYLQEIFSNEMAKVDDSFFHRLEESFLVEEDKKHERHPIFGNIVDEVAYHEKYPTIYHLRKKLVDSTDKADLRLIYLALAHMIKFRGHFLIEGDLNPDNSDVDKLFIQLVQTYNQLFEENPINASGVDAKAILSARLSKSRRLENLIAQLPGEKKNGLFGNLIALSLGLTPNFKSNFDLAEDAKLQLSKDTYDDDLDNLLAQIGDQYADLFLAAKNLSDAILLSDILRVNTEITKAPLSASMIKRYDEHHQDLTLLKALVRQQLPEKYKEIFFDQSKNGYAGYIDGGASQEEFYKFIKPILEKMDGTEELLVKLNREDLLRKQRTFDNGSIPHQIHLGELHAILRRQEDFYPFLKDNREKIEKILTFRIPYYVGPLARGNSRFAWMTRKSEETITPWNFEEVVDKGASAQSFIERMTNFDKNLPNEKVLPKHSLLYEYFTVYNELTKVKYVTEGMRKPAFLSGEQKKAIVDLLFKTNRKVTVKQLKEDYFKKIECFDSVEISGVEDRFNASLGTYHDLLKIIKDKDFLDNEENEDILEDIVLTLTLFEDREMIEERLKTYAHLFDDKVMKQLKRRRYTGWGRLSRKLINGIRDKQSGKTILDFLKSDGFANRNFMQLIHDDSLTFKEDIQKAQVSGQGDSLHEHIANLAGSPAIKKGILQTVKVVDELVKVMGRHKPENIVIEMARENQTTQKGQKNSRERMKRIEEGIKELGSQILKEHPVENTQLQNEKLYLYYLQNGRDMYVDQELDINRLSDYDVDHIVPQSFLKDDSIDNKVLTRSDKARGKSDNVPSEEVVKKMKNYWRQLLNAKLITQRKFDNLTKAERGGLSELDKAGFIKRQLVETRQITKHVAQILDSRMNTKYDENDKLIREVKVITLKSKLVSDFRKDFQFYKVREINNYHHAHDAYLNAVVGTALIKKYPKLESEFVYGDYKVYDVRKMIAKSEQEIGKATAKYFFYSNIMNFFKTEITLANGEIRKRPLIETNGETGEIVWDKGRDFATVRKVLSMPQVNIVKKTEVQTGGFSKESILPKRNSDKLIARKKDWDPKKYGGFDSPTVAYSVLVVAKVEKGKSKKLKSVKELLGITIMERSSFEKNPIDFLEAKGYKEVKKDLIIKLPKYSLFELENGRKRMLASAGELQKGNELALPSKYVNFLYLASHYEKLKGSPEDNEQKQLFVEQHKHYLDEIIEQISEFSKRVILADANLDKVLSAYNKHRDKPIREQAENIIHLFTLTNLGAPAAFKYFDTTIDRKRYTSTKEVLDATLIHQSITGLYETRIDLSQLGGDGGEAAAKGGGGSEAAAKGGVLNLEEEYRLHEKPVPSSIDPSWLQLFPTVWAERAGMGLANQVPPVVVELRSGASPVAVRQYPMSKEAREGIRPHIQRFLDLGVLVPCQSPWNTPLLPVKKPGTNDYRPVQDLREINKRVQDIHPTVPNPYNLLSSLPPSHTWYSVLDLKDAFFCLKLHPNSQPLFAFEWRDPEKGNTGQLTWTRLPQGFKNSPTLFNEALHRDLAPFRALNPQVVLLQYVDDLLVAAPTYRDCKEGTQKLLQELSKLGYRVSAKKAQLCQKEVTYLGYLLKEGKRWLTPARKATVMKIPPPTTPRQVREFLGKAGFCRLFIPGFASLAAPLYPLTKPSIPFIWTEEHQKAFDRIKEALLSAPALALPDLTKPFTLYVDERAGVARGVLTQTLGPWRRPVAYLSKKLDPVASGWPTCLKAVAAVALLLKDADKLTLGQNVTVIASHSLESIVRQPPDRWMTNARMTHYQSLLLNERVSFAPPAVLNPATLLPVESEATPVHRCSEILAEETGTRRDLKDQPLPGVPAWYTDGSSFIAEGKRRAGAAIVDGKRTVWASSLPEGTSAQKAELVALTQALRLAEGKDINIYTDSRYAFATAHIHGAIYKQRGWLTSAGKDIKNKEEILALLEAIHLPKRVAIIHCPGHQKGNDPVATGNRRADEAAKQAALSTRVLAETTKPAGKRTADGSEFEKRTADGSEFESPKKKAKVE

SEQ ID NO: 901 - protein, 2094 aa, synthetic construct
MPAAKRVKLDGGDKKYSIGLDIGTNSVGWAVITDEYKVPSKKFKVLGNTDRHSIKKNLIGALLFDSGETAEATRLKRTARRRYTRRKNRICYLQEIFSNEMAKVDDSFFHRLEESFLVEEDKKHERHPIFGNIVDEVAYHEKYPTIYHLRKKLVDSTDKADLRLIYLALAHMIKFRGHFLIEGDLNPDNSDVDKLFIQLVQTYNQLFEENPINASGVDAKAILSARLSKSRRLENLIAQLPGEKKNGLFGNLIALSLGLTPNFKSNFDLAEDAKLQLSKDTYDDDLDNLLAQIGDQYADLFLAAKNLSDAILLSDILRVNTEITKAPLSASMIKRYDEHHQDLTLLKALVRQQLPEKYKEIFFDQSKNGYAGYIDGGASQEEFYKFIKPILEKMDGTEELLVKLNREDLLRKQRTFDNGSIPHQIHLGELHAILRRQEDFYPFLKDNREKIEKILTFRIPYYVGPLARGNSRFAWMTRKSEETITPWNFEEVVDKGASAQSFIERMTNFDKNLPNEKVLPKHSLLYEYFTVYNELTKVKYVTEGMRKPAFLSGEQKKAIVDLLFKTNRKVTVKQLKEDYFKKIECFDSVEISGVEDRFNASLGTYHDLLKIIKDKDFLDNEENEDILEDIVLTLTLFEDREMIEERLKTYAHLFDDKVMKQLKRRRYTGWGRLSRKLINGIRDKQSGKTILDFLKSDGFANRNFMQLIHDDSLTFKEDIQKAQVSGQGDSLHEHIANLAGSPAIKKGILQTVKVVDELVKVMGRHKPENIVIEMARENQTTQKGQKNSRERMKRIEEGIKELGSQILKEHPVENTQLQNEKLYLYYLQNGRDMYVDQELDINRLSDYDVDHIVPQSFLKDDSIDNKVLTRSDKARGKSDNVPSEEVVKKMKNYWRQLLNAKLITQRKFDNLTKAERGGLSELDKAGFIKRQLVETRQITKHVAQILDSRMNTKYDENDKLIREVKVITLKSKLVSDFRKDFQFYKVREINNYHHAHDAYLNAVVGTALIKKYPKLESEFVYGDYKVYDVRKMIAKSEQEIGKATAKYFFYSNIMNFFKTEITLANGEIRKRPLIETNGETGEIVWDKGRDFATVRKVLSMPQVNIVKKTEVQTGGFSKESILPKRNSDKLIARKKDWDPKKYGGFDSPTVAYSVLVVAKVEKGKSKKLKSVKELLGITIMERSSFEKNPIDFLEAKGYKEVKKDLIIKLPKYSLFELENGRKRMLASAGELQKGNELALPSKYVNFLYLASHYEKLKGSPEDNEQKQLFVEQHKHYLDEIIEQISEFSKRVILADANLDKVLSAYNKHRDKPIREQAENIIHLFTLTNLGAPAAFKYFDTTIDRKRYTSTKEVLDATLIHQSITGLYETRIDLSQLGGDGGGGGEAAAKGGSGGVLNLEEEYRLHEKPVPSSIDPSWLQLFPTVWAERAGMGLANQVPPVVVELRSGASPVAVRQYPMSKEAREGIRPHIQRFLDLGVLVPCQSPWNTPLLPVKKPGTNDYRPVQDLREINKRVQDIHPTVPNPYNLLSSLPPSHTWYSVLDLKDAFFCLKLHPNSQPLFAFEWRDPEKGNTGQLTWTRLPQGFKNSPTLFNEALHRDLAPFRALNPQVVLLQYVDDLLVAAPTYRDCKEGTQKLLQELSKLGYRVSAKKAQLCQKEVTYLGYLLKEGKRWLTPARKATVMKIPPPTTPRQVREFLGKAGFCRLFIPGFASLAAPLYPLTKPSIPFIWTEEHQKAFDRIKEALLSAPALALPDLTKPFTLYVDERAGVARGVLTQTLGPWRRPVAYLSKKLDPVASGWPTCLKAVAAVALLLKDADKLTLGQNVTVIASHSLESIVRQPPDRWMTNARMTHYQSLLLNERVSFAPPAVLNPATLLPVESEATPVHRCSEILAEETGTRRDLKDQPLPGVPAWYTDGSSFIAEGKRRAGAAIVDGKRTVWASSLPEGTSAQKAELVALTQALRLAEGKDINIYTDSRYAFATAHIHGAIYKQRGWLTSAGKDIKNKEEILALLEAIHLPKRVAIIHCPGHQKGNDPVATGNRRADEAAKQAALSTRVLAETTKPAGKRTADGSEFEKRTADGSEFESPKKKAKVE

SEQ ID NO: 902 - protein, 2094 aa, synthetic construct
MPAAKRVKLDGGDKKYSIGLDIGTNSVGWAVITDEYKVPSKKFKVLGNTDRHSIKKNLIGALLFDSGETAEATRLKRTARRRYTRRKNRICYLQEIFSNEMAKVDDSFFHRLEESFLVEEDKKHERHPIFGNIVDEVAYHEKYPTIYHLRKKLVDSTDKADLRLIYLALAHMIKFRGHFLIEGDLNPDNSDVDKLFIQLVQTYNQLFEENPINASGVDAKAILSARLSKSRRLENLIAQLPGEKKNGLFGNLIALSLGLTPNFKSNFDLAEDAKLQLSKDTYDDDLDNLLAQIGDQYADLFLAAKNLSDAILLSDILRVNTEITKAPLSASMIKRYDEHHQDLTLLKALVRQQLPEKYKEIFFDQSKNGYAGYIDGGASQEEFYKFIKPILEKMDGTEELLVKLNREDLLRKQRTFDNGSIPHQIHLGELHAILRRQEDFYPFLKDNREKIEKILTFRIPYYVGPLARGNSRFAWMTRKSEETITPWNFEEVVDKGASAQSFIERMTNFDKNLPNEKVLPKHSLLYEYFTVYNELTKVKYVTEGMRKPAFLSGEQKKAIVDLLFKTNRKVTVKQLKEDYFKKIECFDSVEISGVEDRFNASLGTYHDLLKIIKDKDFLDNEENEDILEDIVLTLTLFEDREMIEERLKTYAHLFDDKVMKQLKRRRYTGWGRLSRKLINGIRDKQSGKTILDFLKSDGFANRNFMQLIHDDSLTFKEDIQKAQVSGQGDSLHEHIANLAGSPAIKKGILQTVKVVDELVKVMGRHKPENIVIEMARENQTTQKGQKNSRERMKRIEEGIKELGSQILKEHPVENTQLQNEKLYLYYLQNGRDMYVDQELDINRLSDYDVDHIVPQSFLKDDSIDNKVLTRSDKARGKSDNVPSEEVVKKMKNYWRQLLNAKLITQRKFDNLTKAERGGLSELDKAGFIKRQLVETRQITKHVAQILDSRMNTKYDENDKLIREVKVITLKSKLVSDFRKDFQFYKVREINNYHHAHDAYLNAVVGTALIKKYPKLESEFVYGDYKVYDVRKMIAKSEQEIGKATAKYFFYSNIMNFFKTEITLANGEIRKRPLIETNGETGEIVWDKGRDFATVRKVLSMPQVNIVKKTEVQTGGFSKESILPKRNSDKLIARKKDWDPKKYGGFDSPTVAYSVLVVAKVEKGKSKKLKSVKELLGITIMERSSFEKNPIDFLEAKGYKEVKKDLIIKLPKYSLFELENGRKRMLASAGELQKGNELALPSKYVNFLYLASHYEKLKGSPEDNEQKQLFVEQHKHYLDEIIEQISEFSKRVILADANLDKVLSAYNKHRDKPIREQAENIIHLFTLTNLGAPAAFKYFDTTIDRKRYTSTKEVLDATLIHQSITGLYETRIDLSQLGGDGGGGSEAAAKGGGGGVLNLEEEYRLHEKPVPSSIDPSWLQLFPTVWAERAGMGLANQVPPVVVELRSGASPVAVRQYPMSKEAREGIRPHIQRFLDLGVLVPCQSPWNTPLLPVKKPGTNDYRPVQDLREINKRVQDIHPTVPNPYNLLSSLPPSHTWYSVLDLKDAFFCLKLHPNSQPLFAFEWRDPEKGNTGQLTWTRLPQGFKNSPTLFNEALHRDLAPFRALNPQVVLLQYVDDLLVAAPTYRDCKEGTQKLLQELSKLGYRVSAKKAQLCQKEVTYLGYLLKEGKRWLTPARKATVMKIPPPTTPRQVREFLGKAGFCRLFIPGFASLAAPLYPLTKPSIPFIWTEEHQKAFDRIKEALLSAPALALPDLTKPFTLYVDERAGVARGVLTQTLGPWRRPVAYLSKKLDPVASGWPTCLKAVAAVALLLKDADKLTLGQNVTVIASHSLESIVRQPPDRWMTNARMTHYQSLLLNERVSFAPPAVLNPATLLPVESEATPVHRCSEILAEETGTRRDLKDQPLPGVPAWYTDGSSFIAEGKRRAGAAIVDGKRTVWASSLPEGTSAQKAELVALTQALRLAEGKDINIYTDSRYAFATAHIHGAIYKQRGWLTSAGKDIKNKEEILALLEAIHLPKRVAIIHCPGHQKGNDPVATGNRRADEAAKQAALSTRVLAETTKPAGKRTADGSEFEKRTADGSEFESPKKKAKVE

SEQ ID NO: 903 - protein, 2092 aa, synthetic construct
MPAAKRVKLDGGDKKYSIGLDIGTNSVGWAVITDEYKVPSKKFKVLGNTDRHSIKKNLIGALLFDSGETAEATRLKRTARRRYTRRKNRICYLQEIFSNEMAKVDDSFFHRLEESFLVEEDKKHERHPIFGNIVDEVAYHEKYPTIYHLRKKLVDSTDKADLRLIYLALAHMIKFRGHFLIEGDLNPDNSDVDKLFIQLVQTYNQLFEENPINASGVDAKAILSARLSKSRRLENLIAQLPGEKKNGLFGNLIALSLGLTPNFKSNFDLAEDAKLQLSKDTYDDDLDNLLAQIGDQYADLFLAAKNLSDAILLSDILRVNTEITKAPLSASMIKRYDEHHQDLTLLKALVRQQLPEKYKEIFFDQSKNGYAGYIDGGASQEEFYKFIKPILEKMDGTEELLVKLNREDLLRKQRTFDNGSIPHQIHLGELHAILRRQEDFYPFLKDNREKIEKILTFRIPYYVGPLARGNSRFAWMTRKSEETITPWNFEEVVDKGASAQSFIERMTNFDKNLPNEKVLPKHSLLYEYFTVYNELTKVKYVTEGMRKPAFLSGEQKKAIVDLLFKTNRKVTVKQLKEDYFKKIECFDSVEISGVEDRFNASLGTYHDLLKIIKDKDFLDNEENEDILEDIVLTLTLFEDREMIEERLKTYAHLFDDKVMKQLKRRRYTGWGRLSRKLINGIRDKQSGKTILDFLKSDGFANRNFMQLIHDDSLTFKEDIQKAQVSGQGDSLHEHIANLAGSPAIKKGILQTVKVVDELVKVMGRHKPENIVIEMARENQTTQKGQKNSRERMKRIEEGIKELGSQILKEHPVENTQLQNEKLYLYYLQNGRDMYVDQELDINRLSDYDVDHIVPQSFLKDDSIDNKVLTRSDKARGKSDNVPSEEVVKKMKNYWRQLLNAKLITQRKFDNLTKAERGGLSELDKAGFIKRQLVETRQITKHVAQILDSRMNTKYDENDKLIREVKVITLKSKLVSDFRKDFQFYKVREINNYHHAHDAYLNAVVGTALIKKYPKLESEFVYGDYKVYDVRKMIAKSEQEIGKATAKYFFYSNIMNFFKTEITLANGEIRKRPLIETNGETGEIVWDKGRDFATVRKVLSMPQVNIVKKTEVQTGGFSKESILPKRNSDKLIARKKDWDPKKYGGFDSPTVAYSVLVVAKVEKGKSKKLKSVKELLGITIMERSSFEKNPIDFLEAKGYKEVKKDLIIKLPKYSLFELENGRKRMLASAGELQKGNELALPSKYVNFLYLASHYEKLKGSPEDNEQKQLFVEQHKHYLDEIIEQISEFSKRVILADANLDKVLSAYNKHRDKPIREQAENIIHLFTLTNLGAPAAFKYFDTTIDRKRYTSTKEVLDATLIHQSITGLYETRIDLSQLGGDGGGGSGGGGSSGGVLNLEEEYRLHEKPVPSSIDPSWLQLFPTVWAERAGMGLANQVPPVVVELRSGASPVAVRQYPMSKEAREGIRPHIQRFLDLGVLVPCQSPWNTPLLPVKKPGTNDYRPVQDLREINKRVQDIHPTVPNPYNLLSSLPPSHTWYSVLDLKDAFFCLKLHPNSQPLFAFEWRDPEKGNTGQLTWTRLPQGFKNSPTLFNEALHRDLAPFRALNPQVVLLQYVDDLLVAAPTYRDCKEGTQKLLQELSKLGYRVSAKKAQLCQKEVTYLGYLLKEGKRWLTPARKATVMKIPPPTTPRQVREFLGKAGFCRLFIPGFASLAAPLYPLTKPSIPFIWTEEHQKAFDRIKEALLSAPALALPDLTKPFTLYVDERAGVARGVLTQTLGPWRRPVAYLSKKLDPVASGWPTCLKAVAAVALLLKDADKLTLGQNVTVIASHSLESIVRQPPDRWMTNARMTHYQSLLLNERVSFAPPAVLNPATLLPVESEATPVHRCSEILAEETGTRRDLKDQPLPGVPAWYTDGSSFIAEGKRRAGAAIVDGKRTVWASSLPEGTSAQKAELVALTQALRLAEGKDINIYTDSRYAFATAHIHGAIYKQRGWLTSAGKDIKNKEEILALLEAIHLPKRVAIIHCPGHQKGNDPVATGNRRADEAAKQAALSTRVLAETTKPAGKRTADGSEFEKRTADGSEFESPKKKAKVE

SEQ ID NO: 904 - protein, 2088 aa, synthetic construct
MPAAKRVKLDGGDKKYSIGLDIGTNSVGWAVITDEYKVPSKKFKVLGNTDRHSIKKNLIGALLFDSGETAEATRLKRTARRRYTRRKNRICYLQEIFSNEMAKVDDSFFHRLEESFLVEEDKKHERHPIFGNIVDEVAYHEKYPTIYHLRKKLVDSTDKADLRLIYLALAHMIKFRGHFLIEGDLNPDNSDVDKLFIQLVQTYNQLFEENPINASGVDAKAILSARLSKSRRLENLIAQLPGEKKNGLFGNLIALSLGLTPNFKSNFDLAEDAKLQLSKDTYDDDLDNLLAQIGDQYADLFLAAKNLSDAILLSDILRVNTEITKAPLSASMIKRYDEHHQDLTLLKALVRQQLPEKYKEIFFDQSKNGYAGYIDGGASQEEFYKFIKPILEKMDGTEELLVKLNREDLLRKQRTFDNGSIPHQIHLGELHAILRRQEDFYPFLKDNREKIEKILTFRIPYYVGPLARGNSRFAWMTRKSEETITPWNFEEVVDKGASAQSFIERMTNFDKNLPNEKVLPKHSLLYEYFTVYNELTKVKYVTEGMRKPAFLSGEQKKAIVDLLFKTNRKVTVKQLKEDYFKKIECFDSVEISGVEDRFNASLGTYHDLLKIIKDKDFLDNEENEDILEDIVLTLTLFEDREMIEERLKTYAHLFDDKVMKQLKRRRYTGWGRLSRKLINGIRDKQSGKTILDFLKSDGFANRNFMQLIHDDSLTFKEDIQKAQVSGQGDSLHEHIANLAGSPAIKKGILQTVKVVDELVKVMGRHKPENIVIEMARENQTTQKGQKNSRERMKRIEEGIKELGSQILKEHPVENTQLQNEKLYLYYLQNGRDMYVDQELDINRLSDYDVDHIVPQSFLKDDSIDNKVLTRSDKARGKSDNVPSEEVVKKMKNYWRQLLNAKLITQRKFDNLTKAERGGLSELDKAGFIKRQLVETRQITKHVAQILDSRMNTKYDENDKLIREVKVITLKSKLVSDFRKDFQFYKVREINNYHHAHDAYLNAVVGTALIKKYPKLESEFVYGDYKVYDVRKMIAKSEQEIGKATAKYFFYSNIMNFFKTEITLANGEIRKRPLIETNGETGEIVWDKGRDFATVRKVLSMPQVNIVKKTEVQTGGFSKESILPKRNSDKLIARKKDWDPKKYGGFDSPTVAYSVLVVAKVEKGKSKKLKSVKELLGITIMERSSFEKNPIDFLEAKGYKEVKKDLIIKLPKYSLFELENGRKRMLASAGELQKGNELALPSKYVNFLYLASHYEKLKGSPEDNEQKQLFVEQHKHYLDEIIEQISEFSKRVILADANLDKVLSAYNKHRDKPIREQAENIIHLFTLTNLGAPAAFKYFDTTIDRKRYTSTKEVLDATLIHQSITGLYETRIDLSQLGGDGGPAPAPGGVLNLEEEYRLHEKPVPSSIDPSWLQLFPTVWAERAGMGLANQVPPVVVELRSGASPVAVRQYPMSKEAREGIRPHIQRFLDLGVLVPCQSPWNTPLLPVKKPGTNDYRPVQDLREINKRVQDIHPTVPNPYNLLSSLPPSHTWYSVLDLKDAFFCLKLHPNSQPLFAFEWRDPEKGNTGQLTWTRLPQGFKNSPTLFNEALHRDLAPFRALNPQVVLLQYVDDLLVAAPTYRDCKEGTQKLLQELSKLGYRVSAKKAQLCQKEVTYLGYLLKEGKRWLTPARKATVMKIPPPTTPRQVREFLGKAGFCRLFIPGFASLAAPLYPLTKPSIPFIWTEEHQKAFDRIKEALLSAPALALPDLTKPFTLYVDERAGVARGVLTQTLGPWRRPVAYLSKKLDPVASGWPTCLKAVAAVALLLKDADKLTLGQNVTVIASHSLESIVRQPPDRWMTNARMTHYQSLLLNERVSFAPPAVLNPATLLPVESEATPVHRCSEILAEETGTRRDLKDQPLPGVPAWYTDGSSFIAEGKRRAGAAIVDGKRTVWASSLPEGTSAQKAELVALTQALRLAEGKDINIYTDSRYAFATAHIHGAIYKQRGWLTSAGKDIKNKEEILALLEAIHLPKRVAIIHCPGHQKGNDPVATGNRRADEAAKQAALSTRVLAETTKPAGKRTADGSEFEKRTADGSEFESPKKKAKVE

SEQ ID NO: 905 - protein, 2094 aa, synthetic construct
MPAAKRVKLDGGDKKYSIGLDIGTNSVGWAVITDEYKVPSKKFKVLGNTDRHSIKKNLIGALLFDSGETAEATRLKRTARRRYTRRKNRICYLQEIFSNEMAKVDDSFFHRLEESFLVEEDKKHERHPIFGNIVDEVAYHEKYPTIYHLRKKLVDSTDKADLRLIYLALAHMIKFRGHFLIEGDLNPDNSDVDKLFIQLVQTYNQLFEENPINASGVDAKAILSARLSKSRRLENLIAQLPGEKKNGLFGNLIALSLGLTPNFKSNFDLAEDAKLQLSKDTYDDDLDNLLAQIGDQYADLFLAAKNLSDAILLSDILRVNTEITKAPLSASMIKRYDEHHQDLTLLKALVRQQLPEKYKEIFFDQSKNGYAGYIDGGASQEEFYKFIKPILEKMDGTEELLVKLNREDLLRKQRTFDNGSIPHQIHLGELHAILRRQEDFYPFLKDNREKIEKILTFRIPYYVGPLARGNSRFAWMTRKSEETITPWNFEEVVDKGASAQSFIERMTNFDKNLPNEKVLPKHSLLYEYFTVYNELTKVKYVTEGMRKPAFLSGEQKKAIVDLLFKTNRKVTVKQLKEDYFKKIECFDSVEISGVEDRFNASLGTYHDLLKIIKDKDFLDNEENEDILEDIVLTLTLFEDREMIEERLKTYAHLFDDKVMKQLKRRRYTGWGRLSRKLINGIRDKQSGKTILDFLKSDGFANRNFMQLIHDDSLTFKEDIQKAQVSGQGDSLHEHIANLAGSPAIKKGILQTVKVVDELVKVMGRHKPENIVIEMARENQTTQKGQKNSRERMKRIEEGIKELGSQILKEHPVENTQLQNEKLYLYYLQNGRDMYVDQELDINRLSDYDVDHIVPQSFLKDDSIDNKVLTRSDKARGKSDNVPSEEVVKKMKNYWRQLLNAKLITQRKFDNLTKAERGGLSELDKAGFIKRQLVETRQITKHVAQILDSRMNTKYDENDKLIREVKVITLKSKLVSDFRKDFQFYKVREINNYHHAHDAYLNAVVGTALIKKYPKLESEFVYGDYKVYDVRKMIAKSEQEIGKATAKYFFYSNIMNFFKTEITLANGEIRKRPLIETNGETGEIVWDKGRDFATVRKVLSMPQVNIVKKTEVQTGGFSKESILPKRNSDKLIARKKDWDPKKYGGFDSPTVAYSVLVVAKVEKGKSKKLKSVKELLGITIMERSSFEKNPIDFLEAKGYKEVKKDLIIKLPKYSLFELENGRKRMLASAGELQKGNELALPSKYVNFLYLASHYEKLKGSPEDNEQKQLFVEQHKHYLDEIIEQISEFSKRVILADANLDKVLSAYNKHRDKPIREQAENIIHLFTLTNLGAPAAFKYFDTTIDRKRYTSTKEVLDATLIHQSITGLYETRIDLSQLGGDGGEAAAKGGSGSSGGVLNLEEEYRLHEKPVPSSIDPSWLQLFPTVWAERAGMGLANQVPPVVVELRSGASPVAVRQYPMSKEAREGIRPHIQRFLDLGVLVPCQSPWNTPLLPVKKPGTNDYRPVQDLREINKRVQDIHPTVPNPYNLLSSLPPSHTWYSVLDLKDAFFCLKLHPNSQPLFAFEWRDPEKGNTGQLTWTRLPQGFKNSPTLFNEALHRDLAPFRALNPQVVLLQYVDDLLVAAPTYRDCKEGTQKLLQELSKLGYRVSAKKAQLCQKEVTYLGYLLKEGKRWLTPARKATVMKIPPPTTPRQVREFLGKAGFCRLFIPGFASLAAPLYPLTKPSIPFIWTEEHQKAFDRIKEALLSAPALALPDLTKPFTLYVDERAGVARGVLTQTLGPWRRPVAYLSKKLDPVASGWPTCLKAVAAVALLLKDADKLTLGQNVTVIASHSLESIVRQPPDRWMTNARMTHYQSLLLNERVSFAPPAVLNPATLLPVESEATPVHRCSEILAEETGTRRDLKDQPLPGVPAWYTDGSSFIAEGKRRAGAAIVDGKRTVWASSLPEGTSAQKAELVALTQALRLAEGKDINIYTDSRYAFATAHIHGAIYKQRGWLTSAGKDIKNKEEILALLEAIHLPKRVAIIHCPGHQKGNDPVATGNRRADEAAKQAALSTRVLAETTKPAGKRTADGSEFEKRTADGSEFESPKKKAKVE

SEQ ID NO: 906 - protein, 2089 aa, synthetic construct
MPAAKRVKLDGGDKKYSIGLDIGTNSVGWAVITDEYKVPSKKFKVLGNTDRHSIKKNLIGALLFDSGETAEATRLKRTARRRYTRRKNRICYLQEIFSNEMAKVDDSFFHRLEESFLVEEDKKHERHPIFGNIVDEVAYHEKYPTIYHLRKKLVDSTDKADLRLIYLALAHMIKFRGHFLIEGDLNPDNSDVDKLFIQLVQTYNQLFEENPINASGVDAKAILSARLSKSRRLENLIAQLPGEKKNGLFGNLIALSLGLTPNFKSNFDLAEDAKLQLSKDTYDDDLDNLLAQIGDQYADLFLAAKNLSDAILLSDILRVNTEITKAPLSASMIKRYDEHHQDLTLLKALVRQQLPEKYKEIFFDQSKNGYAGYIDGGASQEEFYKFIKPILEKMDGTEELLVKLNREDLLRKQRTFDNGSIPHQIHLGELHAILRRQEDFYPFLKDNREKIEKILTFRIPYYVGPLARGNSRFAWMTRKSEETITPWNFEEVVDKGASAQSFIERMTNFDKNLPNEKVLPKHSLLYEYFTVYNELTKVKYVTEGMRKPAFLSGEQKKAIVDLLFKTNRKVTVKQLKEDYFKKIECFDSVEISGVEDRFNASLGTYHDLLKIIKDKDFLDNEENEDILEDIVLTLTLFEDREMIEERLKTYAHLFDDKVMKQLKRRRYTGWGRLSRKLINGIRDKQSGKTILDFLKSDGFANRNFMQLIHDDSLTFKEDIQKAQVSGQGDSLHEHIANLAGSPAIKKGILQTVKVVDELVKVMGRHKPENIVIEMARENQTTQKGQKNSRERMKRIEEGIKELGSQILKEHPVENTQLQNEKLYLYYLQNGRDMYVDQELDINRLSDYDVDHIVPQSFLKDDSIDNKVLTRSDKARGKSDNVPSEEVVKKMKNYWRQLLNAKLITQRKFDNLTKAERGGLSELDKAGFIKRQLVETRQITKHVAQILDSRMNTKYDENDKLIREVKVITLKSKLVSDFRKDFQFYKVREINNYHHAHDAYLNAVVGTALIKKYPKLESEFVYGDYKVYDVRKMIAKSEQEIGKATAKYFFYSNIMNFFKTEITLANGEIRKRPLIETNGETGEIVWDKGRDFATVRKVLSMPQVNIVKKTEVQTGGFSKESILPKRNSDKLIARKKDWDPKKYGGFDSPTVAYSVLVVAKVEKGKSKKLKSVKELLGITIMERSSFEKNPIDFLEAKGYKEVKKDLIIKLPKYSLFELENGRKRMLASAGELQKGNELALPSKYVNFLYLASHYEKLKGSPEDNEQKQLFVEQHKHYLDEIIEQISEFSKRVILADANLDKVLSAYNKHRDKPIREQAENIIHLFTLTNLGAPAAFKYFDTTIDRKRYTSTKEVLDATLIHQSITGLYETRIDLSQLGGDGGGGSGGSGGVLNLEEEYRLHEKPVPSSIDPSWLQLFPTVWAERAGMGLANQVPPVVVELRSGASPVAVRQYPMSKEAREGIRPHIQRFLDLGVLVPCQSPWNTPLLPVKKPGTNDYRPVQDLREINKRVQDIHPTVPNPYNLLSSLPPSHTWYSVLDLKDAFFCLKLHPNSQPLFAFEWRDPEKGNTGQLTWTRLPQGFKNSPTLFNEALHRDLAPFRALNPQVVLLQYVDDLLVAAPTYRDCKEGTQKLLQELSKLGYRVSAKKAQLCQKEVTYLGYLLKEGKRWLTPARKATVMKIPPPTTPRQVREFLGKAGFCRLFIPGFASLAAPLYPLTKPSIPFIWTEEHQKAFDRIKEALLSAPALALPDLTKPFTLYVDERAGVARGVLTQTLGPWRRPVAYLSKKLDPVASGWPTCLKAVAAVALLLKDADKLTLGQNVTVIASHSLESIVRQPPDRWMTNARMTHYQSLLLNERVSFAPPAVLNPATLLPVESEATPVHRCSEILAEETGTRRDLKDQPLPGVPAWYTDGSSFIAEGKRRAGAAIVDGKRTVWASSLPEGTSAQKAELVALTQALRLAEGKDINIYTDSRYAFATAHIHGAIYKQRGWLTSAGKDIKNKEEILALLEAIHLPKRVAIIHCPGHQKGNDPVATGNRRADEAAKQAALSTRVLAETTKPAGKRTADGSEFEKRTADGSEFESPKKKAKVE

SEQ ID NO: 907 - protein, 2095 aa, synthetic construct
MPAAKRVKLDGGDKKYSIGLDIGTNSVGWAVITDEYKVPSKKFKVLGNTDRHSIKKNLIGALLFDSGETAEATRLKRTARRRYTRRKNRICYLQEIFSNEMAKVDDSFFHRLEESFLVEEDKKHERHPIFGNIVDEVAYHEKYPTIYHLRKKLVDSTDKADLRLIYLALAHMIKFRGHFLIEGDLNPDNSDVDKLFIQLVQTYNQLFEENPINASGVDAKAILSARLSKSRRLENLIAQLPGEKKNGLFGNLIALSLGLTPNFKSNFDLAEDAKLQLSKDTYDDDLDNLLAQIGDQYADLFLAAKNLSDAILLSDILRVNTEITKAPLSASMIKRYDEHHQDLTLLKALVRQQLPEKYKEIFFDQSKNGYAGYIDGGASQEEFYKFIKPILEKMDGTEELLVKLNREDLLRKQRTFDNGSIPHQIHLGELHAILRRQEDFYPFLKDNREKIEKILTFRIPYYVGPLARGNSRFAWMTRKSEETITPWNFEEVVDKGASAQSFIERMTNFDKNLPNEKVLPKHSLLYEYFTVYNELTKVKYVTEGMRKPAFLSGEQKKAIVDLLFKTNRKVTVKQLKEDYFKKIECFDSVEISGVEDRFNASLGTYHDLLKIIKDKDFLDNEENEDILEDIVLTLTLFEDREMIEERLKTYAHLFDDKVMKQLKRRRYTGWGRLSRKLINGIRDKQSGKTILDFLKSDGFANRNFMQLIHDDSLTFKEDIQKAQVSGQGDSLHEHIANLAGSPAIKKGILQTVKVVDELVKVMGRHKPENIVIEMARENQTTQKGQKNSRERMKRIEEGIKELGSQILKEHPVENTQLQNEKLYLYYLQNGRDMYVDQELDINRLSDYDVDHIVPQSFLKDDSIDNKVLTRSDKARGKSDNVPSEEVVKKMKNYWRQLLNAKLITQRKFDNLTKAERGGLSELDKAGFIKRQLVETRQITKHVAQILDSRMNTKYDENDKLIREVKVITLKSKLVSDFRKDFQFYKVREINNYHHAHDAYLNAVVGTALIKKYPKLESEFVYGDYKVYDVRKMIAKSEQEIGKATAKYFFYSNIMNFFKTEITLANGEIRKRPLIETNGETGEIVWDKGRDFATVRKVLSMPQVNIVKKTEVQTGGFSKESILPKRNSDKLIARKKDWDPKKYGGFDSPTVAYSVLVVAKVEKGKSKKLKSVKELLGITIMERSSFEKNPIDFLEAKGYKEVKKDLIIKLPKYSLFELENGRKRMLASAGELQKGNELALPSKYVNFLYLASHYEKLKGSPEDNEQKQLFVEQHKHYLDEIIEQISEFSKRVILADANLDKVLSAYNKHRDKPIREQAENIIHLFTLTNLGAPAAFKYFDTTIDRKRYTSTKEVLDATLIHQSITGLYETRIDLSQLGGDGGGSAGSAAGSGEFGGVLNLEEEYRLHEKPVPSSIDPSWLQLFPTVWAERAGMGLANQVPPVVVELRSGASPVAVRQYPMSKEAREGIRPHIQRFLDLGVLVPCQSPWNTPLLPVKKPGTNDYRPVQDLREINKRVQDIHPTVPNPYNLLSSLPPSHTWYSVLDLKDAFFCLKLHPNSQPLFAFEWRDPEKGNTGQLTWTRLPQGFKNSPTLFNEALHRDLAPFRALNPQVVLLQYVDDLLVAAPTYRDCKEGTQKLLQELSKLGYRVSAKKAQLCQKEVTYLGYLLKEGKRWLTPARKATVMKIPPPTTPRQVREFLGKAGFCRLFIPGFASLAAPLYPLTKPSIPFIWTEEHQKAFDRIKEALLSAPALALPDLTKPFTLYVDERAGVARGVLTQTLGPWRRPVAYLSKKLDPVASGWPTCLKAVAAVALLLKDADKLTLGQNVTVIASHSLESIVRQPPDRWMTNARMTHYQSLLLNERVSFAPPAVLNPATLLPVESEATPVHRCSEILAEETGTRRDLKDQPLPGVPAWYTDGSSFIAEGKRRAGAAIVDGKRTVWASSLPEGTSAQKAELVALTQALRLAEGKDINIYTDSRYAFATAHIHGAIYKQRGWLTSAGKDIKNKEEILALLEAIHLPKRVAIIHCPGHQKGNDPVATGNRRADEAAKQAALSTRVLAETTKPAGKRTADGSEFEKRTADGSEFESPKKKAKVE

SEQ ID NO: 908 - protein, 2092 aa, synthetic construct
MPAAKRVKLDGGDKKYSIGLDIGTNSVGWAVITDEYKVPSKKFKVLGNTDRHSIKKNLIGALLFDSGETAEATRLKRTARRRYTRRKNRICYLQEIFSNEMAKVDDSFFHRLEESFLVEEDKKHERHPIFGNIVDEVAYHEKYPTIYHLRKKLVDSTDKADLRLIYLALAHMIKFRGHFLIEGDLNPDNSDVDKLFIQLVQTYNQLFEENPINASGVDAKAILSARLSKSRRLENLIAQLPGEKKNGLFGNLIALSLGLTPNFKSNFDLAEDAKLQLSKDTYDDDLDNLLAQIGDQYADLFLAAKNLSDAILLSDILRVNTEITKAPLSASMIKRYDEHHQDLTLLKALVRQQLPEKYKEIFFDQSKNGYAGYIDGGASQEEFYKFIKPILEKMDGTEELLVKLNREDLLRKQRTFDNGSIPHQIHLGELHAILRRQEDFYPFLKDNREKIEKILTFRIPYYVGPLARGNSRFAWMTRKSEETITPWNFEEVVDKGASAQSFIERMTNFDKNLPNEKVLPKHSLLYEYFTVYNELTKVKYVTEGMRKPAFLSGEQKKAIVDLLFKTNRKVTVKQLKEDYFKKIECFDSVEISGVEDRFNASLGTYHDLLKIIKDKDFLDNEENEDILEDIVLTLTLFEDREMIEERLKTYAHLFDDKVMKQLKRRRYTGWGRLSRKLINGIRDKQSGKTILDFLKSDGFANRNFMQLIHDDSLTFKEDIQKAQVSGQGDSLHEHIANLAGSPAIKKGILQTVKVVDELVKVMGRHKPENIVIEMARENQTTQKGQKNSRERMKRIEEGIKELGSQILKEHPVENTQLQNEKLYLYYLQNGRDMYVDQELDINRLSDYDVDHIVPQSFLKDDSIDNKVLTRSDKARGKSDNVPSEEVVKKMKNYWRQLLNAKLITQRKFDNLTKAERGGLSELDKAGFIKRQLVETRQITKHVAQILDSRMNTKYDENDKLIREVKVITLKSKLVSDFRKDFQFYKVREINNYHHAHDAYLNAVVGTALIKKYPKLESEFVYGDYKVYDVRKMIAKSEQEIGKATAKYFFYSNIMNFFKTEITLANGEIRKRPLIETNGETGEIVWDKGRDFATVRKVLSMPQVNIVKKTEVQTGGFSKESILPKRNSDKLIARKKDWDPKKYGGFDSPTVAYSVLVVAKVEKGKSKKLKSVKELLGITIMERSSFEKNPIDFLEAKGYKEVKKDLIIKLPKYSLFELENGRKRMLASAGELQKGNELALPSKYVNFLYLASHYEKLKGSPEDNEQKQLFVEQHKHYLDEIIEQISEFSKRVILADANLDKVLSAYNKHRDKPIREQAENIIHLFTLTNLGAPAAFKYFDTTIDRKRYTSTKEVLDATLIHQSITGLYETRIDLSQLGGDGGGGSGGGPAPGGVLNLEEEYRLHEKPVPSSIDPSWLQLFPTVWAERAGMGLANQVPPVVVELRSGASPVAVRQYPMSKEAREGIRPHIQRFLDLGVLVPCQSPWNTPLLPVKKPGTNDYRPVQDLREINKRVQDIHPTVPNPYNLLSSLPPSHTWYSVLDLKDAFFCLKLHPNSQPLFAFEWRDPEKGNTGQLTWTRLPQGFKNSPTLFNEALHRDLAPFRALNPQVVLLQYVDDLLVAAPTYRDCKEGTQKLLQELSKLGYRVSAKKAQLCQKEVTYLGYLLKEGKRWLTPARKATVMKIPPPTTPRQVREFLGKAGFCRLFIPGFASLAAPLYPLTKPSIPFIWTEEHQKAFDRIKEALLSAPALALPDLTKPFTLYVDERAGVARGVLTQTLGPWRRPVAYLSKKLDPVASGWPTCLKAVAAVALLLKDADKLTLGQNVTVIASHSLESIVRQPPDRWMTNARMTHYQSLLLNERVSFAPPAVLNPATLLPVESEATPVHRCSEILAEETGTRRDLKDQPLPGVPAWYTDGSSFIAEGKRRAGAAIVDGKRTVWASSLPEGTSAQKAELVALTQALRLAEGKDINIYTDSRYAFATAHIHGAIYKQRGWLTSAGKDIKNKEEILALLEAIHLPKRVAIIHCPGHQKGNDPVATGNRRADEAAKQAALSTRVLAETTKPAGKRTADGSEFEKRTADGSEFESPKKKAKVE

SEQ ID NO: 909 - protein, 2092 aa, synthetic construct
MPAAKRVKLDGGDKKYSIGLDIGTNSVGWAVITDEYKVPSKKFKVLGNTDRHSIKKNLIGALLFDSGETAEATRLKRTARRRYTRRKNRICYLQEIFSNEMAKVDDSFFHRLEESFLVEEDKKHERHPIFGNIVDEVAYHEKYPTIYHLRKKLVDSTDKADLRLIYLALAHMIKFRGHFLIEGDLNPDNSDVDKLFIQLVQTYNQLFEENPINASGVDAKAILSARLSKSRRLENLIAQLPGEKKNGLFGNLIALSLGLTPNFKSNFDLAEDAKLQLSKDTYDDDLDNLLAQIGDQYADLFLAAKNLSDAILLSDILRVNTEITKAPLSASMIKRYDEHHQDLTLLKALVRQQLPEKYKEIFFDQSKNGYAGYIDGGASQEEFYKFIKPILEKMDGTEELLVKLNREDLLRKQRTFDNGSIPHQIHLGELHAILRRQEDFYPFLKDNREKIEKILTFRIPYYVGPLARGNSRFAWMTRKSEETITPWNFEEVVDKGASAQSFIERMTNFDKNLPNEKVLPKHSLLYEYFTVYNELTKVKYVTEGMRKPAFLSGEQKKAIVDLLFKTNRKVTVKQLKEDYFKKIECFDSVEISGVEDRFNASLGTYHDLLKIIKDKDFLDNEENEDILEDIVLTLTLFEDREMIEERLKTYAHLFDDKVMKQLKRRRYTGWGRLSRKLINGIRDKQSGKTILDFLKSDGFANRNFMQLIHDDSLTFKEDIQKAQVSGQGDSLHEHIANLAGSPAIKKGILQTVKVVDELVKVMGRHKPENIVIEMARENQTTQKGQKNSRERMKRIEEGIKELGSQILKEHPVENTQLQNEKLYLYYLQNGRDMYVDQELDINRLSDYDVDHIVPQSFLKDDSIDNKVLTRSDKARGKSDNVPSEEVVKKMKNYWRQLLNAKLITQRKFDNLTKAERGGLSELDKAGFIKRQLVETRQITKHVAQILDSRMNTKYDENDKLIREVKVITLKSKLVSDFRKDFQFYKVREINNYHHAHDAYLNAVVGTALIKKYPKLESEFVYGDYKVYDVRKMIAKSEQEIGKATAKYFFYSNIMNFFKTEITLANGEIRKRPLIETNGETGEIVWDKGRDFATVRKVLSMPQVNIVKKTEVQTGGFSKESILPKRNSDKLIARKKDWDPKKYGGFDSPTVAYSVLVVAKVEKGKSKKLKSVKELLGITIMERSSFEKNPIDFLEAKGYKEVKKDLIIKLPKYSLFELENGRKRMLASAGELQKGNELALPSKYVNFLYLASHYEKLKGSPEDNEQKQLFVEQHKHYLDEIIEQISEFSKRVILADANLDKVLSAYNKHRDKPIREQAENIIHLFTLTNLGAPAAFKYFDTTIDRKRYTSTKEVLDATLIHQSITGLYETRIDLSQLGGDGGGGSGSSGGGGGVLNLEEEYRLHEKPVPSSIDPSWLQLFPTVWAERAGMGLANQVPPVVVELRSGASPVAVRQYPMSKEAREGIRPHIQRFLDLGVLVPCQSPWNTPLLPVKKPGTNDYRPVQDLREINKRVQDIHPTVPNPYNLLSSLPPSHTWYSVLDLKDAFFCLKLHPNSQPLFAFEWRDPEKGNTGQLTWTRLPQGFKNSPTLFNEALHRDLAPFRALNPQVVLLQYVDDLLVAAPTYRDCKEGTQKLLQELSKLGYRVSAKKAQLCQKEVTYLGYLLKEGKRWLTPARKATVMKIPPPTTPRQVREFLGKAGFCRLFIPGFASLAAPLYPLTKPSIPFIWTEEHQKAFDRIKEALLSAPALALPDLTKPFTLYVDERAGVARGVLTQTLGPWRRPVAYLSKKLDPVASGWPTCLKAVAAVALLLKDADKLTLGQNVTVIASHSLESIVRQPPDRWMTNARMTHYQSLLLNERVSFAPPAVLNPATLLPVESEATPVHRCSEILAEETGTRRDLKDQPLPGVPAWYTDGSSFIAEGKRRAGAAIVDGKRTVWASSLPEGTSAQKAELVALTQALRLAEGKDINIYTDSRYAFATAHIHGAIYKQRGWLTSAGKDIKNKEEILALLEAIHLPKRVAIIHCPGHQKGNDPVATGNRRADEAAKQAALSTRVLAETTKPAGKRTADGSEFEKRTADGSEFESPKKKAKVE

SEQ ID NO: 910 - protein, 2094 aa, synthetic construct
MPAAKRVKLDGGDKKYSIGLDIGTNSVGWAVITDEYKVPSKKFKVLGNTDRHSIKKNLIGALLFDSGETAEATRLKRTARRRYTRRKNRICYLQEIFSNEMAKVDDSFFHRLEESFLVEEDKKHERHPIFGNIVDEVAYHEKYPTIYHLRKKLVDSTDKADLRLIYLALAHMIKFRGHFLIEGDLNPDNSDVDKLFIQLVQTYNQLFEENPINASGVDAKAILSARLSKSRRLENLIAQLPGEKKNGLFGNLIALSLGLTPNFKSNFDLAEDAKLQLSKDTYDDDLDNLLAQIGDQYADLFLAAKNLSDAILLSDILRVNTEITKAPLSASMIKRYDEHHQDLTLLKALVRQQLPEKYKEIFFDQSKNGYAGYIDGGASQEEFYKFIKPILEKMDGTEELLVKLNREDLLRKQRTFDNGSIPHQIHLGELHAILRRQEDFYPFLKDNREKIEKILTFRIPYYVGPLARGNSRFAWMTRKSEETITPWNFEEVVDKGASAQSFIERMTNFDKNLPNEKVLPKHSLLYEYFTVYNELTKVKYVTEGMRKPAFLSGEQKKAIVDLLFKTNRKVTVKQLKEDYFKKIECFDSVEISGVEDRFNASLGTYHDLLKIIKDKDFLDNEENEDILEDIVLTLTLFEDREMIEERLKTYAHLFDDKVMKQLKRRRYTGWGRLSRKLINGIRDKQSGKTILDFLKSDGFANRNFMQLIHDDSLTFKEDIQKAQVSGQGDSLHEHIANLAGSPAIKKGILQTVKVVDELVKVMGRHKPENIVIEMARENQTTQKGQKNSRERMKRIEEGIKELGSQILKEHPVENTQLQNEKLYLYYLQNGRDMYVDQELDINRLSDYDVDHIVPQSFLKDDSIDNKVLTRSDKARGKSDNVPSEEVVKKMKNYWRQLLNAKLITQRKFDNLTKAERGGLSELDKAGFIKRQLVETRQITKHVAQILDSRMNTKYDENDKLIREVKVITLKSKLVSDFRKDFQFYKVREINNYHHAHDAYLNAVVGTALIKKYPKLESEFVYGDYKVYDVRKMIAKSEQEIGKATAKYFFYSNIMNFFKTEITLANGEIRKRPLIETNGETGEIVWDKGRDFATVRKVLSMPQVNIVKKTEVQTGGFSKESILPKRNSDKLIARKKDWDPKKYGGFDSPTVAYSVLVVAKVEKGKSKKLKSVKELLGITIMERSSFEKNPIDFLEAKGYKEVKKDLIIKLPKYSLFELENGRKRMLASAGELQKGNELALPSKYVNFLYLASHYEKLKGSPEDNEQKQLFVEQHKHYLDEIIEQISEFSKRVILADANLDKVLSAYNKHRDKPIREQAENIIHLFTLTNLGAPAAFKYFDTTIDRKRYTSTKEVLDATLIHQSITGLYETRIDLSQLGGDGGGSSEAAAKGGGGGVLNLEEEYRLHEKPVPSSIDPSWLQLFPTVWAERAGMGLANQVPPVVVELRSGASPVAVRQYPMSKEAREGIRPHIQRFLDLGVLVPCQSPWNTPLLPVKKPGTNDYRPVQDLREINKRVQDIHPTVPNPYNLLSSLPPSHTWYSVLDLKDAFFCLKLHPNSQPLFAFEWRDPEKGNTGQLTWTRLPQGFKNSPTLFNEALHRDLAPFRALNPQVVLLQYVDDLLVAAPTYRDCKEGTQKLLQELSKLGYRVSAKKAQLCQKEVTYLGYLLKEGKRWLTPARKATVMKIPPPTTPRQVREFLGKAGFCRLFIPGFASLAAPLYPLTKPSIPFIWTEEHQKAFDRIKEALLSAPALALPDLTKPFTLYVDERAGVARGVLTQTLGPWRRPVAYLSKKLDPVASGWPTCLKAVAAVALLLKDADKLTLGQNVTVIASHSLESIVRQPPDRWMTNARMTHYQSLLLNERVSFAPPAVLNPATLLPVESEATPVHRCSEILAEETGTRRDLKDQPLPGVPAWYTDGSSFIAEGKRRAGAAIVDGKRTVWASSLPEGTSAQKAELVALTQALRLAEGKDINIYTDSRYAFATAHIHGAIYKQRGWLTSAGKDIKNKEEILALLEAIHLPKRVAIIHCPGHQKGNDPVATGNRRADEAAKQAALSTRVLAETTKPAGKRTADGSEFEKRTADGSEFESPKKKAKVE

SEQ ID NO: 911 - protein, 2098 aa, synthetic construct
MPAAKRVKLDGGDKKYSIGLDIGTNSVGWAVITDEYKVPSKKFKVLGNTDRHSIKKNLIGALLFDSGETAEATRLKRTARRRYTRRKNRICYLQEIFSNEMAKVDDSFFHRLEESFLVEEDKKHERHPIFGNIVDEVAYHEKYPTIYHLRKKLVDSTDKADLRLIYLALAHMIKFRGHFLIEGDLNPDNSDVDKLFIQLVQTYNQLFEENPINASGVDAKAILSARLSKSRRLENLIAQLPGEKKNGLFGNLIALSLGLTPNFKSNFDLAEDAKLQLSKDTYDDDLDNLLAQIGDQYADLFLAAKNLSDAILLSDILRVNTEITKAPLSASMIKRYDEHHQDLTLLKALVRQQLPEKYKEIFFDQSKNGYAGYIDGGASQEEFYKFIKPILEKMDGTEELLVKLNREDLLRKQRTFDNGSIPHQIHLGELHAILRRQEDFYPFLKDNREKIEKILTFRIPYYVGPLARGNSRFAWMTRKSEETITPWNFEEVVDKGASAQSFIERMTNFDKNLPNEKVLPKHSLLYEYFTVYNELTKVKYVTEGMRKPAFLSGEQKKAIVDLLFKTNRKVTVKQLKEDYFKKIECFDSVEISGVEDRFNASLGTYHDLLKIIKDKDFLDNEENEDILEDIVLTLTLFEDREMIEERLKTYAHLFDDKVMKQLKRRRYTGWGRLSRKLINGIRDKQSGKTILDFLKSDGFANRNFMQLIHDDSLTFKEDIQKAQVSGQGDSLHEHIANLAGSPAIKKGILQTVKVVDELVKVMGRHKPENIVIEMARENQTTQKGQKNSRERMKRIEEGIKELGSQILKEHPVENTQLQNEKLYLYYLQNGRDMYVDQELDINRLSDYDVDHIVPQSFLKDDSIDNKVLTRSDKARGKSDNVPSEEVVKKMKNYWRQLLNAKLITQRKFDNLTKAERGGLSELDKAGFIKRQLVETRQITKHVAQILDSRMNTKYDENDKLIREVKVITLKSKLVSDFRKDFQFYKVREINNYHHAHDAYLNAVVGTALIKKYPKLESEFVYGDYKVYDVRKMIAKSEQEIGKATAKYFFYSNIMNFFKTEITLANGEIRKRPLIETNGETGEIVWDKGRDFATVRKVLSMPQVNIVKKTEVQTGGFSKESILPKRNSDKLIARKKDWDPKKYGGFDSPTVAYSVLVVAKVEKGKSKKLKSVKELLGITIMERSSFEKNPIDFLEAKGYKEVKKDLIIKLPKYSLFELENGRKRMLASAGELQKGNELALPSKYVNFLYLASHYEKLKGSPEDNEQKQLFVEQHKHYLDEIIEQISEFSKRVILADANLDKVLSAYNKHRDKPIREQAENIIHLFTLTNLGAPAAFKYFDTTIDRKRYTSTKEVLDATLIHQSITGLYETRIDLSQLGGDGGGGGGSEAAAKGGGGSGGVLNLEEEYRLHEKPVPSSIDPSWLQLFPTVWAERAGMGLANQVPPVVVELRSGASPVAVRQYPMSKEAREGIRPHIQRFLDLGVLVPCQSPWNTPLLPVKKPGTNDYRPVQDLREINKRVQDIHPTVPNPYNLLSSLPPSHTWYSVLDLKDAFFCLKLHPNSQPLFAFEWRDPEKGNTGQLTWTRLPQGFKNSPTLFNEALHRDLAPFRALNPQVVLLQYVDDLLVAAPTYRDCKEGTQKLLQELSKLGYRVSAKKAQLCQKEVTYLGYLLKEGKRWLTPARKATVMKIPPPTTPRQVREFLGKAGFCRLFIPGFASLAAPLYPLTKPSIPFIWTEEHQKAFDRIKEALLSAPALALPDLTKPFTLYVDERAGVARGVLTQTLGPWRRPVAYLSKKLDPVASGWPTCLKAVAAVALLLKDADKLTLGQNVTVIASHSLESIVRQPPDRWMTNARMTHYQSLLLNERVSFAPPAVLNPATLLPVESEATPVHRCSEILAEETGTRRDLKDQPLPGVPAWYTDGSSFIAEGKRRAGAAIVDGKRTVWASSLPEGTSAQKAELVALTQALRLAEGKDINIYTDSRYAFATAHIHGAIYKQRGWLTSAGKDIKNKEEILALLEAIHLPKRVAIIHCPGHQKGNDPVATGNRRADEAAKQAALSTRVLAETTKPAGKRTADGSEFEKRTADGSEFESPKKKAKVE

SEQ ID NO: 912 - protein, 2094 aa, synthetic construct
MPAAKRVKLDGGDKKYSIGLDIGTNSVGWAVITDEYKVPSKKFKVLGNTDRHSIKKNLIGALLFDSGETAEATRLKRTARRRYTRRKNRICYLQEIFSNEMAKVDDSFFHRLEESFLVEEDKKHERHPIFGNIVDEVAYHEKYPTIYHLRKKLVDSTDKADLRLIYLALAHMIKFRGHFLIEGDLNPDNSDVDKLFIQLVQTYNQLFEENPINASGVDAKAILSARLSKSRRLENLIAQLPGEKKNGLFGNLIALSLGLTPNFKSNFDLAEDAKLQLSKDTYDDDLDNLLAQIGDQYADLFLAAKNLSDAILLSDILRVNTEITKAPLSASMIKRYDEHHQDLTLLKALVRQQLPEKYKEIFFDQSKNGYAGYIDGGASQEEFYKFIKPILEKMDGTEELLVKLNREDLLRKQRTFDNGSIPHQIHLGELHAILRRQEDFYPFLKDNREKIEKILTFRIPYYVGPLARGNSRFAWMTRKSEETITPWNFEEVVDKGASAQSFIERMTNFDKNLPNEKVLPKHSLLYEYFTVYNELTKVKYVTEGMRKPAFLSGEQKKAIVDLLFKTNRKVTVKQLKEDYFKKIECFDSVEISGVEDRFNASLGTYHDLLKIIKDKDFLDNEENEDILEDIVLTLTLFEDREMIEERLKTYAHLFDDKVMKQLKRRRYTGWGRLSRKLINGIRDKQSGKTILDFLKSDGFANRNFMQLIHDDSLTFKEDIQKAQVSGQGDSLHEHIANLAGSPAIKKGILQTVKVVDELVKVMGRHKPENIVIEMARENQTTQKGQKNSRERMKRIEEGIKELGSQILKEHPVENTQLQNEKLYLYYLQNGRDMYVDQELDINRLSDYDVDHIVPQSFLKDDSIDNKVLTRSDKARGKSDNVPSEEVVKKMKNYWRQLLNAKLITQRKFDNLTKAERGGLSELDKAGFIKRQLVETRQITKHVAQILDSRMNTKYDENDKLIREVKVITLKSKLVSDFRKDFQFYKVREINNYHHAHDAYLNAVVGTALIKKYPKLESEFVYGDYKVYDVRKMIAKSEQEIGKATAKYFFYSNIMNFFKTEITLANGEIRKRPLIETNGETGEIVWDKGRDFATVRKVLSMPQVNIVKKTEVQTGGFSKESILPKRNSDKLIARKKDWDPKKYGGFDSPTVAYSVLVVAKVEKGKSKKLKSVKELLGITIMERSSFEKNPIDFLEAKGYKEVKKDLIIKLPKYSLFELENGRKRMLASAGELQKGNELALPSKYVNFLYLASHYEKLKGSPEDNEQKQLFVEQHKHYLDEIIEQISEFSKRVILADANLDKVLSAYNKHRDKPIREQAENIIHLFTLTNLGAPAAFKYFDTTIDRKRYTSTKEVLDATLIHQSITGLYETRIDLSQLGGDGGGGSEAAAKPAPGGVLNLEEEYRLHEKPVPSSIDPSWLQLFPTVWAERAGMGLANQVPPVVVELRSGASPVAVRQYPMSKEAREGIRPHIQRFLDLGVLVPCQSPWNTPLLPVKKPGTNDYRPVQDLREINKRVQDIHPTVPNPYNLLSSLPPSHTWYSVLDLKDAFFCLKLHPNSQPLFAFEWRDPEKGNTGQLTWTRLPQGFKNSPTLFNEALHRDLAPFRALNPQVVLLQYVDDLLVAAPTYRDCKEGTQKLLQELSKLGYRVSAKKAQLCQKEVTYLGYLLKEGKRWLTPARKATVMKIPPPTTPRQVREFLGKAGFCRLFIPGFASLAAPLYPLTKPSIPFIWTEEHQKAFDRIKEALLSAPALALPDLTKPFTLYVDERAGVARGVLTQTLGPWRRPVAYLSKKLDPVASGWPTCLKAVAAVALLLKDADKLTLGQNVTVIASHSLESIVRQPPDRWMTNARMTHYQSLLLNERVSFAPPAVLNPATLLPVESEATPVHRCSEILAEETGTRRDLKDQPLPGVPAWYTDGSSFIAEGKRRAGAAIVDGKRTVWASSLPEGTSAQKAELVALTQALRLAEGKDINIYTDSRYAFATAHIHGAIYKQRGWLTSAGKDIKNKEEILALLEAIHLPKRVAIIHCPGHQKGNDPVATGNRRADEAAKQAALSTRVLAETTKPAGKRTADGSEFEKRTADGSEFESPKKKAKVE

SEQ ID NO: 913 - protein, 2092 aa, synthetic construct
MPAAKRVKLDGGDKKYSIGLDIGTNSVGWAVITDEYKVPSKKFKVLGNTDRHSIKKNLIGALLFDSGETAEATRLKRTARRRYTRRKNRICYLQEIFSNEMAKVDDSFFHRLEESFLVEEDKKHERHPIFGNIVDEVAYHEKYPTIYHLRKKLVDSTDKADLRLIYLALAHMIKFRGHFLIEGDLNPDNSDVDKLFIQLVQTYNQLFEENPINASGVDAKAILSARLSKSRRLENLIAQLPGEKKNGLFGNLIALSLGLTPNFKSNFDLAEDAKLQLSKDTYDDDLDNLLAQIGDQYADLFLAAKNLSDAILLSDILRVNTEITKAPLSASMIKRYDEHHQDLTLLKALVRQQLPEKYKEIFFDQSKNGYAGYIDGGASQEEFYKFIKPILEKMDGTEELLVKLNREDLLRKQRTFDNGSIPHQIHLGELHAILRRQEDFYPFLKDNREKIEKILTFRIPYYVGPLARGNSRFAWMTRKSEETITPWNFEEVVDKGASAQSFIERMTNFDKNLPNEKVLPKHSLLYEYFTVYNELTKVKYVTEGMRKPAFLSGEQKKAIVDLLFKTNRKVTVKQLKEDYFKKIECFDSVEISGVEDRFNASLGTYHDLLKIIKDKDFLDNEENEDILEDIVLTLTLFEDREMIEERLKTYAHLFDDKVMKQLKRRRYTGWGRLSRKLINGIRDKQSGKTILDFLKSDGFANRNFMQLIHDDSLTFKEDIQKAQVSGQGDSLHEHIANLAGSPAIKKGILQTVKVVDELVKVMGRHKPENIVIEMARENQTTQKGQKNSRERMKRIEEGIKELGSQILKEHPVENTQLQNEKLYLYYLQNGRDMYVDQELDINRLSDYDVDHIVPQSFLKDDSIDNKVLTRSDKARGKSDNVPSEEVVKKMKNYWRQLLNAKLITQRKFDNLTKAERGGLSELDKAGFIKRQLVETRQITKHVAQILDSRMNTKYDENDKLIREVKVITLKSKLVSDFRKDFQFYKVREINNYHHAHDAYLNAVVGTALIKKYPKLESEFVYGDYKVYDVRKMIAKSEQEIGKATAKYFFYSNIMNFFKTEITLANGEIRKRPLIETNGETGEIVWDKGRDFATVRKVLSMPQVNIVKKTEVQTGGFSKESILPKRNSDKLIARKKDWDPKKYGGFDSPTVAYSVLVVAKVEKGKSKKLKSVKELLGITIMERSSFEKNPIDFLEAKGYKEVKKDLIIKLPKYSLFELENGRKRMLASAGELQKGNELALPSKYVNFLYLASHYEKLKGSPEDNEQKQLFVEQHKHYLDEIIEQISEFSKRVILADANLDKVLSAYNKHRDKPIREQAENIIHLFTLTNLGAPAAFKYFDTTIDRKRYTSTKEVLDATLIHQSITGLYETRIDLSQLGGDGGGGGPAPGSSGGVLNLEEEYRLHEKPVPSSIDPSWLQLFPTVWAERAGMGLANQVPPVVVELRSGASPVAVRQYPMSKEAREGIRPHIQRFLDLGVLVPCQSPWNTPLLPVKKPGTNDYRPVQDLREINKRVQDIHPTVPNPYNLLSSLPPSHTWYSVLDLKDAFFCLKLHPNSQPLFAFEWRDPEKGNTGQLTWTRLPQGFKNSPTLFNEALHRDLAPFRALNPQVVLLQYVDDLLVAAPTYRDCKEGTQKLLQELSKLGYRVSAKKAQLCQKEVTYLGYLLKEGKRWLTPARKATVMKIPPPTTPRQVREFLGKAGFCRLFIPGFASLAAPLYPLTKPSIPFIWTEEHQKAFDRIKEALLSAPALALPDLTKPFTLYVDERAGVARGVLTQTLGPWRRPVAYLSKKLDPVASGWPTCLKAVAAVALLLKDADKLTLGQNVTVIASHSLESIVRQPPDRWMTNARMTHYQSLLLNERVSFAPPAVLNPATLLPVESEATPVHRCSEILAEETGTRRDLKDQPLPGVPAWYTDGSSFIAEGKRRAGAAIVDGKRTVWASSLPEGTSAQKAELVALTQALRLAEGKDINIYTDSRYAFATAHIHGAIYKQRGWLTSAGKDIKNKEEILALLEAIHLPKRVAIIHCPGHQKGNDPVATGNRRADEAAKQAALSTRVLAETTKPAGKRTADGSEFEKRTADGSEFESPKKKAKVE

SEQ ID NO: 914 - protein, 2089 aa, synthetic construct
MPAAKRVKLDGGDKKYSIGLDIGTNSVGWAVITDEYKVPSKKFKVLGNTDRHSIKKNLIGALLFDSGETAEATRLKRTARRRYTRRKNRICYLQEIFSNEMAKVDDSFFHRLEESFLVEEDKKHERHPIFGNIVDEVAYHEKYPTIYHLRKKLVDSTDKADLRLIYLALAHMIKFRGHFLIEGDLNPDNSDVDKLFIQLVQTYNQLFEENPINASGVDAKAILSARLSKSRRLENLIAQLPGEKKNGLFGNLIALSLGLTPNFKSNFDLAEDAKLQLSKDTYDDDLDNLLAQIGDQYADLFLAAKNLSDAILLSDILRVNTEITKAPLSASMIKRYDEHHQDLTLLKALVRQQLPEKYKEIFFDQSKNGYAGYIDGGASQEEFYKFIKPILEKMDGTEELLVKLNREDLLRKQRTFDNGSIPHQIHLGELHAILRRQEDFYPFLKDNREKIEKILTFRIPYYVGPLARGNSRFAWMTRKSEETITPWNFEEVVDKGASAQSFIERMTNFDKNLPNEKVLPKHSLLYEYFTVYNELTKVKYVTEGMRKPAFLSGEQKKAIVDLLFKTNRKVTVKQLKEDYFKKIECFDSVEISGVEDRFNASLGTYHDLLKIIKDKDFLDNEENEDILEDIVLTLTLFEDREMIEERLKTYAHLFDDKVMKQLKRRRYTGWGRLSRKLINGIRDKQSGKTILDFLKSDGFANRNFMQLIHDDSLTFKEDIQKAQVSGQGDSLHEHIANLAGSPAIKKGILQTVKVVDELVKVMGRHKPENIVIEMARENQTTQKGQKNSRERMKRIEEGIKELGSQILKEHPVENTQLQNEKLYLYYLQNGRDMYVDQELDINRLSDYDVDHIVPQSFLKDDSIDNKVLTRSDKARGKSDNVPSEEVVKKMKNYWRQLLNAKLITQRKFDNLTKAERGGLSELDKAGFIKRQLVETRQITKHVAQILDSRMNTKYDENDKLIREVKVITLKSKLVSDFRKDFQFYKVREINNYHHAHDAYLNAVVGTALIKKYPKLESEFVYGDYKVYDVRKMIAKSEQEIGKATAKYFFYSNIMNFFKTEITLANGEIRKRPLIETNGETGEIVWDKGRDFATVRKVLSMPQVNIVKKTEVQTGGFSKESILPKRNSDKLIARKKDWDPKKYGGFDSPTVAYSVLVVAKVEKGKSKKLKSVKELLGITIMERSSFEKNPIDFLEAKGYKEVKKDLIIKLPKYSLFELENGRKRMLASAGELQKGNELALPSKYVNFLYLASHYEKLKGSPEDNEQKQLFVEQHKHYLDEIIEQISEFSKRVILADANLDKVLSAYNKHRDKPIREQAENIIHLFTLTNLGAPAAFKYFDTTIDRKRYTSTKEVLDATLIHQSITGLYETRIDLSQLGGDGGPAPGGGGGVLNLEEEYRLHEKPVPSSIDPSWLQLFPTVWAERAGMGLANQVPPVVVELRSGASPVAVRQYPMSKEAREGIRPHIQRFLDLGVLVPCQSPWNTPLLPVKKPGTNDYRPVQDLREINKRVQDIHPTVPNPYNLLSSLPPSHTWYSVLDLKDAFFCLKLHPNSQPLFAFEWRDPEKGNTGQLTWTRLPQGFKNSPTLFNEALHRDLAPFRALNPQVVLLQYVDDLLVAAPTYRDCKEGTQKLLQELSKLGYRVSAKKAQLCQKEVTYLGYLLKEGKRWLTPARKATVMKIPPPTTPRQVREFLGKAGFCRLFIPGFASLAAPLYPLTKPSIPFIWTEEHQKAFDRIKEALLSAPALALPDLTKPFTLYVDERAGVARGVLTQTLGPWRRPVAYLSKKLDPVASGWPTCLKAVAAVALLLKDADKLTLGQNVTVIASHSLESIVRQPPDRWMTNARMTHYQSLLLNERVSFAPPAVLNPATLLPVESEATPVHRCSEILAEETGTRRDLKDQPLPGVPAWYTDGSSFIAEGKRRAGAAIVDGKRTVWASSLPEGTSAQKAELVALTQALRLAEGKDINIYTDSRYAFATAHIHGAIYKQRGWLTSAGKDIKNKEEILALLEAIHLPKRVAIIHCPGHQKGNDPVATGNRRADEAAKQAALSTRVLAETTKPAGKRTADGSEFEKRTADGSEFESPKKKAKVE

SEQ ID NO: 915 - protein, 2094 aa, synthetic construct
MPAAKRVKLDGGDKKYSIGLDIGTNSVGWAVITDEYKVPSKKFKVLGNTDRHSIKKNLIGALLFDSGETAEATRLKRTARRRYTRRKNRICYLQEIFSNEMAKVDDSFFHRLEESFLVEEDKKHERHPIFGNIVDEVAYHEKYPTIYHLRKKLVDSTDKADLRLIYLALAHMIKFRGHFLIEGDLNPDNSDVDKLFIQLVQTYNQLFEENPINASGVDAKAILSARLSKSRRLENLIAQLPGEKKNGLFGNLIALSLGLTPNFKSNFDLAEDAKLQLSKDTYDDDLDNLLAQIGDQYADLFLAAKNLSDAILLSDILRVNTEITKAPLSASMIKRYDEHHQDLTLLKALVRQQLPEKYKEIFFDQSKNGYAGYIDGGASQEEFYKFIKPILEKMDGTEELLVKLNREDLLRKQRTFDNGSIPHQIHLGELHAILRRQEDFYPFLKDNREKIEKILTFRIPYYVGPLARGNSRFAWMTRKSEETITPWNFEEVVDKGASAQSFIERMTNFDKNLPNEKVLPKHSLLYEYFTVYNELTKVKYVTEGMRKPAFLSGEQKKAIVDLLFKTNRKVTVKQLKEDYFKKIECFDSVEISGVEDRFNASLGTYHDLLKIIKDKDFLDNEENEDILEDIVLTLTLFEDREMIEERLKTYAHLFDDKVMKQLKRRRYTGWGRLSRKLINGIRDKQSGKTILDFLKSDGFANRNFMQLIHDDSLTFKEDIQKAQVSGQGDSLHEHIANLAGSPAIKKGILQTVKVVDELVKVMGRHKPENIVIEMARENQTTQKGQKNSRERMKRIEEGIKELGSQILKEHPVENTQLQNEKLYLYYLQNGRDMYVDQELDINRLSDYDVDHIVPQSFLKDDSIDNKVLTRSDKARGKSDNVPSEEVVKKMKNYWRQLLNAKLITQRKFDNLTKAERGGLSELDKAGFIKRQLVETRQITKHVAQILDSRMNTKYDENDKLIREVKVITLKSKLVSDFRKDFQFYKVREINNYHHAHDAYLNAVVGTALIKKYPKLESEFVYGDYKVYDVRKMIAKSEQEIGKATAKYFFYSNIMNFFKTEITLANGEIRKRPLIETNGETGEIVWDKGRDFATVRKVLSMPQVNIVKKTEVQTGGFSKESILPKRNSDKLIARKKDWDPKKYGGFDSPTVAYSVLVVAKVEKGKSKKLKSVKELLGITIMERSSFEKNPIDFLEAKGYKEVKKDLIIKLPKYSLFELENGRKRMLASAGELQKGNELALPSKYVNFLYLASHYEKLKGSPEDNEQKQLFVEQHKHYLDEIIEQISEFSKRVILADANLDKVLSAYNKHRDKPIREQAENIIHLFTLTNLGAPAAFKYFDTTIDRKRYTSTKEVLDATLIHQSITGLYETRIDLSQLGGDGGGSSGGSEAAAKGGVLNLEEEYRLHEKPVPSSIDPSWLQLFPTVWAERAGMGLANQVPPVVVELRSGASPVAVRQYPMSKEAREGIRPHIQRFLDLGVLVPCQSPWNTPLLPVKKPGTNDYRPVQDLREINKRVQDIHPTVPNPYNLLSSLPPSHTWYSVLDLKDAFFCLKLHPNSQPLFAFEWRDPEKGNTGQLTWTRLPQGFKNSPTLFNEALHRDLAPFRALNPQVVLLQYVDDLLVAAPTYRDCKEGTQKLLQELSKLGYRVSAKKAQLCQKEVTYLGYLLKEGKRWLTPARKATVMKIPPPTTPRQVREFLGKAGFCRLFIPGFASLAAPLYPLTKPSIPFIWTEEHQKAFDRIKEALLSAPALALPDLTKPFTLYVDERAGVARGVLTQTLGPWRRPVAYLSKKLDPVASGWPTCLKAVAAVALLLKDADKLTLGQNVTVIASHSLESIVRQPPDRWMTNARMTHYQSLLLNERVSFAPPAVLNPATLLPVESEATPVHRCSEILAEETGTRRDLKDQPLPGVPAWYTDGSSFIAEGKRRAGAAIVDGKRTVWASSLPEGTSAQKAELVALTQALRLAEGKDINIYTDSRYAFATAHIHGAIYKQRGWLTSAGKDIKNKEEILALLEAIHLPKRVAIIHCPGHQKGNDPVATGNRRADEAAKQAALSTRVLAETTKPAGKRTADGSEFEKRTADGSEFESPKKKAKVE

SEQ ID NO: 916 - protein, 2092 aa, synthetic construct
MPAAKRVKLDGGDKKYSIGLDIGTNSVGWAVITDEYKVPSKKFKVLGNTDRHSIKKNLIGALLFDSGETAEATRLKRTARRRYTRRKNRICYLQEIFSNEMAKVDDSFFHRLEESFLVEEDKKHERHPIFGNIVDEVAYHEKYPTIYHLRKKLVDSTDKADLRLIYLALAHMIKFRGHFLIEGDLNPDNSDVDKLFIQLVQTYNQLFEENPINASGVDAKAILSARLSKSRRLENLIAQLPGEKKNGLFGNLIALSLGLTPNFKSNFDLAEDAKLQLSKDTYDDDLDNLLAQIGDQYADLFLAAKNLSDAILLSDILRVNTEITKAPLSASMIKRYDEHHQDLTLLKALVRQQLPEKYKEIFFDQSKNGYAGYIDGGASQEEFYKFIKPILEKMDGTEELLVKLNREDLLRKQRTFDNGSIPHQIHLGELHAILRRQEDFYPFLKDNREKIEKILTFRIPYYVGPLARGNSRFAWMTRKSEETITPWNFEEVVDKGASAQSFIERMTNFDKNLPNEKVLPKHSLLYEYFTVYNELTKVKYVTEGMRKPAFLSGEQKKAIVDLLFKTNRKVTVKQLKEDYFKKIECFDSVEISGVEDRFNASLGTYHDLLKIIKDKDFLDNEENEDILEDIVLTLTLFEDREMIEERLKTYAHLFDDKVMKQLKRRRYTGWGRLSRKLINGIRDKQSGKTILDFLKSDGFANRNFMQLIHDDSLTFKEDIQKAQVSGQGDSLHEHIANLAGSPAIKKGILQTVKVVDELVKVMGRHKPENIVIEMARENQTTQKGQKNSRERMKRIEEGIKELGSQILKEHPVENTQLQNEKLYLYYLQNGRDMYVDQELDINRLSDYDVDHIVPQSFLKDDSIDNKVLTRSDKARGKSDNVPSEEVVKKMKNYWRQLLNAKLITQRKFDNLTKAERGGLSELDKAGFIKRQLVETRQITKHVAQILDSRMNTKYDENDKLIREVKVITLKSKLVSDFRKDFQFYKVREINNYHHAHDAYLNAVVGTALIKKYPKLESEFVYGDYKVYDVRKMIAKSEQEIGKATAKYFFYSNIMNFFKTEITLANGEIRKRPLIETNGETGEIVWDKGRDFATVRKVLSMPQVNIVKKTEVQTGGFSKESILPKRNSDKLIARKKDWDPKKYGGFDSPTVAYSVLVVAKVEKGKSKKLKSVKELLGITIMERSSFEKNPIDFLEAKGYKEVKKDLIIKLPKYSLFELENGRKRMLASAGELQKGNELALPSKYVNFLYLASHYEKLKGSPEDNEQKQLFVEQHKHYLDEIIEQISEFSKRVILADANLDKVLSAYNKHRDKPIREQAENIIHLFTLTNLGAPAAFKYFDTTIDRKRYTSTKEVLDATLIHQSITGLYETRIDLSQLGGDGGPAPAPAPAPGGVLNLEEEYRLHEKPVPSSIDPSWLQLFPTVWAERAGMGLANQVPPVVVELRSGASPVAVRQYPMSKEAREGIRPHIQRFLDLGVLVPCQSPWNTPLLPVKKPGTNDYRPVQDLREINKRVQDIHPTVPNPYNLLSSLPPSHTWYSVLDLKDAFFCLKLHPNSQPLFAFEWRDPEKGNTGQLTWTRLPQGFKNSPTLFNEALHRDLAPFRALNPQVVLLQYVDDLLVAAPTYRDCKEGTQKLLQELSKLGYRVSAKKAQLCQKEVTYLGYLLKEGKRWLTPARKATVMKIPPPTTPRQVREFLGKAGFCRLFIPGFASLAAPLYPLTKPSIPFIWTEEHQKAFDRIKEALLSAPALALPDLTKPFTLYVDERAGVARGVLTQTLGPWRRPVAYLSKKLDPVASGWPTCLKAVAAVALLLKDADKLTLGQNVTVIASHSLESIVRQPPDRWMTNARMTHYQSLLLNERVSFAPPAVLNPATLLPVESEATPVHRCSEILAEETGTRRDLKDQPLPGVPAWYTDGSSFIAEGKRRAGAAIVDGKRTVWASSLPEGTSAQKAELVALTQALRLAEGKDINIYTDSRYAFATAHIHGAIYKQRGWLTSAGKDIKNKEEILALLEAIHLPKRVAIIHCPGHQKGNDPVATGNRRADEAAKQAALSTRVLAETTKPAGKRTADGSEFEKRTADGSEFESPKKKAKVE

SEQ ID NO: 917 - protein, 2093 aa, synthetic construct
MPAAKRVKLDGGDKKYSIGLDIGTNSVGWAVITDEYKVPSKKFKVLGNTDRHSIKKNLIGALLFDSGETAEATRLKRTARRRYTRRKNRICYLQEIFSNEMAKVDDSFFHRLEESFLVEEDKKHERHPIFGNIVDEVAYHEKYPTIYHLRKKLVDSTDKADLRLIYLALAHMIKFRGHFLIEGDLNPDNSDVDKLFIQLVQTYNQLFEENPINASGVDAKAILSARLSKSRRLENLIAQLPGEKKNGLFGNLIALSLGLTPNFKSNFDLAEDAKLQLSKDTYDDDLDNLLAQIGDQYADLFLAAKNLSDAILLSDILRVNTEITKAPLSASMIKRYDEHHQDLTLLKALVRQQLPEKYKEIFFDQSKNGYAGYIDGGASQEEFYKFIKPILEKMDGTEELLVKLNREDLLRKQRTFDNGSIPHQIHLGELHAILRRQEDFYPFLKDNREKIEKILTFRIPYYVGPLARGNSRFAWMTRKSEETITPWNFEEVVDKGASAQSFIERMTNFDKNLPNEKVLPKHSLLYEYFTVYNELTKVKYVTEGMRKPAFLSGEQKKAIVDLLFKTNRKVTVKQLKEDYFKKIECFDSVEISGVEDRFNASLGTYHDLLKIIKDKDFLDNEENEDILEDIVLTLTLFEDREMIEERLKTYAHLFDDKVMKQLKRRRYTGWGRLSRKLINGIRDKQSGKTILDFLKSDGFANRNFMQLIHDDSLTFKEDIQKAQVSGQGDSLHEHIANLAGSPAIKKGILQTVKVVDELVKVMGRHKPENIVIEMARENQTTQKGQKNSRERMKRIEEGIKELGSQILKEHPVENTQLQNEKLYLYYLQNGRDMYVDQELDINRLSDYDVDHIVPQSFLKDDSIDNKVLTRSDKARGKSDNVPSEEVVKKMKNYWRQLLNAKLITQRKFDNLTKAERGGLSELDKAGFIKRQLVETRQITKHVAQILDSRMNTKYDENDKLIREVKVITLKSKLVSDFRKDFQFYKVREINNYHHAHDAYLNAVVGTALIKKYPKLESEFVYGDYKVYDVRKMIAKSEQEIGKATAKYFFYSNIMNFFKTEITLANGEIRKRPLIETNGETGEIVWDKGRDFATVRKVLSMPQVNIVKKTEVQTGGFSKESILPKRNSDKLIARKKDWDPKKYGGFDSPTVAYSVLVVAKVEKGKSKKLKSVKELLGITIMERSSFEKNPIDFLEAKGYKEVKKDLIIKLPKYSLFELENGRKRMLASAGELQKGNELALPSKYVNFLYLASHYEKLKGSPEDNEQKQLFVEQHKHYLDEIIEQISEFSKRVILADANLDKVLSAYNKHRDKPIREQAENIIHLFTLTNLGAPAAFKYFDTTIDRKRYTSTKEVLDATLIHQSITGLYETRIDLSQLGGDGGEAAAKEAAAKGGVLNLEEEYRLHEKPVPSSIDPSWLQLFPTVWAERAGMGLANQVPPVVVELRSGASPVAVRQYPMSKEAREGIRPHIQRFLDLGVLVPCQSPWNTPLLPVKKPGTNDYRPVQDLREINKRVQDIHPTVPNPYNLLSSLPPSHTWYSVLDLKDAFFCLKLHPNSQPLFAFEWRDPEKGNTGQLTWTRLPQGFKNSPTLFNEALHRDLAPFRALNPQVVLLQYVDDLLVAAPTYRDCKEGTQKLLQELSKLGYRVSAKKAQLCQKEVTYLGYLLKEGKRWLTPARKATVMKIPPPTTPRQVREFLGKAGFCRLFIPGFASLAAPLYPLTKPSIPFIWTEEHQKAFDRIKEALLSAPALALPDLTKPFTLYVDERAGVARGVLTQTLGPWRRPVAYLSKKLDPVASGWPTCLKAVAAVALLLKDADKLTLGQNVTVIASHSLESIVRQPPDRWMTNARMTHYQSLLLNERVSFAPPAVLNPATLLPVESEATPVHRCSEILAEETGTRRDLKDQPLPGVPAWYTDGSSFIAEGKRRAGAAIVDGKRTVWASSLPEGTSAQKAELVALTQALRLAEGKDINIYTDSRYAFATAHIHGAIYKQRGWLTSAGKDIKNKEEILALLEAIHLPKRVAIIHCPGHQKGNDPVATGNRRADEAAKQAALSTRVLAETTKPAGKRTADGSEFEKRTADGSEFESPKKKAKVE

SEQ ID NO: 918 - protein, 2092 aa, synthetic construct
MPAAKRVKLDGGDKKYSIGLDIGTNSVGWAVITDEYKVPSKKFKVLGNTDRHSIKKNLIGALLFDSGETAEATRLKRTARRRYTRRKNRICYLQEIFSNEMAKVDDSFFHRLEESFLVEEDKKHERHPIFGNIVDEVAYHEKYPTIYHLRKKLVDSTDKADLRLIYLALAHMIKFRGHFLIEGDLNPDNSDVDKLFIQLVQTYNQLFEENPINASGVDAKAILSARLSKSRRLENLIAQLPGEKKNGLFGNLIALSLGLTPNFKSNFDLAEDAKLQLSKDTYDDDLDNLLAQIGDQYADLFLAAKNLSDAILLSDILRVNTEITKAPLSASMIKRYDEHHQDLTLLKALVRQQLPEKYKEIFFDQSKNGYAGYIDGGASQEEFYKFIKPILEKMDGTEELLVKLNREDLLRKQRTFDNGSIPHQIHLGELHAILRRQEDFYPFLKDNREKIEKILTFRIPYYVGPLARGNSRFAWMTRKSEETITPWNFEEVVDKGASAQSFIERMTNFDKNLPNEKVLPKHSLLYEYFTVYNELTKVKYVTEGMRKPAFLSGEQKKAIVDLLFKTNRKVTVKQLKEDYFKKIECFDSVEISGVEDRFNASLGTYHDLLKIIKDKDFLDNEENEDILEDIVLTLTLFEDREMIEERLKTYAHLFDDKVMKQLKRRRYTGWGRLSRKLINGIRDKQSGKTILDFLKSDGFANRNFMQLIHDDSLTFKEDIQKAQVSGQGDSLHEHIANLAGSPAIKKGILQTVKVVDELVKVMGRHKPENIVIEMARENQTTQKGQKNSRERMKRIEEGIKELGSQILKEHPVENTQLQNEKLYLYYLQNGRDMYVDQELDINRLSDYDVDHIVPQSFLKDDSIDNKVLTRSDKARGKSDNVPSEEVVKKMKNYWRQLLNAKLITQRKFDNLTKAERGGLSELDKAGFIKRQLVETRQITKHVAQILDSRMNTKYDENDKLIREVKVITLKSKLVSDFRKDFQFYKVREINNYHHAHDAYLNAVVGTALIKKYPKLESEFVYGDYKVYDVRKMIAKSEQEIGKATAKYFFYSNIMNFFKTEITLANGEIRKRPLIETNGETGEIVWDKGRDFATVRKVLSMPQVNIVKKTEVQTGGFSKESILPKRNSDKLIARKKDWDPKKYGGFDSPTVAYSVLVVAKVEKGKSKKLKSVKELLGITIMERSSFEKNPIDFLEAKGYKEVKKDLIIKLPKYSLFELENGRKRMLASAGELQKGNELALPSKYVNFLYLASHYEKLKGSPEDNEQKQLFVEQHKHYLDEIIEQISEFSKRVILADANLDKVLSAYNKHRDKPIREQAENIIHLFTLTNLGAPAAFKYFDTTIDRKRYTSTKEVLDATLIHQSITGLYETRIDLSQLGGDGGGSSGGGGGSGGVLNLEEEYRLHEKPVPSSIDPSWLQLFPTVWAERAGMGLANQVPPVVVELRSGASPVAVRQYPMSKEAREGIRPHIQRFLDLGVLVPCQSPWNTPLLPVKKPGTNDYRPVQDLREINKRVQDIHPTVPNPYNLLSSLPPSHTWYSVLDLKDAFFCLKLHPNSQPLFAFEWRDPEKGNTGQLTWTRLPQGFKNSPTLFNEALHRDLAPFRALNPQVVLLQYVDDLLVAAPTYRDCKEGTQKLLQELSKLGYRVSAKKAQLCQKEVTYLGYLLKEGKRWLTPARKATVMKIPPPTTPRQVREFLGKAGFCRLFIPGFASLAAPLYPLTKPSIPFIWTEEHQKAFDRIKEALLSAPALALPDLTKPFTLYVDERAGVARGVLTQTLGPWRRPVAYLSKKLDPVASGWPTCLKAVAAVALLLKDADKLTLGQNVTVIASHSLESIVRQPPDRWMTNARMTHYQSLLLNERVSFAPPAVLNPATLLPVESEATPVHRCSEILAEETGTRRDLKDQPLPGVPAWYTDGSSFIAEGKRRAGAAIVDGKRTVWASSLPEGTSAQKAELVALTQALRLAEGKDINIYTDSRYAFATAHIHGAIYKQRGWLTSAGKDIKNKEEILALLEAIHLPKRVAIIHCPGHQKGNDPVATGNRRADEAAKQAALSTRVLAETTKPAGKRTADGSEFEKRTADGSEFESPKKKAKVE

SEQ ID NO: 919 - protein, 2094 aa, synthetic construct
MPAAKRVKLDGGDKKYSIGLDIGTNSVGWAVITDEYKVPSKKFKVLGNTDRHSIKKNLIGALLFDSGETAEATRLKRTARRRYTRRKNRICYLQEIFSNEMAKVDDSFFHRLEESFLVEEDKKHERHPIFGNIVDEVAYHEKYPTIYHLRKKLVDSTDKADLRLIYLALAHMIKFRGHFLIEGDLNPDNSDVDKLFIQLVQTYNQLFEENPINASGVDAKAILSARLSKSRRLENLIAQLPGEKKNGLFGNLIALSLGLTPNFKSNFDLAEDAKLQLSKDTYDDDLDNLLAQIGDQYADLFLAAKNLSDAILLSDILRVNTEITKAPLSASMIKRYDEHHQDLTLLKALVRQQLPEKYKEIFFDQSKNGYAGYIDGGASQEEFYKFIKPILEKMDGTEELLVKLNREDLLRKQRTFDNGSIPHQIHLGELHAILRRQEDFYPFLKDNREKIEKILTFRIPYYVGPLARGNSRFAWMTRKSEETITPWNFEEVVDKGASAQSFIERMTNFDKNLPNEKVLPKHSLLYEYFTVYNELTKVKYVTEGMRKPAFLSGEQKKAIVDLLFKTNRKVTVKQLKEDYFKKIECFDSVEISGVEDRFNASLGTYHDLLKIIKDKDFLDNEENEDILEDIVLTLTLFEDREMIEERLKTYAHLFDDKVMKQLKRRRYTGWGRLSRKLINGIRDKQSGKTILDFLKSDGFANRNFMQLIHDDSLTFKEDIQKAQVSGQGDSLHEHIANLAGSPAIKKGILQTVKVVDELVKVMGRHKPENIVIEMARENQTTQKGQKNSRERMKRIEEGIKELGSQILKEHPVENTQLQNEKLYLYYLQNGRDMYVDQELDINRLSDYDVDHIVPQSFLKDDSIDNKVLTRSDKARGKSDNVPSEEVVKKMKNYWRQLLNAKLITQRKFDNLTKAERGGLSELDKAGFIKRQLVETRQITKHVAQILDSRMNTKYDENDKLIREVKVITLKSKLVSDFRKDFQFYKVREINNYHHAHDAYLNAVVGTALIKKYPKLESEFVYGDYKVYDVRKMIAKSEQEIGKATAKYFFYSNIMNFFKTEITLANGEIRKRPLIETNGETGEIVWDKGRDFATVRKVLSMPQVNIVKKTEVQTGGFSKESILPKRNSDKLIARKKDWDPKKYGGFDSPTVAYSVLVVAKVEKGKSKKLKSVKELLGITIMERSSFEKNPIDFLEAKGYKEVKKDLIIKLPKYSLFELENGRKRMLASAGELQKGNELALPSKYVNFLYLASHYEKLKGSPEDNEQKQLFVEQHKHYLDEIIEQISEFSKRVILADANLDKVLSAYNKHRDKPIREQAENIIHLFTLTNLGAPAAFKYFDTTIDRKRYTSTKEVLDATLIHQSITGLYETRIDLSQLGGDGGEAAAKGSSPAPGGVLNLEEEYRLHEKPVPSSIDPSWLQLFPTVWAERAGMGLANQVPPVVVELRSGASPVAVRQYPMSKEAREGIRPHIQRFLDLGVLVPCQSPWNTPLLPVKKPGTNDYRPVQDLREINKRVQDIHPTVPNPYNLLSSLPPSHTWYSVLDLKDAFFCLKLHPNSQPLFAFEWRDPEKGNTGQLTWTRLPQGFKNSPTLFNEALHRDLAPFRALNPQVVLLQYVDDLLVAAPTYRDCKEGTQKLLQELSKLGYRVSAKKAQLCQKEVTYLGYLLKEGKRWLTPARKATVMKIPPPTTPRQVREFLGKAGFCRLFIPGFASLAAPLYPLTKPSIPFIWTEEHQKAFDRIKEALLSAPALALPDLTKPFTLYVDERAGVARGVLTQTLGPWRRPVAYLSKKLDPVASGWPTCLKAVAAVALLLKDADKLTLGQNVTVIASHSLESIVRQPPDRWMTNARMTHYQSLLLNERVSFAPPAVLNPATLLPVESEATPVHRCSEILAEETGTRRDLKDQPLPGVPAWYTDGSSFIAEGKRRAGAAIVDGKRTVWASSLPEGTSAQKAELVALTQALRLAEGKDINIYTDSRYAFATAHIHGAIYKQRGWLTSAGKDIKNKEEILALLEAIHLPKRVAIIHCPGHQKGNDPVATGNRRADEAAKQAALSTRVLAETTKPAGKRTADGSEFEKRTADGSEFESPKKKAKVE

SEQ ID NO: 920 - protein, 2094 aa, synthetic construct
MPAAKRVKLDGGDKKYSIGLDIGTNSVGWAVITDEYKVPSKKFKVLGNTDRHSIKKNLIGALLFDSGETAEATRLKRTARRRYTRRKNRICYLQEIFSNEMAKVDDSFFHRLEESFLVEEDKKHERHPIFGNIVDEVAYHEKYPTIYHLRKKLVDSTDKADLRLIYLALAHMIKFRGHFLIEGDLNPDNSDVDKLFIQLVQTYNQLFEENPINASGVDAKAILSARLSKSRRLENLIAQLPGEKKNGLFGNLIALSLGLTPNFKSNFDLAEDAKLQLSKDTYDDDLDNLLAQIGDQYADLFLAAKNLSDAILLSDILRVNTEITKAPLSASMIKRYDEHHQDLTLLKALVRQQLPEKYKEIFFDQSKNGYAGYIDGGASQEEFYKFIKPILEKMDGTEELLVKLNREDLLRKQRTFDNGSIPHQIHLGELHAILRRQEDFYPFLKDNREKIEKILTFRIPYYVGPLARGNSRFAWMTRKSEETITPWNFEEVVDKGASAQSFIERMTNFDKNLPNEKVLPKHSLLYEYFTVYNELTKVKYVTEGMRKPAFLSGEQKKAIVDLLFKTNRKVTVKQLKEDYFKKIECFDSVEISGVEDRFNASLGTYHDLLKIIKDKDFLDNEENEDILEDIVLTLTLFEDREMIEERLKTYAHLFDDKVMKQLKRRRYTGWGRLSRKLINGIRDKQSGKTILDFLKSDGFANRNFMQLIHDDSLTFKEDIQKAQVSGQGDSLHEHIANLAGSPAIKKGILQTVKVVDELVKVMGRHKPENIVIEMARENQTTQKGQKNSRERMKRIEEGIKELGSQILKEHPVENTQLQNEKLYLYYLQNGRDMYVDQELDINRLSDYDVDHIVPQSFLKDDSIDNKVLTRSDKARGKSDNVPSEEVVKKMKNYWRQLLNAKLITQRKFDNLTKAERGGLSELDKAGFIKRQLVETRQITKHVAQILDSRMNTKYDENDKLIREVKVITLKSKLVSDFRKDFQFYKVREINNYHHAHDAYLNAVVGTALIKKYPKLESEFVYGDYKVYDVRKMIAKSEQEIGKATAKYFFYSNIMNFFKTEITLANGEIRKRPLIETNGETGEIVWDKGRDFATVRKVLSMPQVNIVKKTEVQTGGFSKESILPKRNSDKLIARKKDWDPKKYGGFDSPTVAYSVLVVAKVEKGKSKKLKSVKELLGITIMERSSFEKNPIDFLEAKGYKEVKKDLIIKLPKYSLFELENGRKRMLASAGELQKGNELALPSKYVNFLYLASHYEKLKGSPEDNEQKQLFVEQHKHYLDEIIEQISEFSKRVILADANLDKVLSAYNKHRDKPIREQAENIIHLFTLTNLGAPAAFKYFDTTIDRKRYTSTKEVLDATLIHQSITGLYETRIDLSQLGGDGGGSSGGGEAAAKGGVLNLEEEYRLHEKPVPSSIDPSWLQLFPTVWAERAGMGLANQVPPVVVELRSGASPVAVRQYPMSKEAREGIRPHIQRFLDLGVLVPCQSPWNTPLLPVKKPGTNDYRPVQDLREINKRVQDIHPTVPNPYNLLSSLPPSHTWYSVLDLKDAFFCLKLHPNSQPLFAFEWRDPEKGNTGQLTWTRLPQGFKNSPTLFNEALHRDLAPFRALNPQVVLLQYVDDLLVAAPTYRDCKEGTQKLLQELSKLGYRVSAKKAQLCQKEVTYLGYLLKEGKRWLTPARKATVMKIPPPTTPRQVREFLGKAGFCRLFIPGFASLAAPLYPLTKPSIPFIWTEEHQKAFDRIKEALLSAPALALPDLTKPFTLYVDERAGVARGVLTQTLGPWRRPVAYLSKKLDPVASGWPTCLKAVAAVALLLKDADKLTLGQNVTVIASHSLESIVRQPPDRWMTNARMTHYQSLLLNERVSFAPPAVLNPATLLPVESEATPVHRCSEILAEETGTRRDLKDQPLPGVPAWYTDGSSFIAEGKRRAGAAIVDGKRTVWASSLPEGTSAQKAELVALTQALRLAEGKDINIYTDSRYAFATAHIHGAIYKQRGWLTSAGKDIKNKEEILALLEAIHLPKRVAIIHCPGHQKGNDPVATGNRRADEAAKQAALSTRVLAETTKPAGKRTADGSEFEKRTADGSEFESPKKKAKVE

SEQ ID NO: 921 - protein, 2094 aa, synthetic construct
MPAAKRVKLDGGDKKYSIGLDIGTNSVGWAVITDEYKVPSKKFKVLGNTDRHSIKKNLIGALLFDSGETAEATRLKRTARRRYTRRKNRICYLQEIFSNEMAKVDDSFFHRLEESFLVEEDKKHERHPIFGNIVDEVAYHEKYPTIYHLRKKLVDSTDKADLRLIYLALAHMIKFRGHFLIEGDLNPDNSDVDKLFIQLVQTYNQLFEENPINASGVDAKAILSARLSKSRRLENLIAQLPGEKKNGLFGNLIALSLGLTPNFKSNFDLAEDAKLQLSKDTYDDDLDNLLAQIGDQYADLFLAAKNLSDAILLSDILRVNTEITKAPLSASMIKRYDEHHQDLTLLKALVRQQLPEKYKEIFFDQSKNGYAGYIDGGASQEEFYKFIKPILEKMDGTEELLVKLNREDLLRKQRTFDNGSIPHQIHLGELHAILRRQEDFYPFLKDNREKIEKILTFRIPYYVGPLARGNSRFAWMTRKSEETITPWNFEEVVDKGASAQSFIERMTNFDKNLPNEKVLPKHSLLYEYFTVYNELTKVKYVTEGMRKPAFLSGEQKKAIVDLLFKTNRKVTVKQLKEDYFKKIECFDSVEISGVEDRFNASLGTYHDLLKIIKDKDFLDNEENEDILEDIVLTLTLFEDREMIEERLKTYAHLFDDKVMKQLKRRRYTGWGRLSRKLINGIRDKQSGKTILDFLKSDGFANRNFMQLIHDDSLTFKEDIQKAQVSGQGDSLHEHIANLAGSPAIKKGILQTVKVVDELVKVMGRHKPENIVIEMARENQTTQKGQKNSRERMKRIEEGIKELGSQILKEHPVENTQLQNEKLYLYYLQNGRDMYVDQELDINRLSDYDVDHIVPQSFLKDDSIDNKVLTRSDKARGKSDNVPSEEVVKKMKNYWRQLLNAKLITQRKFDNLTKAERGGLSELDKAGFIKRQLVETRQITKHVAQILDSRMNTKYDENDKLIREVKVITLKSKLVSDFRKDFQFYKVREINNYHHAHDAYLNAVVGTALIKKYPKLESEFVYGDYKVYDVRKMIAKSEQEIGKATAKYFFYSNIMNFFKTEITLANGEIRKRPLIETNGETGEIVWDKGRDFATVRKVLSMPQVNIVKKTEVQTGGFSKESILPKRNSDKLIARKKDWDPKKYGGFDSPTVAYSVLVVAKVEKGKSKKLKSVKELLGITIMERSSFEKNPIDFLEAKGYKEVKKDLIIKLPKYSLFELENGRKRMLASAGELQKGNELALPSKYVNFLYLASHYEKLKGSPEDNEQKQLFVEQHKHYLDEIIEQISEFSKRVILADANLDKVLSAYNKHRDKPIREQAENIIHLFTLTNLGAPAAFKYFDTTIDRKRYTSTKEVLDATLIHQSITGLYETRIDLSQLGGDGGEAAAKPAPGGSGGVLNLEEEYRLHEKPVPSSIDPSWLQLFPTVWAERAGMGLANQVPPVVVELRSGASPVAVRQYPMSKEAREGIRPHIQRFLDLGVLVPCQSPWNTPLLPVKKPGTNDYRPVQDLREINKRVQDIHPTVPNPYNLLSSLPPSHTWYSVLDLKDAFFCLKLHPNSQPLFAFEWRDPEKGNTGQLTWTRLPQGFKNSPTLFNEALHRDLAPFRALNPQVVLLQYVDDLLVAAPTYRDCKEGTQKLLQELSKLGYRVSAKKAQLCQKEVTYLGYLLKEGKRWLTPARKATVMKIPPPTTPRQVREFLGKAGFCRLFIPGFASLAAPLYPLTKPSIPFIWTEEHQKAFDRIKEALLSAPALALPDLTKPFTLYVDERAGVARGVLTQTLGPWRRPVAYLSKKLDPVASGWPTCLKAVAAVALLLKDADKLTLGQNVTVIASHSLESIVRQPPDRWMTNARMTHYQSLLLNERVSFAPPAVLNPATLLPVESEATPVHRCSEILAEETGTRRDLKDQPLPGVPAWYTDGSSFIAEGKRRAGAAIVDGKRTVWASSLPEGTSAQKAELVALTQALRLAEGKDINIYTDSRYAFATAHIHGAIYKQRGWLTSAGKDIKNKEEILALLEAIHLPKRVAIIHCPGHQKGNDPVATGNRRADEAAKQAALSTRVLAETTKPAGKRTADGSEFEKRTADGSEFESPKKKAKVE

SEQ ID NO: 922 - protein, 2092 aa, synthetic construct
MPAAKRVKLDGGDKKYSIGLDIGTNSVGWAVITDEYKVPSKKFKVLGNTDRHSIKKNLIGALLFDSGETAEATRLKRTARRRYTRRKNRICYLQEIFSNEMAKVDDSFFHRLEESFLVEEDKKHERHPIFGNIVDEVAYHEKYPTIYHLRKKLVDSTDKADLRLIYLALAHMIKFRGHFLIEGDLNPDNSDVDKLFIQLVQTYNQLFEENPINASGVDAKAILSARLSKSRRLENLIAQLPGEKKNGLFGNLIALSLGLTPNFKSNFDLAEDAKLQLSKDTYDDDLDNLLAQIGDQYADLFLAAKNLSDAILLSDILRVNTEITKAPLSASMIKRYDEHHQDLTLLKALVRQQLPEKYKEIFFDQSKNGYAGYIDGGASQEEFYKFIKPILEKMDGTEELLVKLNREDLLRKQRTFDNGSIPHQIHLGELHAILRRQEDFYPFLKDNREKIEKILTFRIPYYVGPLARGNSRFAWMTRKSEETITPWNFEEVVDKGASAQSFIERMTNFDKNLPNEKVLPKHSLLYEYFTVYNELTKVKYVTEGMRKPAFLSGEQKKAIVDLLFKTNRKVTVKQLKEDYFKKIECFDSVEISGVEDRFNASLGTYHDLLKIIKDKDFLDNEENEDILEDIVLTLTLFEDREMIEERLKTYAHLFDDKVMKQLKRRRYTGWGRLSRKLINGIRDKQSGKTILDFLKSDGFANRNFMQLIHDDSLTFKEDIQKAQVSGQGDSLHEHIANLAGSPAIKKGILQTVKVVDELVKVMGRHKPENIVIEMARENQTTQKGQKNSRERMKRIEEGIKELGSQILKEHPVENTQLQNEKLYLYYLQNGRDMYVDQELDINRLSDYDVDHIVPQSFLKDDSIDNKVLTRSDKARGKSDNVPSEEVVKKMKNYWRQLLNAKLITQRKFDNLTKAERGGLSELDKAGFIKRQLVETRQITKHVAQILDSRMNTKYDENDKLIREVKVITLKSKLVSDFRKDFQFYKVREINNYHHAHDAYLNAVVGTALIKKYPKLESEFVYGDYKVYDVRKMIAKSEQEIGKATAKYFFYSNIMNFFKTEITLANGEIRKRPLIETNGETGEIVWDKGRDFATVRKVLSMPQVNIVKKTEVQTGGFSKESILPKRNSDKLIARKKDWDPKKYGGFDSPTVAYSVLVVAKVEKGKSKKLKSVKELLGITIMERSSFEKNPIDFLEAKGYKEVKKDLIIKLPKYSLFELENGRKRMLASAGELQKGNELALPSKYVNFLYLASHYEKLKGSPEDNEQKQLFVEQHKHYLDEIIEQISEFSKRVILADANLDKVLSAYNKHRDKPIREQAENIIHLFTLTNLGAPAAFKYFDTTIDRKRYTSTKEVLDATLIHQSITGLYETRIDLSQLGGDGGGSSPAPGGGGGVLNLEEEYRLHEKPVPSSIDPSWLQLFPTVWAERAGMGLANQVPPVVVELRSGASPVAVRQYPMSKEAREGIRPHIQRFLDLGVLVPCQSPWNTPLLPVKKPGTNDYRPVQDLREINKRVQDIHPTVPNPYNLLSSLPPSHTWYSVLDLKDAFFCLKLHPNSQPLFAFEWRDPEKGNTGQLTWTRLPQGFKNSPTLFNEALHRDLAPFRALNPQVVLLQYVDDLLVAAPTYRDCKEGTQKLLQELSKLGYRVSAKKAQLCQKEVTYLGYLLKEGKRWLTPARKATVMKIPPPTTPRQVREFLGKAGFCRLFIPGFASLAAPLYPLTKPSIPFIWTEEHQKAFDRIKEALLSAPALALPDLTKPFTLYVDERAGVARGVLTQTLGPWRRPVAYLSKKLDPVASGWPTCLKAVAAVALLLKDADKLTLGQNVTVIASHSLESIVRQPPDRWMTNARMTHYQSLLLNERVSFAPPAVLNPATLLPVESEATPVHRCSEILAEETGTRRDLKDQPLPGVPAWYTDGSSFIAEGKRRAGAAIVDGKRTVWASSLPEGTSAQKAELVALTQALRLAEGKDINIYTDSRYAFATAHIHGAIYKQRGWLTSAGKDIKNKEEILALLEAIHLPKRVAIIHCPGHQKGNDPVATGNRRADEAAKQAALSTRVLAETTKPAGKRTADGSEFEKRTADGSEFESPKKKAKVE

SEQ ID NO: 923 - protein, 2101 aa, synthetic construct
MPAAKRVKLDGGDKKYSIGLDIGTNSVGWAVITDEYKVPSKKFKVLGNTDRHSIKKNLIGALLFDSGETAEATRLKRTARRRYTRRKNRICYLQEIFSNEMAKVDDSFFHRLEESFLVEEDKKHERHPIFGNIVDEVAYHEKYPTIYHLRKKLVDSTDKADLRLIYLALAHMIKFRGHFLIEGDLNPDNSDVDKLFIQLVQTYNQLFEENPINASGVDAKAILSARLSKSRRLENLIAQLPGEKKNGLFGNLIALSLGLTPNFKSNFDLAEDAKLQLSKDTYDDDLDNLLAQIGDQYADLFLAAKNLSDAILLSDILRVNTEITKAPLSASMIKRYDEHHQDLTLLKALVRQQLPEKYKEIFFDQSKNGYAGYIDGGASQEEFYKFIKPILEKMDGTEELLVKLNREDLLRKQRTFDNGSIPHQIHLGELHAILRRQEDFYPFLKDNREKIEKILTFRIPYYVGPLARGNSRFAWMTRKSEETITPWNFEEVVDKGASAQSFIERMTNFDKNLPNEKVLPKHSLLYEYFTVYNELTKVKYVTEGMRKPAFLSGEQKKAIVDLLFKTNRKVTVKQLKEDYFKKIECFDSVEISGVEDRFNASLGTYHDLLKIIKDKDFLDNEENEDILEDIVLTLTLFEDREMIEERLKTYAHLFDDKVMKQLKRRRYTGWGRLSRKLINGIRDKQSGKTILDFLKSDGFANRNFMQLIHDDSLTFKEDIQKAQVSGQGDSLHEHIANLAGSPAIKKGILQTVKVVDELVKVMGRHKPENIVIEMARENQTTQKGQKNSRERMKRIEEGIKELGSQILKEHPVENTQLQNEKLYLYYLQNGRDMYVDQELDINRLSDYDVDHIVPQSFLKDDSIDNKVLTRSDKARGKSDNVPSEEVVKKMKNYWRQLLNAKLITQRKFDNLTKAERGGLSELDKAGFIKRQLVETRQITKHVAQILDSRMNTKYDENDKLIREVKVITLKSKLVSDFRKDFQFYKVREINNYHHAHDAYLNAVVGTALIKKYPKLESEFVYGDYKVYDVRKMIAKSEQEIGKATAKYFFYSNIMNFFKTEITLANGEIRKRPLIETNGETGEIVWDKGRDFATVRKVLSMPQVNIVKKTEVQTGGFSKESILPKRNSDKLIARKKDWDPKKYGGFDSPTVAYSVLVVAKVEKGKSKKLKSVKELLGITIMERSSFEKNPIDFLEAKGYKEVKKDLIIKLPKYSLFELENGRKRMLASAGELQKGNELALPSKYVNFLYLASHYEKLKGSPEDNEQKQLFVEQHKHYLDEIIEQISEFSKRVILADANLDKVLSAYNKHRDKPIREQAENIIHLFTLTNLGAPAAFKYFDTTIDRKRYTSTKEVLDATLIHQSITGLYETRIDLSQLGGDGGGSSGSSGSSGSSGSSGSSGGVLNLEEEYRLHEKPVPSSIDPSWLQLFPTVWAERAGMGLANQVPPVVVELRSGASPVAVRQYPMSKEAREGIRPHIQRFLDLGVLVPCQSPWNTPLLPVKKPGTNDYRPVQDLREINKRVQDIHPTVPNPYNLLSSLPPSHTWYSVLDLKDAFFCLKLHPNSQPLFAFEWRDPEKGNTGQLTWTRLPQGFKNSPTLFNEALHRDLAPFRALNPQVVLLQYVDDLLVAAPTYRDCKEGTQKLLQELSKLGYRVSAKKAQLCQKEVTYLGYLLKEGKRWLTPARKATVMKIPPPTTPRQVREFLGKAGFCRLFIPGFASLAAPLYPLTKPSIPFIWTEEHQKAFDRIKEALLSAPALALPDLTKPFTLYVDERAGVARGVLTQTLGPWRRPVAYLSKKLDPVASGWPTCLKAVAAVALLLKDADKLTLGQNVTVIASHSLESIVRQPPDRWMTNARMTHYQSLLLNERVSFAPPAVLNPATLLPVESEATPVHRCSEILAEETGTRRDLKDQPLPGVPAWYTDGSSFIAEGKRRAGAAIVDGKRTVWASSLPEGTSAQKAELVALTQALRLAEGKDINIYTDSRYAFATAHIHGAIYKQRGWLTSAGKDIKNKEEILALLEAIHLPKRVAIIHCPGHQKGNDPVATGNRRADEAAKQAALSTRVLAETTKPAGKRTADGSEFEKRTADGSEFESPKKKAKVE

SEQ ID NO: 924 - protein, 2092 aa, synthetic construct
MPAAKRVKLDGGDKKYSIGLDIGTNSVGWAVITDEYKVPSKKFKVLGNTDRHSIKKNLIGALLFDSGETAEATRLKRTARRRYTRRKNRICYLQEIFSNEMAKVDDSFFHRLEESFLVEEDKKHERHPIFGNIVDEVAYHEKYPTIYHLRKKLVDSTDKADLRLIYLALAHMIKFRGHFLIEGDLNPDNSDVDKLFIQLVQTYNQLFEENPINASGVDAKAILSARLSKSRRLENLIAQLPGEKKNGLFGNLIALSLGLTPNFKSNFDLAEDAKLQLSKDTYDDDLDNLLAQIGDQYADLFLAAKNLSDAILLSDILRVNTEITKAPLSASMIKRYDEHHQDLTLLKALVRQQLPEKYKEIFFDQSKNGYAGYIDGGASQEEFYKFIKPILEKMDGTEELLVKLNREDLLRKQRTFDNGSIPHQIHLGELHAILRRQEDFYPFLKDNREKIEKILTFRIPYYVGPLARGNSRFAWMTRKSEETITPWNFEEVVDKGASAQSFIERMTNFDKNLPNEKVLPKHSLLYEYFTVYNELTKVKYVTEGMRKPAFLSGEQKKAIVDLLFKTNRKVTVKQLKEDYFKKIECFDSVEISGVEDRFNASLGTYHDLLKIIKDKDFLDNEENEDILEDIVLTLTLFEDREMIEERLKTYAHLFDDKVMKQLKRRRYTGWGRLSRKLINGIRDKQSGKTILDFLKSDGFANRNFMQLIHDDSLTFKEDIQKAQVSGQGDSLHEHIANLAGSPAIKKGILQTVKVVDELVKVMGRHKPENIVIEMARENQTTQKGQKNSRERMKRIEEGIKELGSQILKEHPVENTQLQNEKLYLYYLQNGRDMYVDQELDINRLSDYDVDHIVPQSFLKDDSIDNKVLTRSDKARGKSDNVPSEEVVKKMKNYWRQLLNAKLITQRKFDNLTKAERGGLSELDKAGFIKRQLVETRQITKHVAQILDSRMNTKYDENDKLIREVKVITLKSKLVSDFRKDFQFYKVREINNYHHAHDAYLNAVVGTALIKKYPKLESEFVYGDYKVYDVRKMIAKSEQEIGKATAKYFFYSNIMNFFKTEITLANGEIRKRPLIETNGETGEIVWDKGRDFATVRKVLSMPQVNIVKKTEVQTGGFSKESILPKRNSDKLIARKKDWDPKKYGGFDSPTVAYSVLVVAKVEKGKSKKLKSVKELLGITIMERSSFEKNPIDFLEAKGYKEVKKDLIIKLPKYSLFELENGRKRMLASAGELQKGNELALPSKYVNFLYLASHYEKLKGSPEDNEQKQLFVEQHKHYLDEIIEQISEFSKRVILADANLDKVLSAYNKHRDKPIREQAENIIHLFTLTNLGAPAAFKYFDTTIDRKRYTSTKEVLDATLIHQSITGLYETRIDLSQLGGDGGGGSGSSPAPGGVLNLEEEYRLHEKPVPSSIDPSWLQLFPTVWAERAGMGLANQVPPVVVELRSGASPVAVRQYPMSKEAREGIRPHIQRFLDLGVLVPCQSPWNTPLLPVKKPGTNDYRPVQDLREINKRVQDIHPTVPNPYNLLSSLPPSHTWYSVLDLKDAFFCLKLHPNSQPLFAFEWRDPEKGNTGQLTWTRLPQGFKNSPTLFNEALHRDLAPFRALNPQVVLLQYVDDLLVAAPTYRDCKEGTQKLLQELSKLGYRVSAKKAQLCQKEVTYLGYLLKEGKRWLTPARKATVMKIPPPTTPRQVREFLGKAGFCRLFIPGFASLAAPLYPLTKPSIPFIWTEEHQKAFDRIKEALLSAPALALPDLTKPFTLYVDERAGVARGVLTQTLGPWRRPVAYLSKKLDPVASGWPTCLKAVAAVALLLKDADKLTLGQNVTVIASHSLESIVRQPPDRWMTNARMTHYQSLLLNERVSFAPPAVLNPATLLPVESEATPVHRCSEILAEETGTRRDLKDQPLPGVPAWYTDGSSFIAEGKRRAGAAIVDGKRTVWASSLPEGTSAQKAELVALTQALRLAEGKDINIYTDSRYAFATAHIHGAIYKQRGWLTSAGKDIKNKEEILALLEAIHLPKRVAIIHCPGHQKGNDPVATGNRRADEAAKQAALSTRVLAETTKPAGKRTADGSEFEKRTADGSEFESPKKKAKVE

SEQ ID NO: 925 - protein, 2094 aa, synthetic construct
MPAAKRVKLDGGDKKYSIGLDIGTNSVGWAVITDEYKVPSKKFKVLGNTDRHSIKKNLIGALLFDSGETAEATRLKRTARRRYTRRKNRICYLQEIFSNEMAKVDDSFFHRLEESFLVEEDKKHERHPIFGNIVDEVAYHEKYPTIYHLRKKLVDSTDKADLRLIYLALAHMIKFRGHFLIEGDLNPDNSDVDKLFIQLVQTYNQLFEENPINASGVDAKAILSARLSKSRRLENLIAQLPGEKKNGLFGNLIALSLGLTPNFKSNFDLAEDAKLQLSKDTYDDDLDNLLAQIGDQYADLFLAAKNLSDAILLSDILRVNTEITKAPLSASMIKRYDEHHQDLTLLKALVRQQLPEKYKEIFFDQSKNGYAGYIDGGASQEEFYKFIKPILEKMDGTEELLVKLNREDLLRKQRTFDNGSIPHQIHLGELHAILRRQEDFYPFLKDNREKIEKILTFRIPYYVGPLARGNSRFAWMTRKSEETITPWNFEEVVDKGASAQSFIERMTNFDKNLPNEKVLPKHSLLYEYFTVYNELTKVKYVTEGMRKPAFLSGEQKKAIVDLLFKTNRKVTVKQLKEDYFKKIECFDSVEISGVEDRFNASLGTYHDLLKIIKDKDFLDNEENEDILEDIVLTLTLFEDREMIEERLKTYAHLFDDKVMKQLKRRRYTGWGRLSRKLINGIRDKQSGKTILDFLKSDGFANRNFMQLIHDDSLTFKEDIQKAQVSGQGDSLHEHIANLAGSPAIKKGILQTVKVVDELVKVMGRHKPENIVIEMARENQTTQKGQKNSRERMKRIEEGIKELGSQILKEHPVENTQLQNEKLYLYYLQNGRDMYVDQELDINRLSDYDVDHIVPQSFLKDDSIDNKVLTRSDKARGKSDNVPSEEVVKKMKNYWRQLLNAKLITQRKFDNLTKAERGGLSELDKAGFIKRQLVETRQITKHVAQILDSRMNTKYDENDKLIREVKVITLKSKLVSDFRKDFQFYKVREINNYHHAHDAYLNAVVGTALIKKYPKLESEFVYGDYKVYDVRKMIAKSEQEIGKATAKYFFYSNIMNFFKTEITLANGEIRKRPLIETNGETGEIVWDKGRDFATVRKVLSMPQVNIVKKTEVQTGGFSKESILPKRNSDKLIARKKDWDPKKYGGFDSPTVAYSVLVVAKVEKGKSKKLKSVKELLGITIMERSSFEKNPIDFLEAKGYKEVKKDLIIKLPKYSLFELENGRKRMLASAGELQKGNELALPSKYVNFLYLASHYEKLKGSPEDNEQKQLFVEQHKHYLDEIIEQISEFSKRVILADANLDKVLSAYNKHRDKPIREQAENIIHLFTLTNLGAPAAFKYFDTTIDRKRYTSTKEVLDATLIHQSITGLYETRIDLSQLGGDGGGGGEAAAKGSSGGVLNLEEEYRLHEKPVPSSIDPSWLQLFPTVWAERAGMGLANQVPPVVVELRSGASPVAVRQYPMSKEAREGIRPHIQRFLDLGVLVPCQSPWNTPLLPVKKPGTNDYRPVQDLREINKRVQDIHPTVPNPYNLLSSLPPSHTWYSVLDLKDAFFCLKLHPNSQPLFAFEWRDPEKGNTGQLTWTRLPQGFKNSPTLFNEALHRDLAPFRALNPQVVLLQYVDDLLVAAPTYRDCKEGTQKLLQELSKLGYRVSAKKAQLCQKEVTYLGYLLKEGKRWLTPARKATVMKIPPPTTPRQVREFLGKAGFCRLFIPGFASLAAPLYPLTKPSIPFIWTEEHQKAFDRIKEALLSAPALALPDLTKPFTLYVDERAGVARGVLTQTLGPWRRPVAYLSKKLDPVASGWPTCLKAVAAVALLLKDADKLTLGQNVTVIASHSLESIVRQPPDRWMTNARMTHYQSLLLNERVSFAPPAVLNPATLLPVESEATPVHRCSEILAEETGTRRDLKDQPLPGVPAWYTDGSSFIAEGKRRAGAAIVDGKRTVWASSLPEGTSAQKAELVALTQALRLAEGKDINIYTDSRYAFATAHIHGAIYKQRGWLTSAGKDIKNKEEILALLEAIHLPKRVAIIHCPGHQKGNDPVATGNRRADEAAKQAALSTRVLAETTKPAGKRTADGSEFEKRTADGSEFESPKKKAKVE

SEQ ID NO: 926 - protein, 2087 aa, synthetic construct
MPAAKRVKLDGGDKKYSIGLDIGTNSVGWAVITDEYKVPSKKFKVLGNTDRHSIKKNLIGALLFDSGETAEATRLKRTARRRYTRRKNRICYLQEIFSNEMAKVDDSFFHRLEESFLVEEDKKHERHPIFGNIVDEVAYHEKYPTIYHLRKKLVDSTDKADLRLIYLALAHMIKFRGHFLIEGDLNPDNSDVDKLFIQLVQTYNQLFEENPINASGVDAKAILSARLSKSRRLENLIAQLPGEKKNGLFGNLIALSLGLTPNFKSNFDLAEDAKLQLSKDTYDDDLDNLLAQIGDQYADLFLAAKNLSDAILLSDILRVNTEITKAPLSASMIKRYDEHHQDLTLLKALVRQQLPEKYKEIFFDQSKNGYAGYIDGGASQEEFYKFIKPILEKMDGTEELLVKLNREDLLRKQRTFDNGSIPHQIHLGELHAILRRQEDFYPFLKDNREKIEKILTFRIPYYVGPLARGNSRFAWMTRKSEETITPWNFEEVVDKGASAQSFIERMTNFDKNLPNEKVLPKHSLLYEYFTVYNELTKVKYVTEGMRKPAFLSGEQKKAIVDLLFKTNRKVTVKQLKEDYFKKIECFDSVEISGVEDRFNASLGTYHDLLKIIKDKDFLDNEENEDILEDIVLTLTLFEDREMIEERLKTYAHLFDDKVMKQLKRRRYTGWGRLSRKLINGIRDKQSGKTILDFLKSDGFANRNFMQLIHDDSLTFKEDIQKAQVSGQGDSLHEHIANLAGSPAIKKGILQTVKVVDELVKVMGRHKPENIVIEMARENQTTQKGQKNSRERMKRIEEGIKELGSQILKEHPVENTQLQNEKLYLYYLQNGRDMYVDQELDINRLSDYDVDHIVPQSFLKDDSIDNKVLTRSDKARGKSDNVPSEEVVKKMKNYWRQLLNAKLITQRKFDNLTKAERGGLSELDKAGFIKRQLVETRQITKHVAQILDSRMNTKYDENDKLIREVKVITLKSKLVSDFRKDFQFYKVREINNYHHAHDAYLNAVVGTALIKKYPKLESEFVYGDYKVYDVRKMIAKSEQEIGKATAKYFFYSNIMNFFKTEITLANGEIRKRPLIETNGETGEIVWDKGRDFATVRKVLSMPQVNIVKKTEVQTGGFSKESILPKRNSDKLIARKKDWDPKKYGGFDSPTVAYSVLVVAKVEKGKSKKLKSVKELLGITIMERSSFEKNPIDFLEAKGYKEVKKDLIIKLPKYSLFELENGRKRMLASAGELQKGNELALPSKYVNFLYLASHYEKLKGSPEDNEQKQLFVEQHKHYLDEIIEQISEFSKRVILADANLDKVLSAYNKHRDKPIREQAENIIHLFTLTNLGAPAAFKYFDTTIDRKRYTSTKEVLDATLIHQSITGLYETRIDLSQLGGDGGGGGGGGVLNLEEEYRLHEKPVPSSIDPSWLQLFPTVWAERAGMGLANQVPPVVVELRSGASPVAVRQYPMSKEAREGIRPHIQRFLDLGVLVPCQSPWNTPLLPVKKPGTNDYRPVQDLREINKRVQDIHPTVPNPYNLLSSLPPSHTWYSVLDLKDAFFCLKLHPNSQPLFAFEWRDPEKGNTGQLTWTRLPQGFKNSPTLFNEALHRDLAPFRALNPQVVLLQYVDDLLVAAPTYRDCKEGTQKLLQELSKLGYRVSAKKAQLCQKEVTYLGYLLKEGKRWLTPARKATVMKIPPPTTPRQVREFLGKAGFCRLFIPGFASLAAPLYPLTKPSIPFIWTEEHQKAFDRIKEALLSAPALALPDLTKPFTLYVDERAGVARGVLTQTLGPWRRPVAYLSKKLDPVASGWPTCLKAVAAVALLLKDADKLTLGQNVTVIASHSLESIVRQPPDRWMTNARMTHYQSLLLNERVSFAPPAVLNPATLLPVESEATPVHRCSEILAEETGTRRDLKDQPLPGVPAWYTDGSSFIAEGKRRAGAAIVDGKRTVWASSLPEGTSAQKAELVALTQALRLAEGKDINIYTDSRYAFATAHIHGAIYKQRGWLTSAGKDIKNKEEILALLEAIHLPKRVAIIHCPGHQKGNDPVATGNRRADEAAKQAALSTRVLAETTKPAGKRTADGSEFEKRTADGSEFESPKKKAKVE

SEQ ID NO: 927 - protein, 2092 aa, synthetic construct
MPAAKRVKLDGGDKKYSIGLDIGTNSVGWAVITDEYKVPSKKFKVLGNTDRHSIKKNLIGALLFDSGETAEATRLKRTARRRYTRRKNRICYLQEIFSNEMAKVDDSFFHRLEESFLVEEDKKHERHPIFGNIVDEVAYHEKYPTIYHLRKKLVDSTDKADLRLIYLALAHMIKFRGHFLIEGDLNPDNSDVDKLFIQLVQTYNQLFEENPINASGVDAKAILSARLSKSRRLENLIAQLPGEKKNGLFGNLIALSLGLTPNFKSNFDLAEDAKLQLSKDTYDDDLDNLLAQIGDQYADLFLAAKNLSDAILLSDILRVNTEITKAPLSASMIKRYDEHHQDLTLLKALVRQQLPEKYKEIFFDQSKNGYAGYIDGGASQEEFYKFIKPILEKMDGTEELLVKLNREDLLRKQRTFDNGSIPHQIHLGELHAILRRQEDFYPFLKDNREKIEKILTFRIPYYVGPLARGNSRFAWMTRKSEETITPWNFEEVVDKGASAQSFIERMTNFDKNLPNEKVLPKHSLLYEYFTVYNELTKVKYVTEGMRKPAFLSGEQKKAIVDLLFKTNRKVTVKQLKEDYFKKIECFDSVEISGVEDRFNASLGTYHDLLKIIKDKDFLDNEENEDILEDIVLTLTLFEDREMIEERLKTYAHLFDDKVMKQLKRRRYTGWGRLSRKLINGIRDKQSGKTILDFLKSDGFANRNFMQLIHDDSLTFKEDIQKAQVSGQGDSLHEHIANLAGSPAIKKGILQTVKVVDELVKVMGRHKPENIVIEMARENQTTQKGQKNSRERMKRIEEGIKELGSQILKEHPVENTQLQNEKLYLYYLQNGRDMYVDQELDINRLSDYDVDHIVPQSFLKDDSIDNKVLTRSDKARGKSDNVPSEEVVKKMKNYWRQLLNAKLITQRKFDNLTKAERGGLSELDKAGFIKRQLVETRQITKHVAQILDSRMNTKYDENDKLIREVKVITLKSKLVSDFRKDFQFYKVREINNYHHAHDAYLNAVVGTALIKKYPKLESEFVYGDYKVYDVRKMIAKSEQEIGKATAKYFFYSNIMNFFKTEITLANGEIRKRPLIETNGETGEIVWDKGRDFATVRKVLSMPQVNIVKKTEVQTGGFSKESILPKRNSDKLIARKKDWDPKKYGGFDSPTVAYSVLVVAKVEKGKSKKLKSVKELLGITIMERSSFEKNPIDFLEAKGYKEVKKDLIIKLPKYSLFELENGRKRMLASAGELQKGNELALPSKYVNFLYLASHYEKLKGSPEDNEQKQLFVEQHKHYLDEIIEQISEFSKRVILADANLDKVLSAYNKHRDKPIREQAENIIHLFTLTNLGAPAAFKYFDTTIDRKRYTSTKEVLDATLIHQSITGLYETRIDLSQLGGDGGPAPGSSGGGGGVLNLEEEYRLHEKPVPSSIDPSWLQLFPTVWAERAGMGLANQVPPVVVELRSGASPVAVRQYPMSKEAREGIRPHIQRFLDLGVLVPCQSPWNTPLLPVKKPGTNDYRPVQDLREINKRVQDIHPTVPNPYNLLSSLPPSHTWYSVLDLKDAFFCLKLHPNSQPLFAFEWRDPEKGNTGQLTWTRLPQGFKNSPTLFNEALHRDLAPFRALNPQVVLLQYVDDLLVAAPTYRDCKEGTQKLLQELSKLGYRVSAKKAQLCQKEVTYLGYLLKEGKRWLTPARKATVMKIPPPTTPRQVREFLGKAGFCRLFIPGFASLAAPLYPLTKPSIPFIWTEEHQKAFDRIKEALLSAPALALPDLTKPFTLYVDERAGVARGVLTQTLGPWRRPVAYLSKKLDPVASGWPTCLKAVAAVALLLKDADKLTLGQNVTVIASHSLESIVRQPPDRWMTNARMTHYQSLLLNERVSFAPPAVLNPATLLPVESEATPVHRCSEILAEETGTRRDLKDQPLPGVPAWYTDGSSFIAEGKRRAGAAIVDGKRTVWASSLPEGTSAQKAELVALTQALRLAEGKDINIYTDSRYAFATAHIHGAIYKQRGWLTSAGKDIKNKEEILALLEAIHLPKRVAIIHCPGHQKGNDPVATGNRRADEAAKQAALSTRVLAETTKPAGKRTADGSEFEKRTADGSEFESPKKKAKVE

SEQ ID NO: 928 - protein, 2094 aa, synthetic construct
MPAAKRVKLDGGDKKYSIGLDIGTNSVGWAVITDEYKVPSKKFKVLGNTDRHSIKKNLIGALLFDSGETAEATRLKRTARRRYTRRKNRICYLQEIFSNEMAKVDDSFFHRLEESFLVEEDKKHERHPIFGNIVDEVAYHEKYPTIYHLRKKLVDSTDKADLRLIYLALAHMIKFRGHFLIEGDLNPDNSDVDKLFIQLVQTYNQLFEENPINASGVDAKAILSARLSKSRRLENLIAQLPGEKKNGLFGNLIALSLGLTPNFKSNFDLAEDAKLQLSKDTYDDDLDNLLAQIGDQYADLFLAAKNLSDAILLSDILRVNTEITKAPLSASMIKRYDEHHQDLTLLKALVRQQLPEKYKEIFFDQSKNGYAGYIDGGASQEEFYKFIKPILEKMDGTEELLVKLNREDLLRKQRTFDNGSIPHQIHLGELHAILRRQEDFYPFLKDNREKIEKILTFRIPYYVGPLARGNSRFAWMTRKSEETITPWNFEEVVDKGASAQSFIERMTNFDKNLPNEKVLPKHSLLYEYFTVYNELTKVKYVTEGMRKPAFLSGEQKKAIVDLLFKTNRKVTVKQLKEDYFKKIECFDSVEISGVEDRFNASLGTYHDLLKIIKDKDFLDNEENEDILEDIVLTLTLFEDREMIEERLKTYAHLFDDKVMKQLKRRRYTGWGRLSRKLINGIRDKQSGKTILDFLKSDGFANRNFMQLIHDDSLTFKEDIQKAQVSGQGDSLHEHIANLAGSPAIKKGILQTVKVVDELVKVMGRHKPENIVIEMARENQTTQKGQKNSRERMKRIEEGIKELGSQILKEHPVENTQLQNEKLYLYYLQNGRDMYVDQELDINRLSDYDVDHIVPQSFLKDDSIDNKVLTRSDKARGKSDNVPSEEVVKKMKNYWRQLLNAKLITQRKFDNLTKAERGGLSELDKAGFIKRQLVETRQITKHVAQILDSRMNTKYDENDKLIREVKVITLKSKLVSDFRKDFQFYKVREINNYHHAHDAYLNAVVGTALIKKYPKLESEFVYGDYKVYDVRKMIAKSEQEIGKATAKYFFYSNIMNFFKTEITLANGEIRKRPLIETNGETGEIVWDKGRDFATVRKVLSMPQVNIVKKTEVQTGGFSKESILPKRNSDKLIARKKDWDPKKYGGFDSPTVAYSVLVVAKVEKGKSKKLKSVKELLGITIMERSSFEKNPIDFLEAKGYKEVKKDLIIKLPKYSLFELENGRKRMLASAGELQKGNELALPSKYVNFLYLASHYEKLKGSPEDNEQKQLFVEQHKHYLDEIIEQISEFSKRVILADANLDKVLSAYNKHRDKPIREQAENIIHLFTLTNLGAPAAFKYFDTTIDRKRYTSTKEVLDATLIHQSITGLYETRIDLSQLGGDGGGGGEAAAKPAPGGVLNLEEEYRLHEKPVPSSIDPSWLQLFPTVWAERAGMGLANQVPPVVVELRSGASPVAVRQYPMSKEAREGIRPHIQRFLDLGVLVPCQSPWNTPLLPVKKPGTNDYRPVQDLREINKRVQDIHPTVPNPYNLLSSLPPSHTWYSVLDLKDAFFCLKLHPNSQPLFAFEWRDPEKGNTGQLTWTRLPQGFKNSPTLFNEALHRDLAPFRALNPQVVLLQYVDDLLVAAPTYRDCKEGTQKLLQELSKLGYRVSAKKAQLCQKEVTYLGYLLKEGKRWLTPARKATVMKIPPPTTPRQVREFLGKAGFCRLFIPGFASLAAPLYPLTKPSIPFIWTEEHQKAFDRIKEALLSAPALALPDLTKPFTLYVDERAGVARGVLTQTLGPWRRPVAYLSKKLDPVASGWPTCLKAVAAVALLLKDADKLTLGQNVTVIASHSLESIVRQPPDRWMTNARMTHYQSLLLNERVSFAPPAVLNPATLLPVESEATPVHRCSEILAEETGTRRDLKDQPLPGVPAWYTDGSSFIAEGKRRAGAAIVDGKRTVWASSLPEGTSAQKAELVALTQALRLAEGKDINIYTDSRYAFATAHIHGAIYKQRGWLTSAGKDIKNKEEILALLEAIHLPKRVAIIHCPGHQKGNDPVATGNRRADEAAKQAALSTRVLAETTKPAGKRTADGSEFEKRTADGSEFESPKKKAKVE

SEQ ID NO: 929 - protein, 2092 aa, synthetic construct
MPAAKRVKLDGGDKKYSIGLDIGTNSVGWAVITDEYKVPSKKFKVLGNTDRHSIKKNLIGALLFDSGETAEATRLKRTARRRYTRRKNRICYLQEIFSNEMAKVDDSFFHRLEESFLVEEDKKHERHPIFGNIVDEVAYHEKYPTIYHLRKKLVDSTDKADLRLIYLALAHMIKFRGHFLIEGDLNPDNSDVDKLFIQLVQTYNQLFEENPINASGVDAKAILSARLSKSRRLENLIAQLPGEKKNGLFGNLIALSLGLTPNFKSNFDLAEDAKLQLSKDTYDDDLDNLLAQIGDQYADLFLAAKNLSDAILLSDILRVNTEITKAPLSASMIKRYDEHHQDLTLLKALVRQQLPEKYKEIFFDQSKNGYAGYIDGGASQEEFYKFIKPILEKMDGTEELLVKLNREDLLRKQRTFDNGSIPHQIHLGELHAILRRQEDFYPFLKDNREKIEKILTFRIPYYVGPLARGNSRFAWMTRKSEETITPWNFEEVVDKGASAQSFIERMTNFDKNLPNEKVLPKHSLLYEYFTVYNELTKVKYVTEGMRKPAFLSGEQKKAIVDLLFKTNRKVTVKQLKEDYFKKIECFDSVEISGVEDRFNASLGTYHDLLKIIKDKDFLDNEENEDILEDIVLTLTLFEDREMIEERLKTYAHLFDDKVMKQLKRRRYTGWGRLSRKLINGIRDKQSGKTILDFLKSDGFANRNFMQLIHDDSLTFKEDIQKAQVSGQGDSLHEHIANLAGSPAIKKGILQTVKVVDELVKVMGRHKPENIVIEMARENQTTQKGQKNSRERMKRIEEGIKELGSQILKEHPVENTQLQNEKLYLYYLQNGRDMYVDQELDINRLSDYDVDHIVPQSFLKDDSIDNKVLTRSDKARGKSDNVPSEEVVKKMKNYWRQLLNAKLITQRKFDNLTKAERGGLSELDKAGFIKRQLVETRQITKHVAQILDSRMNTKYDENDKLIREVKVITLKSKLVSDFRKDFQFYKVREINNYHHAHDAYLNAVVGTALIKKYPKLESEFVYGDYKVYDVRKMIAKSEQEIGKATAKYFFYSNIMNFFKTEITLANGEIRKRPLIETNGETGEIVWDKGRDFATVRKVLSMPQVNIVKKTEVQTGGFSKESILPKRNSDKLIARKKDWDPKKYGGFDSPTVAYSVLVVAKVEKGKSKKLKSVKELLGITIMERSSFEKNPIDFLEAKGYKEVKKDLIIKLPKYSLFELENGRKRMLASAGELQKGNELALPSKYVNFLYLASHYEKLKGSPEDNEQKQLFVEQHKHYLDEIIEQISEFSKRVILADANLDKVLSAYNKHRDKPIREQAENIIHLFTLTNLGAPAAFKYFDTTIDRKRYTSTKEVLDATLIHQSITGLYETRIDLSQLGGDGGGSSGSSGSSGGVLNLEEEYRLHEKPVPSSIDPSWLQLFPTVWAERAGMGLANQVPPVVVELRSGASPVAVRQYPMSKEAREGIRPHIQRFLDLGVLVPCQSPWNTPLLPVKKPGTNDYRPVQDLREINKRVQDIHPTVPNPYNLLSSLPPSHTWYSVLDLKDAFFCLKLHPNSQPLFAFEWRDPEKGNTGQLTWTRLPQGFKNSPTLFNEALHRDLAPFRALNPQVVLLQYVDDLLVAAPTYRDCKEGTQKLLQELSKLGYRVSAKKAQLCQKEVTYLGYLLKEGKRWLTPARKATVMKIPPPTTPRQVREFLGKAGFCRLFIPGFASLAAPLYPLTKPSIPFIWTEEHQKAFDRIKEALLSAPALALPDLTKPFTLYVDERAGVARGVLTQTLGPWRRPVAYLSKKLDPVASGWPTCLKAVAAVALLLKDADKLTLGQNVTVIASHSLESIVRQPPDRWMTNARMTHYQSLLLNERVSFAPPAVLNPATLLPVESEATPVHRCSEILAEETGTRRDLKDQPLPGVPAWYTDGSSFIAEGKRRAGAAIVDGKRTVWASSLPEGTSAQKAELVALTQALRLAEGKDINIYTDSRYAFATAHIHGAIYKQRGWLTSAGKDIKNKEEILALLEAIHLPKRVAIIHCPGHQKGNDPVATGNRRADEAAKQAALSTRVLAETTKPAGKRTADGSEFEKRTADGSEFESPKKKAKVE

SEQ ID NO: 930 - protein, 2092 aa, synthetic construct
MPAAKRVKLDGGDKKYSIGLDIGTNSVGWAVITDEYKVPSKKFKVLGNTDRHSIKKNLIGALLFDSGETAEATRLKRTARRRYTRRKNRICYLQEIFSNEMAKVDDSFFHRLEESFLVEEDKKHERHPIFGNIVDEVAYHEKYPTIYHLRKKLVDSTDKADLRLIYLALAHMIKFRGHFLIEGDLNPDNSDVDKLFIQLVQTYNQLFEENPINASGVDAKAILSARLSKSRRLENLIAQLPGEKKNGLFGNLIALSLGLTPNFKSNFDLAEDAKLQLSKDTYDDDLDNLLAQIGDQYADLFLAAKNLSDAILLSDILRVNTEITKAPLSASMIKRYDEHHQDLTLLKALVRQQLPEKYKEIFFDQSKNGYAGYIDGGASQEEFYKFIKPILEKMDGTEELLVKLNREDLLRKQRTFDNGSIPHQIHLGELHAILRRQEDFYPFLKDNREKIEKILTFRIPYYVGPLARGNSRFAWMTRKSEETITPWNFEEVVDKGASAQSFIERMTNFDKNLPNEKVLPKHSLLYEYFTVYNELTKVKYVTEGMRKPAFLSGEQKKAIVDLLFKTNRKVTVKQLKEDYFKKIECFDSVEISGVEDRFNASLGTYHDLLKIIKDKDFLDNEENEDILEDIVLTLTLFEDREMIEERLKTYAHLFDDKVMKQLKRRRYTGWGRLSRKLINGIRDKQSGKTILDFLKSDGFANRNFMQLIHDDSLTFKEDIQKAQVSGQGDSLHEHIANLAGSPAIKKGILQTVKVVDELVKVMGRHKPENIVIEMARENQTTQKGQKNSRERMKRIEEGIKELGSQILKEHPVENTQLQNEKLYLYYLQNGRDMYVDQELDINRLSDYDVDHIVPQSFLKDDSIDNKVLTRSDKARGKSDNVPSEEVVKKMKNYWRQLLNAKLITQRKFDNLTKAERGGLSELDKAGFIKRQLVETRQITKHVAQILDSRMNTKYDENDKLIREVKVITLKSKLVSDFRKDFQFYKVREINNYHHAHDAYLNAVVGTALIKKYPKLESEFVYGDYKVYDVRKMIAKSEQEIGKATAKYFFYSNIMNFFKTEITLANGEIRKRPLIETNGETGEIVWDKGRDFATVRKVLSMPQVNIVKKTEVQTGGFSKESILPKRNSDKLIARKKDWDPKKYGGFDSPTVAYSVLVVAKVEKGKSKKLKSVKELLGITIMERSSFEKNPIDFLEAKGYKEVKKDLIIKLPKYSLFELENGRKRMLASAGELQKGNELALPSKYVNFLYLASHYEKLKGSPEDNEQKQLFVEQHKHYLDEIIEQISEFSKRVILADANLDKVLSAYNKHRDKPIREQAENIIHLFTLTNLGAPAAFKYFDTTIDRKRYTSTKEVLDATLIHQSITGLYETRIDLSQLGGDGGGGSPAPGGGGGVLNLEEEYRLHEKPVPSSIDPSWLQLFPTVWAERAGMGLANQVPPVVVELRSGASPVAVRQYPMSKEAREGIRPHIQRFLDLGVLVPCQSPWNTPLLPVKKPGTNDYRPVQDLREINKRVQDIHPTVPNPYNLLSSLPPSHTWYSVLDLKDAFFCLKLHPNSQPLFAFEWRDPEKGNTGQLTWTRLPQGFKNSPTLFNEALHRDLAPFRALNPQVVLLQYVDDLLVAAPTYRDCKEGTQKLLQELSKLGYRVSAKKAQLCQKEVTYLGYLLKEGKRWLTPARKATVMKIPPPTTPRQVREFLGKAGFCRLFIPGFASLAAPLYPLTKPSIPFIWTEEHQKAFDRIKEALLSAPALALPDLTKPFTLYVDERAGVARGVLTQTLGPWRRPVAYLSKKLDPVASGWPTCLKAVAAVALLLKDADKLTLGQNVTVIASHSLESIVRQPPDRWMTNARMTHYQSLLLNERVSFAPPAVLNPATLLPVESEATPVHRCSEILAEETGTRRDLKDQPLPGVPAWYTDGSSFIAEGKRRAGAAIVDGKRTVWASSLPEGTSAQKAELVALTQALRLAEGKDINIYTDSRYAFATAHIHGAIYKQRGWLTSAGKDIKNKEEILALLEAIHLPKRVAIIHCPGHQKGNDPVATGNRRADEAAKQAALSTRVLAETTKPAGKRTADGSEFEKRTADGSEFESPKKKAKVE

SEQ ID NO: 931 - protein, 2091 aa, synthetic construct
MPAAKRVKLDGGDKKYSIGLDIGTNSVGWAVITDEYKVPSKKFKVLGNTDRHSIKKNLIGALLFDSGETAEATRLKRTARRRYTRRKNRICYLQEIFSNEMAKVDDSFFHRLEESFLVEEDKKHERHPIFGNIVDEVAYHEKYPTIYHLRKKLVDSTDKADLRLIYLALAHMIKFRGHFLIEGDLNPDNSDVDKLFIQLVQTYNQLFEENPINASGVDAKAILSARLSKSRRLENLIAQLPGEKKNGLFGNLIALSLGLTPNFKSNFDLAEDAKLQLSKDTYDDDLDNLLAQIGDQYADLFLAAKNLSDAILLSDILRVNTEITKAPLSASMIKRYDEHHQDLTLLKALVRQQLPEKYKEIFFDQSKNGYAGYIDGGASQEEFYKFIKPILEKMDGTEELLVKLNREDLLRKQRTFDNGSIPHQIHLGELHAILRRQEDFYPFLKDNREKIEKILTFRIPYYVGPLARGNSRFAWMTRKSEETITPWNFEEVVDKGASAQSFIERMTNFDKNLPNEKVLPKHSLLYEYFTVYNELTKVKYVTEGMRKPAFLSGEQKKAIVDLLFKTNRKVTVKQLKEDYFKKIECFDSVEISGVEDRFNASLGTYHDLLKIIKDKDFLDNEENEDILEDIVLTLTLFEDREMIEERLKTYAHLFDDKVMKQLKRRRYTGWGRLSRKLINGIRDKQSGKTILDFLKSDGFANRNFMQLIHDDSLTFKEDIQKAQVSGQGDSLHEHIANLAGSPAIKKGILQTVKVVDELVKVMGRHKPENIVIEMARENQTTQKGQKNSRERMKRIEEGIKELGSQILKEHPVENTQLQNEKLYLYYLQNGRDMYVDQELDINRLSDYDVDHIVPQSFLKDDSIDNKVLTRSDKARGKSDNVPSEEVVKKMKNYWRQLLNAKLITQRKFDNLTKAERGGLSELDKAGFIKRQLVETRQITKHVAQILDSRMNTKYDENDKLIREVKVITLKSKLVSDFRKDFQFYKVREINNYHHAHDAYLNAVVGTALIKKYPKLESEFVYGDYKVYDVRKMIAKSEQEIGKATAKYFFYSNIMNFFKTEITLANGEIRKRPLIETNGETGEIVWDKGRDFATVRKVLSMPQVNIVKKTEVQTGGFSKESILPKRNSDKLIARKKDWDPKKYGGFDSPTVAYSVLVVAKVEKGKSKKLKSVKELLGITIMERSSFEKNPIDFLEAKGYKEVKKDLIIKLPKYSLFELENGRKRMLASAGELQKGNELALPSKYVNFLYLASHYEKLKGSPEDNEQKQLFVEQHKHYLDEIIEQISEFSKRVILADANLDKVLSAYNKHRDKPIREQAENIIHLFTLTNLGAPAAFKYFDTTIDRKRYTSTKEVLDATLIHQSITGLYETRIDLSQLGGDGGEAAAKGGGGGVLNLEEEYRLHEKPVPSSIDPSWLQLFPTVWAERAGMGLANQVPPVVVELRSGASPVAVRQYPMSKEAREGIRPHIQRFLDLGVLVPCQSPWNTPLLPVKKPGTNDYRPVQDLREINKRVQDIHPTVPNPYNLLSSLPPSHTWYSVLDLKDAFFCLKLHPNSQPLFAFEWRDPEKGNTGQLTWTRLPQGFKNSPTLFNEALHRDLAPFRALNPQVVLLQYVDDLLVAAPTYRDCKEGTQKLLQELSKLGYRVSAKKAQLCQKEVTYLGYLLKEGKRWLTPARKATVMKIPPPTTPRQVREFLGKAGFCRLFIPGFASLAAPLYPLTKPSIPFIWTEEHQKAFDRIKEALLSAPALALPDLTKPFTLYVDERAGVARGVLTQTLGPWRRPVAYLSKKLDPVASGWPTCLKAVAAVALLLKDADKLTLGQNVTVIASHSLESIVRQPPDRWMTNARMTHYQSLLLNERVSFAPPAVLNPATLLPVESEATPVHRCSEILAEETGTRRDLKDQPLPGVPAWYTDGSSFIAEGKRRAGAAIVDGKRTVWASSLPEGTSAQKAELVALTQALRLAEGKDINIYTDSRYAFATAHIHGAIYKQRGWLTSAGKDIKNKEEILALLEAIHLPKRVAIIHCPGHQKGNDPVATGNRRADEAAKQAALSTRVLAETTKPAGKRTADGSEFEKRTADGSEFESPKKKAKVE

SEQ ID NO: 932 - protein, 2089 aa, synthetic construct
MPAAKRVKLDGGDKKYSIGLDIGTNSVGWAVITDEYKVPSKKFKVLGNTDRHSIKKNLIGALLFDSGETAEATRLKRTARRRYTRRKNRICYLQEIFSNEMAKVDDSFFHRLEESFLVEEDKKHERHPIFGNIVDEVAYHEKYPTIYHLRKKLVDSTDKADLRLIYLALAHMIKFRGHFLIEGDLNPDNSDVDKLFIQLVQTYNQLFEENPINASGVDAKAILSARLSKSRRLENLIAQLPGEKKNGLFGNLIALSLGLTPNFKSNFDLAEDAKLQLSKDTYDDDLDNLLAQIGDQYADLFLAAKNLSDAILLSDILRVNTEITKAPLSASMIKRYDEHHQDLTLLKALVRQQLPEKYKEIFFDQSKNGYAGYIDGGASQEEFYKFIKPILEKMDGTEELLVKLNREDLLRKQRTFDNGSIPHQIHLGELHAILRRQEDFYPFLKDNREKIEKILTFRIPYYVGPLARGNSRFAWMTRKSEETITPWNFEEVVDKGASAQSFIERMTNFDKNLPNEKVLPKHSLLYEYFTVYNELTKVKYVTEGMRKPAFLSGEQKKAIVDLLFKTNRKVTVKQLKEDYFKKIECFDSVEISGVEDRFNASLGTYHDLLKIIKDKDFLDNEENEDILEDIVLTLTLFEDREMIEERLKTYAHLFDDKVMKQLKRRRYTGWGRLSRKLINGIRDKQSGKTILDFLKSDGFANRNFMQLIHDDSLTFKEDIQKAQVSGQGDSLHEHIANLAGSPAIKKGILQTVKVVDELVKVMGRHKPENIVIEMARENQTTQKGQKNSRERMKRIEEGIKELGSQILKEHPVENTQLQNEKLYLYYLQNGRDMYVDQELDINRLSDYDVDHIVPQSFLKDDSIDNKVLTRSDKARGKSDNVPSEEVVKKMKNYWRQLLNAKLITQRKFDNLTKAERGGLSELDKAGFIKRQLVETRQITKHVAQILDSRMNTKYDENDKLIREVKVITLKSKLVSDFRKDFQFYKVREINNYHHAHDAYLNAVVGTALIKKYPKLESEFVYGDYKVYDVRKMIAKSEQEIGKATAKYFFYSNIMNFFKTEITLANGEIRKRPLIETNGETGEIVWDKGRDFATVRKVLSMPQVNIVKKTEVQTGGFSKESILPKRNSDKLIARKKDWDPKKYGGFDSPTVAYSVLVVAKVEKGKSKKLKSVKELLGITIMERSSFEKNPIDFLEAKGYKEVKKDLIIKLPKYSLFELENGRKRMLASAGELQKGNELALPSKYVNFLYLASHYEKLKGSPEDNEQKQLFVEQHKHYLDEIIEQISEFSKRVILADANLDKVLSAYNKHRDKPIREQAENIIHLFTLTNLGAPAAFKYFDTTIDRKRYTSTKEVLDATLIHQSITGLYETRIDLSQLGGDGGGSSGSSGGVLNLEEEYRLHEKPVPSSIDPSWLQLFPTVWAERAGMGLANQVPPVVVELRSGASPVAVRQYPMSKEAREGIRPHIQRFLDLGVLVPCQSPWNTPLLPVKKPGTNDYRPVQDLREINKRVQDIHPTVPNPYNLLSSLPPSHTWYSVLDLKDAFFCLKLHPNSQPLFAFEWRDPEKGNTGQLTWTRLPQGFKNSPTLFNEALHRDLAPFRALNPQVVLLQYVDDLLVAAPTYRDCKEGTQKLLQELSKLGYRVSAKKAQLCQKEVTYLGYLLKEGKRWLTPARKATVMKIPPPTTPRQVREFLGKAGFCRLFIPGFASLAAPLYPLTKPSIPFIWTEEHQKAFDRIKEALLSAPALALPDLTKPFTLYVDERAGVARGVLTQTLGPWRRPVAYLSKKLDPVASGWPTCLKAVAAVALLLKDADKLTLGQNVTVIASHSLESIVRQPPDRWMTNARMTHYQSLLLNERVSFAPPAVLNPATLLPVESEATPVHRCSEILAEETGTRRDLKDQPLPGVPAWYTDGSSFIAEGKRRAGAAIVDGKRTVWASSLPEGTSAQKAELVALTQALRLAEGKDINIYTDSRYAFATAHIHGAIYKQRGWLTSAGKDIKNKEEILALLEAIHLPKRVAIIHCPGHQKGNDPVATGNRRADEAAKQAALSTRVLAETTKPAGKRTADGSEFEKRTADGSEFESPKKKAKVE

SEQ ID NO: 933 - protein, 2098 aa, synthetic construct
MPAAKRVKLDGGDKKYSIGLDIGTNSVGWAVITDEYKVPSKKFKVLGNTDRHSIKKNLIGALLFDSGETAEATRLKRTARRRYTRRKNRICYLQEIFSNEMAKVDDSFFHRLEESFLVEEDKKHERHPIFGNIVDEVAYHEKYPTIYHLRKKLVDSTDKADLRLIYLALAHMIKFRGHFLIEGDLNPDNSDVDKLFIQLVQTYNQLFEENPINASGVDAKAILSARLSKSRRLENLIAQLPGEKKNGLFGNLIALSLGLTPNFKSNFDLAEDAKLQLSKDTYDDDLDNLLAQIGDQYADLFLAAKNLSDAILLSDILRVNTEITKAPLSASMIKRYDEHHQDLTLLKALVRQQLPEKYKEIFFDQSKNGYAGYIDGGASQEEFYKFIKPILEKMDGTEELLVKLNREDLLRKQRTFDNGSIPHQIHLGELHAILRRQEDFYPFLKDNREKIEKILTFRIPYYVGPLARGNSRFAWMTRKSEETITPWNFEEVVDKGASAQSFIERMTNFDKNLPNEKVLPKHSLLYEYFTVYNELTKVKYVTEGMRKPAFLSGEQKKAIVDLLFKTNRKVTVKQLKEDYFKKIECFDSVEISGVEDRFNASLGTYHDLLKIIKDKDFLDNEENEDILEDIVLTLTLFEDREMIEERLKTYAHLFDDKVMKQLKRRRYTGWGRLSRKLINGIRDKQSGKTILDFLKSDGFANRNFMQLIHDDSLTFKEDIQKAQVSGQGDSLHEHIANLAGSPAIKKGILQTVKVVDELVKVMGRHKPENIVIEMARENQTTQKGQKNSRERMKRIEEGIKELGSQILKEHPVENTQLQNEKLYLYYLQNGRDMYVDQELDINRLSDYDVDHIVPQSFLKDDSIDNKVLTRSDKARGKSDNVPSEEVVKKMKNYWRQLLNAKLITQRKFDNLTKAERGGLSELDKAGFIKRQLVETRQITKHVAQILDSRMNTKYDENDKLIREVKVITLKSKLVSDFRKDFQFYKVREINNYHHAHDAYLNAVVGTALIKKYPKLESEFVYGDYKVYDVRKMIAKSEQEIGKATAKYFFYSNIMNFFKTEITLANGEIRKRPLIETNGETGEIVWDKGRDFATVRKVLSMPQVNIVKKTEVQTGGFSKESILPKRNSDKLIARKKDWDPKKYGGFDSPTVAYSVLVVAKVEKGKSKKLKSVKELLGITIMERSSFEKNPIDFLEAKGYKEVKKDLIIKLPKYSLFELENGRKRMLASAGELQKGNELALPSKYVNFLYLASHYEKLKGSPEDNEQKQLFVEQHKHYLDEIIEQISEFSKRVILADANLDKVLSAYNKHRDKPIREQAENIIHLFTLTNLGAPAAFKYFDTTIDRKRYTSTKEVLDATLIHQSITGLYETRIDLSQLGGDGGEAAAKEAAAKEAAAKGGVLNLEEEYRLHEKPVPSSIDPSWLQLFPTVWAERAGMGLANQVPPVVVELRSGASPVAVRQYPMSKEAREGIRPHIQRFLDLGVLVPCQSPWNTPLLPVKKPGTNDYRPVQDLREINKRVQDIHPTVPNPYNLLSSLPPSHTWYSVLDLKDAFFCLKLHPNSQPLFAFEWRDPEKGNTGQLTWTRLPQGFKNSPTLFNEALHRDLAPFRALNPQVVLLQYVDDLLVAAPTYRDCKEGTQKLLQELSKLGYRVSAKKAQLCQKEVTYLGYLLKEGKRWLTPARKATVMKIPPPTTPRQVREFLGKAGFCRLFIPGFASLAAPLYPLTKPSIPFIWTEEHQKAFDRIKEALLSAPALALPDLTKPFTLYVDERAGVARGVLTQTLGPWRRPVAYLSKKLDPVASGWPTCLKAVAAVALLLKDADKLTLGQNVTVIASHSLESIVRQPPDRWMTNARMTHYQSLLLNERVSFAPPAVLNPATLLPVESEATPVHRCSEILAEETGTRRDLKDQPLPGVPAWYTDGSSFIAEGKRRAGAAIVDGKRTVWASSLPEGTSAQKAELVALTQALRLAEGKDINIYTDSRYAFATAHIHGAIYKQRGWLTSAGKDIKNKEEILALLEAIHLPKRVAIIHCPGHQKGNDPVATGNRRADEAAKQAALSTRVLAETTKPAGKRTADGSEFEKRTADGSEFESPKKKAKVE

SEQ ID NO: 934 - protein, 2091 aa, synthetic construct
MPAAKRVKLDGGDKKYSIGLDIGTNSVGWAVITDEYKVPSKKFKVLGNTDRHSIKKNLIGALLFDSGETAEATRLKRTARRRYTRRKNRICYLQEIFSNEMAKVDDSFFHRLEESFLVEEDKKHERHPIFGNIVDEVAYHEKYPTIYHLRKKLVDSTDKADLRLIYLALAHMIKFRGHFLIEGDLNPDNSDVDKLFIQLVQTYNQLFEENPINASGVDAKAILSARLSKSRRLENLIAQLPGEKKNGLFGNLIALSLGLTPNFKSNFDLAEDAKLQLSKDTYDDDLDNLLAQIGDQYADLFLAAKNLSDAILLSDILRVNTEITKAPLSASMIKRYDEHHQDLTLLKALVRQQLPEKYKEIFFDQSKNGYAGYIDGGASQEEFYKFIKPILEKMDGTEELLVKLNREDLLRKQRTFDNGSIPHQIHLGELHAILRRQEDFYPFLKDNREKIEKILTFRIPYYVGPLARGNSRFAWMTRKSEETITPWNFEEVVDKGASAQSFIERMTNFDKNLPNEKVLPKHSLLYEYFTVYNELTKVKYVTEGMRKPAFLSGEQKKAIVDLLFKTNRKVTVKQLKEDYFKKIECFDSVEISGVEDRFNASLGTYHDLLKIIKDKDFLDNEENEDILEDIVLTLTLFEDREMIEERLKTYAHLFDDKVMKQLKRRRYTGWGRLSRKLINGIRDKQSGKTILDFLKSDGFANRNFMQLIHDDSLTFKEDIQKAQVSGQGDSLHEHIANLAGSPAIKKGILQTVKVVDELVKVMGRHKPENIVIEMARENQTTQKGQKNSRERMKRIEEGIKELGSQILKEHPVENTQLQNEKLYLYYLQNGRDMYVDQELDINRLSDYDVDHIVPQSFLKDDSIDNKVLTRSDKARGKSDNVPSEEVVKKMKNYWRQLLNAKLITQRKFDNLTKAERGGLSELDKAGFIKRQLVETRQITKHVAQILDSRMNTKYDENDKLIREVKVITLKSKLVSDFRKDFQFYKVREINNYHHAHDAYLNAVVGTALIKKYPKLESEFVYGDYKVYDVRKMIAKSEQEIGKATAKYFFYSNIMNFFKTEITLANGEIRKRPLIETNGETGEIVWDKGRDFATVRKVLSMPQVNIVKKTEVQTGGFSKESILPKRNSDKLIARKKDWDPKKYGGFDSPTVAYSVLVVAKVEKGKSKKLKSVKELLGITIMERSSFEKNPIDFLEAKGYKEVKKDLIIKLPKYSLFELENGRKRMLASAGELQKGNELALPSKYVNFLYLASHYEKLKGSPEDNEQKQLFVEQHKHYLDEIIEQISEFSKRVILADANLDKVLSAYNKHRDKPIREQAENIIHLFTLTNLGAPAAFKYFDTTIDRKRYTSTKEVLDATLIHQSITGLYETRIDLSQLGGDGGGGGEAAAKGGVLNLEEEYRLHEKPVPSSIDPSWLQLFPTVWAERAGMGLANQVPPVVVELRSGASPVAVRQYPMSKEAREGIRPHIQRFLDLGVLVPCQSPWNTPLLPVKKPGTNDYRPVQDLREINKRVQDIHPTVPNPYNLLSSLPPSHTWYSVLDLKDAFFCLKLHPNSQPLFAFEWRDPEKGNTGQLTWTRLPQGFKNSPTLFNEALHRDLAPFRALNPQVVLLQYVDDLLVAAPTYRDCKEGTQKLLQELSKLGYRVSAKKAQLCQKEVTYLGYLLKEGKRWLTPARKATVMKIPPPTTPRQVREFLGKAGFCRLFIPGFASLAAPLYPLTKPSIPFIWTEEHQKAFDRIKEALLSAPALALPDLTKPFTLYVDERAGVARGVLTQTLGPWRRPVAYLSKKLDPVASGWPTCLKAVAAVALLLKDADKLTLGQNVTVIASHSLESIVRQPPDRWMTNARMTHYQSLLLNERVSFAPPAVLNPATLLPVESEATPVHRCSEILAEETGTRRDLKDQPLPGVPAWYTDGSSFIAEGKRRAGAAIVDGKRTVWASSLPEGTSAQKAELVALTQALRLAEGKDINIYTDSRYAFATAHIHGAIYKQRGWLTSAGKDIKNKEEILALLEAIHLPKRVAIIHCPGHQKGNDPVATGNRRADEAAKQAALSTRVLAETTKPAGKRTADGSEFEKRTADGSEFESPKKKAKVE

SEQ ID NO: 935 - protein, 2103 aa, synthetic construct
MPAAKRVKLDGGDKKYSIGLDIGTNSVGWAVITDEYKVPSKKFKVLGNTDRHSIKKNLIGALLFDSGETAEATRLKRTARRRYTRRKNRICYLQEIFSNEMAKVDDSFFHRLEESFLVEEDKKHERHPIFGNIVDEVAYHEKYPTIYHLRKKLVDSTDKADLRLIYLALAHMIKFRGHFLIEGDLNPDNSDVDKLFIQLVQTYNQLFEENPINASGVDAKAILSARLSKSRRLENLIAQLPGEKKNGLFGNLIALSLGLTPNFKSNFDLAEDAKLQLSKDTYDDDLDNLLAQIGDQYADLFLAAKNLSDAILLSDILRVNTEITKAPLSASMIKRYDEHHQDLTLLKALVRQQLPEKYKEIFFDQSKNGYAGYIDGGASQEEFYKFIKPILEKMDGTEELLVKLNREDLLRKQRTFDNGSIPHQIHLGELHAILRRQEDFYPFLKDNREKIEKILTFRIPYYVGPLARGNSRFAWMTRKSEETITPWNFEEVVDKGASAQSFIERMTNFDKNLPNEKVLPKHSLLYEYFTVYNELTKVKYVTEGMRKPAFLSGEQKKAIVDLLFKTNRKVTVKQLKEDYFKKIECFDSVEISGVEDRFNASLGTYHDLLKIIKDKDFLDNEENEDILEDIVLTLTLFEDREMIEERLKTYAHLFDDKVMKQLKRRRYTGWGRLSRKLINGIRDKQSGKTILDFLKSDGFANRNFMQLIHDDSLTFKEDIQKAQVSGQGDSLHEHIANLAGSPAIKKGILQTVKVVDELVKVMGRHKPENIVIEMARENQTTQKGQKNSRERMKRIEEGIKELGSQILKEHPVENTQLQNEKLYLYYLQNGRDMYVDQELDINRLSDYDVDHIVPQSFLKDDSIDNKVLTRSDKARGKSDNVPSEEVVKKMKNYWRQLLNAKLITQRKFDNLTKAERGGLSELDKAGFIKRQLVETRQITKHVAQILDSRMNTKYDENDKLIREVKVITLKSKLVSDFRKDFQFYKVREINNYHHAHDAYLNAVVGTALIKKYPKLESEFVYGDYKVYDVRKMIAKSEQEIGKATAKYFFYSNIMNFFKTEITLANGEIRKRPLIETNGETGEIVWDKGRDFATVRKVLSMPQVNIVKKTEVQTGGFSKESILPKRNSDKLIARKKDWDPKKYGGFDSPTVAYSVLVVAKVEKGKSKKLKSVKELLGITIMERSSFEKNPIDFLEAKGYKEVKKDLIIKLPKYSLFELENGRKRMLASAGELQKGNELALPSKYVNFLYLASHYEKLKGSPEDNEQKQLFVEQHKHYLDEIIEQISEFSKRVILADANLDKVLSAYNKHRDKPIREQAENIIHLFTLTNLGAPAAFKYFDTTIDRKRYTSTKEVLDATLIHQSITGLYETRIDLSQLGGDGGEAAAKEAAAKEAAAKEAAAKGGVLNLEEEYRLHEKPVPSSIDPSWLQLFPTVWAERAGMGLANQVPPVVVELRSGASPVAVRQYPMSKEAREGIRPHIQRFLDLGVLVPCQSPWNTPLLPVKKPGTNDYRPVQDLREINKRVQDIHPTVPNPYNLLSSLPPSHTWYSVLDLKDAFFCLKLHPNSQPLFAFEWRDPEKGNTGQLTWTRLPQGFKNSPTLFNEALHRDLAPFRALNPQVVLLQYVDDLLVAAPTYRDCKEGTQKLLQELSKLGYRVSAKKAQLCQKEVTYLGYLLKEGKRWLTPARKATVMKIPPPTTPRQVREFLGKAGFCRLFIPGFASLAAPLYPLTKPSIPFIWTEEHQKAFDRIKEALLSAPALALPDLTKPFTLYVDERAGVARGVLTQTLGPWRRPVAYLSKKLDPVASGWPTCLKAVAAVALLLKDADKLTLGQNVTVIASHSLESIVRQPPDRWMTNARMTHYQSLLLNERVSFAPPAVLNPATLLPVESEATPVHRCSEILAEETGTRRDLKDQPLPGVPAWYTDGSSFIAEGKRRAGAAIVDGKRTVWASSLPEGTSAQKAELVALTQALRLAEGKDINIYTDSRYAFATAHIHGAIYKQRGWLTSAGKDIKNKEEILALLEAIHLPKRVAIIHCPGHQKGNDPVATGNRRADEAAKQAALSTRVLAETTKPAGKRTADGSEFEKRTADGSEFESPKKKAKVE

SEQ ID NO: 936 - protein, 2094 aa, synthetic construct
MPAAKRVKLDGGDKKYSIGLDIGTNSVGWAVITDEYKVPSKKFKVLGNTDRHSIKKNLIGALLFDSGETAEATRLKRTARRRYTRRKNRICYLQEIFSNEMAKVDDSFFHRLEESFLVEEDKKHERHPIFGNIVDEVAYHEKYPTIYHLRKKLVDSTDKADLRLIYLALAHMIKFRGHFLIEGDLNPDNSDVDKLFIQLVQTYNQLFEENPINASGVDAKAILSARLSKSRRLENLIAQLPGEKKNGLFGNLIALSLGLTPNFKSNFDLAEDAKLQLSKDTYDDDLDNLLAQIGDQYADLFLAAKNLSDAILLSDILRVNTEITKAPLSASMIKRYDEHHQDLTLLKALVRQQLPEKYKEIFFDQSKNGYAGYIDGGASQEEFYKFIKPILEKMDGTEELLVKLNREDLLRKQRTFDNGSIPHQIHLGELHAILRRQEDFYPFLKDNREKIEKILTFRIPYYVGPLARGNSRFAWMTRKSEETITPWNFEEVVDKGASAQSFIERMTNFDKNLPNEKVLPKHSLLYEYFTVYNELTKVKYVTEGMRKPAFLSGEQKKAIVDLLFKTNRKVTVKQLKEDYFKKIECFDSVEISGVEDRFNASLGTYHDLLKIIKDKDFLDNEENEDILEDIVLTLTLFEDREMIEERLKTYAHLFDDKVMKQLKRRRYTGWGRLSRKLINGIRDKQSGKTILDFLKSDGFANRNFMQLIHDDSLTFKEDIQKAQVSGQGDSLHEHIANLAGSPAIKKGILQTVKVVDELVKVMGRHKPENIVIEMARENQTTQKGQKNSRERMKRIEEGIKELGSQILKEHPVENTQLQNEKLYLYYLQNGRDMYVDQELDINRLSDYDVDHIVPQSFLKDDSIDNKVLTRSDKARGKSDNVPSEEVVKKMKNYWRQLLNAKLITQRKFDNLTKAERGGLSELDKAGFIKRQLVETRQITKHVAQILDSRMNTKYDENDKLIREVKVITLKSKLVSDFRKDFQFYKVREINNYHHAHDAYLNAVVGTALIKKYPKLESEFVYGDYKVYDVRKMIAKSEQEIGKATAKYFFYSNIMNFFKTEITLANGEIRKRPLIETNGETGEIVWDKGRDFATVRKVLSMPQVNIVKKTEVQTGGFSKESILPKRNSDKLIARKKDWDPKKYGGFDSPTVAYSVLVVAKVEKGKSKKLKSVKELLGITIMERSSFEKNPIDFLEAKGYKEVKKDLIIKLPKYSLFELENGRKRMLASAGELQKGNELALPSKYVNFLYLASHYEKLKGSPEDNEQKQLFVEQHKHYLDEIIEQISEFSKRVILADANLDKVLSAYNKHRDKPIREQAENIIHLFTLTNLGAPAAFKYFDTTIDRKRYTSTKEVLDATLIHQSITGLYETRIDLSQLGGDGGGGSGSSEAAAKGGVLNLEEEYRLHEKPVPSSIDPSWLQLFPTVWAERAGMGLANQVPPVVVELRSGASPVAVRQYPMSKEAREGIRPHIQRFLDLGVLVPCQSPWNTPLLPVKKPGTNDYRPVQDLREINKRVQDIHPTVPNPYNLLSSLPPSHTWYSVLDLKDAFFCLKLHPNSQPLFAFEWRDPEKGNTGQLTWTRLPQGFKNSPTLFNEALHRDLAPFRALNPQVVLLQYVDDLLVAAPTYRDCKEGTQKLLQELSKLGYRVSAKKAQLCQKEVTYLGYLLKEGKRWLTPARKATVMKIPPPTTPRQVREFLGKAGFCRLFIPGFASLAAPLYPLTKPSIPFIWTEEHQKAFDRIKEALLSAPALALPDLTKPFTLYVDERAGVARGVLTQTLGPWRRPVAYLSKKLDPVASGWPTCLKAVAAVALLLKDADKLTLGQNVTVIASHSLESIVRQPPDRWMTNARMTHYQSLLLNERVSFAPPAVLNPATLLPVESEATPVHRCSEILAEETGTRRDLKDQPLPGVPAWYTDGSSFIAEGKRRAGAAIVDGKRTVWASSLPEGTSAQKAELVALTQALRLAEGKDINIYTDSRYAFATAHIHGAIYKQRGWLTSAGKDIKNKEEILALLEAIHLPKRVAIIHCPGHQKGNDPVATGNRRADEAAKQAALSTRVLAETTKPAGKRTADGSEFEKRTADGSEFESPKKKAKVE

SEQ ID NO: 937 - protein, 2092 aa, synthetic construct
MPAAKRVKLDGGDKKYSIGLDIGTNSVGWAVITDEYKVPSKKFKVLGNTDRHSIKKNLIGALLFDSGETAEATRLKRTARRRYTRRKNRICYLQEIFSNEMAKVDDSFFHRLEESFLVEEDKKHERHPIFGNIVDEVAYHEKYPTIYHLRKKLVDSTDKADLRLIYLALAHMIKFRGHFLIEGDLNPDNSDVDKLFIQLVQTYNQLFEENPINASGVDAKAILSARLSKSRRLENLIAQLPGEKKNGLFGNLIALSLGLTPNFKSNFDLAEDAKLQLSKDTYDDDLDNLLAQIGDQYADLFLAAKNLSDAILLSDILRVNTEITKAPLSASMIKRYDEHHQDLTLLKALVRQQLPEKYKEIFFDQSKNGYAGYIDGGASQEEFYKFIKPILEKMDGTEELLVKLNREDLLRKQRTFDNGSIPHQIHLGELHAILRRQEDFYPFLKDNREKIEKILTFRIPYYVGPLARGNSRFAWMTRKSEETITPWNFEEVVDKGASAQSFIERMTNFDKNLPNEKVLPKHSLLYEYFTVYNELTKVKYVTEGMRKPAFLSGEQKKAIVDLLFKTNRKVTVKQLKEDYFKKIECFDSVEISGVEDRFNASLGTYHDLLKIIKDKDFLDNEENEDILEDIVLTLTLFEDREMIEERLKTYAHLFDDKVMKQLKRRRYTGWGRLSRKLINGIRDKQSGKTILDFLKSDGFANRNFMQLIHDDSLTFKEDIQKAQVSGQGDSLHEHIANLAGSPAIKKGILQTVKVVDELVKVMGRHKPENIVIEMARENQTTQKGQKNSRERMKRIEEGIKELGSQILKEHPVENTQLQNEKLYLYYLQNGRDMYVDQELDINRLSDYDVDHIVPQSFLKDDSIDNKVLTRSDKARGKSDNVPSEEVVKKMKNYWRQLLNAKLITQRKFDNLTKAERGGLSELDKAGFIKRQLVETRQITKHVAQILDSRMNTKYDENDKLIREVKVITLKSKLVSDFRKDFQFYKVREINNYHHAHDAYLNAVVGTALIKKYPKLESEFVYGDYKVYDVRKMIAKSEQEIGKATAKYFFYSNIMNFFKTEITLANGEIRKRPLIETNGETGEIVWDKGRDFATVRKVLSMPQVNIVKKTEVQTGGFSKESILPKRNSDKLIARKKDWDPKKYGGFDSPTVAYSVLVVAKVEKGKSKKLKSVKELLGITIMERSSFEKNPIDFLEAKGYKEVKKDLIIKLPKYSLFELENGRKRMLASAGELQKGNELALPSKYVNFLYLASHYEKLKGSPEDNEQKQLFVEQHKHYLDEIIEQISEFSKRVILADANLDKVLSAYNKHRDKPIREQAENIIHLFTLTNLGAPAAFKYFDTTIDRKRYTSTKEVLDATLIHQSITGLYETRIDLSQLGGDGGGGGGGSGSSGGVLNLEEEYRLHEKPVPSSIDPSWLQLFPTVWAERAGMGLANQVPPVVVELRSGASPVAVRQYPMSKEAREGIRPHIQRFLDLGVLVPCQSPWNTPLLPVKKPGTNDYRPVQDLREINKRVQDIHPTVPNPYNLLSSLPPSHTWYSVLDLKDAFFCLKLHPNSQPLFAFEWRDPEKGNTGQLTWTRLPQGFKNSPTLFNEALHRDLAPFRALNPQVVLLQYVDDLLVAAPTYRDCKEGTQKLLQELSKLGYRVSAKKAQLCQKEVTYLGYLLKEGKRWLTPARKATVMKIPPPTTPRQVREFLGKAGFCRLFIPGFASLAAPLYPLTKPSIPFIWTEEHQKAFDRIKEALLSAPALALPDLTKPFTLYVDERAGVARGVLTQTLGPWRRPVAYLSKKLDPVASGWPTCLKAVAAVALLLKDADKLTLGQNVTVIASHSLESIVRQPPDRWMTNARMTHYQSLLLNERVSFAPPAVLNPATLLPVESEATPVHRCSEILAEETGTRRDLKDQPLPGVPAWYTDGSSFIAEGKRRAGAAIVDGKRTVWASSLPEGTSAQKAELVALTQALRLAEGKDINIYTDSRYAFATAHIHGAIYKQRGWLTSAGKDIKNKEEILALLEAIHLPKRVAIIHCPGHQKGNDPVATGNRRADEAAKQAALSTRVLAETTKPAGKRTADGSEFEKRTADGSEFESPKKKAKVE

SEQ ID NO: 938 - protein, 2098 aa, synthetic construct
MPAAKRVKLDGGDKKYSIGLDIGTNSVGWAVITDEYKVPSKKFKVLGNTDRHSIKKNLIGALLFDSGETAEATRLKRTARRRYTRRKNRICYLQEIFSNEMAKVDDSFFHRLEESFLVEEDKKHERHPIFGNIVDEVAYHEKYPTIYHLRKKLVDSTDKADLRLIYLALAHMIKFRGHFLIEGDLNPDNSDVDKLFIQLVQTYNQLFEENPINASGVDAKAILSARLSKSRRLENLIAQLPGEKKNGLFGNLIALSLGLTPNFKSNFDLAEDAKLQLSKDTYDDDLDNLLAQIGDQYADLFLAAKNLSDAILLSDILRVNTEITKAPLSASMIKRYDEHHQDLTLLKALVRQQLPEKYKEIFFDQSKNGYAGYIDGGASQEEFYKFIKPILEKMDGTEELLVKLNREDLLRKQRTFDNGSIPHQIHLGELHAILRRQEDFYPFLKDNREKIEKILTFRIPYYVGPLARGNSRFAWMTRKSEETITPWNFEEVVDKGASAQSFIERMTNFDKNLPNEKVLPKHSLLYEYFTVYNELTKVKYVTEGMRKPAFLSGEQKKAIVDLLFKTNRKVTVKQLKEDYFKKIECFDSVEISGVEDRFNASLGTYHDLLKIIKDKDFLDNEENEDILEDIVLTLTLFEDREMIEERLKTYAHLFDDKVMKQLKRRRYTGWGRLSRKLINGIRDKQSGKTILDFLKSDGFANRNFMQLIHDDSLTFKEDIQKAQVSGQGDSLHEHIANLAGSPAIKKGILQTVKVVDELVKVMGRHKPENIVIEMARENQTTQKGQKNSRERMKRIEEGIKELGSQILKEHPVENTQLQNEKLYLYYLQNGRDMYVDQELDINRLSDYDVDHIVPQSFLKDDSIDNKVLTRSDKARGKSDNVPSEEVVKKMKNYWRQLLNAKLITQRKFDNLTKAERGGLSELDKAGFIKRQLVETRQITKHVAQILDSRMNTKYDENDKLIREVKVITLKSKLVSDFRKDFQFYKVREINNYHHAHDAYLNAVVGTALIKKYPKLESEFVYGDYKVYDVRKMIAKSEQEIGKATAKYFFYSNIMNFFKTEITLANGEIRKRPLIETNGETGEIVWDKGRDFATVRKVLSMPQVNIVKKTEVQTGGFSKESILPKRNSDKLIARKKDWDPKKYGGFDSPTVAYSVLVVAKVEKGKSKKLKSVKELLGITIMERSSFEKNPIDFLEAKGYKEVKKDLIIKLPKYSLFELENGRKRMLASAGELQKGNELALPSKYVNFLYLASHYEKLKGSPEDNEQKQLFVEQHKHYLDEIIEQISEFSKRVILADANLDKVLSAYNKHRDKPIREQAENIIHLFTLTNLGAPAAFKYFDTTIDRKRYTSTKEVLDATLIHQSITGLYETRIDLSQLGGDGGGSSGSSGSSGSSGSSGGVLNLEEEYRLHEKPVPSSIDPSWLQLFPTVWAERAGMGLANQVPPVVVELRSGASPVAVRQYPMSKEAREGIRPHIQRFLDLGVLVPCQSPWNTPLLPVKKPGTNDYRPVQDLREINKRVQDIHPTVPNPYNLLSSLPPSHTWYSVLDLKDAFFCLKLHPNSQPLFAFEWRDPEKGNTGQLTWTRLPQGFKNSPTLFNEALHRDLAPFRALNPQVVLLQYVDDLLVAAPTYRDCKEGTQKLLQELSKLGYRVSAKKAQLCQKEVTYLGYLLKEGKRWLTPARKATVMKIPPPTTPRQVREFLGKAGFCRLFIPGFASLAAPLYPLTKPSIPFIWTEEHQKAFDRIKEALLSAPALALPDLTKPFTLYVDERAGVARGVLTQTLGPWRRPVAYLSKKLDPVASGWPTCLKAVAAVALLLKDADKLTLGQNVTVIASHSLESIVRQPPDRWMTNARMTHYQSLLLNERVSFAPPAVLNPATLLPVESEATPVHRCSEILAEETGTRRDLKDQPLPGVPAWYTDGSSFIAEGKRRAGAAIVDGKRTVWASSLPEGTSAQKAELVALTQALRLAEGKDINIYTDSRYAFATAHIHGAIYKQRGWLTSAGKDIKNKEEILALLEAIHLPKRVAIIHCPGHQKGNDPVATGNRRADEAAKQAALSTRVLAETTKPAGKRTADGSEFEKRTADGSEFESPKKKAKVE

SEQ ID NO: 939 - protein, 2094 aa, synthetic construct
MPAAKRVKLDGGDKKYSIGLDIGTNSVGWAVITDEYKVPSKKFKVLGNTDRHSIKKNLIGALLFDSGETAEATRLKRTARRRYTRRKNRICYLQEIFSNEMAKVDDSFFHRLEESFLVEEDKKHERHPIFGNIVDEVAYHEKYPTIYHLRKKLVDSTDKADLRLIYLALAHMIKFRGHFLIEGDLNPDNSDVDKLFIQLVQTYNQLFEENPINASGVDAKAILSARLSKSRRLENLIAQLPGEKKNGLFGNLIALSLGLTPNFKSNFDLAEDAKLQLSKDTYDDDLDNLLAQIGDQYADLFLAAKNLSDAILLSDILRVNTEITKAPLSASMIKRYDEHHQDLTLLKALVRQQLPEKYKEIFFDQSKNGYAGYIDGGASQEEFYKFIKPILEKMDGTEELLVKLNREDLLRKQRTFDNGSIPHQIHLGELHAILRRQEDFYPFLKDNREKIEKILTFRIPYYVGPLARGNSRFAWMTRKSEETITPWNFEEVVDKGASAQSFIERMTNFDKNLPNEKVLPKHSLLYEYFTVYNELTKVKYVTEGMRKPAFLSGEQKKAIVDLLFKTNRKVTVKQLKEDYFKKIECFDSVEISGVEDRFNASLGTYHDLLKIIKDKDFLDNEENEDILEDIVLTLTLFEDREMIEERLKTYAHLFDDKVMKQLKRRRYTGWGRLSRKLINGIRDKQSGKTILDFLKSDGFANRNFMQLIHDDSLTFKEDIQKAQVSGQGDSLHEHIANLAGSPAIKKGILQTVKVVDELVKVMGRHKPENIVIEMARENQTTQKGQKNSRERMKRIEEGIKELGSQILKEHPVENTQLQNEKLYLYYLQNGRDMYVDQELDINRLSDYDVDHIVPQSFLKDDSIDNKVLTRSDKARGKSDNVPSEEVVKKMKNYWRQLLNAKLITQRKFDNLTKAERGGLSELDKAGFIKRQLVETRQITKHVAQILDSRMNTKYDENDKLIREVKVITLKSKLVSDFRKDFQFYKVREINNYHHAHDAYLNAVVGTALIKKYPKLESEFVYGDYKVYDVRKMIAKSEQEIGKATAKYFFYSNIMNFFKTEITLANGEIRKRPLIETNGETGEIVWDKGRDFATVRKVLSMPQVNIVKKTEVQTGGFSKESILPKRNSDKLIARKKDWDPKKYGGFDSPTVAYSVLVVAKVEKGKSKKLKSVKELLGITIMERSSFEKNPIDFLEAKGYKEVKKDLIIKLPKYSLFELENGRKRMLASAGELQKGNELALPSKYVNFLYLASHYEKLKGSPEDNEQKQLFVEQHKHYLDEIIEQISEFSKRVILADANLDKVLSAYNKHRDKPIREQAENIIHLFTLTNLGAPAAFKYFDTTIDRKRYTSTKEVLDATLIHQSITGLYETRIDLSQLGGDGGPAPEAAAKGGSGGVLNLEEEYRLHEKPVPSSIDPSWLQLFPTVWAERAGMGLANQVPPVVVELRSGASPVAVRQYPMSKEAREGIRPHIQRFLDLGVLVPCQSPWNTPLLPVKKPGTNDYRPVQDLREINKRVQDIHPTVPNPYNLLSSLPPSHTWYSVLDLKDAFFCLKLHPNSQPLFAFEWRDPEKGNTGQLTWTRLPQGFKNSPTLFNEALHRDLAPFRALNPQVVLLQYVDDLLVAAPTYRDCKEGTQKLLQELSKLGYRVSAKKAQLCQKEVTYLGYLLKEGKRWLTPARKATVMKIPPPTTPRQVREFLGKAGFCRLFIPGFASLAAPLYPLTKPSIPFIWTEEHQKAFDRIKEALLSAPALALPDLTKPFTLYVDERAGVARGVLTQTLGPWRRPVAYLSKKLDPVASGWPTCLKAVAAVALLLKDADKLTLGQNVTVIASHSLESIVRQPPDRWMTNARMTHYQSLLLNERVSFAPPAVLNPATLLPVESEATPVHRCSEILAEETGTRRDLKDQPLPGVPAWYTDGSSFIAEGKRRAGAAIVDGKRTVWASSLPEGTSAQKAELVALTQALRLAEGKDINIYTDSRYAFATAHIHGAIYKQRGWLTSAGKDIKNKEEILALLEAIHLPKRVAIIHCPGHQKGNDPVATGNRRADEAAKQAALSTRVLAETTKPAGKRTADGSEFEKRTADGSEFESPKKKAKVE

SEQ ID NO: 940 - protein, 2089 aa, synthetic construct
MPAAKRVKLDGGDKKYSIGLDIGTNSVGWAVITDEYKVPSKKFKVLGNTDRHSIKKNLIGALLFDSGETAEATRLKRTARRRYTRRKNRICYLQEIFSNEMAKVDDSFFHRLEESFLVEEDKKHERHPIFGNIVDEVAYHEKYPTIYHLRKKLVDSTDKADLRLIYLALAHMIKFRGHFLIEGDLNPDNSDVDKLFIQLVQTYNQLFEENPINASGVDAKAILSARLSKSRRLENLIAQLPGEKKNGLFGNLIALSLGLTPNFKSNFDLAEDAKLQLSKDTYDDDLDNLLAQIGDQYADLFLAAKNLSDAILLSDILRVNTEITKAPLSASMIKRYDEHHQDLTLLKALVRQQLPEKYKEIFFDQSKNGYAGYIDGGASQEEFYKFIKPILEKMDGTEELLVKLNREDLLRKQRTFDNGSIPHQIHLGELHAILRRQEDFYPFLKDNREKIEKILTFRIPYYVGPLARGNSRFAWMTRKSEETITPWNFEEVVDKGASAQSFIERMTNFDKNLPNEKVLPKHSLLYEYFTVYNELTKVKYVTEGMRKPAFLSGEQKKAIVDLLFKTNRKVTVKQLKEDYFKKIECFDSVEISGVEDRFNASLGTYHDLLKIIKDKDFLDNEENEDILEDIVLTLTLFEDREMIEERLKTYAHLFDDKVMKQLKRRRYTGWGRLSRKLINGIRDKQSGKTILDFLKSDGFANRNFMQLIHDDSLTFKEDIQKAQVSGQGDSLHEHIANLAGSPAIKKGILQTVKVVDELVKVMGRHKPENIVIEMARENQTTQKGQKNSRERMKRIEEGIKELGSQILKEHPVENTQLQNEKLYLYYLQNGRDMYVDQELDINRLSDYDVDHIVPQSFLKDDSIDNKVLTRSDKARGKSDNVPSEEVVKKMKNYWRQLLNAKLITQRKFDNLTKAERGGLSELDKAGFIKRQLVETRQITKHVAQILDSRMNTKYDENDKLIREVKVITLKSKLVSDFRKDFQFYKVREINNYHHAHDAYLNAVVGTALIKKYPKLESEFVYGDYKVYDVRKMIAKSEQEIGKATAKYFFYSNIMNFFKTEITLANGEIRKRPLIETNGETGEIVWDKGRDFATVRKVLSMPQVNIVKKTEVQTGGFSKESILPKRNSDKLIARKKDWDPKKYGGFDSPTVAYSVLVVAKVEKGKSKKLKSVKELLGITIMERSSFEKNPIDFLEAKGYKEVKKDLIIKLPKYSLFELENGRKRMLASAGELQKGNELALPSKYVNFLYLASHYEKLKGSPEDNEQKQLFVEQHKHYLDEIIEQISEFSKRVILADANLDKVLSAYNKHRDKPIREQAENIIHLFTLTNLGAPAAFKYFDTTIDRKRYTSTKEVLDATLIHQSITGLYETRIDLSQLGGDGGGGGPAPGGVLNLEEEYRLHEKPVPSSIDPSWLQLFPTVWAERAGMGLANQVPPVVVELRSGASPVAVRQYPMSKEAREGIRPHIQRFLDLGVLVPCQSPWNTPLLPVKKPGTNDYRPVQDLREINKRVQDIHPTVPNPYNLLSSLPPSHTWYSVLDLKDAFFCLKLHPNSQPLFAFEWRDPEKGNTGQLTWTRLPQGFKNSPTLFNEALHRDLAPFRALNPQVVLLQYVDDLLVAAPTYRDCKEGTQKLLQELSKLGYRVSAKKAQLCQKEVTYLGYLLKEGKRWLTPARKATVMKIPPPTTPRQVREFLGKAGFCRLFIPGFASLAAPLYPLTKPSIPFIWTEEHQKAFDRIKEALLSAPALALPDLTKPFTLYVDERAGVARGVLTQTLGPWRRPVAYLSKKLDPVASGWPTCLKAVAAVALLLKDADKLTLGQNVTVIASHSLESIVRQPPDRWMTNARMTHYQSLLLNERVSFAPPAVLNPATLLPVESEATPVHRCSEILAEETGTRRDLKDQPLPGVPAWYTDGSSFIAEGKRRAGAAIVDGKRTVWASSLPEGTSAQKAELVALTQALRLAEGKDINIYTDSRYAFATAHIHGAIYKQRGWLTSAGKDIKNKEEILALLEAIHLPKRVAIIHCPGHQKGNDPVATGNRRADEAAKQAALSTRVLAETTKPAGKRTADGSEFEKRTADGSEFESPKKKAKVE

SEQ ID NO: 941 - protein, 2089 aa, synthetic construct
MPAAKRVKLDGGDKKYSIGLDIGTNSVGWAVITDEYKVPSKKFKVLGNTDRHSIKKNLIGALLFDSGETAEATRLKRTARRRYTRRKNRICYLQEIFSNEMAKVDDSFFHRLEESFLVEEDKKHERHPIFGNIVDEVAYHEKYPTIYHLRKKLVDSTDKADLRLIYLALAHMIKFRGHFLIEGDLNPDNSDVDKLFIQLVQTYNQLFEENPINASGVDAKAILSARLSKSRRLENLIAQLPGEKKNGLFGNLIALSLGLTPNFKSNFDLAEDAKLQLSKDTYDDDLDNLLAQIGDQYADLFLAAKNLSDAILLSDILRVNTEITKAPLSASMIKRYDEHHQDLTLLKALVRQQLPEKYKEIFFDQSKNGYAGYIDGGASQEEFYKFIKPILEKMDGTEELLVKLNREDLLRKQRTFDNGSIPHQIHLGELHAILRRQEDFYPFLKDNREKIEKILTFRIPYYVGPLARGNSRFAWMTRKSEETITPWNFEEVVDKGASAQSFIERMTNFDKNLPNEKVLPKHSLLYEYFTVYNELTKVKYVTEGMRKPAFLSGEQKKAIVDLLFKTNRKVTVKQLKEDYFKKIECFDSVEISGVEDRFNASLGTYHDLLKIIKDKDFLDNEENEDILEDIVLTLTLFEDREMIEERLKTYAHLFDDKVMKQLKRRRYTGWGRLSRKLINGIRDKQSGKTILDFLKSDGFANRNFMQLIHDDSLTFKEDIQKAQVSGQGDSLHEHIANLAGSPAIKKGILQTVKVVDELVKVMGRHKPENIVIEMARENQTTQKGQKNSRERMKRIEEGIKELGSQILKEHPVENTQLQNEKLYLYYLQNGRDMYVDQELDINRLSDYDVDHIVPQSFLKDDSIDNKVLTRSDKARGKSDNVPSEEVVKKMKNYWRQLLNAKLITQRKFDNLTKAERGGLSELDKAGFIKRQLVETRQITKHVAQILDSRMNTKYDENDKLIREVKVITLKSKLVSDFRKDFQFYKVREINNYHHAHDAYLNAVVGTALIKKYPKLESEFVYGDYKVYDVRKMIAKSEQEIGKATAKYFFYSNIMNFFKTEITLANGEIRKRPLIETNGETGEIVWDKGRDFATVRKVLSMPQVNIVKKTEVQTGGFSKESILPKRNSDKLIARKKDWDPKKYGGFDSPTVAYSVLVVAKVEKGKSKKLKSVKELLGITIMERSSFEKNPIDFLEAKGYKEVKKDLIIKLPKYSLFELENGRKRMLASAGELQKGNELALPSKYVNFLYLASHYEKLKGSPEDNEQKQLFVEQHKHYLDEIIEQISEFSKRVILADANLDKVLSAYNKHRDKPIREQAENIIHLFTLTNLGAPAAFKYFDTTIDRKRYTSTKEVLDATLIHQSITGLYETRIDLSQLGGDGGPAPGSSGGVLNLEEEYRLHEKPVPSSIDPSWLQLFPTVWAERAGMGLANQVPPVVVELRSGASPVAVRQYPMSKEAREGIRPHIQRFLDLGVLVPCQSPWNTPLLPVKKPGTNDYRPVQDLREINKRVQDIHPTVPNPYNLLSSLPPSHTWYSVLDLKDAFFCLKLHPNSQPLFAFEWRDPEKGNTGQLTWTRLPQGFKNSPTLFNEALHRDLAPFRALNPQVVLLQYVDDLLVAAPTYRDCKEGTQKLLQELSKLGYRVSAKKAQLCQKEVTYLGYLLKEGKRWLTPARKATVMKIPPPTTPRQVREFLGKAGFCRLFIPGFASLAAPLYPLTKPSIPFIWTEEHQKAFDRIKEALLSAPALALPDLTKPFTLYVDERAGVARGVLTQTLGPWRRPVAYLSKKLDPVASGWPTCLKAVAAVALLLKDADKLTLGQNVTVIASHSLESIVRQPPDRWMTNARMTHYQSLLLNERVSFAPPAVLNPATLLPVESEATPVHRCSEILAEETGTRRDLKDQPLPGVPAWYTDGSSFIAEGKRRAGAAIVDGKRTVWASSLPEGTSAQKAELVALTQALRLAEGKDINIYTDSRYAFATAHIHGAIYKQRGWLTSAGKDIKNKEEILALLEAIHLPKRVAIIHCPGHQKGNDPVATGNRRADEAAKQAALSTRVLAETTKPAGKRTADGSEFEKRTADGSEFESPKKKAKVE

SEQ ID NO: 942 - protein, 2091 aa, synthetic construct
MPAAKRVKLDGGDKKYSIGLDIGTNSVGWAVITDEYKVPSKKFKVLGNTDRHSIKKNLIGALLFDSGETAEATRLKRTARRRYTRRKNRICYLQEIFSNEMAKVDDSFFHRLEESFLVEEDKKHERHPIFGNIVDEVAYHEKYPTIYHLRKKLVDSTDKADLRLIYLALAHMIKFRGHFLIEGDLNPDNSDVDKLFIQLVQTYNQLFEENPINASGVDAKAILSARLSKSRRLENLIAQLPGEKKNGLFGNLIALSLGLTPNFKSNFDLAEDAKLQLSKDTYDDDLDNLLAQIGDQYADLFLAAKNLSDAILLSDILRVNTEITKAPLSASMIKRYDEHHQDLTLLKALVRQQLPEKYKEIFFDQSKNGYAGYIDGGASQEEFYKFIKPILEKMDGTEELLVKLNREDLLRKQRTFDNGSIPHQIHLGELHAILRRQEDFYPFLKDNREKIEKILTFRIPYYVGPLARGNSRFAWMTRKSEETITPWNFEEVVDKGASAQSFIERMTNFDKNLPNEKVLPKHSLLYEYFTVYNELTKVKYVTEGMRKPAFLSGEQKKAIVDLLFKTNRKVTVKQLKEDYFKKIECFDSVEISGVEDRFNASLGTYHDLLKIIKDKDFLDNEENEDILEDIVLTLTLFEDREMIEERLKTYAHLFDDKVMKQLKRRRYTGWGRLSRKLINGIRDKQSGKTILDFLKSDGFANRNFMQLIHDDSLTFKEDIQKAQVSGQGDSLHEHIANLAGSPAIKKGILQTVKVVDELVKVMGRHKPENIVIEMARENQTTQKGQKNSRERMKRIEEGIKELGSQILKEHPVENTQLQNEKLYLYYLQNGRDMYVDQELDINRLSDYDVDHIVPQSFLKDDSIDNKVLTRSDKARGKSDNVPSEEVVKKMKNYWRQLLNAKLITQRKFDNLTKAERGGLSELDKAGFIKRQLVETRQITKHVAQILDSRMNTKYDENDKLIREVKVITLKSKLVSDFRKDFQFYKVREINNYHHAHDAYLNAVVGTALIKKYPKLESEFVYGDYKVYDVRKMIAKSEQEIGKATAKYFFYSNIMNFFKTEITLANGEIRKRPLIETNGETGEIVWDKGRDFATVRKVLSMPQVNIVKKTEVQTGGFSKESILPKRNSDKLIARKKDWDPKKYGGFDSPTVAYSVLVVAKVEKGKSKKLKSVKELLGITIMERSSFEKNPIDFLEAKGYKEVKKDLIIKLPKYSLFELENGRKRMLASAGELQKGNELALPSKYVNFLYLASHYEKLKGSPEDNEQKQLFVEQHKHYLDEIIEQISEFSKRVILADANLDKVLSAYNKHRDKPIREQAENIIHLFTLTNLGAPAAFKYFDTTIDRKRYTSTKEVLDATLIHQSITGLYETRIDLSQLGGDGGEAAAKGSSGGVLNLEEEYRLHEKPVPSSIDPSWLQLFPTVWAERAGMGLANQVPPVVVELRSGASPVAVRQYPMSKEAREGIRPHIQRFLDLGVLVPCQSPWNTPLLPVKKPGTNDYRPVQDLREINKRVQDIHPTVPNPYNLLSSLPPSHTWYSVLDLKDAFFCLKLHPNSQPLFAFEWRDPEKGNTGQLTWTRLPQGFKNSPTLFNEALHRDLAPFRALNPQVVLLQYVDDLLVAAPTYRDCKEGTQKLLQELSKLGYRVSAKKAQLCQKEVTYLGYLLKEGKRWLTPARKATVMKIPPPTTPRQVREFLGKAGFCRLFIPGFASLAAPLYPLTKPSIPFIWTEEHQKAFDRIKEALLSAPALALPDLTKPFTLYVDERAGVARGVLTQTLGPWRRPVAYLSKKLDPVASGWPTCLKAVAAVALLLKDADKLTLGQNVTVIASHSLESIVRQPPDRWMTNARMTHYQSLLLNERVSFAPPAVLNPATLLPVESEATPVHRCSEILAEETGTRRDLKDQPLPGVPAWYTDGSSFIAEGKRRAGAAIVDGKRTVWASSLPEGTSAQKAELVALTQALRLAEGKDINIYTDSRYAFATAHIHGAIYKQRGWLTSAGKDIKNKEEILALLEAIHLPKRVAIIHCPGHQKGNDPVATGNRRADEAAKQAALSTRVLAETTKPAGKRTADGSEFEKRTADGSEFESPKKKAKVE

SEQ ID NO: 943 - protein, 2089 aa, synthetic construct
MPAAKRVKLDGGDKKYSIGLDIGTNSVGWAVITDEYKVPSKKFKVLGNTDRHSIKKNLIGALLFDSGETAEATRLKRTARRRYTRRKNRICYLQEIFSNEMAKVDDSFFHRLEESFLVEEDKKHERHPIFGNIVDEVAYHEKYPTIYHLRKKLVDSTDKADLRLIYLALAHMIKFRGHFLIEGDLNPDNSDVDKLFIQLVQTYNQLFEENPINASGVDAKAILSARLSKSRRLENLIAQLPGEKKNGLFGNLIALSLGLTPNFKSNFDLAEDAKLQLSKDTYDDDLDNLLAQIGDQYADLFLAAKNLSDAILLSDILRVNTEITKAPLSASMIKRYDEHHQDLTLLKALVRQQLPEKYKEIFFDQSKNGYAGYIDGGASQEEFYKFIKPILEKMDGTEELLVKLNREDLLRKQRTFDNGSIPHQIHLGELHAILRRQEDFYPFLKDNREKIEKILTFRIPYYVGPLARGNSRFAWMTRKSEETITPWNFEEVVDKGASAQSFIERMTNFDKNLPNEKVLPKHSLLYEYFTVYNELTKVKYVTEGMRKPAFLSGEQKKAIVDLLFKTNRKVTVKQLKEDYFKKIECFDSVEISGVEDRFNASLGTYHDLLKIIKDKDFLDNEENEDILEDIVLTLTLFEDREMIEERLKTYAHLFDDKVMKQLKRRRYTGWGRLSRKLINGIRDKQSGKTILDFLKSDGFANRNFMQLIHDDSLTFKEDIQKAQVSGQGDSLHEHIANLAGSPAIKKGILQTVKVVDELVKVMGRHKPENIVIEMARENQTTQKGQKNSRERMKRIEEGIKELGSQILKEHPVENTQLQNEKLYLYYLQNGRDMYVDQELDINRLSDYDVDHIVPQSFLKDDSIDNKVLTRSDKARGKSDNVPSEEVVKKMKNYWRQLLNAKLITQRKFDNLTKAERGGLSELDKAGFIKRQLVETRQITKHVAQILDSRMNTKYDENDKLIREVKVITLKSKLVSDFRKDFQFYKVREINNYHHAHDAYLNAVVGTALIKKYPKLESEFVYGDYKVYDVRKMIAKSEQEIGKATAKYFFYSNIMNFFKTEITLANGEIRKRPLIETNGETGEIVWDKGRDFATVRKVLSMPQVNIVKKTEVQTGGFSKESILPKRNSDKLIARKKDWDPKKYGGFDSPTVAYSVLVVAKVEKGKSKKLKSVKELLGITIMERSSFEKNPIDFLEAKGYKEVKKDLIIKLPKYSLFELENGRKRMLASAGELQKGNELALPSKYVNFLYLASHYEKLKGSPEDNEQKQLFVEQHKHYLDEIIEQISEFSKRVILADANLDKVLSAYNKHRDKPIREQAENIIHLFTLTNLGAPAAFKYFDTTIDRKRYTSTKEVLDATLIHQSITGLYETRIDLSQLGGDGGPAPGGSGGVLNLEEEYRLHEKPVPSSIDPSWLQLFPTVWAERAGMGLANQVPPVVVELRSGASPVAVRQYPMSKEAREGIRPHIQRFLDLGVLVPCQSPWNTPLLPVKKPGTNDYRPVQDLREINKRVQDIHPTVPNPYNLLSSLPPSHTWYSVLDLKDAFFCLKLHPNSQPLFAFEWRDPEKGNTGQLTWTRLPQGFKNSPTLFNEALHRDLAPFRALNPQVVLLQYVDDLLVAAPTYRDCKEGTQKLLQELSKLGYRVSAKKAQLCQKEVTYLGYLLKEGKRWLTPARKATVMKIPPPTTPRQVREFLGKAGFCRLFIPGFASLAAPLYPLTKPSIPFIWTEEHQKAFDRIKEALLSAPALALPDLTKPFTLYVDERAGVARGVLTQTLGPWRRPVAYLSKKLDPVASGWPTCLKAVAAVALLLKDADKLTLGQNVTVIASHSLESIVRQPPDRWMTNARMTHYQSLLLNERVSFAPPAVLNPATLLPVESEATPVHRCSEILAEETGTRRDLKDQPLPGVPAWYTDGSSFIAEGKRRAGAAIVDGKRTVWASSLPEGTSAQKAELVALTQALRLAEGKDINIYTDSRYAFATAHIHGAIYKQRGWLTSAGKDIKNKEEILALLEAIHLPKRVAIIHCPGHQKGNDPVATGNRRADEAAKQAALSTRVLAETTKPAGKRTADGSEFEKRTADGSEFESPKKKAKVE

SEQ ID NO: 944 - protein, 2094 aa, synthetic construct
MPAAKRVKLDGGDKKYSIGLDIGTNSVGWAVITDEYKVPSKKFKVLGNTDRHSIKKNLIGALLFDSGETAEATRLKRTARRRYTRRKNRICYLQEIFSNEMAKVDDSFFHRLEESFLVEEDKKHERHPIFGNIVDEVAYHEKYPTIYHLRKKLVDSTDKADLRLIYLALAHMIKFRGHFLIEGDLNPDNSDVDKLFIQLVQTYNQLFEENPINASGVDAKAILSARLSKSRRLENLIAQLPGEKKNGLFGNLIALSLGLTPNFKSNFDLAEDAKLQLSKDTYDDDLDNLLAQIGDQYADLFLAAKNLSDAILLSDILRVNTEITKAPLSASMIKRYDEHHQDLTLLKALVRQQLPEKYKEIFFDQSKNGYAGYIDGGASQEEFYKFIKPILEKMDGTEELLVKLNREDLLRKQRTFDNGSIPHQIHLGELHAILRRQEDFYPFLKDNREKIEKILTFRIPYYVGPLARGNSRFAWMTRKSEETITPWNFEEVVDKGASAQSFIERMTNFDKNLPNEKVLPKHSLLYEYFTVYNELTKVKYVTEGMRKPAFLSGEQKKAIVDLLFKTNRKVTVKQLKEDYFKKIECFDSVEISGVEDRFNASLGTYHDLLKIIKDKDFLDNEENEDILEDIVLTLTLFEDREMIEERLKTYAHLFDDKVMKQLKRRRYTGWGRLSRKLINGIRDKQSGKTILDFLKSDGFANRNFMQLIHDDSLTFKEDIQKAQVSGQGDSLHEHIANLAGSPAIKKGILQTVKVVDELVKVMGRHKPENIVIEMARENQTTQKGQKNSRERMKRIEEGIKELGSQILKEHPVENTQLQNEKLYLYYLQNGRDMYVDQELDINRLSDYDVDHIVPQSFLKDDSIDNKVLTRSDKARGKSDNVPSEEVVKKMKNYWRQLLNAKLITQRKFDNLTKAERGGLSELDKAGFIKRQLVETRQITKHVAQILDSRMNTKYDENDKLIREVKVITLKSKLVSDFRKDFQFYKVREINNYHHAHDAYLNAVVGTALIKKYPKLESEFVYGDYKVYDVRKMIAKSEQEIGKATAKYFFYSNIMNFFKTEITLANGEIRKRPLIETNGETGEIVWDKGRDFATVRKVLSMPQVNIVKKTEVQTGGFSKESILPKRNSDKLIARKKDWDPKKYGGFDSPTVAYSVLVVAKVEKGKSKKLKSVKELLGITIMERSSFEKNPIDFLEAKGYKEVKKDLIIKLPKYSLFELENGRKRMLASAGELQKGNELALPSKYVNFLYLASHYEKLKGSPEDNEQKQLFVEQHKHYLDEIIEQISEFSKRVILADANLDKVLSAYNKHRDKPIREQAENIIHLFTLTNLGAPAAFKYFDTTIDRKRYTSTKEVLDATLIHQSITGLYETRIDLSQLGGDGGGSSPAPEAAAKGGVLNLEEEYRLHEKPVPSSIDPSWLQLFPTVWAERAGMGLANQVPPVVVELRSGASPVAVRQYPMSKEAREGIRPHIQRFLDLGVLVPCQSPWNTPLLPVKKPGTNDYRPVQDLREINKRVQDIHPTVPNPYNLLSSLPPSHTWYSVLDLKDAFFCLKLHPNSQPLFAFEWRDPEKGNTGQLTWTRLPQGFKNSPTLFNEALHRDLAPFRALNPQVVLLQYVDDLLVAAPTYRDCKEGTQKLLQELSKLGYRVSAKKAQLCQKEVTYLGYLLKEGKRWLTPARKATVMKIPPPTTPRQVREFLGKAGFCRLFIPGFASLAAPLYPLTKPSIPFIWTEEHQKAFDRIKEALLSAPALALPDLTKPFTLYVDERAGVARGVLTQTLGPWRRPVAYLSKKLDPVASGWPTCLKAVAAVALLLKDADKLTLGQNVTVIASHSLESIVRQPPDRWMTNARMTHYQSLLLNERVSFAPPAVLNPATLLPVESEATPVHRCSEILAEETGTRRDLKDQPLPGVPAWYTDGSSFIAEGKRRAGAAIVDGKRTVWASSLPEGTSAQKAELVALTQALRLAEGKDINIYTDSRYAFATAHIHGAIYKQRGWLTSAGKDIKNKEEILALLEAIHLPKRVAIIHCPGHQKGNDPVATGNRRADEAAKQAALSTRVLAETTKPAGKRTADGSEFEKRTADGSEFESPKKKAKVE

SEQ ID NO: 945 - protein, 2093 aa, synthetic construct
MPAAKRVKLDGGDKKYSIGLDIGTNSVGWAVITDEYKVPSKKFKVLGNTDRHSIKKNLIGALLFDSGETAEATRLKRTARRRYTRRKNRICYLQEIFSNEMAKVDDSFFHRLEESFLVEEDKKHERHPIFGNIVDEVAYHEKYPTIYHLRKKLVDSTDKADLRLIYLALAHMIKFRGHFLIEGDLNPDNSDVDKLFIQLVQTYNQLFEENPINASGVDAKAILSARLSKSRRLENLIAQLPGEKKNGLFGNLIALSLGLTPNFKSNFDLAEDAKLQLSKDTYDDDLDNLLAQIGDQYADLFLAAKNLSDAILLSDILRVNTEITKAPLSASMIKRYDEHHQDLTLLKALVRQQLPEKYKEIFFDQSKNGYAGYIDGGASQEEFYKFIKPILEKMDGTEELLVKLNREDLLRKQRTFDNGSIPHQIHLGELHAILRRQEDFYPFLKDNREKIEKILTFRIPYYVGPLARGNSRFAWMTRKSEETITPWNFEEVVDKGASAQSFIERMTNFDKNLPNEKVLPKHSLLYEYFTVYNELTKVKYVTEGMRKPAFLSGEQKKAIVDLLFKTNRKVTVKQLKEDYFKKIECFDSVEISGVEDRFNASLGTYHDLLKIIKDKDFLDNEENEDILEDIVLTLTLFEDREMIEERLKTYAHLFDDKVMKQLKRRRYTGWGRLSRKLINGIRDKQSGKTILDFLKSDGFANRNFMQLIHDDSLTFKEDIQKAQVSGQGDSLHEHIANLAGSPAIKKGILQTVKVVDELVKVMGRHKPENIVIEMARENQTTQKGQKNSRERMKRIEEGIKELGSQILKEHPVENTQLQNEKLYLYYLQNGRDMYVDQELDINRLSDYDVDHIVPQSFLKDDSIDNKVLTRSDKARGKSDNVPSEEVVKKMKNYWRQLLNAKLITQRKFDNLTKAERGGLSELDKAGFIKRQLVETRQITKHVAQILDSRMNTKYDENDKLIREVKVITLKSKLVSDFRKDFQFYKVREINNYHHAHDAYLNAVVGTALIKKYPKLESEFVYGDYKVYDVRKMIAKSEQEIGKATAKYFFYSNIMNFFKTEITLANGEIRKRPLIETNGETGEIVWDKGRDFATVRKVLSMPQVNIVKKTEVQTGGFSKESILPKRNSDKLIARKKDWDPKKYGGFDSPTVAYSVLVVAKVEKGKSKKLKSVKELLGITIMERSSFEKNPIDFLEAKGYKEVKKDLIIKLPKYSLFELENGRKRMLASAGELQKGNELALPSKYVNFLYLASHYEKLKGSPEDNEQKQLFVEQHKHYLDEIIEQISEFSKRVILADANLDKVLSAYNKHRDKPIREQAENIIHLFTLTNLGAPAAFKYFDTTIDRKRYTSTKEVLDATLIHQSITGLYETRIDLSQLGGDGGGGGGSGGGGSGGVLNLEEEYRLHEKPVPSSIDPSWLQLFPTVWAERAGMGLANQVPPVVVELRSGASPVAVRQYPMSKEAREGIRPHIQRFLDLGVLVPCQSPWNTPLLPVKKPGTNDYRPVQDLREINKRVQDIHPTVPNPYNLLSSLPPSHTWYSVLDLKDAFFCLKLHPNSQPLFAFEWRDPEKGNTGQLTWTRLPQGFKNSPTLFNEALHRDLAPFRALNPQVVLLQYVDDLLVAAPTYRDCKEGTQKLLQELSKLGYRVSAKKAQLCQKEVTYLGYLLKEGKRWLTPARKATVMKIPPPTTPRQVREFLGKAGFCRLFIPGFASLAAPLYPLTKPSIPFIWTEEHQKAFDRIKEALLSAPALALPDLTKPFTLYVDERAGVARGVLTQTLGPWRRPVAYLSKKLDPVASGWPTCLKAVAAVALLLKDADKLTLGQNVTVIASHSLESIVRQPPDRWMTNARMTHYQSLLLNERVSFAPPAVLNPATLLPVESEATPVHRCSEILAEETGTRRDLKDQPLPGVPAWYTDGSSFIAEGKRRAGAAIVDGKRTVWASSLPEGTSAQKAELVALTQALRLAEGKDINIYTDSRYAFATAHIHGAIYKQRGWLTSAGKDIKNKEEILALLEAIHLPKRVAIIHCPGHQKGNDPVATGNRRADEAAKQAALSTRVLAETTKPAGKRTADGSEFEKRTADGSEFESPKKKAKVE

SEQ ID NO: 946 - protein, 2092 aa, synthetic construct
MPAAKRVKLDGGDKKYSIGLDIGTNSVGWAVITDEYKVPSKKFKVLGNTDRHSIKKNLIGALLFDSGETAEATRLKRTARRRYTRRKNRICYLQEIFSNEMAKVDDSFFHRLEESFLVEEDKKHERHPIFGNIVDEVAYHEKYPTIYHLRKKLVDSTDKADLRLIYLALAHMIKFRGHFLIEGDLNPDNSDVDKLFIQLVQTYNQLFEENPINASGVDAKAILSARLSKSRRLENLIAQLPGEKKNGLFGNLIALSLGLTPNFKSNFDLAEDAKLQLSKDTYDDDLDNLLAQIGDQYADLFLAAKNLSDAILLSDILRVNTEITKAPLSASMIKRYDEHHQDLTLLKALVRQQLPEKYKEIFFDQSKNGYAGYIDGGASQEEFYKFIKPILEKMDGTEELLVKLNREDLLRKQRTFDNGSIPHQIHLGELHAILRRQEDFYPFLKDNREKIEKILTFRIPYYVGPLARGNSRFAWMTRKSEETITPWNFEEVVDKGASAQSFIERMTNFDKNLPNEKVLPKHSLLYEYFTVYNELTKVKYVTEGMRKPAFLSGEQKKAIVDLLFKTNRKVTVKQLKEDYFKKIECFDSVEISGVEDRFNASLGTYHDLLKIIKDKDFLDNEENEDILEDIVLTLTLFEDREMIEERLKTYAHLFDDKVMKQLKRRRYTGWGRLSRKLINGIRDKQSGKTILDFLKSDGFANRNFMQLIHDDSLTFKEDIQKAQVSGQGDSLHEHIANLAGSPAIKKGILQTVKVVDELVKVMGRHKPENIVIEMARENQTTQKGQKNSRERMKRIEEGIKELGSQILKEHPVENTQLQNEKLYLYYLQNGRDMYVDQELDINRLSDYDVDHIVPQSFLKDDSIDNKVLTRSDKARGKSDNVPSEEVVKKMKNYWRQLLNAKLITQRKFDNLTKAERGGLSELDKAGFIKRQLVETRQITKHVAQILDSRMNTKYDENDKLIREVKVITLKSKLVSDFRKDFQFYKVREINNYHHAHDAYLNAVVGTALIKKYPKLESEFVYGDYKVYDVRKMIAKSEQEIGKATAKYFFYSNIMNFFKTEITLANGEIRKRPLIETNGETGEIVWDKGRDFATVRKVLSMPQVNIVKKTEVQTGGFSKESILPKRNSDKLIARKKDWDPKKYGGFDSPTVAYSVLVVAKVEKGKSKKLKSVKELLGITIMERSSFEKNPIDFLEAKGYKEVKKDLIIKLPKYSLFELENGRKRMLASAGELQKGNELALPSKYVNFLYLASHYEKLKGSPEDNEQKQLFVEQHKHYLDEIIEQISEFSKRVILADANLDKVLSAYNKHRDKPIREQAENIIHLFTLTNLGAPAAFKYFDTTIDRKRYTSTKEVLDATLIHQSITGLYETRIDLSQLGGDGGGGGGSSGGSGGVLNLEEEYRLHEKPVPSSIDPSWLQLFPTVWAERAGMGLANQVPPVVVELRSGASPVAVRQYPMSKEAREGIRPHIQRFLDLGVLVPCQSPWNTPLLPVKKPGTNDYRPVQDLREINKRVQDIHPTVPNPYNLLSSLPPSHTWYSVLDLKDAFFCLKLHPNSQPLFAFEWRDPEKGNTGQLTWTRLPQGFKNSPTLFNEALHRDLAPFRALNPQVVLLQYVDDLLVAAPTYRDCKEGTQKLLQELSKLGYRVSAKKAQLCQKEVTYLGYLLKEGKRWLTPARKATVMKIPPPTTPRQVREFLGKAGFCRLFIPGFASLAAPLYPLTKPSIPFIWTEEHQKAFDRIKEALLSAPALALPDLTKPFTLYVDERAGVARGVLTQTLGPWRRPVAYLSKKLDPVASGWPTCLKAVAAVALLLKDADKLTLGQNVTVIASHSLESIVRQPPDRWMTNARMTHYQSLLLNERVSFAPPAVLNPATLLPVESEATPVHRCSEILAEETGTRRDLKDQPLPGVPAWYTDGSSFIAEGKRRAGAAIVDGKRTVWASSLPEGTSAQKAELVALTQALRLAEGKDINIYTDSRYAFATAHIHGAIYKQRGWLTSAGKDIKNKEEILALLEAIHLPKRVAIIHCPGHQKGNDPVATGNRRADEAAKQAALSTRVLAETTKPAGKRTADGSEFEKRTADGSEFESPKKKAKVE

SEQ ID NO: 947 - protein, 2091 aa, synthetic construct
MPAAKRVKLDGGDKKYSIGLDIGTNSVGWAVITDEYKVPSKKFKVLGNTDRHSIKKNLIGALLFDSGETAEATRLKRTARRRYTRRKNRICYLQEIFSNEMAKVDDSFFHRLEESFLVEEDKKHERHPIFGNIVDEVAYHEKYPTIYHLRKKLVDSTDKADLRLIYLALAHMIKFRGHFLIEGDLNPDNSDVDKLFIQLVQTYNQLFEENPINASGVDAKAILSARLSKSRRLENLIAQLPGEKKNGLFGNLIALSLGLTPNFKSNFDLAEDAKLQLSKDTYDDDLDNLLAQIGDQYADLFLAAKNLSDAILLSDILRVNTEITKAPLSASMIKRYDEHHQDLTLLKALVRQQLPEKYKEIFFDQSKNGYAGYIDGGASQEEFYKFIKPILEKMDGTEELLVKLNREDLLRKQRTFDNGSIPHQIHLGELHAILRRQEDFYPFLKDNREKIEKILTFRIPYYVGPLARGNSRFAWMTRKSEETITPWNFEEVVDKGASAQSFIERMTNFDKNLPNEKVLPKHSLLYEYFTVYNELTKVKYVTEGMRKPAFLSGEQKKAIVDLLFKTNRKVTVKQLKEDYFKKIECFDSVEISGVEDRFNASLGTYHDLLKIIKDKDFLDNEENEDILEDIVLTLTLFEDREMIEERLKTYAHLFDDKVMKQLKRRRYTGWGRLSRKLINGIRDKQSGKTILDFLKSDGFANRNFMQLIHDDSLTFKEDIQKAQVSGQGDSLHEHIANLAGSPAIKKGILQTVKVVDELVKVMGRHKPENIVIEMARENQTTQKGQKNSRERMKRIEEGIKELGSQILKEHPVENTQLQNEKLYLYYLQNGRDMYVDQELDINRLSDYDVDHIVPQSFLKDDSIDNKVLTRSDKARGKSDNVPSEEVVKKMKNYWRQLLNAKLITQRKFDNLTKAERGGLSELDKAGFIKRQLVETRQITKHVAQILDSRMNTKYDENDKLIREVKVITLKSKLVSDFRKDFQFYKVREINNYHHAHDAYLNAVVGTALIKKYPKLESEFVYGDYKVYDVRKMIAKSEQEIGKATAKYFFYSNIMNFFKTEITLANGEIRKRPLIETNGETGEIVWDKGRDFATVRKVLSMPQVNIVKKTEVQTGGFSKESILPKRNSDKLIARKKDWDPKKYGGFDSPTVAYSVLVVAKVEKGKSKKLKSVKELLGITIMERSSFEKNPIDFLEAKGYKEVKKDLIIKLPKYSLFELENGRKRMLASAGELQKGNELALPSKYVNFLYLASHYEKLKGSPEDNEQKQLFVEQHKHYLDEIIEQISEFSKRVILADANLDKVLSAYNKHRDKPIREQAENIIHLFTLTNLGAPAAFKYFDTTIDRKRYTSTKEVLDATLIHQSITGLYETRIDLSQLGGDGGPAPEAAAKGGVLNLEEEYRLHEKPVPSSIDPSWLQLFPTVWAERAGMGLANQVPPVVVELRSGASPVAVRQYPMSKEAREGIRPHIQRFLDLGVLVPCQSPWNTPLLPVKKPGTNDYRPVQDLREINKRVQDIHPTVPNPYNLLSSLPPSHTWYSVLDLKDAFFCLKLHPNSQPLFAFEWRDPEKGNTGQLTWTRLPQGFKNSPTLFNEALHRDLAPFRALNPQVVLLQYVDDLLVAAPTYRDCKEGTQKLLQELSKLGYRVSAKKAQLCQKEVTYLGYLLKEGKRWLTPARKATVMKIPPPTTPRQVREFLGKAGFCRLFIPGFASLAAPLYPLTKPSIPFIWTEEHQKAFDRIKEALLSAPALALPDLTKPFTLYVDERAGVARGVLTQTLGPWRRPVAYLSKKLDPVASGWPTCLKAVAAVALLLKDADKLTLGQNVTVIASHSLESIVRQPPDRWMTNARMTHYQSLLLNERVSFAPPAVLNPATLLPVESEATPVHRCSEILAEETGTRRDLKDQPLPGVPAWYTDGSSFIAEGKRRAGAAIVDGKRTVWASSLPEGTSAQKAELVALTQALRLAEGKDINIYTDSRYAFATAHIHGAIYKQRGWLTSAGKDIKNKEEILALLEAIHLPKRVAIIHCPGHQKGNDPVATGNRRADEAAKQAALSTRVLAETTKPAGKRTADGSEFEKRTADGSEFESPKKKAKVE

SEQ ID NO: 948 - protein, 2094 aa, synthetic construct
MPAAKRVKLDGGDKKYSIGLDIGTNSVGWAVITDEYKVPSKKFKVLGNTDRHSIKKNLIGALLFDSGETAEATRLKRTARRRYTRRKNRICYLQEIFSNEMAKVDDSFFHRLEESFLVEEDKKHERHPIFGNIVDEVAYHEKYPTIYHLRKKLVDSTDKADLRLIYLALAHMIKFRGHFLIEGDLNPDNSDVDKLFIQLVQTYNQLFEENPINASGVDAKAILSARLSKSRRLENLIAQLPGEKKNGLFGNLIALSLGLTPNFKSNFDLAEDAKLQLSKDTYDDDLDNLLAQIGDQYADLFLAAKNLSDAILLSDILRVNTEITKAPLSASMIKRYDEHHQDLTLLKALVRQQLPEKYKEIFFDQSKNGYAGYIDGGASQEEFYKFIKPILEKMDGTEELLVKLNREDLLRKQRTFDNGSIPHQIHLGELHAILRRQEDFYPFLKDNREKIEKILTFRIPYYVGPLARGNSRFAWMTRKSEETITPWNFEEVVDKGASAQSFIERMTNFDKNLPNEKVLPKHSLLYEYFTVYNELTKVKYVTEGMRKPAFLSGEQKKAIVDLLFKTNRKVTVKQLKEDYFKKIECFDSVEISGVEDRFNASLGTYHDLLKIIKDKDFLDNEENEDILEDIVLTLTLFEDREMIEERLKTYAHLFDDKVMKQLKRRRYTGWGRLSRKLINGIRDKQSGKTILDFLKSDGFANRNFMQLIHDDSLTFKEDIQKAQVSGQGDSLHEHIANLAGSPAIKKGILQTVKVVDELVKVMGRHKPENIVIEMARENQTTQKGQKNSRERMKRIEEGIKELGSQILKEHPVENTQLQNEKLYLYYLQNGRDMYVDQELDINRLSDYDVDHIVPQSFLKDDSIDNKVLTRSDKARGKSDNVPSEEVVKKMKNYWRQLLNAKLITQRKFDNLTKAERGGLSELDKAGFIKRQLVETRQITKHVAQILDSRMNTKYDENDKLIREVKVITLKSKLVSDFRKDFQFYKVREINNYHHAHDAYLNAVVGTALIKKYPKLESEFVYGDYKVYDVRKMIAKSEQEIGKATAKYFFYSNIMNFFKTEITLANGEIRKRPLIETNGETGEIVWDKGRDFATVRKVLSMPQVNIVKKTEVQTGGFSKESILPKRNSDKLIARKKDWDPKKYGGFDSPTVAYSVLVVAKVEKGKSKKLKSVKELLGITIMERSSFEKNPIDFLEAKGYKEVKKDLIIKLPKYSLFELENGRKRMLASAGELQKGNELALPSKYVNFLYLASHYEKLKGSPEDNEQKQLFVEQHKHYLDEIIEQISEFSKRVILADANLDKVLSAYNKHRDKPIREQAENIIHLFTLTNLGAPAAFKYFDTTIDRKRYTSTKEVLDATLIHQSITGLYETRIDLSQLGGDGGEAAAKGSSGGSGGVLNLEEEYRLHEKPVPSSIDPSWLQLFPTVWAERAGMGLANQVPPVVVELRSGASPVAVRQYPMSKEAREGIRPHIQRFLDLGVLVPCQSPWNTPLLPVKKPGTNDYRPVQDLREINKRVQDIHPTVPNPYNLLSSLPPSHTWYSVLDLKDAFFCLKLHPNSQPLFAFEWRDPEKGNTGQLTWTRLPQGFKNSPTLFNEALHRDLAPFRALNPQVVLLQYVDDLLVAAPTYRDCKEGTQKLLQELSKLGYRVSAKKAQLCQKEVTYLGYLLKEGKRWLTPARKATVMKIPPPTTPRQVREFLGKAGFCRLFIPGFASLAAPLYPLTKPSIPFIWTEEHQKAFDRIKEALLSAPALALPDLTKPFTLYVDERAGVARGVLTQTLGPWRRPVAYLSKKLDPVASGWPTCLKAVAAVALLLKDADKLTLGQNVTVIASHSLESIVRQPPDRWMTNARMTHYQSLLLNERVSFAPPAVLNPATLLPVESEATPVHRCSEILAEETGTRRDLKDQPLPGVPAWYTDGSSFIAEGKRRAGAAIVDGKRTVWASSLPEGTSAQKAELVALTQALRLAEGKDINIYTDSRYAFATAHIHGAIYKQRGWLTSAGKDIKNKEEILALLEAIHLPKRVAIIHCPGHQKGNDPVATGNRRADEAAKQAALSTRVLAETTKPAGKRTADGSEFEKRTADGSEFESPKKKAKVE

SEQ ID NO: 949 - protein, 2090 aa, synthetic construct
MPAAKRVKLDGGDKKYSIGLDIGTNSVGWAVITDEYKVPSKKFKVLGNTDRHSIKKNLIGALLFDSGETAEATRLKRTARRRYTRRKNRICYLQEIFSNEMAKVDDSFFHRLEESFLVEEDKKHERHPIFGNIVDEVAYHEKYPTIYHLRKKLVDSTDKADLRLIYLALAHMIKFRGHFLIEGDLNPDNSDVDKLFIQLVQTYNQLFEENPINASGVDAKAILSARLSKSRRLENLIAQLPGEKKNGLFGNLIALSLGLTPNFKSNFDLAEDAKLQLSKDTYDDDLDNLLAQIGDQYADLFLAAKNLSDAILLSDILRVNTEITKAPLSASMIKRYDEHHQDLTLLKALVRQQLPEKYKEIFFDQSKNGYAGYIDGGASQEEFYKFIKPILEKMDGTEELLVKLNREDLLRKQRTFDNGSIPHQIHLGELHAILRRQEDFYPFLKDNREKIEKILTFRIPYYVGPLARGNSRFAWMTRKSEETITPWNFEEVVDKGASAQSFIERMTNFDKNLPNEKVLPKHSLLYEYFTVYNELTKVKYVTEGMRKPAFLSGEQKKAIVDLLFKTNRKVTVKQLKEDYFKKIECFDSVEISGVEDRFNASLGTYHDLLKIIKDKDFLDNEENEDILEDIVLTLTLFEDREMIEERLKTYAHLFDDKVMKQLKRRRYTGWGRLSRKLINGIRDKQSGKTILDFLKSDGFANRNFMQLIHDDSLTFKEDIQKAQVSGQGDSLHEHIANLAGSPAIKKGILQTVKVVDELVKVMGRHKPENIVIEMARENQTTQKGQKNSRERMKRIEEGIKELGSQILKEHPVENTQLQNEKLYLYYLQNGRDMYVDQELDINRLSDYDVDHIVPQSFLKDDSIDNKVLTRSDKARGKSDNVPSEEVVKKMKNYWRQLLNAKLITQRKFDNLTKAERGGLSELDKAGFIKRQLVETRQITKHVAQILDSRMNTKYDENDKLIREVKVITLKSKLVSDFRKDFQFYKVREINNYHHAHDAYLNAVVGTALIKKYPKLESEFVYGDYKVYDVRKMIAKSEQEIGKATAKYFFYSNIMNFFKTEITLANGEIRKRPLIETNGETGEIVWDKGRDFATVRKVLSMPQVNIVKKTEVQTGGFSKESILPKRNSDKLIARKKDWDPKKYGGFDSPTVAYSVLVVAKVEKGKSKKLKSVKELLGITIMERSSFEKNPIDFLEAKGYKEVKKDLIIKLPKYSLFELENGRKRMLASAGELQKGNELALPSKYVNFLYLASHYEKLKGSPEDNEQKQLFVEQHKHYLDEIIEQISEFSKRVILADANLDKVLSAYNKHRDKPIREQAENIIHLFTLTNLGAPAAFKYFDTTIDRKRYTSTKEVLDATLIHQSITGLYETRIDLSQLGGDGGPAPAPAPGGVLNLEEEYRLHEKPVPSSIDPSWLQLFPTVWAERAGMGLANQVPPVVVELRSGASPVAVRQYPMSKEAREGIRPHIQRFLDLGVLVPCQSPWNTPLLPVKKPGTNDYRPVQDLREINKRVQDIHPTVPNPYNLLSSLPPSHTWYSVLDLKDAFFCLKLHPNSQPLFAFEWRDPEKGNTGQLTWTRLPQGFKNSPTLFNEALHRDLAPFRALNPQVVLLQYVDDLLVAAPTYRDCKEGTQKLLQELSKLGYRVSAKKAQLCQKEVTYLGYLLKEGKRWLTPARKATVMKIPPPTTPRQVREFLGKAGFCRLFIPGFASLAAPLYPLTKPSIPFIWTEEHQKAFDRIKEALLSAPALALPDLTKPFTLYVDERAGVARGVLTQTLGPWRRPVAYLSKKLDPVASGWPTCLKAVAAVALLLKDADKLTLGQNVTVIASHSLESIVRQPPDRWMTNARMTHYQSLLLNERVSFAPPAVLNPATLLPVESEATPVHRCSEILAEETGTRRDLKDQPLPGVPAWYTDGSSFIAEGKRRAGAAIVDGKRTVWASSLPEGTSAQKAELVALTQALRLAEGKDINIYTDSRYAFATAHIHGAIYKQRGWLTSAGKDIKNKEEILALLEAIHLPKRVAIIHCPGHQKGNDPVATGNRRADEAAKQAALSTRVLAETTKPAGKRTADGSEFEKRTADGSEFESPKKKAKVE

SEQ ID NO: 950 - protein, 2089 aa, synthetic construct
MPAAKRVKLDGGDKKYSIGLDIGTNSVGWAVITDEYKVPSKKFKVLGNTDRHSIKKNLIGALLFDSGETAEATRLKRTARRRYTRRKNRICYLQEIFSNEMAKVDDSFFHRLEESFLVEEDKKHERHPIFGNIVDEVAYHEKYPTIYHLRKKLVDSTDKADLRLIYLALAHMIKFRGHFLIEGDLNPDNSDVDKLFIQLVQTYNQLFEENPINASGVDAKAILSARLSKSRRLENLIAQLPGEKKNGLFGNLIALSLGLTPNFKSNFDLAEDAKLQLSKDTYDDDLDNLLAQIGDQYADLFLAAKNLSDAILLSDILRVNTEITKAPLSASMIKRYDEHHQDLTLLKALVRQQLPEKYKEIFFDQSKNGYAGYIDGGASQEEFYKFIKPILEKMDGTEELLVKLNREDLLRKQRTFDNGSIPHQIHLGELHAILRRQEDFYPFLKDNREKIEKILTFRIPYYVGPLARGNSRFAWMTRKSEETITPWNFEEVVDKGASAQSFIERMTNFDKNLPNEKVLPKHSLLYEYFTVYNELTKVKYVTEGMRKPAFLSGEQKKAIVDLLFKTNRKVTVKQLKEDYFKKIECFDSVEISGVEDRFNASLGTYHDLLKIIKDKDFLDNEENEDILEDIVLTLTLFEDREMIEERLKTYAHLFDDKVMKQLKRRRYTGWGRLSRKLINGIRDKQSGKTILDFLKSDGFANRNFMQLIHDDSLTFKEDIQKAQVSGQGDSLHEHIANLAGSPAIKKGILQTVKVVDELVKVMGRHKPENIVIEMARENQTTQKGQKNSRERMKRIEEGIKELGSQILKEHPVENTQLQNEKLYLYYLQNGRDMYVDQELDINRLSDYDVDHIVPQSFLKDDSIDNKVLTRSDKARGKSDNVPSEEVVKKMKNYWRQLLNAKLITQRKFDNLTKAERGGLSELDKAGFIKRQLVETRQITKHVAQILDSRMNTKYDENDKLIREVKVITLKSKLVSDFRKDFQFYKVREINNYHHAHDAYLNAVVGTALIKKYPKLESEFVYGDYKVYDVRKMIAKSEQEIGKATAKYFFYSNIMNFFKTEITLANGEIRKRPLIETNGETGEIVWDKGRDFATVRKVLSMPQVNIVKKTEVQTGGFSKESILPKRNSDKLIARKKDWDPKKYGGFDSPTVAYSVLVVAKVEKGKSKKLKSVKELLGITIMERSSFEKNPIDFLEAKGYKEVKKDLIIKLPKYSLFELENGRKRMLASAGELQKGNELALPSKYVNFLYLASHYEKLKGSPEDNEQKQLFVEQHKHYLDEIIEQISEFSKRVILADANLDKVLSAYNKHRDKPIREQAENIIHLFTLTNLGAPAAFKYFDTTIDRKRYTSTKEVLDATLIHQSITGLYETRIDLSQLGGDGGGSSGGSGGVLNLEEEYRLHEKPVPSSIDPSWLQLFPTVWAERAGMGLANQVPPVVVELRSGASPVAVRQYPMSKEAREGIRPHIQRFLDLGVLVPCQSPWNTPLLPVKKPGTNDYRPVQDLREINKRVQDIHPTVPNPYNLLSSLPPSHTWYSVLDLKDAFFCLKLHPNSQPLFAFEWRDPEKGNTGQLTWTRLPQGFKNSPTLFNEALHRDLAPFRALNPQVVLLQYVDDLLVAAPTYRDCKEGTQKLLQELSKLGYRVSAKKAQLCQKEVTYLGYLLKEGKRWLTPARKATVMKIPPPTTPRQVREFLGKAGFCRLFIPGFASLAAPLYPLTKPSIPFIWTEEHQKAFDRIKEALLSAPALALPDLTKPFTLYVDERAGVARGVLTQTLGPWRRPVAYLSKKLDPVASGWPTCLKAVAAVALLLKDADKLTLGQNVTVIASHSLESIVRQPPDRWMTNARMTHYQSLLLNERVSFAPPAVLNPATLLPVESEATPVHRCSEILAEETGTRRDLKDQPLPGVPAWYTDGSSFIAEGKRRAGAAIVDGKRTVWASSLPEGTSAQKAELVALTQALRLAEGKDINIYTDSRYAFATAHIHGAIYKQRGWLTSAGKDIKNKEEILALLEAIHLPKRVAIIHCPGHQKGNDPVATGNRRADEAAKQAALSTRVLAETTKPAGKRTADGSEFEKRTADGSEFESPKKKAKVE

SEQ ID NO: 951 - protein, 2131 aa, synthetic construct
MPAAKRVKLDGGDKKYSIGLDIGTNSVGWAVITDEYKVPSKKFKVLGNTDRHSIKKNLIGALLFDSGETAEATRLKRTARRRYTRRKNRICYLQEIFSNEMAKVDDSFFHRLEESFLVEEDKKHERHPIFGNIVDEVAYHEKYPTIYHLRKKLVDSTDKADLRLIYLALAHMIKFRGHFLIEGDLNPDNSDVDKLFIQLVQTYNQLFEENPINASGVDAKAILSARLSKSRRLENLIAQLPGEKKNGLFGNLIALSLGLTPNFKSNFDLAEDAKLQLSKDTYDDDLDNLLAQIGDQYADLFLAAKNLSDAILLSDILRVNTEITKAPLSASMIKRYDEHHQDLTLLKALVRQQLPEKYKEIFFDQSKNGYAGYIDGGASQEEFYKFIKPILEKMDGTEELLVKLNREDLLRKQRTFDNGSIPHQIHLGELHAILRRQEDFYPFLKDNREKIEKILTFRIPYYVGPLARGNSRFAWMTRKSEETITPWNFEEVVDKGASAQSFIERMTNFDKNLPNEKVLPKHSLLYEYFTVYNELTKVKYVTEGMRKPAFLSGEQKKAIVDLLFKTNRKVTVKQLKEDYFKKIECFDSVEISGVEDRFNASLGTYHDLLKIIKDKDFLDNEENEDILEDIVLTLTLFEDREMIEERLKTYAHLFDDKVMKQLKRRRYTGWGRLSRKLINGIRDKQSGKTILDFLKSDGFANRNFMQLIHDDSLTFKEDIQKAQVSGQGDSLHEHIANLAGSPAIKKGILQTVKVVDELVKVMGRHKPENIVIEMARENQTTQKGQKNSRERMKRIEEGIKELGSQILKEHPVENTQLQNEKLYLYYLQNGRDMYVDQELDINRLSDYDVDHIVPQSFLKDDSIDNKVLTRSDKARGKSDNVPSEEVVKKMKNYWRQLLNAKLITQRKFDNLTKAERGGLSELDKAGFIKRQLVETRQITKHVAQILDSRMNTKYDENDKLIREVKVITLKSKLVSDFRKDFQFYKVREINNYHHAHDAYLNAVVGTALIKKYPKLESEFVYGDYKVYDVRKMIAKSEQEIGKATAKYFFYSNIMNFFKTEITLANGEIRKRPLIETNGETGEIVWDKGRDFATVRKVLSMPQVNIVKKTEVQTGGFSKESILPKRNSDKLIARKKDWDPKKYGGFDSPTVAYSVLVVAKVEKGKSKKLKSVKELLGITIMERSSFEKNPIDFLEAKGYKEVKKDLIIKLPKYSLFELENGRKRMLASAGELQKGNELALPSKYVNFLYLASHYEKLKGSPEDNEQKQLFVEQHKHYLDEIIEQISEFSKRVILADANLDKVLSAYNKHRDKPIREQAENIIHLFTLTNLGAPAAFKYFDTTIDRKRYTSTKEVLDATLIHQSITGLYETRIDLSQLGGDGGAEAAAKEAAAKEAAAKEAAAKALEAEAAAKEAAAKEAAAKEAAAKAGGTLNIEDEYRLHETSKEPDVPLGSTWLSDFPQAWAETGGMGLAVRQAPLIIPLKATSTPVSIKQYPMSQEARLGIKPHIQRLLDQGILVPCQSPWNTPLLPVKKPGTNDYRPVQDLREVNKRVEDIHPTVPNPYNLLSGLPPSHQWYTVLDLKDAFFCLRLHPTSQPLFAFEWRDPEMGISGQLTWTRLPQGFKNSPTLFDEALHRDLADFRIQHPDLILLQYVDDLLLAATSEQDCQRGTRALLQTLGNLGYRASAKKAQICQKQVKYLGYLLKEGQRWLTEARKETVMGQPTPKTPRQLREFLGTAGFCRLWIPGFAEMAAPLYPLTKTGTLFNWGPDQQKAYQEIKQALLTAPALGLPDLTKPFELFVDEKQGYAKGVLTQKLGPWRRPVAYLSKKLDPVAAGWPPCLRMVAAIAVLTKDAGKLTMGQPLVILAPHAVEALVKQPPDRWLSNARMTHYQAMLLDTDRVQFGPVVALNPATLLPLPEKEAPHDCLEILAETHGTRPDLTDQPIPDADYTWYTDGSSFLQEGQRRAGAAVTTETEVIWARALPAGTSAQRAELIALTQALKMAEGKKLNVYTDSRYAFATAHVHGEIYRRRGLLTSEGREIKNKNEILALLKALFLPKRLSIIHCPGHQKGNSAEARGNRMADQAAREAAMKAVLETSTLLAGKRTADGSEFEKRTADGSEFESPKKKAKVE

SEQ ID NO: 952 - protein, 2118 aa, synthetic construct
MPAAKRVKLDGGDKKYSIGLDIGTNSVGWAVITDEYKVPSKKFKVLGNTDRHSIKKNLIGALLFDSGETAEATRLKRTARRRYTRRKNRICYLQEIFSNEMAKVDDSFFHRLEESFLVEEDKKHERHPIFGNIVDEVAYHEKYPTIYHLRKKLVDSTDKADLRLIYLALAHMIKFRGHFLIEGDLNPDNSDVDKLFIQLVQTYNQLFEENPINASGVDAKAILSARLSKSRRLENLIAQLPGEKKNGLFGNLIALSLGLTPNFKSNFDLAEDAKLQLSKDTYDDDLDNLLAQIGDQYADLFLAAKNLSDAILLSDILRVNTEITKAPLSASMIKRYDEHHQDLTLLKALVRQQLPEKYKEIFFDQSKNGYAGYIDGGASQEEFYKFIKPILEKMDGTEELLVKLNREDLLRKQRTFDNGSIPHQIHLGELHAILRRQEDFYPFLKDNREKIEKILTFRIPYYVGPLARGNSRFAWMTRKSEETITPWNFEEVVDKGASAQSFIERMTNFDKNLPNEKVLPKHSLLYEYFTVYNELTKVKYVTEGMRKPAFLSGEQKKAIVDLLFKTNRKVTVKQLKEDYFKKIECFDSVEISGVEDRFNASLGTYHDLLKIIKDKDFLDNEENEDILEDIVLTLTLFEDREMIEERLKTYAHLFDDKVMKQLKRRRYTGWGRLSRKLINGIRDKQSGKTILDFLKSDGFANRNFMQLIHDDSLTFKEDIQKAQVSGQGDSLHEHIANLAGSPAIKKGILQTVKVVDELVKVMGRHKPENIVIEMARENQTTQKGQKNSRERMKRIEEGIKELGSQILKEHPVENTQLQNEKLYLYYLQNGRDMYVDQELDINRLSDYDVDHIVPQSFLKDDSIDNKVLTRSDKARGKSDNVPSEEVVKKMKNYWRQLLNAKLITQRKFDNLTKAERGGLSELDKAGFIKRQLVETRQITKHVAQILDSRMNTKYDENDKLIREVKVITLKSKLVSDFRKDFQFYKVREINNYHHAHDAYLNAVVGTALIKKYPKLESEFVYGDYKVYDVRKMIAKSEQEIGKATAKYFFYSNIMNFFKTEITLANGEIRKRPLIETNGETGEIVWDKGRDFATVRKVLSMPQVNIVKKTEVQTGGFSKESILPKRNSDKLIARKKDWDPKKYGGFDSPTVAYSVLVVAKVEKGKSKKLKSVKELLGITIMERSSFEKNPIDFLEAKGYKEVKKDLIIKLPKYSLFELENGRKRMLASAGELQKGNELALPSKYVNFLYLASHYEKLKGSPEDNEQKQLFVEQHKHYLDEIIEQISEFSKRVILADANLDKVLSAYNKHRDKPIREQAENIIHLFTLTNLGAPAAFKYFDTTIDRKRYTSTKEVLDATLIHQSITGLYETRIDLSQLGGDGGSGGSSGGSSGSETPGTSESATPESSGGSSGGSSGGTLNIEDEYRLHETSKEPDVPLGSTWLSDFPQAWAETGGMGLAVRQAPLIIPLKATSTPVSIKQYPMSQEARLGIKPHIQRLLDQGILVPCQSPWNTPLLPVKKPGTNDYRPVQDLREVNKRVEDIHPTVPNPYNLLSGLPPSHQWYTVLDLKDAFFCLRLHPTSQPLFAFEWRDPEMGISGQLTWTRLPQGFKNSPTLFDEALHRDLADFRIQHPDLILLQYVDDLLLAATSEQDCQRGTRALLQTLGNLGYRASAKKAQICQKQVKYLGYLLKEGQRWLTEARKETVMGQPTPKTPRQLREFLGTAGFCRLWIPGFAEMAAPLYPLTKTGTLFNWGPDQQKAYQEIKQALLTAPALGLPDLTKPFELFVDEKQGYAKGVLTQKLGPWRRPVAYLSKKLDPVAAGWPPCLRMVAAIAVLTKDAGKLTMGQPLVILAPHAVEALVKQPPDRWLSNARMTHYQAMLLDTDRVQFGPVVALNPATLLPLPEKEAPHDCLEILAETHGTRPDLTDQPIPDADYTWYTDGSSFLQEGQRRAGAAVTTETEVIWARALPAGTSAQRAELIALTQALKMAEGKKLNVYTDSRYAFATAHVHGEIYRRRGLLTSEGREIKNKNEILALLKALFLPKRLSIIHCPGHQKGNSAEARGNRMADQAAREAAMKAVLETSTLLAGKRTADGSEFEKRTADGSEFESPKKKAKVE

SEQ ID NO: 953 - protein, 2105 aa, synthetic construct
MPAAKRVKLDGGDKKYSIGLDIGTNSVGWAVITDEYKVPSKKFKVLGNTDRHSIKKNLIGALLFDSGETAEATRLKRTARRRYTRRKNRICYLQEIFSNEMAKVDDSFFHRLEESFLVEEDKKHERHPIFGNIVDEVAYHEKYPTIYHLRKKLVDSTDKADLRLIYLALAHMIKFRGHFLIEGDLNPDNSDVDKLFIQLVQTYNQLFEENPINASGVDAKAILSARLSKSRRLENLIAQLPGEKKNGLFGNLIALSLGLTPNFKSNFDLAEDAKLQLSKDTYDDDLDNLLAQIGDQYADLFLAAKNLSDAILLSDILRVNTEITKAPLSASMIKRYDEHHQDLTLLKALVRQQLPEKYKEIFFDQSKNGYAGYIDGGASQEEFYKFIKPILEKMDGTEELLVKLNREDLLRKQRTFDNGSIPHQIHLGELHAILRRQEDFYPFLKDNREKIEKILTFRIPYYVGPLARGNSRFAWMTRKSEETITPWNFEEVVDKGASAQSFIERMTNFDKNLPNEKVLPKHSLLYEYFTVYNELTKVKYVTEGMRKPAFLSGEQKKAIVDLLFKTNRKVTVKQLKEDYFKKIECFDSVEISGVEDRFNASLGTYHDLLKIIKDKDFLDNEENEDILEDIVLTLTLFEDREMIEERLKTYAHLFDDKVMKQLKRRRYTGWGRLSRKLINGIRDKQSGKTILDFLKSDGFANRNFMQLIHDDSLTFKEDIQKAQVSGQGDSLHEHIANLAGSPAIKKGILQTVKVVDELVKVMGRHKPENIVIEMARENQTTQKGQKNSRERMKRIEEGIKELGSQILKEHPVENTQLQNEKLYLYYLQNGRDMYVDQELDINRLSDYDVDHIVPQSFLKDDSIDNKVLTRSDKARGKSDNVPSEEVVKKMKNYWRQLLNAKLITQRKFDNLTKAERGGLSELDKAGFIKRQLVETRQITKHVAQILDSRMNTKYDENDKLIREVKVITLKSKLVSDFRKDFQFYKVREINNYHHAHDAYLNAVVGTALIKKYPKLESEFVYGDYKVYDVRKMIAKSEQEIGKATAKYFFYSNIMNFFKTEITLANGEIRKRPLIETNGETGEIVWDKGRDFATVRKVLSMPQVNIVKKTEVQTGGFSKESILPKRNSDKLIARKKDWDPKKYGGFDSPTVAYSVLVVAKVEKGKSKKLKSVKELLGITIMERSSFEKNPIDFLEAKGYKEVKKDLIIKLPKYSLFELENGRKRMLASAGELQKGNELALPSKYVNFLYLASHYEKLKGSPEDNEQKQLFVEQHKHYLDEIIEQISEFSKRVILADANLDKVLSAYNKHRDKPIREQAENIIHLFTLTNLGAPAAFKYFDTTIDRKRYTSTKEVLDATLIHQSITGLYETRIDLSQLGGDGGGGGGSGGGGSGGGGSGGGGSGGTLNIEDEYRLHETSKEPDVPLGSTWLSDFPQAWAETGGMGLAVRQAPLIIPLKATSTPVSIKQYPMSQEARLGIKPHIQRLLDQGILVPCQSPWNTPLLPVKKPGTNDYRPVQDLREVNKRVEDIHPTVPNPYNLLSGLPPSHQWYTVLDLKDAFFCLRLHPTSQPLFAFEWRDPEMGISGQLTWTRLPQGFKNSPTLFDEALHRDLADFRIQHPDLILLQYVDDLLLAATSEQDCQRGTRALLQTLGNLGYRASAKKAQICQKQVKYLGYLLKEGQRWLTEARKETVMGQPTPKTPRQLREFLGTAGFCRLWIPGFAEMAAPLYPLTKTGTLFNWGPDQQKAYQEIKQALLTAPALGLPDLTKPFELFVDEKQGYAKGVLTQKLGPWRRPVAYLSKKLDPVAAGWPPCLRMVAAIAVLTKDAGKLTMGQPLVILAPHAVEALVKQPPDRWLSNARMTHYQAMLLDTDRVQFGPVVALNPATLLPLPEKEAPHDCLEILAETHGTRPDLTDQPIPDADYTWYTDGSSFLQEGQRRAGAAVTTETEVIWARALPAGTSAQRAELIALTQALKMAEGKKLNVYTDSRYAFATAHVHGEIYRRRGLLTSEGREIKNKNEILALLKALFLPKRLSIIHCPGHQKGNSAEARGNRMADQAAREAAMKAVLETSTLLAGKRTADGSEFEKRTADGSEFESPKKKAKVE

SEQ ID NO: 954 - protein, 2093 aa, synthetic construct
MPAAKRVKLDGGDKKYSIGLDIGTNSVGWAVITDEYKVPSKKFKVLGNTDRHSIKKNLIGALLFDSGETAEATRLKRTARRRYTRRKNRICYLQEIFSNEMAKVDDSFFHRLEESFLVEEDKKHERHPIFGNIVDEVAYHEKYPTIYHLRKKLVDSTDKADLRLIYLALAHMIKFRGHFLIEGDLNPDNSDVDKLFIQLVQTYNQLFEENPINASGVDAKAILSARLSKSRRLENLIAQLPGEKKNGLFGNLIALSLGLTPNFKSNFDLAEDAKLQLSKDTYDDDLDNLLAQIGDQYADLFLAAKNLSDAILLSDILRVNTEITKAPLSASMIKRYDEHHQDLTLLKALVRQQLPEKYKEIFFDQSKNGYAGYIDGGASQEEFYKFIKPILEKMDGTEELLVKLNREDLLRKQRTFDNGSIPHQIHLGELHAILRRQEDFYPFLKDNREKIEKILTFRIPYYVGPLARGNSRFAWMTRKSEETITPWNFEEVVDKGASAQSFIERMTNFDKNLPNEKVLPKHSLLYEYFTVYNELTKVKYVTEGMRKPAFLSGEQKKAIVDLLFKTNRKVTVKQLKEDYFKKIECFDSVEISGVEDRFNASLGTYHDLLKIIKDKDFLDNEENEDILEDIVLTLTLFEDREMIEERLKTYAHLFDDKVMKQLKRRRYTGWGRLSRKLINGIRDKQSGKTILDFLKSDGFANRNFMQLIHDDSLTFKEDIQKAQVSGQGDSLHEHIANLAGSPAIKKGILQTVKVVDELVKVMGRHKPENIVIEMARENQTTQKGQKNSRERMKRIEEGIKELGSQILKEHPVENTQLQNEKLYLYYLQNGRDMYVDQELDINRLSDYDVDHIVPQSFLKDDSIDNKVLTRSDKARGKSDNVPSEEVVKKMKNYWRQLLNAKLITQRKFDNLTKAERGGLSELDKAGFIKRQLVETRQITKHVAQILDSRMNTKYDENDKLIREVKVITLKSKLVSDFRKDFQFYKVREINNYHHAHDAYLNAVVGTALIKKYPKLESEFVYGDYKVYDVRKMIAKSEQEIGKATAKYFFYSNIMNFFKTEITLANGEIRKRPLIETNGETGEIVWDKGRDFATVRKVLSMPQVNIVKKTEVQTGGFSKESILPKRNSDKLIARKKDWDPKKYGGFDSPTVAYSVLVVAKVEKGKSKKLKSVKELLGITIMERSSFEKNPIDFLEAKGYKEVKKDLIIKLPKYSLFELENGRKRMLASAGELQKGNELALPSKYVNFLYLASHYEKLKGSPEDNEQKQLFVEQHKHYLDEIIEQISEFSKRVILADANLDKVLSAYNKHRDKPIREQAENIIHLFTLTNLGAPAAFKYFDTTIDRKRYTSTKEVLDATLIHQSITGLYETRIDLSQLGGDGGGSSEAAAKGGTLNIEDEYRLHETSKEPDVPLGSTWLSDFPQAWAETGGMGLAVRQAPLIIPLKATSTPVSIKQYPMSQEARLGIKPHIQRLLDQGILVPCQSPWNTPLLPVKKPGTNDYRPVQDLREVNKRVEDIHPTVPNPYNLLSGLPPSHQWYTVLDLKDAFFCLRLHPTSQPLFAFEWRDPEMGISGQLTWTRLPQGFKNSPTLFDEALHRDLADFRIQHPDLILLQYVDDLLLAATSEQDCQRGTRALLQTLGNLGYRASAKKAQICQKQVKYLGYLLKEGQRWLTEARKETVMGQPTPKTPRQLREFLGTAGFCRLWIPGFAEMAAPLYPLTKTGTLFNWGPDQQKAYQEIKQALLTAPALGLPDLTKPFELFVDEKQGYAKGVLTQKLGPWRRPVAYLSKKLDPVAAGWPPCLRMVAAIAVLTKDAGKLTMGQPLVILAPHAVEALVKQPPDRWLSNARMTHYQAMLLDTDRVQFGPVVALNPATLLPLPEKEAPHDCLEILAETHGTRPDLTDQPIPDADYTWYTDGSSFLQEGQRRAGAAVTTETEVIWARALPAGTSAQRAELIALTQALKMAEGKKLNVYTDSRYAFATAHVHGEIYRRRGLLTSEGREIKNKNEILALLKALFLPKRLSIIHCPGHQKGNSAEARGNRMADQAAREAAMKAVLETSTLLAGKRTADGSEFEKRTADGSEFESPKKKAKVE

SEQ ID NO: 955 - protein, 2096 aa, synthetic construct
MPAAKRVKLDGGDKKYSIGLDIGTNSVGWAVITDEYKVPSKKFKVLGNTDRHSIKKNLIGALLFDSGETAEATRLKRTARRRYTRRKNRICYLQEIFSNEMAKVDDSFFHRLEESFLVEEDKKHERHPIFGNIVDEVAYHEKYPTIYHLRKKLVDSTDKADLRLIYLALAHMIKFRGHFLIEGDLNPDNSDVDKLFIQLVQTYNQLFEENPINASGVDAKAILSARLSKSRRLENLIAQLPGEKKNGLFGNLIALSLGLTPNFKSNFDLAEDAKLQLSKDTYDDDLDNLLAQIGDQYADLFLAAKNLSDAILLSDILRVNTEITKAPLSASMIKRYDEHHQDLTLLKALVRQQLPEKYKEIFFDQSKNGYAGYIDGGASQEEFYKFIKPILEKMDGTEELLVKLNREDLLRKQRTFDNGSIPHQIHLGELHAILRRQEDFYPFLKDNREKIEKILTFRIPYYVGPLARGNSRFAWMTRKSEETITPWNFEEVVDKGASAQSFIERMTNFDKNLPNEKVLPKHSLLYEYFTVYNELTKVKYVTEGMRKPAFLSGEQKKAIVDLLFKTNRKVTVKQLKEDYFKKIECFDSVEISGVEDRFNASLGTYHDLLKIIKDKDFLDNEENEDILEDIVLTLTLFEDREMIEERLKTYAHLFDDKVMKQLKRRRYTGWGRLSRKLINGIRDKQSGKTILDFLKSDGFANRNFMQLIHDDSLTFKEDIQKAQVSGQGDSLHEHIANLAGSPAIKKGILQTVKVVDELVKVMGRHKPENIVIEMARENQTTQKGQKNSRERMKRIEEGIKELGSQILKEHPVENTQLQNEKLYLYYLQNGRDMYVDQELDINRLSDYDVDHIVPQSFLKDDSIDNKVLTRSDKARGKSDNVPSEEVVKKMKNYWRQLLNAKLITQRKFDNLTKAERGGLSELDKAGFIKRQLVETRQITKHVAQILDSRMNTKYDENDKLIREVKVITLKSKLVSDFRKDFQFYKVREINNYHHAHDAYLNAVVGTALIKKYPKLESEFVYGDYKVYDVRKMIAKSEQEIGKATAKYFFYSNIMNFFKTEITLANGEIRKRPLIETNGETGEIVWDKGRDFATVRKVLSMPQVNIVKKTEVQTGGFSKESILPKRNSDKLIARKKDWDPKKYGGFDSPTVAYSVLVVAKVEKGKSKKLKSVKELLGITIMERSSFEKNPIDFLEAKGYKEVKKDLIIKLPKYSLFELENGRKRMLASAGELQKGNELALPSKYVNFLYLASHYEKLKGSPEDNEQKQLFVEQHKHYLDEIIEQISEFSKRVILADANLDKVLSAYNKHRDKPIREQAENIIHLFTLTNLGAPAAFKYFDTTIDRKRYTSTKEVLDATLIHQSITGLYETRIDLSQLGGDGGEAAAKGGGGSSGGTLNIEDEYRLHETSKEPDVPLGSTWLSDFPQAWAETGGMGLAVRQAPLIIPLKATSTPVSIKQYPMSQEARLGIKPHIQRLLDQGILVPCQSPWNTPLLPVKKPGTNDYRPVQDLREVNKRVEDIHPTVPNPYNLLSGLPPSHQWYTVLDLKDAFFCLRLHPTSQPLFAFEWRDPEMGISGQLTWTRLPQGFKNSPTLFDEALHRDLADFRIQHPDLILLQYVDDLLLAATSEQDCQRGTRALLQTLGNLGYRASAKKAQICQKQVKYLGYLLKEGQRWLTEARKETVMGQPTPKTPRQLREFLGTAGFCRLWIPGFAEMAAPLYPLTKTGTLFNWGPDQQKAYQEIKQALLTAPALGLPDLTKPFELFVDEKQGYAKGVLTQKLGPWRRPVAYLSKKLDPVAAGWPPCLRMVAAIAVLTKDAGKLTMGQPLVILAPHAVEALVKQPPDRWLSNARMTHYQAMLLDTDRVQFGPVVALNPATLLPLPEKEAPHDCLEILAETHGTRPDLTDQPIPDADYTWYTDGSSFLQEGQRRAGAAVTTETEVIWARALPAGTSAQRAELIALTQALKMAEGKKLNVYTDSRYAFATAHVHGEIYRRRGLLTSEGREIKNKNEILALLKALFLPKRLSIIHCPGHQKGNSAEARGNRMADQAAREAAMKAVLETSTLLAGKRTADGSEFEKRTADGSEFESPKKKAKVE

SEQ ID NO: 956 - protein, 2092 aa, synthetic construct
MPAAKRVKLDGGDKKYSIGLDIGTNSVGWAVITDEYKVPSKKFKVLGNTDRHSIKKNLIGALLFDSGETAEATRLKRTARRRYTRRKNRICYLQEIFSNEMAKVDDSFFHRLEESFLVEEDKKHERHPIFGNIVDEVAYHEKYPTIYHLRKKLVDSTDKADLRLIYLALAHMIKFRGHFLIEGDLNPDNSDVDKLFIQLVQTYNQLFEENPINASGVDAKAILSARLSKSRRLENLIAQLPGEKKNGLFGNLIALSLGLTPNFKSNFDLAEDAKLQLSKDTYDDDLDNLLAQIGDQYADLFLAAKNLSDAILLSDILRVNTEITKAPLSASMIKRYDEHHQDLTLLKALVRQQLPEKYKEIFFDQSKNGYAGYIDGGASQEEFYKFIKPILEKMDGTEELLVKLNREDLLRKQRTFDNGSIPHQIHLGELHAILRRQEDFYPFLKDNREKIEKILTFRIPYYVGPLARGNSRFAWMTRKSEETITPWNFEEVVDKGASAQSFIERMTNFDKNLPNEKVLPKHSLLYEYFTVYNELTKVKYVTEGMRKPAFLSGEQKKAIVDLLFKTNRKVTVKQLKEDYFKKIECFDSVEISGVEDRFNASLGTYHDLLKIIKDKDFLDNEENEDILEDIVLTLTLFEDREMIEERLKTYAHLFDDKVMKQLKRRRYTGWGRLSRKLINGIRDKQSGKTILDFLKSDGFANRNFMQLIHDDSLTFKEDIQKAQVSGQGDSLHEHIANLAGSPAIKKGILQTVKVVDELVKVMGRHKPENIVIEMARENQTTQKGQKNSRERMKRIEEGIKELGSQILKEHPVENTQLQNEKLYLYYLQNGRDMYVDQELDINRLSDYDVDHIVPQSFLKDDSIDNKVLTRSDKARGKSDNVPSEEVVKKMKNYWRQLLNAKLITQRKFDNLTKAERGGLSELDKAGFIKRQLVETRQITKHVAQILDSRMNTKYDENDKLIREVKVITLKSKLVSDFRKDFQFYKVREINNYHHAHDAYLNAVVGTALIKKYPKLESEFVYGDYKVYDVRKMIAKSEQEIGKATAKYFFYSNIMNFFKTEITLANGEIRKRPLIETNGETGEIVWDKGRDFATVRKVLSMPQVNIVKKTEVQTGGFSKESILPKRNSDKLIARKKDWDPKKYGGFDSPTVAYSVLVVAKVEKGKSKKLKSVKELLGITIMERSSFEKNPIDFLEAKGYKEVKKDLIIKLPKYSLFELENGRKRMLASAGELQKGNELALPSKYVNFLYLASHYEKLKGSPEDNEQKQLFVEQHKHYLDEIIEQISEFSKRVILADANLDKVLSAYNKHRDKPIREQAENIIHLFTLTNLGAPAAFKYFDTTIDRKRYTSTKEVLDATLIHQSITGLYETRIDLSQLGGDGGGGGGGGGGGTLNIEDEYRLHETSKEPDVPLGSTWLSDFPQAWAETGGMGLAVRQAPLIIPLKATSTPVSIKQYPMSQEARLGIKPHIQRLLDQGILVPCQSPWNTPLLPVKKPGTNDYRPVQDLREVNKRVEDIHPTVPNPYNLLSGLPPSHQWYTVLDLKDAFFCLRLHPTSQPLFAFEWRDPEMGISGQLTWTRLPQGFKNSPTLFDEALHRDLADFRIQHPDLILLQYVDDLLLAATSEQDCQRGTRALLQTLGNLGYRASAKKAQICQKQVKYLGYLLKEGQRWLTEARKETVMGQPTPKTPRQLREFLGTAGFCRLWIPGFAEMAAPLYPLTKTGTLFNWGPDQQKAYQEIKQALLTAPALGLPDLTKPFELFVDEKQGYAKGVLTQKLGPWRRPVAYLSKKLDPVAAGWPPCLRMVAAIAVLTKDAGKLTMGQPLVILAPHAVEALVKQPPDRWLSNARMTHYQAMLLDTDRVQFGPVVALNPATLLPLPEKEAPHDCLEILAETHGTRPDLTDQPIPDADYTWYTDGSSFLQEGQRRAGAAVTTETEVIWARALPAGTSAQRAELIALTQALKMAEGKKLNVYTDSRYAFATAHVHGEIYRRRGLLTSEGREIKNKNEILALLKALFLPKRLSIIHCPGHQKGNSAEARGNRMADQAAREAAMKAVLETSTLLAGKRTADGSEFEKRTADGSEFESPKKKAKVE

SEQ ID NO: 957 - protein, 2094 aa, synthetic construct
MPAAKRVKLDGGDKKYSIGLDIGTNSVGWAVITDEYKVPSKKFKVLGNTDRHSIKKNLIGALLFDSGETAEATRLKRTARRRYTRRKNRICYLQEIFSNEMAKVDDSFFHRLEESFLVEEDKKHERHPIFGNIVDEVAYHEKYPTIYHLRKKLVDSTDKADLRLIYLALAHMIKFRGHFLIEGDLNPDNSDVDKLFIQLVQTYNQLFEENPINASGVDAKAILSARLSKSRRLENLIAQLPGEKKNGLFGNLIALSLGLTPNFKSNFDLAEDAKLQLSKDTYDDDLDNLLAQIGDQYADLFLAAKNLSDAILLSDILRVNTEITKAPLSASMIKRYDEHHQDLTLLKALVRQQLPEKYKEIFFDQSKNGYAGYIDGGASQEEFYKFIKPILEKMDGTEELLVKLNREDLLRKQRTFDNGSIPHQIHLGELHAILRRQEDFYPFLKDNREKIEKILTFRIPYYVGPLARGNSRFAWMTRKSEETITPWNFEEVVDKGASAQSFIERMTNFDKNLPNEKVLPKHSLLYEYFTVYNELTKVKYVTEGMRKPAFLSGEQKKAIVDLLFKTNRKVTVKQLKEDYFKKIECFDSVEISGVEDRFNASLGTYHDLLKIIKDKDFLDNEENEDILEDIVLTLTLFEDREMIEERLKTYAHLFDDKVMKQLKRRRYTGWGRLSRKLINGIRDKQSGKTILDFLKSDGFANRNFMQLIHDDSLTFKEDIQKAQVSGQGDSLHEHIANLAGSPAIKKGILQTVKVVDELVKVMGRHKPENIVIEMARENQTTQKGQKNSRERMKRIEEGIKELGSQILKEHPVENTQLQNEKLYLYYLQNGRDMYVDQELDINRLSDYDVDHIVPQSFLKDDSIDNKVLTRSDKARGKSDNVPSEEVVKKMKNYWRQLLNAKLITQRKFDNLTKAERGGLSELDKAGFIKRQLVETRQITKHVAQILDSRMNTKYDENDKLIREVKVITLKSKLVSDFRKDFQFYKVREINNYHHAHDAYLNAVVGTALIKKYPKLESEFVYGDYKVYDVRKMIAKSEQEIGKATAKYFFYSNIMNFFKTEITLANGEIRKRPLIETNGETGEIVWDKGRDFATVRKVLSMPQVNIVKKTEVQTGGFSKESILPKRNSDKLIARKKDWDPKKYGGFDSPTVAYSVLVVAKVEKGKSKKLKSVKELLGITIMERSSFEKNPIDFLEAKGYKEVKKDLIIKLPKYSLFELENGRKRMLASAGELQKGNELALPSKYVNFLYLASHYEKLKGSPEDNEQKQLFVEQHKHYLDEIIEQISEFSKRVILADANLDKVLSAYNKHRDKPIREQAENIIHLFTLTNLGAPAAFKYFDTTIDRKRYTSTKEVLDATLIHQSITGLYETRIDLSQLGGDGGGSSGGSGGGGGTLNIEDEYRLHETSKEPDVPLGSTWLSDFPQAWAETGGMGLAVRQAPLIIPLKATSTPVSIKQYPMSQEARLGIKPHIQRLLDQGILVPCQSPWNTPLLPVKKPGTNDYRPVQDLREVNKRVEDIHPTVPNPYNLLSGLPPSHQWYTVLDLKDAFFCLRLHPTSQPLFAFEWRDPEMGISGQLTWTRLPQGFKNSPTLFDEALHRDLADFRIQHPDLILLQYVDDLLLAATSEQDCQRGTRALLQTLGNLGYRASAKKAQICQKQVKYLGYLLKEGQRWLTEARKETVMGQPTPKTPRQLREFLGTAGFCRLWIPGFAEMAAPLYPLTKTGTLFNWGPDQQKAYQEIKQALLTAPALGLPDLTKPFELFVDEKQGYAKGVLTQKLGPWRRPVAYLSKKLDPVAAGWPPCLRMVAAIAVLTKDAGKLTMGQPLVILAPHAVEALVKQPPDRWLSNARMTHYQAMLLDTDRVQFGPVVALNPATLLPLPEKEAPHDCLEILAETHGTRPDLTDQPIPDADYTWYTDGSSFLQEGQRRAGAAVTTETEVIWARALPAGTSAQRAELIALTQALKMAEGKKLNVYTDSRYAFATAHVHGEIYRRRGLLTSEGREIKNKNEILALLKALFLPKRLSIIHCPGHQKGNSAEARGNRMADQAAREAAMKAVLETSTLLAGKRTADGSEFEKRTADGSEFESPKKKAKVE

SEQ ID NO: 958 - protein, 2103 aa, synthetic construct
MPAAKRVKLDGGDKKYSIGLDIGTNSVGWAVITDEYKVPSKKFKVLGNTDRHSIKKNLIGALLFDSGETAEATRLKRTARRRYTRRKNRICYLQEIFSNEMAKVDDSFFHRLEESFLVEEDKKHERHPIFGNIVDEVAYHEKYPTIYHLRKKLVDSTDKADLRLIYLALAHMIKFRGHFLIEGDLNPDNSDVDKLFIQLVQTYNQLFEENPINASGVDAKAILSARLSKSRRLENLIAQLPGEKKNGLFGNLIALSLGLTPNFKSNFDLAEDAKLQLSKDTYDDDLDNLLAQIGDQYADLFLAAKNLSDAILLSDILRVNTEITKAPLSASMIKRYDEHHQDLTLLKALVRQQLPEKYKEIFFDQSKNGYAGYIDGGASQEEFYKFIKPILEKMDGTEELLVKLNREDLLRKQRTFDNGSIPHQIHLGELHAILRRQEDFYPFLKDNREKIEKILTFRIPYYVGPLARGNSRFAWMTRKSEETITPWNFEEVVDKGASAQSFIERMTNFDKNLPNEKVLPKHSLLYEYFTVYNELTKVKYVTEGMRKPAFLSGEQKKAIVDLLFKTNRKVTVKQLKEDYFKKIECFDSVEISGVEDRFNASLGTYHDLLKIIKDKDFLDNEENEDILEDIVLTLTLFEDREMIEERLKTYAHLFDDKVMKQLKRRRYTGWGRLSRKLINGIRDKQSGKTILDFLKSDGFANRNFMQLIHDDSLTFKEDIQKAQVSGQGDSLHEHIANLAGSPAIKKGILQTVKVVDELVKVMGRHKPENIVIEMARENQTTQKGQKNSRERMKRIEEGIKELGSQILKEHPVENTQLQNEKLYLYYLQNGRDMYVDQELDINRLSDYDVDHIVPQSFLKDDSIDNKVLTRSDKARGKSDNVPSEEVVKKMKNYWRQLLNAKLITQRKFDNLTKAERGGLSELDKAGFIKRQLVETRQITKHVAQILDSRMNTKYDENDKLIREVKVITLKSKLVSDFRKDFQFYKVREINNYHHAHDAYLNAVVGTALIKKYPKLESEFVYGDYKVYDVRKMIAKSEQEIGKATAKYFFYSNIMNFFKTEITLANGEIRKRPLIETNGETGEIVWDKGRDFATVRKVLSMPQVNIVKKTEVQTGGFSKESILPKRNSDKLIARKKDWDPKKYGGFDSPTVAYSVLVVAKVEKGKSKKLKSVKELLGITIMERSSFEKNPIDFLEAKGYKEVKKDLIIKLPKYSLFELENGRKRMLASAGELQKGNELALPSKYVNFLYLASHYEKLKGSPEDNEQKQLFVEQHKHYLDEIIEQISEFSKRVILADANLDKVLSAYNKHRDKPIREQAENIIHLFTLTNLGAPAAFKYFDTTIDRKRYTSTKEVLDATLIHQSITGLYETRIDLSQLGGDGGGGSGGSGGSGGSGGSGGSGGTLNIEDEYRLHETSKEPDVPLGSTWLSDFPQAWAETGGMGLAVRQAPLIIPLKATSTPVSIKQYPMSQEARLGIKPHIQRLLDQGILVPCQSPWNTPLLPVKKPGTNDYRPVQDLREVNKRVEDIHPTVPNPYNLLSGLPPSHQWYTVLDLKDAFFCLRLHPTSQPLFAFEWRDPEMGISGQLTWTRLPQGFKNSPTLFNEALHRDLADFRIQHPDLILLQYVDDLLLAATSEQDCQRGTRALLQTLGNLGYRASAKKAQICQKQVKYLGYLLKEGQRWLTEARKETVMGQPTPKTPRQLREFLGTAGFCRLWIPGFAEMAAPLYPLTKPGTLFNWGPDQQKAYQEIKQALLTAPALGLPDLTKPFELFVDEKQGYAKGVLTQKLGPWRRPVAYLSKKLDPVAAGWPPCLRMVAAIAVLTKDAGKLTMGQPLVILAPHAVEALVKQPPDRWLSNARMTHYQAMLLDTDRVQFGPVVALNPATLLPLPEKEAPHDCLEILAETHGTRPDLTDQPIPDADYTWYTDGSSFLQEGQRRAGAAVTTETEVIWARALPAGTSAQRAELIALTQALKMAEGKKLNVYTDSRYAFATAHVHGEIYRRRGWLTSEGREIKNKNEILALLKALFLPKRLSIIHCPGHQKGNSAEARGNRMADQAAREAAMKAVLETSTLLAGKRTADGSEFEKRTADGSEFESPKKKAKVE

SEQ ID NO: 959 - protein, 2094 aa, synthetic construct
MPAAKRVKLDGGDKKYSIGLDIGTNSVGWAVITDEYKVPSKKFKVLGNTDRHSIKKNLIGALLFDSGETAEATRLKRTARRRYTRRKNRICYLQEIFSNEMAKVDDSFFHRLEESFLVEEDKKHERHPIFGNIVDEVAYHEKYPTIYHLRKKLVDSTDKADLRLIYLALAHMIKFRGHFLIEGDLNPDNSDVDKLFIQLVQTYNQLFEENPINASGVDAKAILSARLSKSRRLENLIAQLPGEKKNGLFGNLIALSLGLTPNFKSNFDLAEDAKLQLSKDTYDDDLDNLLAQIGDQYADLFLAAKNLSDAILLSDILRVNTEITKAPLSASMIKRYDEHHQDLTLLKALVRQQLPEKYKEIFFDQSKNGYAGYIDGGASQEEFYKFIKPILEKMDGTEELLVKLNREDLLRKQRTFDNGSIPHQIHLGELHAILRRQEDFYPFLKDNREKIEKILTFRIPYYVGPLARGNSRFAWMTRKSEETITPWNFEEVVDKGASAQSFIERMTNFDKNLPNEKVLPKHSLLYEYFTVYNELTKVKYVTEGMRKPAFLSGEQKKAIVDLLFKTNRKVTVKQLKEDYFKKIECFDSVEISGVEDRFNASLGTYHDLLKIIKDKDFLDNEENEDILEDIVLTLTLFEDREMIEERLKTYAHLFDDKVMKQLKRRRYTGWGRLSRKLINGIRDKQSGKTILDFLKSDGFANRNFMQLIHDDSLTFKEDIQKAQVSGQGDSLHEHIANLAGSPAIKKGILQTVKVVDELVKVMGRHKPENIVIEMARENQTTQKGQKNSRERMKRIEEGIKELGSQILKEHPVENTQLQNEKLYLYYLQNGRDMYVDQELDINRLSDYDVDHIVPQSFLKDDSIDNKVLTRSDKARGKSDNVPSEEVVKKMKNYWRQLLNAKLITQRKFDNLTKAERGGLSELDKAGFIKRQLVETRQITKHVAQILDSRMNTKYDENDKLIREVKVITLKSKLVSDFRKDFQFYKVREINNYHHAHDAYLNAVVGTALIKKYPKLESEFVYGDYKVYDVRKMIAKSEQEIGKATAKYFFYSNIMNFFKTEITLANGEIRKRPLIETNGETGEIVWDKGRDFATVRKVLSMPQVNIVKKTEVQTGGFSKESILPKRNSDKLIARKKDWDPKKYGGFDSPTVAYSVLVVAKVEKGKSKKLKSVKELLGITIMERSSFEKNPIDFLEAKGYKEVKKDLIIKLPKYSLFELENGRKRMLASAGELQKGNELALPSKYVNFLYLASHYEKLKGSPEDNEQKQLFVEQHKHYLDEIIEQISEFSKRVILADANLDKVLSAYNKHRDKPIREQAENIIHLFTLTNLGAPAAFKYFDTTIDRKRYTSTKEVLDATLIHQSITGLYETRIDLSQLGGDGGGSSGSSGSSGGTLNIEDEYRLHETSKEPDVPLGSTWLSDFPQAWAETGGMGLAVRQAPLIIPLKATSTPVSIKQYPMSQEARLGIKPHIQRLLDQGILVPCQSPWNTPLLPVKKPGTNDYRPVQDLREVNKRVEDIHPTVPNPYNLLSGLPPSHQWYTVLDLKDAFFCLRLHPTSQPLFAFEWRDPEMGISGQLTWTRLPQGFKNSPTLFNEALHRDLADFRIQHPDLILLQYVDDLLLAATSEQDCQRGTRALLQTLGNLGYRASAKKAQICQKQVKYLGYLLKEGQRWLTEARKETVMGQPTPKTPRQLREFLGTAGFCRLWIPGFAEMAAPLYPLTKPGTLFNWGPDQQKAYQEIKQALLTAPALGLPDLTKPFELFVDEKQGYAKGVLTQKLGPWRRPVAYLSKKLDPVAAGWPPCLRMVAAIAVLTKDAGKLTMGQPLVILAPHAVEALVKQPPDRWLSNARMTHYQAMLLDTDRVQFGPVVALNPATLLPLPEKEAPHDCLEILAETHGTRPDLTDQPIPDADYTWYTDGSSFLQEGQRRAGAAVTTETEVIWARALPAGTSAQRAELIALTQALKMAEGKKLNVYTDSRYAFATAHVHGEIYRRRGWLTSEGREIKNKNEILALLKALFLPKRLSIIHCPGHQKGNSAEARGNRMADQAAREAAMKAVLETSTLLAGKRTADGSEFEKRTADGSEFESPKKKAKVE

SEQ ID NO: 960 - protein, 2096 aa, synthetic construct
MPAAKRVKLDGGDKKYSIGLDIGTNSVGWAVITDEYKVPSKKFKVLGNTDRHSIKKNLIGALLFDSGETAEATRLKRTARRRYTRRKNRICYLQEIFSNEMAKVDDSFFHRLEESFLVEEDKKHERHPIFGNIVDEVAYHEKYPTIYHLRKKLVDSTDKADLRLIYLALAHMIKFRGHFLIEGDLNPDNSDVDKLFIQLVQTYNQLFEENPINASGVDAKAILSARLSKSRRLENLIAQLPGEKKNGLFGNLIALSLGLTPNFKSNFDLAEDAKLQLSKDTYDDDLDNLLAQIGDQYADLFLAAKNLSDAILLSDILRVNTEITKAPLSASMIKRYDEHHQDLTLLKALVRQQLPEKYKEIFFDQSKNGYAGYIDGGASQEEFYKFIKPILEKMDGTEELLVKLNREDLLRKQRTFDNGSIPHQIHLGELHAILRRQEDFYPFLKDNREKIEKILTFRIPYYVGPLARGNSRFAWMTRKSEETITPWNFEEVVDKGASAQSFIERMTNFDKNLPNEKVLPKHSLLYEYFTVYNELTKVKYVTEGMRKPAFLSGEQKKAIVDLLFKTNRKVTVKQLKEDYFKKIECFDSVEISGVEDRFNASLGTYHDLLKIIKDKDFLDNEENEDILEDIVLTLTLFEDREMIEERLKTYAHLFDDKVMKQLKRRRYTGWGRLSRKLINGIRDKQSGKTILDFLKSDGFANRNFMQLIHDDSLTFKEDIQKAQVSGQGDSLHEHIANLAGSPAIKKGILQTVKVVDELVKVMGRHKPENIVIEMARENQTTQKGQKNSRERMKRIEEGIKELGSQILKEHPVENTQLQNEKLYLYYLQNGRDMYVDQELDINRLSDYDVDHIVPQSFLKDDSIDNKVLTRSDKARGKSDNVPSEEVVKKMKNYWRQLLNAKLITQRKFDNLTKAERGGLSELDKAGFIKRQLVETRQITKHVAQILDSRMNTKYDENDKLIREVKVITLKSKLVSDFRKDFQFYKVREINNYHHAHDAYLNAVVGTALIKKYPKLESEFVYGDYKVYDVRKMIAKSEQEIGKATAKYFFYSNIMNFFKTEITLANGEIRKRPLIETNGETGEIVWDKGRDFATVRKVLSMPQVNIVKKTEVQTGGFSKESILPKRNSDKLIARKKDWDPKKYGGFDSPTVAYSVLVVAKVEKGKSKKLKSVKELLGITIMERSSFEKNPIDFLEAKGYKEVKKDLIIKLPKYSLFELENGRKRMLASAGELQKGNELALPSKYVNFLYLASHYEKLKGSPEDNEQKQLFVEQHKHYLDEIIEQISEFSKRVILADANLDKVLSAYNKHRDKPIREQAENIIHLFTLTNLGAPAAFKYFDTTIDRKRYTSTKEVLDATLIHQSITGLYETRIDLSQLGGDGGEAAAKGSSPAPGGTLNIEDEYRLHETSKEPDVPLGSTWLSDFPQAWAETGGMGLAVRQAPLIIPLKATSTPVSIKQYPMSQEARLGIKPHIQRLLDQGILVPCQSPWNTPLLPVKKPGTNDYRPVQDLREVNKRVEDIHPTVPNPYNLLSGLPPSHQWYTVLDLKDAFFCLRLHPTSQPLFAFEWRDPEMGISGQLTWTRLPQGFKNSPTLFNEALHRDLADFRIQHPDLILLQYVDDLLLAATSEQDCQRGTRALLQTLGNLGYRASAKKAQICQKQVKYLGYLLKEGQRWLTEARKETVMGQPTPKTPRQLREFLGTAGFCRLWIPGFAEMAAPLYPLTKPGTLFNWGPDQQKAYQEIKQALLTAPALGLPDLTKPFELFVDEKQGYAKGVLTQKLGPWRRPVAYLSKKLDPVAAGWPPCLRMVAAIAVLTKDAGKLTMGQPLVILAPHAVEALVKQPPDRWLSNARMTHYQAMLLDTDRVQFGPVVALNPATLLPLPEKEAPHDCLEILAETHGTRPDLTDQPIPDADYTWYTDGSSFLQEGQRRAGAAVTTETEVIWARALPAGTSAQRAELIALTQALKMAEGKKLNVYTDSRYAFATAHVHGEIYRRRGWLTSEGREIKNKNEILALLKALFLPKRLSIIHCPGHQKGNSAEARGNRMADQAAREAAMKAVLETSTLLAGKRTADGSEFEKRTADGSEFESPKKKAKVE

SEQ ID NO: 961 - protein, 2096 aa, synthetic construct
MPAAKRVKLDGGDKKYSIGLDIGTNSVGWAVITDEYKVPSKKFKVLGNTDRHSIKKNLIGALLFDSGETAEATRLKRTARRRYTRRKNRICYLQEIFSNEMAKVDDSFFHRLEESFLVEEDKKHERHPIFGNIVDEVAYHEKYPTIYHLRKKLVDSTDKADLRLIYLALAHMIKFRGHFLIEGDLNPDNSDVDKLFIQLVQTYNQLFEENPINASGVDAKAILSARLSKSRRLENLIAQLPGEKKNGLFGNLIALSLGLTPNFKSNFDLAEDAKLQLSKDTYDDDLDNLLAQIGDQYADLFLAAKNLSDAILLSDILRVNTEITKAPLSASMIKRYDEHHQDLTLLKALVRQQLPEKYKEIFFDQSKNGYAGYIDGGASQEEFYKFIKPILEKMDGTEELLVKLNREDLLRKQRTFDNGSIPHQIHLGELHAILRRQEDFYPFLKDNREKIEKILTFRIPYYVGPLARGNSRFAWMTRKSEETITPWNFEEVVDKGASAQSFIERMTNFDKNLPNEKVLPKHSLLYEYFTVYNELTKVKYVTEGMRKPAFLSGEQKKAIVDLLFKTNRKVTVKQLKEDYFKKIECFDSVEISGVEDRFNASLGTYHDLLKIIKDKDFLDNEENEDILEDIVLTLTLFEDREMIEERLKTYAHLFDDKVMKQLKRRRYTGWGRLSRKLINGIRDKQSGKTILDFLKSDGFANRNFMQLIHDDSLTFKEDIQKAQVSGQGDSLHEHIANLAGSPAIKKGILQTVKVVDELVKVMGRHKPENIVIEMARENQTTQKGQKNSRERMKRIEEGIKELGSQILKEHPVENTQLQNEKLYLYYLQNGRDMYVDQELDINRLSDYDVDHIVPQSFLKDDSIDNKVLTRSDKARGKSDNVPSEEVVKKMKNYWRQLLNAKLITQRKFDNLTKAERGGLSELDKAGFIKRQLVETRQITKHVAQILDSRMNTKYDENDKLIREVKVITLKSKLVSDFRKDFQFYKVREINNYHHAHDAYLNAVVGTALIKKYPKLESEFVYGDYKVYDVRKMIAKSEQEIGKATAKYFFYSNIMNFFKTEITLANGEIRKRPLIETNGETGEIVWDKGRDFATVRKVLSMPQVNIVKKTEVQTGGFSKESILPKRNSDKLIARKKDWDPKKYGGFDSPTVAYSVLVVAKVEKGKSKKLKSVKELLGITIMERSSFEKNPIDFLEAKGYKEVKKDLIIKLPKYSLFELENGRKRMLASAGELQKGNELALPSKYVNFLYLASHYEKLKGSPEDNEQKQLFVEQHKHYLDEIIEQISEFSKRVILADANLDKVLSAYNKHRDKPIREQAENIIHLFTLTNLGAPAAFKYFDTTIDRKRYTSTKEVLDATLIHQSITGLYETRIDLSQLGGDGGEAAAKPAPGGSGGTLNIEDEYRLHETSKEPDVPLGSTWLSDFPQAWAETGGMGLAVRQAPLIIPLKATSTPVSIKQYPMSQEARLGIKPHIQRLLDQGILVPCQSPWNTPLLPVKKPGTNDYRPVQDLREVNKRVEDIHPTVPNPYNLLSGLPPSHQWYTVLDLKDAFFCLRLHPTSQPLFAFEWRDPEMGISGQLTWTRLPQGFKNSPTLFNEALHRDLADFRIQHPDLILLQYVDDLLLAATSEQDCQRGTRALLQTLGNLGYRASAKKAQICQKQVKYLGYLLKEGQRWLTEARKETVMGQPTPKTPRQLREFLGTAGFCRLWIPGFAEMAAPLYPLTKPGTLFNWGPDQQKAYQEIKQALLTAPALGLPDLTKPFELFVDEKQGYAKGVLTQKLGPWRRPVAYLSKKLDPVAAGWPPCLRMVAAIAVLTKDAGKLTMGQPLVILAPHAVEALVKQPPDRWLSNARMTHYQAMLLDTDRVQFGPVVALNPATLLPLPEKEAPHDCLEILAETHGTRPDLTDQPIPDADYTWYTDGSSFLQEGQRRAGAAVTTETEVIWARALPAGTSAQRAELIALTQALKMAEGKKLNVYTDSRYAFATAHVHGEIYRRRGWLTSEGREIKNKNEILALLKALFLPKRLSIIHCPGHQKGNSAEARGNRMADQAAREAAMKAVLETSTLLAGKRTADGSEFEKRTADGSEFESPKKKAKVE

SEQ ID NO: 962 - protein, 2131 aa, synthetic construct
MPAAKRVKLDGGDKKYSIGLDIGTNSVGWAVITDEYKVPSKKFKVLGNTDRHSIKKNLIGALLFDSGETAEATRLKRTARRRYTRRKNRICYLQEIFSNEMAKVDDSFFHRLEESFLVEEDKKHERHPIFGNIVDEVAYHEKYPTIYHLRKKLVDSTDKADLRLIYLALAHMIKFRGHFLIEGDLNPDNSDVDKLFIQLVQTYNQLFEENPINASGVDAKAILSARLSKSRRLENLIAQLPGEKKNGLFGNLIALSLGLTPNFKSNFDLAEDAKLQLSKDTYDDDLDNLLAQIGDQYADLFLAAKNLSDAILLSDILRVNTEITKAPLSASMIKRYDEHHQDLTLLKALVRQQLPEKYKEIFFDQSKNGYAGYIDGGASQEEFYKFIKPILEKMDGTEELLVKLNREDLLRKQRTFDNGSIPHQIHLGELHAILRRQEDFYPFLKDNREKIEKILTFRIPYYVGPLARGNSRFAWMTRKSEETITPWNFEEVVDKGASAQSFIERMTNFDKNLPNEKVLPKHSLLYEYFTVYNELTKVKYVTEGMRKPAFLSGEQKKAIVDLLFKTNRKVTVKQLKEDYFKKIECFDSVEISGVEDRFNASLGTYHDLLKIIKDKDFLDNEENEDILEDIVLTLTLFEDREMIEERLKTYAHLFDDKVMKQLKRRRYTGWGRLSRKLINGIRDKQSGKTILDFLKSDGFANRNFMQLIHDDSLTFKEDIQKAQVSGQGDSLHEHIANLAGSPAIKKGILQTVKVVDELVKVMGRHKPENIVIEMARENQTTQKGQKNSRERMKRIEEGIKELGSQILKEHPVENTQLQNEKLYLYYLQNGRDMYVDQELDINRLSDYDVDHIVPQSFLKDDSIDNKVLTRSDKARGKSDNVPSEEVVKKMKNYWRQLLNAKLITQRKFDNLTKAERGGLSELDKAGFIKRQLVETRQITKHVAQILDSRMNTKYDENDKLIREVKVITLKSKLVSDFRKDFQFYKVREINNYHHAHDAYLNAVVGTALIKKYPKLESEFVYGDYKVYDVRKMIAKSEQEIGKATAKYFFYSNIMNFFKTEITLANGEIRKRPLIETNGETGEIVWDKGRDFATVRKVLSMPQVNIVKKTEVQTGGFSKESILPKRNSDKLIARKKDWDPKKYGGFDSPTVAYSVLVVAKVEKGKSKKLKSVKELLGITIMERSSFEKNPIDFLEAKGYKEVKKDLIIKLPKYSLFELENGRKRMLASAGELQKGNELALPSKYVNFLYLASHYEKLKGSPEDNEQKQLFVEQHKHYLDEIIEQISEFSKRVILADANLDKVLSAYNKHRDKPIREQAENIIHLFTLTNLGAPAAFKYFDTTIDRKRYTSTKEVLDATLIHQSITGLYETRIDLSQLGGDGGAEAAAKEAAAKEAAAKEAAAKALEAEAAAKEAAAKEAAAKEAAAKAGGTLNIEDEYRLHETSKEPDVPLGSTWLSDFPQAWAETGGMGLAVRQAPLIIPLKATSTPVSIKQYPMSQEARLGIKPHIQRLLDQGILVPCQSPWNTPLLPVKKPGTNDYRPVQDLREVNKRVEDIHPTVPNPYNLLSGLPPSHQWYTVLDLKDAFFCLRLHPTSQPLFAFEWRDPEMGISGQLTWTRLPQGFKNSPTLFNEALHRDLADFRIQHPDLILLQYVDDLLLAATSEQDCQRGTRALLQTLGNLGYRASAKKAQICQKQVKYLGYLLKEGQRWLTEARKETVMGQPTPKTPRQLREFLGTAGFCRLWIPGFAEMAAPLYPLTKPGTLFNWGPDQQKAYQEIKQALLTAPALGLPDLTKPFELFVDEKQGYAKGVLTQKLGPWRRPVAYLSKKLDPVAAGWPPCLRMVAAIAVLTKDAGKLTMGQPLVILAPHAVEALVKQPPDRWLSNARMTHYQAMLLDTDRVQFGPVVALNPATLLPLPEKEAPHDCLEILAETHGTRPDLTDQPIPDADYTWYTDGSSFLQEGQRRAGAAVTTETEVIWARALPAGTSAQRAELIALTQALKMAEGKKLNVYTDSRYAFATAHVHGEIYRRRGWLTSEGREIKNKNEILALLKALFLPKRLSIIHCPGHQKGNSAEARGNRMADQAAREAAMKAVLETSTLLAGKRTADGSEFEKRTADGSEFESPKKKAKVE

SEQ ID NO: 963 - protein, 2096 aa, synthetic construct
MPAAKRVKLDGGDKKYSIGLDIGTNSVGWAVITDEYKVPSKKFKVLGNTDRHSIKKNLIGALLFDSGETAEATRLKRTARRRYTRRKNRICYLQEIFSNEMAKVDDSFFHRLEESFLVEEDKKHERHPIFGNIVDEVAYHEKYPTIYHLRKKLVDSTDKADLRLIYLALAHMIKFRGHFLIEGDLNPDNSDVDKLFIQLVQTYNQLFEENPINASGVDAKAILSARLSKSRRLENLIAQLPGEKKNGLFGNLIALSLGLTPNFKSNFDLAEDAKLQLSKDTYDDDLDNLLAQIGDQYADLFLAAKNLSDAILLSDILRVNTEITKAPLSASMIKRYDEHHQDLTLLKALVRQQLPEKYKEIFFDQSKNGYAGYIDGGASQEEFYKFIKPILEKMDGTEELLVKLNREDLLRKQRTFDNGSIPHQIHLGELHAILRRQEDFYPFLKDNREKIEKILTFRIPYYVGPLARGNSRFAWMTRKSEETITPWNFEEVVDKGASAQSFIERMTNFDKNLPNEKVLPKHSLLYEYFTVYNELTKVKYVTEGMRKPAFLSGEQKKAIVDLLFKTNRKVTVKQLKEDYFKKIECFDSVEISGVEDRFNASLGTYHDLLKIIKDKDFLDNEENEDILEDIVLTLTLFEDREMIEERLKTYAHLFDDKVMKQLKRRRYTGWGRLSRKLINGIRDKQSGKTILDFLKSDGFANRNFMQLIHDDSLTFKEDIQKAQVSGQGDSLHEHIANLAGSPAIKKGILQTVKVVDELVKVMGRHKPENIVIEMARENQTTQKGQKNSRERMKRIEEGIKELGSQILKEHPVENTQLQNEKLYLYYLQNGRDMYVDQELDINRLSDYDVDHIVPQSFLKDDSIDNKVLTRSDKARGKSDNVPSEEVVKKMKNYWRQLLNAKLITQRKFDNLTKAERGGLSELDKAGFIKRQLVETRQITKHVAQILDSRMNTKYDENDKLIREVKVITLKSKLVSDFRKDFQFYKVREINNYHHAHDAYLNAVVGTALIKKYPKLESEFVYGDYKVYDVRKMIAKSEQEIGKATAKYFFYSNIMNFFKTEITLANGEIRKRPLIETNGETGEIVWDKGRDFATVRKVLSMPQVNIVKKTEVQTGGFSKESILPKRNSDKLIARKKDWDPKKYGGFDSPTVAYSVLVVAKVEKGKSKKLKSVKELLGITIMERSSFEKNPIDFLEAKGYKEVKKDLIIKLPKYSLFELENGRKRMLASAGELQKGNELALPSKYVNFLYLASHYEKLKGSPEDNEQKQLFVEQHKHYLDEIIEQISEFSKRVILADANLDKVLSAYNKHRDKPIREQAENIIHLFTLTNLGAPAAFKYFDTTIDRKRYTSTKEVLDATLIHQSITGLYETRIDLSQLGGDGGEAAAKGGGPAPGGTLNIEDEYRLHETSKEPDVPLGSTWLSDFPQAWAETGGMGLAVRQAPLIIPLKATSTPVSIKQYPMSQEARLGIKPHIQRLLDQGILVPCQSPWNTPLLPVKKPGTNDYRPVQDLREVNKRVEDIHPTVPNPYNLLSGLPPSHQWYTVLDLKDAFFCLRLHPTSQPLFAFEWRDPEMGISGQLTWTRLPQGFKNSPTLFNEALHRDLADFRIQHPDLILLQYVDDLLLAATSEQDCQRGTRALLQTLGNLGYRASAKKAQICQKQVKYLGYLLKEGQRWLTEARKETVMGQPTPKTPRQLREFLGTAGFCRLWIPGFAEMAAPLYPLTKPGTLFNWGPDQQKAYQEIKQALLTAPALGLPDLTKPFELFVDEKQGYAKGVLTQKLGPWRRPVAYLSKKLDPVAAGWPPCLRMVAAIAVLTKDAGKLTMGQPLVILAPHAVEALVKQPPDRWLSNARMTHYQAMLLDTDRVQFGPVVALNPATLLPLPEKEAPHDCLEILAETHGTRPDLTDQPIPDADYTWYTDGSSFLQEGQRRAGAAVTTETEVIWARALPAGTSAQRAELIALTQALKMAEGKKLNVYTDSRYAFATAHVHGEIYRRRGWLTSEGREIKNKNEILALLKALFLPKRLSIIHCPGHQKGNSAEARGNRMADQAAREAAMKAVLETSTLLAGKRTADGSEFEKRTADGSEFESPKKKAKVE

SEQ ID NO: 964 - protein, 2100 aa, synthetic construct
MPAAKRVKLDGGDKKYSIGLDIGTNSVGWAVITDEYKVPSKKFKVLGNTDRHSIKKNLIGALLFDSGETAEATRLKRTARRRYTRRKNRICYLQEIFSNEMAKVDDSFFHRLEESFLVEEDKKHERHPIFGNIVDEVAYHEKYPTIYHLRKKLVDSTDKADLRLIYLALAHMIKFRGHFLIEGDLNPDNSDVDKLFIQLVQTYNQLFEENPINASGVDAKAILSARLSKSRRLENLIAQLPGEKKNGLFGNLIALSLGLTPNFKSNFDLAEDAKLQLSKDTYDDDLDNLLAQIGDQYADLFLAAKNLSDAILLSDILRVNTEITKAPLSASMIKRYDEHHQDLTLLKALVRQQLPEKYKEIFFDQSKNGYAGYIDGGASQEEFYKFIKPILEKMDGTEELLVKLNREDLLRKQRTFDNGSIPHQIHLGELHAILRRQEDFYPFLKDNREKIEKILTFRIPYYVGPLARGNSRFAWMTRKSEETITPWNFEEVVDKGASAQSFIERMTNFDKNLPNEKVLPKHSLLYEYFTVYNELTKVKYVTEGMRKPAFLSGEQKKAIVDLLFKTNRKVTVKQLKEDYFKKIECFDSVEISGVEDRFNASLGTYHDLLKIIKDKDFLDNEENEDILEDIVLTLTLFEDREMIEERLKTYAHLFDDKVMKQLKRRRYTGWGRLSRKLINGIRDKQSGKTILDFLKSDGFANRNFMQLIHDDSLTFKEDIQKAQVSGQGDSLHEHIANLAGSPAIKKGILQTVKVVDELVKVMGRHKPENIVIEMARENQTTQKGQKNSRERMKRIEEGIKELGSQILKEHPVENTQLQNEKLYLYYLQNGRDMYVDQELDINRLSDYDVDHIVPQSFLKDDSIDNKVLTRSDKARGKSDNVPSEEVVKKMKNYWRQLLNAKLITQRKFDNLTKAERGGLSELDKAGFIKRQLVETRQITKHVAQILDSRMNTKYDENDKLIREVKVITLKSKLVSDFRKDFQFYKVREINNYHHAHDAYLNAVVGTALIKKYPKLESEFVYGDYKVYDVRKMIAKSEQEIGKATAKYFFYSNIMNFFKTEITLANGEIRKRPLIETNGETGEIVWDKGRDFATVRKVLSMPQVNIVKKTEVQTGGFSKESILPKRNSDKLIARKKDWDPKKYGGFDSPTVAYSVLVVAKVEKGKSKKLKSVKELLGITIMERSSFEKNPIDFLEAKGYKEVKKDLIIKLPKYSLFELENGRKRMLASAGELQKGNELALPSKYVNFLYLASHYEKLKGSPEDNEQKQLFVEQHKHYLDEIIEQISEFSKRVILADANLDKVLSAYNKHRDKPIREQAENIIHLFTLTNLGAPAAFKYFDTTIDRKRYTSTKEVLDATLIHQSITGLYETRIDLSQLGGDGGGSSGSSGSSGSSGSSGGTLNIEDEYRLHETSKEPDVPLGSTWLSDFPQAWAETGGMGLAVRQAPLIIPLKATSTPVSIKQYPMSQEARLGIKPHIQRLLDQGILVPCQSPWNTPLLPVKKPGTNDYRPVQDLREVNKRVEDIHPTVPNPYNLLSGLPPSHQWYTVLDLKDAFFCLRLHPTSQPLFAFEWRDPEMGISGQLTWTRLPQGFKNSPTLFNEALHRDLADFRIQHPDLILLQYVDDLLLAATSEQDCQRGTRALLQTLGNLGYRASAKKAQICQKQVKYLGYLLKEGQRWLTEARKETVMGQPTPKTPRQLREFLGTAGFCRLWIPGFAEMAAPLYPLTKPGTLFNWGPDQQKAYQEIKQALLTAPALGLPDLTKPFELFVDEKQGYAKGVLTQKLGPWRRPVAYLSKKLDPVAAGWPPCLRMVAAIAVLTKDAGKLTMGQPLVILAPHAVEALVKQPPDRWLSNARMTHYQAMLLDTDRVQFGPVVALNPATLLPLPEKEAPHDCLEILAETHGTRPDLTDQPIPDADYTWYTDGSSFLQEGQRRAGAAVTTETEVIWARALPAGTSAQRAELIALTQALKMAEGKKLNVYTDSRYAFATAHVHGEIYRRRGWLTSEGREIKNKNEILALLKALFLPKRLSIIHCPGHQKGNSAEARGNRMADQAAREAAMKAVLETSTLLAGKRTADGSEFEKRTADGSEFESPKKKAKVE

SEQ ID NO: 965 - protein, 2105 aa, synthetic construct
MPAAKRVKLDGGDKKYSIGLDIGTNSVGWAVITDEYKVPSKKFKVLGNTDRHSIKKNLIGALLFDSGETAEATRLKRTARRRYTRRKNRICYLQEIFSNEMAKVDDSFFHRLEESFLVEEDKKHERHPIFGNIVDEVAYHEKYPTIYHLRKKLVDSTDKADLRLIYLALAHMIKFRGHFLIEGDLNPDNSDVDKLFIQLVQTYNQLFEENPINASGVDAKAILSARLSKSRRLENLIAQLPGEKKNGLFGNLIALSLGLTPNFKSNFDLAEDAKLQLSKDTYDDDLDNLLAQIGDQYADLFLAAKNLSDAILLSDILRVNTEITKAPLSASMIKRYDEHHQDLTLLKALVRQQLPEKYKEIFFDQSKNGYAGYIDGGASQEEFYKFIKPILEKMDGTEELLVKLNREDLLRKQRTFDNGSIPHQIHLGELHAILRRQEDFYPFLKDNREKIEKILTFRIPYYVGPLARGNSRFAWMTRKSEETITPWNFEEVVDKGASAQSFIERMTNFDKNLPNEKVLPKHSLLYEYFTVYNELTKVKYVTEGMRKPAFLSGEQKKAIVDLLFKTNRKVTVKQLKEDYFKKIECFDSVEISGVEDRFNASLGTYHDLLKIIKDKDFLDNEENEDILEDIVLTLTLFEDREMIEERLKTYAHLFDDKVMKQLKRRRYTGWGRLSRKLINGIRDKQSGKTILDFLKSDGFANRNFMQLIHDDSLTFKEDIQKAQVSGQGDSLHEHIANLAGSPAIKKGILQTVKVVDELVKVMGRHKPENIVIEMARENQTTQKGQKNSRERMKRIEEGIKELGSQILKEHPVENTQLQNEKLYLYYLQNGRDMYVDQELDINRLSDYDVDHIVPQSFLKDDSIDNKVLTRSDKARGKSDNVPSEEVVKKMKNYWRQLLNAKLITQRKFDNLTKAERGGLSELDKAGFIKRQLVETRQITKHVAQILDSRMNTKYDENDKLIREVKVITLKSKLVSDFRKDFQFYKVREINNYHHAHDAYLNAVVGTALIKKYPKLESEFVYGDYKVYDVRKMIAKSEQEIGKATAKYFFYSNIMNFFKTEITLANGEIRKRPLIETNGETGEIVWDKGRDFATVRKVLSMPQVNIVKKTEVQTGGFSKESILPKRNSDKLIARKKDWDPKKYGGFDSPTVAYSVLVVAKVEKGKSKKLKSVKELLGITIMERSSFEKNPIDFLEAKGYKEVKKDLIIKLPKYSLFELENGRKRMLASAGELQKGNELALPSKYVNFLYLASHYEKLKGSPEDNEQKQLFVEQHKHYLDEIIEQISEFSKRVILADANLDKVLSAYNKHRDKPIREQAENIIHLFTLTNLGAPAAFKYFDTTIDRKRYTSTKEVLDATLIHQSITGLYETRIDLSQLGGDGGEAAAKEAAAKEAAAKEAAAKGGTLNIEDEYRLHETSKEPDVPLGSTWLSDFPQAWAETGGMGLAVRQAPLIIPLKATSTPVSIKQYPMSQEARLGIKPHIQRLLDQGILVPCQSPWNTPLLPVKKPGTNDYRPVQDLREVNKRVEDIHPTVPNPYNLLSGLPPSHQWYTVLDLKDAFFCLRLHPTSQPLFAFEWRDPEMGISGQLTWTRLPQGFKNSPTLFNEALHRDLADFRIQHPDLILLQYVDDLLLAATSEQDCQRGTRALLQTLGNLGYRASAKKAQICQKQVKYLGYLLKEGQRWLTEARKETVMGQPTPKTPRQLREFLGTAGFCRLWIPGFAEMAAPLYPLTKPGTLFNWGPDQQKAYQEIKQALLTAPALGLPDLTKPFELFVDEKQGYAKGVLTQKLGPWRRPVAYLSKKLDPVAAGWPPCLRMVAAIAVLTKDAGKLTMGQPLVILAPHAVEALVKQPPDRWLSNARMTHYQAMLLDTDRVQFGPVVALNPATLLPLPEKEAPHDCLEILAETHGTRPDLTDQPIPDADYTWYTDGSSFLQEGQRRAGAAVTTETEVIWARALPAGTSAQRAELIALTQALKMAEGKKLNVYTDSRYAFATAHVHGEIYRRRGWLTSEGREIKNKNEILALLKALFLPKRLSIIHCPGHQKGNSAEARGNRMADQAAREAAMKAVLETSTLLAGKRTADGSEFEKRTADGSEFESPKKKAKVE

SEQ ID NO: 966 - protein, 2093 aa, synthetic construct
MPAAKRVKLDGGDKKYSIGLDIGTNSVGWAVITDEYKVPSKKFKVLGNTDRHSIKKNLIGALLFDSGETAEATRLKRTARRRYTRRKNRICYLQEIFSNEMAKVDDSFFHRLEESFLVEEDKKHERHPIFGNIVDEVAYHEKYPTIYHLRKKLVDSTDKADLRLIYLALAHMIKFRGHFLIEGDLNPDNSDVDKLFIQLVQTYNQLFEENPINASGVDAKAILSARLSKSRRLENLIAQLPGEKKNGLFGNLIALSLGLTPNFKSNFDLAEDAKLQLSKDTYDDDLDNLLAQIGDQYADLFLAAKNLSDAILLSDILRVNTEITKAPLSASMIKRYDEHHQDLTLLKALVRQQLPEKYKEIFFDQSKNGYAGYIDGGASQEEFYKFIKPILEKMDGTEELLVKLNREDLLRKQRTFDNGSIPHQIHLGELHAILRRQEDFYPFLKDNREKIEKILTFRIPYYVGPLARGNSRFAWMTRKSEETITPWNFEEVVDKGASAQSFIERMTNFDKNLPNEKVLPKHSLLYEYFTVYNELTKVKYVTEGMRKPAFLSGEQKKAIVDLLFKTNRKVTVKQLKEDYFKKIECFDSVEISGVEDRFNASLGTYHDLLKIIKDKDFLDNEENEDILEDIVLTLTLFEDREMIEERLKTYAHLFDDKVMKQLKRRRYTGWGRLSRKLINGIRDKQSGKTILDFLKSDGFANRNFMQLIHDDSLTFKEDIQKAQVSGQGDSLHEHIANLAGSPAIKKGILQTVKVVDELVKVMGRHKPENIVIEMARENQTTQKGQKNSRERMKRIEEGIKELGSQILKEHPVENTQLQNEKLYLYYLQNGRDMYVDQELDINRLSDYDVDHIVPQSFLKDDSIDNKVLTRSDKARGKSDNVPSEEVVKKMKNYWRQLLNAKLITQRKFDNLTKAERGGLSELDKAGFIKRQLVETRQITKHVAQILDSRMNTKYDENDKLIREVKVITLKSKLVSDFRKDFQFYKVREINNYHHAHDAYLNAVVGTALIKKYPKLESEFVYGDYKVYDVRKMIAKSEQEIGKATAKYFFYSNIMNFFKTEITLANGEIRKRPLIETNGETGEIVWDKGRDFATVRKVLSMPQVNIVKKTEVQTGGFSKESILPKRNSDKLIARKKDWDPKKYGGFDSPTVAYSVLVVAKVEKGKSKKLKSVKELLGITIMERSSFEKNPIDFLEAKGYKEVKKDLIIKLPKYSLFELENGRKRMLASAGELQKGNELALPSKYVNFLYLASHYEKLKGSPEDNEQKQLFVEQHKHYLDEIIEQISEFSKRVILADANLDKVLSAYNKHRDKPIREQAENIIHLFTLTNLGAPAAFKYFDTTIDRKRYTSTKEVLDATLIHQSITGLYETRIDLSQLGGDGGGSSEAAAKGGTLNIEDEYRLHETSKEPDVPLGSTWLSDFPQAWAETGGMGLAVRQAPLIIPLKATSTPVSIKQYPMSQEARLGIKPHIQRLLDQGILVPCQSPWNTPLLPVKKPGTNDYRPVQDLREVNKRVEDIHPTVPNPYNLLSGLPPSHQWYTVLDLKDAFFCLRLHPTSQPLFAFEWRDPEMGISGQLTWTRLPQGFKNSPTLFNEALHRDLADFRIQHPDLILLQYVDDLLLAATSEQDCQRGTRALLQTLGNLGYRASAKKAQICQKQVKYLGYLLKEGQRWLTEARKETVMGQPTPKTPRQLREFLGTAGFCRLWIPGFAEMAAPLYPLTKPGTLFNWGPDQQKAYQEIKQALLTAPALGLPDLTKPFELFVDEKQGYAKGVLTQKLGPWRRPVAYLSKKLDPVAAGWPPCLRMVAAIAVLTKDAGKLTMGQPLVILAPHAVEALVKQPPDRWLSNARMTHYQAMLLDTDRVQFGPVVALNPATLLPLPEKEAPHDCLEILAETHGTRPDLTDQPIPDADYTWYTDGSSFLQEGQRRAGAAVTTETEVIWARALPAGTSAQRAELIALTQALKMAEGKKLNVYTDSRYAFATAHVHGEIYRRRGWLTSEGREIKNKNEILALLKALFLPKRLSIIHCPGHQKGNSAEARGNRMADQAAREAAMKAVLETSTLLAGKRTADGSEFEKRTADGSEFESPKKKAKVE

SEQ ID NO: 967 - protein, 2096 aa, synthetic construct
MPAAKRVKLDGGDKKYSIGLDIGTNSVGWAVITDEYKVPSKKFKVLGNTDRHSIKKNLIGALLFDSGETAEATRLKRTARRRYTRRKNRICYLQEIFSNEMAKVDDSFFHRLEESFLVEEDKKHERHPIFGNIVDEVAYHEKYPTIYHLRKKLVDSTDKADLRLIYLALAHMIKFRGHFLIEGDLNPDNSDVDKLFIQLVQTYNQLFEENPINASGVDAKAILSARLSKSRRLENLIAQLPGEKKNGLFGNLIALSLGLTPNFKSNFDLAEDAKLQLSKDTYDDDLDNLLAQIGDQYADLFLAAKNLSDAILLSDILRVNTEITKAPLSASMIKRYDEHHQDLTLLKALVRQQLPEKYKEIFFDQSKNGYAGYIDGGASQEEFYKFIKPILEKMDGTEELLVKLNREDLLRKQRTFDNGSIPHQIHLGELHAILRRQEDFYPFLKDNREKIEKILTFRIPYYVGPLARGNSRFAWMTRKSEETITPWNFEEVVDKGASAQSFIERMTNFDKNLPNEKVLPKHSLLYEYFTVYNELTKVKYVTEGMRKPAFLSGEQKKAIVDLLFKTNRKVTVKQLKEDYFKKIECFDSVEISGVEDRFNASLGTYHDLLKIIKDKDFLDNEENEDILEDIVLTLTLFEDREMIEERLKTYAHLFDDKVMKQLKRRRYTGWGRLSRKLINGIRDKQSGKTILDFLKSDGFANRNFMQLIHDDSLTFKEDIQKAQVSGQGDSLHEHIANLAGSPAIKKGILQTVKVVDELVKVMGRHKPENIVIEMARENQTTQKGQKNSRERMKRIEEGIKELGSQILKEHPVENTQLQNEKLYLYYLQNGRDMYVDQELDINRLSDYDVDHIVPQSFLKDDSIDNKVLTRSDKARGKSDNVPSEEVVKKMKNYWRQLLNAKLITQRKFDNLTKAERGGLSELDKAGFIKRQLVETRQITKHVAQILDSRMNTKYDENDKLIREVKVITLKSKLVSDFRKDFQFYKVREINNYHHAHDAYLNAVVGTALIKKYPKLESEFVYGDYKVYDVRKMIAKSEQEIGKATAKYFFYSNIMNFFKTEITLANGEIRKRPLIETNGETGEIVWDKGRDFATVRKVLSMPQVNIVKKTEVQTGGFSKESILPKRNSDKLIARKKDWDPKKYGGFDSPTVAYSVLVVAKVEKGKSKKLKSVKELLGITIMERSSFEKNPIDFLEAKGYKEVKKDLIIKLPKYSLFELENGRKRMLASAGELQKGNELALPSKYVNFLYLASHYEKLKGSPEDNEQKQLFVEQHKHYLDEIIEQISEFSKRVILADANLDKVLSAYNKHRDKPIREQAENIIHLFTLTNLGAPAAFKYFDTTIDRKRYTSTKEVLDATLIHQSITGLYETRIDLSQLGGDGGPAPGSSEAAAKGGTLNIEDEYRLHETSKEPDVPLGSTWLSDFPQAWAETGGMGLAVRQAPLIIPLKATSTPVSIKQYPMSQEARLGIKPHIQRLLDQGILVPCQSPWNTPLLPVKKPGTNDYRPVQDLREVNKRVEDIHPTVPNPYNLLSGLPPSHQWYTVLDLKDAFFCLRLHPTSQPLFAFEWRDPEMGISGQLTWTRLPQGFKNSPTLFNEALHRDLADFRIQHPDLILLQYVDDLLLAATSEQDCQRGTRALLQTLGNLGYRASAKKAQICQKQVKYLGYLLKEGQRWLTEARKETVMGQPTPKTPRQLREFLGTAGFCRLWIPGFAEMAAPLYPLTKPGTLFNWGPDQQKAYQEIKQALLTAPALGLPDLTKPFELFVDEKQGYAKGVLTQKLGPWRRPVAYLSKKLDPVAAGWPPCLRMVAAIAVLTKDAGKLTMGQPLVILAPHAVEALVKQPPDRWLSNARMTHYQAMLLDTDRVQFGPVVALNPATLLPLPEKEAPHDCLEILAETHGTRPDLTDQPIPDADYTWYTDGSSFLQEGQRRAGAAVTTETEVIWARALPAGTSAQRAELIALTQALKMAEGKKLNVYTDSRYAFATAHVHGEIYRRRGWLTSEGREIKNKNEILALLKALFLPKRLSIIHCPGHQKGNSAEARGNRMADQAAREAAMKAVLETSTLLAGKRTADGSEFEKRTADGSEFESPKKKAKVE

SEQ ID NO: 968 - protein, 2096 aa, synthetic construct
MPAAKRVKLDGGDKKYSIGLDIGTNSVGWAVITDEYKVPSKKFKVLGNTDRHSIKKNLIGALLFDSGETAEATRLKRTARRRYTRRKNRICYLQEIFSNEMAKVDDSFFHRLEESFLVEEDKKHERHPIFGNIVDEVAYHEKYPTIYHLRKKLVDSTDKADLRLIYLALAHMIKFRGHFLIEGDLNPDNSDVDKLFIQLVQTYNQLFEENPINASGVDAKAILSARLSKSRRLENLIAQLPGEKKNGLFGNLIALSLGLTPNFKSNFDLAEDAKLQLSKDTYDDDLDNLLAQIGDQYADLFLAAKNLSDAILLSDILRVNTEITKAPLSASMIKRYDEHHQDLTLLKALVRQQLPEKYKEIFFDQSKNGYAGYIDGGASQEEFYKFIKPILEKMDGTEELLVKLNREDLLRKQRTFDNGSIPHQIHLGELHAILRRQEDFYPFLKDNREKIEKILTFRIPYYVGPLARGNSRFAWMTRKSEETITPWNFEEVVDKGASAQSFIERMTNFDKNLPNEKVLPKHSLLYEYFTVYNELTKVKYVTEGMRKPAFLSGEQKKAIVDLLFKTNRKVTVKQLKEDYFKKIECFDSVEISGVEDRFNASLGTYHDLLKIIKDKDFLDNEENEDILEDIVLTLTLFEDREMIEERLKTYAHLFDDKVMKQLKRRRYTGWGRLSRKLINGIRDKQSGKTILDFLKSDGFANRNFMQLIHDDSLTFKEDIQKAQVSGQGDSLHEHIANLAGSPAIKKGILQTVKVVDELVKVMGRHKPENIVIEMARENQTTQKGQKNSRERMKRIEEGIKELGSQILKEHPVENTQLQNEKLYLYYLQNGRDMYVDQELDINRLSDYDVDHIVPQSFLKDDSIDNKVLTRSDKARGKSDNVPSEEVVKKMKNYWRQLLNAKLITQRKFDNLTKAERGGLSELDKAGFIKRQLVETRQITKHVAQILDSRMNTKYDENDKLIREVKVITLKSKLVSDFRKDFQFYKVREINNYHHAHDAYLNAVVGTALIKKYPKLESEFVYGDYKVYDVRKMIAKSEQEIGKATAKYFFYSNIMNFFKTEITLANGEIRKRPLIETNGETGEIVWDKGRDFATVRKVLSMPQVNIVKKTEVQTGGFSKESILPKRNSDKLIARKKDWDPKKYGGFDSPTVAYSVLVVAKVEKGKSKKLKSVKELLGITIMERSSFEKNPIDFLEAKGYKEVKKDLIIKLPKYSLFELENGRKRMLASAGELQKGNELALPSKYVNFLYLASHYEKLKGSPEDNEQKQLFVEQHKHYLDEIIEQISEFSKRVILADANLDKVLSAYNKHRDKPIREQAENIIHLFTLTNLGAPAAFKYFDTTIDRKRYTSTKEVLDATLIHQSITGLYETRIDLSQLGGDGGGGSPAPEAAAKGGTLNIEDEYRLHETSKEPDVPLGSTWLSDFPQAWAETGGMGLAVRQAPLIIPLKATSTPVSIKQYPMSQEARLGIKPHIQRLLDQGILVPCQSPWNTPLLPVKKPGTNDYRPVQDLREVNKRVEDIHPTVPNPYNLLSGLPPSHQWYTVLDLKDAFFCLRLHPTSQPLFAFEWRDPEMGISGQLTWTRLPQGFKNSPTLFNEALHRDLADFRIQHPDLILLQYVDDLLLAATSEQDCQRGTRALLQTLGNLGYRASAKKAQICQKQVKYLGYLLKEGQRWLTEARKETVMGQPTPKTPRQLREFLGTAGFCRLWIPGFAEMAAPLYPLTKPGTLFNWGPDQQKAYQEIKQALLTAPALGLPDLTKPFELFVDEKQGYAKGVLTQKLGPWRRPVAYLSKKLDPVAAGWPPCLRMVAAIAVLTKDAGKLTMGQPLVILAPHAVEALVKQPPDRWLSNARMTHYQAMLLDTDRVQFGPVVALNPATLLPLPEKEAPHDCLEILAETHGTRPDLTDQPIPDADYTWYTDGSSFLQEGQRRAGAAVTTETEVIWARALPAGTSAQRAELIALTQALKMAEGKKLNVYTDSRYAFATAHVHGEIYRRRGWLTSEGREIKNKNEILALLKALFLPKRLSIIHCPGHQKGNSAEARGNRMADQAAREAAMKAVLETSTLLAGKRTADGSEFEKRTADGSEFESPKKKAKVE

SEQ ID NO: 969 - protein, 2094 aa, synthetic construct
MPAAKRVKLDGGDKKYSIGLDIGTNSVGWAVITDEYKVPSKKFKVLGNTDRHSIKKNLIGALLFDSGETAEATRLKRTARRRYTRRKNRICYLQEIFSNEMAKVDDSFFHRLEESFLVEEDKKHERHPIFGNIVDEVAYHEKYPTIYHLRKKLVDSTDKADLRLIYLALAHMIKFRGHFLIEGDLNPDNSDVDKLFIQLVQTYNQLFEENPINASGVDAKAILSARLSKSRRLENLIAQLPGEKKNGLFGNLIALSLGLTPNFKSNFDLAEDAKLQLSKDTYDDDLDNLLAQIGDQYADLFLAAKNLSDAILLSDILRVNTEITKAPLSASMIKRYDEHHQDLTLLKALVRQQLPEKYKEIFFDQSKNGYAGYIDGGASQEEFYKFIKPILEKMDGTEELLVKLNREDLLRKQRTFDNGSIPHQIHLGELHAILRRQEDFYPFLKDNREKIEKILTFRIPYYVGPLARGNSRFAWMTRKSEETITPWNFEEVVDKGASAQSFIERMTNFDKNLPNEKVLPKHSLLYEYFTVYNELTKVKYVTEGMRKPAFLSGEQKKAIVDLLFKTNRKVTVKQLKEDYFKKIECFDSVEISGVEDRFNASLGTYHDLLKIIKDKDFLDNEENEDILEDIVLTLTLFEDREMIEERLKTYAHLFDDKVMKQLKRRRYTGWGRLSRKLINGIRDKQSGKTILDFLKSDGFANRNFMQLIHDDSLTFKEDIQKAQVSGQGDSLHEHIANLAGSPAIKKGILQTVKVVDELVKVMGRHKPENIVIEMARENQTTQKGQKNSRERMKRIEEGIKELGSQILKEHPVENTQLQNEKLYLYYLQNGRDMYVDQELDINRLSDYDVDHIVPQSFLKDDSIDNKVLTRSDKARGKSDNVPSEEVVKKMKNYWRQLLNAKLITQRKFDNLTKAERGGLSELDKAGFIKRQLVETRQITKHVAQILDSRMNTKYDENDKLIREVKVITLKSKLVSDFRKDFQFYKVREINNYHHAHDAYLNAVVGTALIKKYPKLESEFVYGDYKVYDVRKMIAKSEQEIGKATAKYFFYSNIMNFFKTEITLANGEIRKRPLIETNGETGEIVWDKGRDFATVRKVLSMPQVNIVKKTEVQTGGFSKESILPKRNSDKLIARKKDWDPKKYGGFDSPTVAYSVLVVAKVEKGKSKKLKSVKELLGITIMERSSFEKNPIDFLEAKGYKEVKKDLIIKLPKYSLFELENGRKRMLASAGELQKGNELALPSKYVNFLYLASHYEKLKGSPEDNEQKQLFVEQHKHYLDEIIEQISEFSKRVILADANLDKVLSAYNKHRDKPIREQAENIIHLFTLTNLGAPAAFKYFDTTIDRKRYTSTKEVLDATLIHQSITGLYETRIDLSQLGGDGGGGGGSSPAPGGTLNIEDEYRLHETSKEPDVPLGSTWLSDFPQAWAETGGMGLAVRQAPLIIPLKATSTPVSIKQYPMSQEARLGIKPHIQRLLDQGILVPCQSPWNTPLLPVKKPGTNDYRPVQDLREVNKRVEDIHPTVPNPYNLLSGLPPSHQWYTVLDLKDAFFCLRLHPTSQPLFAFEWRDPEMGISGQLTWTRLPQGFKNSPTLFNEALHRDLADFRIQHPDLILLQYVDDLLLAATSEQDCQRGTRALLQTLGNLGYRASAKKAQICQKQVKYLGYLLKEGQRWLTEARKETVMGQPTPKTPRQLREFLGTAGFCRLWIPGFAEMAAPLYPLTKPGTLFNWGPDQQKAYQEIKQALLTAPALGLPDLTKPFELFVDEKQGYAKGVLTQKLGPWRRPVAYLSKKLDPVAAGWPPCLRMVAAIAVLTKDAGKLTMGQPLVILAPHAVEALVKQPPDRWLSNARMTHYQAMLLDTDRVQFGPVVALNPATLLPLPEKEAPHDCLEILAETHGTRPDLTDQPIPDADYTWYTDGSSFLQEGQRRAGAAVTTETEVIWARALPAGTSAQRAELIALTQALKMAEGKKLNVYTDSRYAFATAHVHGEIYRRRGWLTSEGREIKNKNEILALLKALFLPKRLSIIHCPGHQKGNSAEARGNRMADQAAREAAMKAVLETSTLLAGKRTADGSEFEKRTADGSEFESPKKKAKVE

SEQ ID NO: 970 - protein, 2094 aa, synthetic construct
MPAAKRVKLDGGDKKYSIGLDIGTNSVGWAVITDEYKVPSKKFKVLGNTDRHSIKKNLIGALLFDSGETAEATRLKRTARRRYTRRKNRICYLQEIFSNEMAKVDDSFFHRLEESFLVEEDKKHERHPIFGNIVDEVAYHEKYPTIYHLRKKLVDSTDKADLRLIYLALAHMIKFRGHFLIEGDLNPDNSDVDKLFIQLVQTYNQLFEENPINASGVDAKAILSARLSKSRRLENLIAQLPGEKKNGLFGNLIALSLGLTPNFKSNFDLAEDAKLQLSKDTYDDDLDNLLAQIGDQYADLFLAAKNLSDAILLSDILRVNTEITKAPLSASMIKRYDEHHQDLTLLKALVRQQLPEKYKEIFFDQSKNGYAGYIDGGASQEEFYKFIKPILEKMDGTEELLVKLNREDLLRKQRTFDNGSIPHQIHLGELHAILRRQEDFYPFLKDNREKIEKILTFRIPYYVGPLARGNSRFAWMTRKSEETITPWNFEEVVDKGASAQSFIERMTNFDKNLPNEKVLPKHSLLYEYFTVYNELTKVKYVTEGMRKPAFLSGEQKKAIVDLLFKTNRKVTVKQLKEDYFKKIECFDSVEISGVEDRFNASLGTYHDLLKIIKDKDFLDNEENEDILEDIVLTLTLFEDREMIEERLKTYAHLFDDKVMKQLKRRRYTGWGRLSRKLINGIRDKQSGKTILDFLKSDGFANRNFMQLIHDDSLTFKEDIQKAQVSGQGDSLHEHIANLAGSPAIKKGILQTVKVVDELVKVMGRHKPENIVIEMARENQTTQKGQKNSRERMKRIEEGIKELGSQILKEHPVENTQLQNEKLYLYYLQNGRDMYVDQELDINRLSDYDVDHIVPQSFLKDDSIDNKVLTRSDKARGKSDNVPSEEVVKKMKNYWRQLLNAKLITQRKFDNLTKAERGGLSELDKAGFIKRQLVETRQITKHVAQILDSRMNTKYDENDKLIREVKVITLKSKLVSDFRKDFQFYKVREINNYHHAHDAYLNAVVGTALIKKYPKLESEFVYGDYKVYDVRKMIAKSEQEIGKATAKYFFYSNIMNFFKTEITLANGEIRKRPLIETNGETGEIVWDKGRDFATVRKVLSMPQVNIVKKTEVQTGGFSKESILPKRNSDKLIARKKDWDPKKYGGFDSPTVAYSVLVVAKVEKGKSKKLKSVKELLGITIMERSSFEKNPIDFLEAKGYKEVKKDLIIKLPKYSLFELENGRKRMLASAGELQKGNELALPSKYVNFLYLASHYEKLKGSPEDNEQKQLFVEQHKHYLDEIIEQISEFSKRVILADANLDKVLSAYNKHRDKPIREQAENIIHLFTLTNLGAPAAFKYFDTTIDRKRYTSTKEVLDATLIHQSITGLYETRIDLSQLGGDGGPAPGSSGGSGGTLNIEDEYRLHETSKEPDVPLGSTWLSDFPQAWAETGGMGLAVRQAPLIIPLKATSTPVSIKQYPMSQEARLGIKPHIQRLLDQGILVPCQSPWNTPLLPVKKPGTNDYRPVQDLREVNKRVEDIHPTVPNPYNLLSGLPPSHQWYTVLDLKDAFFCLRLHPTSQPLFAFEWRDPEMGISGQLTWTRLPQGFKNSPTLFNEALHRDLADFRIQHPDLILLQYVDDLLLAATSEQDCQRGTRALLQTLGNLGYRASAKKAQICQKQVKYLGYLLKEGQRWLTEARKETVMGQPTPKTPRQLREFLGTAGFCRLWIPGFAEMAAPLYPLTKPGTLFNWGPDQQKAYQEIKQALLTAPALGLPDLTKPFELFVDEKQGYAKGVLTQKLGPWRRPVAYLSKKLDPVAAGWPPCLRMVAAIAVLTKDAGKLTMGQPLVILAPHAVEALVKQPPDRWLSNARMTHYQAMLLDTDRVQFGPVVALNPATLLPLPEKEAPHDCLEILAETHGTRPDLTDQPIPDADYTWYTDGSSFLQEGQRRAGAAVTTETEVIWARALPAGTSAQRAELIALTQALKMAEGKKLNVYTDSRYAFATAHVHGEIYRRRGWLTSEGREIKNKNEILALLKALFLPKRLSIIHCPGHQKGNSAEARGNRMADQAAREAAMKAVLETSTLLAGKRTADGSEFEKRTADGSEFESPKKKAKVE

SEQ ID NO: 971 - protein, 2096 aa, synthetic construct
MPAAKRVKLDGGDKKYSIGLDIGTNSVGWAVITDEYKVPSKKFKVLGNTDRHSIKKNLIGALLFDSGETAEATRLKRTARRRYTRRKNRICYLQEIFSNEMAKVDDSFFHRLEESFLVEEDKKHERHPIFGNIVDEVAYHEKYPTIYHLRKKLVDSTDKADLRLIYLALAHMIKFRGHFLIEGDLNPDNSDVDKLFIQLVQTYNQLFEENPINASGVDAKAILSARLSKSRRLENLIAQLPGEKKNGLFGNLIALSLGLTPNFKSNFDLAEDAKLQLSKDTYDDDLDNLLAQIGDQYADLFLAAKNLSDAILLSDILRVNTEITKAPLSASMIKRYDEHHQDLTLLKALVRQQLPEKYKEIFFDQSKNGYAGYIDGGASQEEFYKFIKPILEKMDGTEELLVKLNREDLLRKQRTFDNGSIPHQIHLGELHAILRRQEDFYPFLKDNREKIEKILTFRIPYYVGPLARGNSRFAWMTRKSEETITPWNFEEVVDKGASAQSFIERMTNFDKNLPNEKVLPKHSLLYEYFTVYNELTKVKYVTEGMRKPAFLSGEQKKAIVDLLFKTNRKVTVKQLKEDYFKKIECFDSVEISGVEDRFNASLGTYHDLLKIIKDKDFLDNEENEDILEDIVLTLTLFEDREMIEERLKTYAHLFDDKVMKQLKRRRYTGWGRLSRKLINGIRDKQSGKTILDFLKSDGFANRNFMQLIHDDSLTFKEDIQKAQVSGQGDSLHEHIANLAGSPAIKKGILQTVKVVDELVKVMGRHKPENIVIEMARENQTTQKGQKNSRERMKRIEEGIKELGSQILKEHPVENTQLQNEKLYLYYLQNGRDMYVDQELDINRLSDYDVDHIVPQSFLKDDSIDNKVLTRSDKARGKSDNVPSEEVVKKMKNYWRQLLNAKLITQRKFDNLTKAERGGLSELDKAGFIKRQLVETRQITKHVAQILDSRMNTKYDENDKLIREVKVITLKSKLVSDFRKDFQFYKVREINNYHHAHDAYLNAVVGTALIKKYPKLESEFVYGDYKVYDVRKMIAKSEQEIGKATAKYFFYSNIMNFFKTEITLANGEIRKRPLIETNGETGEIVWDKGRDFATVRKVLSMPQVNIVKKTEVQTGGFSKESILPKRNSDKLIARKKDWDPKKYGGFDSPTVAYSVLVVAKVEKGKSKKLKSVKELLGITIMERSSFEKNPIDFLEAKGYKEVKKDLIIKLPKYSLFELENGRKRMLASAGELQKGNELALPSKYVNFLYLASHYEKLKGSPEDNEQKQLFVEQHKHYLDEIIEQISEFSKRVILADANLDKVLSAYNKHRDKPIREQAENIIHLFTLTNLGAPAAFKYFDTTIDRKRYTSTKEVLDATLIHQSITGLYETRIDLSQLGGDGGGSSGGGEAAAKGGTLNIEDEYRLHETSKEPDVPLGSTWLSDFPQAWAETGGMGLAVRQAPLIIPLKATSTPVSIKQYPMSQEARLGIKPHIQRLLDQGILVPCQSPWNTPLLPVKKPGTNDYRPVQDLREVNKRVEDIHPTVPNPYNLLSGLPPSHQWYTVLDLKDAFFCLRLHPTSQPLFAFEWRDPEMGISGQLTWTRLPQGFKNSPTLFNEALHRDLADFRIQHPDLILLQYVDDLLLAATSEQDCQRGTRALLQTLGNLGYRASAKKAQICQKQVKYLGYLLKEGQRWLTEARKETVMGQPTPKTPRQLREFLGTAGFCRLWIPGFAEMAAPLYPLTKPGTLFNWGPDQQKAYQEIKQALLTAPALGLPDLTKPFELFVDEKQGYAKGVLTQKLGPWRRPVAYLSKKLDPVAAGWPPCLRMVAAIAVLTKDAGKLTMGQPLVILAPHAVEALVKQPPDRWLSNARMTHYQAMLLDTDRVQFGPVVALNPATLLPLPEKEAPHDCLEILAETHGTRPDLTDQPIPDADYTWYTDGSSFLQEGQRRAGAAVTTETEVIWARALPAGTSAQRAELIALTQALKMAEGKKLNVYTDSRYAFATAHVHGEIYRRRGWLTSEGREIKNKNEILALLKALFLPKRLSIIHCPGHQKGNSAEARGNRMADQAAREAAMKAVLETSTLLAGKRTADGSEFEKRTADGSEFESPKKKAKVE

SEQ ID NO: 972 - protein, 2100 aa, synthetic construct
MPAAKRVKLDGGDKKYSIGLDIGTNSVGWAVITDEYKVPSKKFKVLGNTDRHSIKKNLIGALLFDSGETAEATRLKRTARRRYTRRKNRICYLQEIFSNEMAKVDDSFFHRLEESFLVEEDKKHERHPIFGNIVDEVAYHEKYPTIYHLRKKLVDSTDKADLRLIYLALAHMIKFRGHFLIEGDLNPDNSDVDKLFIQLVQTYNQLFEENPINASGVDAKAILSARLSKSRRLENLIAQLPGEKKNGLFGNLIALSLGLTPNFKSNFDLAEDAKLQLSKDTYDDDLDNLLAQIGDQYADLFLAAKNLSDAILLSDILRVNTEITKAPLSASMIKRYDEHHQDLTLLKALVRQQLPEKYKEIFFDQSKNGYAGYIDGGASQEEFYKFIKPILEKMDGTEELLVKLNREDLLRKQRTFDNGSIPHQIHLGELHAILRRQEDFYPFLKDNREKIEKILTFRIPYYVGPLARGNSRFAWMTRKSEETITPWNFEEVVDKGASAQSFIERMTNFDKNLPNEKVLPKHSLLYEYFTVYNELTKVKYVTEGMRKPAFLSGEQKKAIVDLLFKTNRKVTVKQLKEDYFKKIECFDSVEISGVEDRFNASLGTYHDLLKIIKDKDFLDNEENEDILEDIVLTLTLFEDREMIEERLKTYAHLFDDKVMKQLKRRRYTGWGRLSRKLINGIRDKQSGKTILDFLKSDGFANRNFMQLIHDDSLTFKEDIQKAQVSGQGDSLHEHIANLAGSPAIKKGILQTVKVVDELVKVMGRHKPENIVIEMARENQTTQKGQKNSRERMKRIEEGIKELGSQILKEHPVENTQLQNEKLYLYYLQNGRDMYVDQELDINRLSDYDVDHIVPQSFLKDDSIDNKVLTRSDKARGKSDNVPSEEVVKKMKNYWRQLLNAKLITQRKFDNLTKAERGGLSELDKAGFIKRQLVETRQITKHVAQILDSRMNTKYDENDKLIREVKVITLKSKLVSDFRKDFQFYKVREINNYHHAHDAYLNAVVGTALIKKYPKLESEFVYGDYKVYDVRKMIAKSEQEIGKATAKYFFYSNIMNFFKTEITLANGEIRKRPLIETNGETGEIVWDKGRDFATVRKVLSMPQVNIVKKTEVQTGGFSKESILPKRNSDKLIARKKDWDPKKYGGFDSPTVAYSVLVVAKVEKGKSKKLKSVKELLGITIMERSSFEKNPIDFLEAKGYKEVKKDLIIKLPKYSLFELENGRKRMLASAGELQKGNELALPSKYVNFLYLASHYEKLKGSPEDNEQKQLFVEQHKHYLDEIIEQISEFSKRVILADANLDKVLSAYNKHRDKPIREQAENIIHLFTLTNLGAPAAFKYFDTTIDRKRYTSTKEVLDATLIHQSITGLYETRIDLSQLGGDGGGGGGSEAAAKGGGGSGGTLNIEDEYRLHETSKEPDVPLGSTWLSDFPQAWAETGGMGLAVRQAPLIIPLKATSTPVSIKQYPMSQEARLGIKPHIQRLLDQGILVPCQSPWNTPLLPVKKPGTNDYRPVQDLREVNKRVEDIHPTVPNPYNLLSGLPPSHQWYTVLDLKDAFFCLRLHPTSQPLFAFEWRDPEMGISGQLTWTRLPQGFKNSPTLFNEALHRDLADFRIQHPDLILLQYVDDLLLAATSEQDCQRGTRALLQTLGNLGYRASAKKAQICQKQVKYLGYLLKEGQRWLTEARKETVMGQPTPKTPRQLREFLGTAGFCRLWIPGFAEMAAPLYPLTKPGTLFNWGPDQQKAYQEIKQALLTAPALGLPDLTKPFELFVDEKQGYAKGVLTQKLGPWRRPVAYLSKKLDPVAAGWPPCLRMVAAIAVLTKDAGKLTMGQPLVILAPHAVEALVKQPPDRWLSNARMTHYQAMLLDTDRVQFGPVVALNPATLLPLPEKEAPHDCLEILAETHGTRPDLTDQPIPDADYTWYTDGSSFLQEGQRRAGAAVTTETEVIWARALPAGTSAQRAELIALTQALKMAEGKKLNVYTDSRYAFATAHVHGEIYRRRGWLTSEGREIKNKNEILALLKALFLPKRLSIIHCPGHQKGNSAEARGNRMADQAAREAAMKAVLETSTLLAGKRTADGSEFEKRTADGSEFESPKKKAKVE

SEQ ID NO: 973 - protein, 2096 aa, synthetic construct
MPAAKRVKLDGGDKKYSIGLDIGTNSVGWAVITDEYKVPSKKFKVLGNTDRHSIKKNLIGALLFDSGETAEATRLKRTARRRYTRRKNRICYLQEIFSNEMAKVDDSFFHRLEESFLVEEDKKHERHPIFGNIVDEVAYHEKYPTIYHLRKKLVDSTDKADLRLIYLALAHMIKFRGHFLIEGDLNPDNSDVDKLFIQLVQTYNQLFEENPINASGVDAKAILSARLSKSRRLENLIAQLPGEKKNGLFGNLIALSLGLTPNFKSNFDLAEDAKLQLSKDTYDDDLDNLLAQIGDQYADLFLAAKNLSDAILLSDILRVNTEITKAPLSASMIKRYDEHHQDLTLLKALVRQQLPEKYKEIFFDQSKNGYAGYIDGGASQEEFYKFIKPILEKMDGTEELLVKLNREDLLRKQRTFDNGSIPHQIHLGELHAILRRQEDFYPFLKDNREKIEKILTFRIPYYVGPLARGNSRFAWMTRKSEETITPWNFEEVVDKGASAQSFIERMTNFDKNLPNEKVLPKHSLLYEYFTVYNELTKVKYVTEGMRKPAFLSGEQKKAIVDLLFKTNRKVTVKQLKEDYFKKIECFDSVEISGVEDRFNASLGTYHDLLKIIKDKDFLDNEENEDILEDIVLTLTLFEDREMIEERLKTYAHLFDDKVMKQLKRRRYTGWGRLSRKLINGIRDKQSGKTILDFLKSDGFANRNFMQLIHDDSLTFKEDIQKAQVSGQGDSLHEHIANLAGSPAIKKGILQTVKVVDELVKVMGRHKPENIVIEMARENQTTQKGQKNSRERMKRIEEGIKELGSQILKEHPVENTQLQNEKLYLYYLQNGRDMYVDQELDINRLSDYDVDHIVPQSFLKDDSIDNKVLTRSDKARGKSDNVPSEEVVKKMKNYWRQLLNAKLITQRKFDNLTKAERGGLSELDKAGFIKRQLVETRQITKHVAQILDSRMNTKYDENDKLIREVKVITLKSKLVSDFRKDFQFYKVREINNYHHAHDAYLNAVVGTALIKKYPKLESEFVYGDYKVYDVRKMIAKSEQEIGKATAKYFFYSNIMNFFKTEITLANGEIRKRPLIETNGETGEIVWDKGRDFATVRKVLSMPQVNIVKKTEVQTGGFSKESILPKRNSDKLIARKKDWDPKKYGGFDSPTVAYSVLVVAKVEKGKSKKLKSVKELLGITIMERSSFEKNPIDFLEAKGYKEVKKDLIIKLPKYSLFELENGRKRMLASAGELQKGNELALPSKYVNFLYLASHYEKLKGSPEDNEQKQLFVEQHKHYLDEIIEQISEFSKRVILADANLDKVLSAYNKHRDKPIREQAENIIHLFTLTNLGAPAAFKYFDTTIDRKRYTSTKEVLDATLIHQSITGLYETRIDLSQLGGDGGGGGGGSEAAAKGGTLNIEDEYRLHETSKEPDVPLGSTWLSDFPQAWAETGGMGLAVRQAPLIIPLKATSTPVSIKQYPMSQEARLGIKPHIQRLLDQGILVPCQSPWNTPLLPVKKPGTNDYRPVQDLREVNKRVEDIHPTVPNPYNLLSGLPPSHQWYTVLDLKDAFFCLRLHPTSQPLFAFEWRDPEMGISGQLTWTRLPQGFKNSPTLFNEALHRDLADFRIQHPDLILLQYVDDLLLAATSEQDCQRGTRALLQTLGNLGYRASAKKAQICQKQVKYLGYLLKEGQRWLTEARKETVMGQPTPKTPRQLREFLGTAGFCRLWIPGFAEMAAPLYPLTKPGTLFNWGPDQQKAYQEIKQALLTAPALGLPDLTKPFELFVDEKQGYAKGVLTQKLGPWRRPVAYLSKKLDPVAAGWPPCLRMVAAIAVLTKDAGKLTMGQPLVILAPHAVEALVKQPPDRWLSNARMTHYQAMLLDTDRVQFGPVVALNPATLLPLPEKEAPHDCLEILAETHGTRPDLTDQPIPDADYTWYTDGSSFLQEGQRRAGAAVTTETEVIWARALPAGTSAQRAELIALTQALKMAEGKKLNVYTDSRYAFATAHVHGEIYRRRGWLTSEGREIKNKNEILALLKALFLPKRLSIIHCPGHQKGNSAEARGNRMADQAAREAAMKAVLETSTLLAGKRTADGSEFEKRTADGSEFESPKKKAKVE

SEQ ID NO: 974 - protein, 2091 aa, synthetic construct
MPAAKRVKLDGGDKKYSIGLDIGTNSVGWAVITDEYKVPSKKFKVLGNTDRHSIKKNLIGALLFDSGETAEATRLKRTARRRYTRRKNRICYLQEIFSNEMAKVDDSFFHRLEESFLVEEDKKHERHPIFGNIVDEVAYHEKYPTIYHLRKKLVDSTDKADLRLIYLALAHMIKFRGHFLIEGDLNPDNSDVDKLFIQLVQTYNQLFEENPINASGVDAKAILSARLSKSRRLENLIAQLPGEKKNGLFGNLIALSLGLTPNFKSNFDLAEDAKLQLSKDTYDDDLDNLLAQIGDQYADLFLAAKNLSDAILLSDILRVNTEITKAPLSASMIKRYDEHHQDLTLLKALVRQQLPEKYKEIFFDQSKNGYAGYIDGGASQEEFYKFIKPILEKMDGTEELLVKLNREDLLRKQRTFDNGSIPHQIHLGELHAILRRQEDFYPFLKDNREKIEKILTFRIPYYVGPLARGNSRFAWMTRKSEETITPWNFEEVVDKGASAQSFIERMTNFDKNLPNEKVLPKHSLLYEYFTVYNELTKVKYVTEGMRKPAFLSGEQKKAIVDLLFKTNRKVTVKQLKEDYFKKIECFDSVEISGVEDRFNASLGTYHDLLKIIKDKDFLDNEENEDILEDIVLTLTLFEDREMIEERLKTYAHLFDDKVMKQLKRRRYTGWGRLSRKLINGIRDKQSGKTILDFLKSDGFANRNFMQLIHDDSLTFKEDIQKAQVSGQGDSLHEHIANLAGSPAIKKGILQTVKVVDELVKVMGRHKPENIVIEMARENQTTQKGQKNSRERMKRIEEGIKELGSQILKEHPVENTQLQNEKLYLYYLQNGRDMYVDQELDINRLSDYDVDHIVPQSFLKDDSIDNKVLTRSDKARGKSDNVPSEEVVKKMKNYWRQLLNAKLITQRKFDNLTKAERGGLSELDKAGFIKRQLVETRQITKHVAQILDSRMNTKYDENDKLIREVKVITLKSKLVSDFRKDFQFYKVREINNYHHAHDAYLNAVVGTALIKKYPKLESEFVYGDYKVYDVRKMIAKSEQEIGKATAKYFFYSNIMNFFKTEITLANGEIRKRPLIETNGETGEIVWDKGRDFATVRKVLSMPQVNIVKKTEVQTGGFSKESILPKRNSDKLIARKKDWDPKKYGGFDSPTVAYSVLVVAKVEKGKSKKLKSVKELLGITIMERSSFEKNPIDFLEAKGYKEVKKDLIIKLPKYSLFELENGRKRMLASAGELQKGNELALPSKYVNFLYLASHYEKLKGSPEDNEQKQLFVEQHKHYLDEIIEQISEFSKRVILADANLDKVLSAYNKHRDKPIREQAENIIHLFTLTNLGAPAAFKYFDTTIDRKRYTSTKEVLDATLIHQSITGLYETRIDLSQLGGDGGGGGGGSGGTLNIEDEYRLHETSKEPDVPLGSTWLSDFPQAWAETGGMGLAVRQAPLIIPLKATSTPVSIKQYPMSQEARLGIKPHIQRLLDQGILVPCQSPWNTPLLPVKKPGTNDYRPVQDLREVNKRVEDIHPTVPNPYNLLSGLPPSHQWYTVLDLKDAFFCLRLHPTSQPLFAFEWRDPEMGISGQLTWTRLPQGFKNSPTLFNEALHRDLADFRIQHPDLILLQYVDDLLLAATSEQDCQRGTRALLQTLGNLGYRASAKKAQICQKQVKYLGYLLKEGQRWLTEARKETVMGQPTPKTPRQLREFLGTAGFCRLWIPGFAEMAAPLYPLTKPGTLFNWGPDQQKAYQEIKQALLTAPALGLPDLTKPFELFVDEKQGYAKGVLTQKLGPWRRPVAYLSKKLDPVAAGWPPCLRMVAAIAVLTKDAGKLTMGQPLVILAPHAVEALVKQPPDRWLSNARMTHYQAMLLDTDRVQFGPVVALNPATLLPLPEKEAPHDCLEILAETHGTRPDLTDQPIPDADYTWYTDGSSFLQEGQRRAGAAVTTETEVIWARALPAGTSAQRAELIALTQALKMAEGKKLNVYTDSRYAFATAHVHGEIYRRRGWLTSEGREIKNKNEILALLKALFLPKRLSIIHCPGHQKGNSAEARGNRMADQAAREAAMKAVLETSTLLAGKRTADGSEFEKRTADGSEFESPKKKAKVE

SEQ ID NO: 975 - protein, 2096 aa, synthetic construct
MPAAKRVKLDGGDKKYSIGLDIGTNSVGWAVITDEYKVPSKKFKVLGNTDRHSIKKNLIGALLFDSGETAEATRLKRTARRRYTRRKNRICYLQEIFSNEMAKVDDSFFHRLEESFLVEEDKKHERHPIFGNIVDEVAYHEKYPTIYHLRKKLVDSTDKADLRLIYLALAHMIKFRGHFLIEGDLNPDNSDVDKLFIQLVQTYNQLFEENPINASGVDAKAILSARLSKSRRLENLIAQLPGEKKNGLFGNLIALSLGLTPNFKSNFDLAEDAKLQLSKDTYDDDLDNLLAQIGDQYADLFLAAKNLSDAILLSDILRVNTEITKAPLSASMIKRYDEHHQDLTLLKALVRQQLPEKYKEIFFDQSKNGYAGYIDGGASQEEFYKFIKPILEKMDGTEELLVKLNREDLLRKQRTFDNGSIPHQIHLGELHAILRRQEDFYPFLKDNREKIEKILTFRIPYYVGPLARGNSRFAWMTRKSEETITPWNFEEVVDKGASAQSFIERMTNFDKNLPNEKVLPKHSLLYEYFTVYNELTKVKYVTEGMRKPAFLSGEQKKAIVDLLFKTNRKVTVKQLKEDYFKKIECFDSVEISGVEDRFNASLGTYHDLLKIIKDKDFLDNEENEDILEDIVLTLTLFEDREMIEERLKTYAHLFDDKVMKQLKRRRYTGWGRLSRKLINGIRDKQSGKTILDFLKSDGFANRNFMQLIHDDSLTFKEDIQKAQVSGQGDSLHEHIANLAGSPAIKKGILQTVKVVDELVKVMGRHKPENIVIEMARENQTTQKGQKNSRERMKRIEEGIKELGSQILKEHPVENTQLQNEKLYLYYLQNGRDMYVDQELDINRLSDYDVDHIVPQSFLKDDSIDNKVLTRSDKARGKSDNVPSEEVVKKMKNYWRQLLNAKLITQRKFDNLTKAERGGLSELDKAGFIKRQLVETRQITKHVAQILDSRMNTKYDENDKLIREVKVITLKSKLVSDFRKDFQFYKVREINNYHHAHDAYLNAVVGTALIKKYPKLESEFVYGDYKVYDVRKMIAKSEQEIGKATAKYFFYSNIMNFFKTEITLANGEIRKRPLIETNGETGEIVWDKGRDFATVRKVLSMPQVNIVKKTEVQTGGFSKESILPKRNSDKLIARKKDWDPKKYGGFDSPTVAYSVLVVAKVEKGKSKKLKSVKELLGITIMERSSFEKNPIDFLEAKGYKEVKKDLIIKLPKYSLFELENGRKRMLASAGELQKGNELALPSKYVNFLYLASHYEKLKGSPEDNEQKQLFVEQHKHYLDEIIEQISEFSKRVILADANLDKVLSAYNKHRDKPIREQAENIIHLFTLTNLGAPAAFKYFDTTIDRKRYTSTKEVLDATLIHQSITGLYETRIDLSQLGGDGGGSSGGSEAAAKGGTLNIEDEYRLHETSKEPDVPLGSTWLSDFPQAWAETGGMGLAVRQAPLIIPLKATSTPVSIKQYPMSQEARLGIKPHIQRLLDQGILVPCQSPWNTPLLPVKKPGTNDYRPVQDLREVNKRVEDIHPTVPNPYNLLSGLPPSHQWYTVLDLKDAFFCLRLHPTSQPLFAFEWRDPEMGISGQLTWTRLPQGFKNSPTLFNEALHRDLADFRIQHPDLILLQYVDDLLLAATSEQDCQRGTRALLQTLGNLGYRASAKKAQICQKQVKYLGYLLKEGQRWLTEARKETVMGQPTPKTPRQLREFLGTAGFCRLWIPGFAEMAAPLYPLTKPGTLFNWGPDQQKAYQEIKQALLTAPALGLPDLTKPFELFVDEKQGYAKGVLTQKLGPWRRPVAYLSKKLDPVAAGWPPCLRMVAAIAVLTKDAGKLTMGQPLVILAPHAVEALVKQPPDRWLSNARMTHYQAMLLDTDRVQFGPVVALNPATLLPLPEKEAPHDCLEILAETHGTRPDLTDQPIPDADYTWYTDGSSFLQEGQRRAGAAVTTETEVIWARALPAGTSAQRAELIALTQALKMAEGKKLNVYTDSRYAFATAHVHGEIYRRRGWLTSEGREIKNKNEILALLKALFLPKRLSIIHCPGHQKGNSAEARGNRMADQAAREAAMKAVLETSTLLAGKRTADGSEFEKRTADGSEFESPKKKAKVE

SEQ ID NO: 976 - protein, 2115 aa, synthetic construct
MPAAKRVKLDGGDKKYSIGLDIGTNSVGWAVITDEYKVPSKKFKVLGNTDRHSIKKNLIGALLFDSGETAEATRLKRTARRRYTRRKNRICYLQEIFSNEMAKVDDSFFHRLEESFLVEEDKKHERHPIFGNIVDEVAYHEKYPTIYHLRKKLVDSTDKADLRLIYLALAHMIKFRGHFLIEGDLNPDNSDVDKLFIQLVQTYNQLFEENPINASGVDAKAILSARLSKSRRLENLIAQLPGEKKNGLFGNLIALSLGLTPNFKSNFDLAEDAKLQLSKDTYDDDLDNLLAQIGDQYADLFLAAKNLSDAILLSDILRVNTEITKAPLSASMIKRYDEHHQDLTLLKALVRQQLPEKYKEIFFDQSKNGYAGYIDGGASQEEFYKFIKPILEKMDGTEELLVKLNREDLLRKQRTFDNGSIPHQIHLGELHAILRRQEDFYPFLKDNREKIEKILTFRIPYYVGPLARGNSRFAWMTRKSEETITPWNFEEVVDKGASAQSFIERMTNFDKNLPNEKVLPKHSLLYEYFTVYNELTKVKYVTEGMRKPAFLSGEQKKAIVDLLFKTNRKVTVKQLKEDYFKKIECFDSVEISGVEDRFNASLGTYHDLLKIIKDKDFLDNEENEDILEDIVLTLTLFEDREMIEERLKTYAHLFDDKVMKQLKRRRYTGWGRLSRKLINGIRDKQSGKTILDFLKSDGFANRNFMQLIHDDSLTFKEDIQKAQVSGQGDSLHEHIANLAGSPAIKKGILQTVKVVDELVKVMGRHKPENIVIEMARENQTTQKGQKNSRERMKRIEEGIKELGSQILKEHPVENTQLQNEKLYLYYLQNGRDMYVDQELDINRLSDYDVDHIVPQSFLKDDSIDNKVLTRSDKARGKSDNVPSEEVVKKMKNYWRQLLNAKLITQRKFDNLTKAERGGLSELDKAGFIKRQLVETRQITKHVAQILDSRMNTKYDENDKLIREVKVITLKSKLVSDFRKDFQFYKVREINNYHHAHDAYLNAVVGTALIKKYPKLESEFVYGDYKVYDVRKMIAKSEQEIGKATAKYFFYSNIMNFFKTEITLANGEIRKRPLIETNGETGEIVWDKGRDFATVRKVLSMPQVNIVKKTEVQTGGFSKESILPKRNSDKLIARKKDWDPKKYGGFDSPTVAYSVLVVAKVEKGKSKKLKSVKELLGITIMERSSFEKNPIDFLEAKGYKEVKKDLIIKLPKYSLFELENGRKRMLASAGELQKGNELALPSKYVNFLYLASHYEKLKGSPEDNEQKQLFVEQHKHYLDEIIEQISEFSKRVILADANLDKVLSAYNKHRDKPIREQAENIIHLFTLTNLGAPAAFKYFDTTIDRKRYTSTKEVLDATLIHQSITGLYETRIDLSQLGGDGGGGGGSGGGGSGGGGSGGGGSGGGGSGGGGSGGTLNIEDEYRLHETSKEPDVPLGSTWLSDFPQAWAETGGMGLAVRQAPLIIPLKATSTPVSIKQYPMSQEARLGIKPHIQRLLDQGILVPCQSPWNTPLLPVKKPGTNDYRPVQDLREVNKRVEDIHPTVPNPYNLLSGLPPSHQWYTVLDLKDAFFCLRLHPTSQPLFAFEWRDPEMGISGQLTWTRLPQGFKNSPTLFNEALHRDLADFRIQHPDLILLQYVDDLLLAATSEQDCQRGTRALLQTLGNLGYRASAKKAQICQKQVKYLGYLLKEGQRWLTEARKETVMGQPTPKTPRQLREFLGTAGFCRLWIPGFAEMAAPLYPLTKPGTLFNWGPDQQKAYQEIKQALLTAPALGLPDLTKPFELFVDEKQGYAKGVLTQKLGPWRRPVAYLSKKLDPVAAGWPPCLRMVAAIAVLTKDAGKLTMGQPLVILAPHAVEALVKQPPDRWLSNARMTHYQAMLLDTDRVQFGPVVALNPATLLPLPEKEAPHDCLEILAETHGTRPDLTDQPIPDADYTWYTDGSSFLQEGQRRAGAAVTTETEVIWARALPAGTSAQRAELIALTQALKMAEGKKLNVYTDSRYAFATAHVHGEIYRRRGWLTSEGREIKNKNEILALLKALFLPKRLSIIHCPGHQKGNSAEARGNRMADQAAREAAMKAVLETSTLLAGKRTADGSEFEKRTADGSEFESPKKKAKVE

SEQ ID NO: 977 - protein, 2105 aa, synthetic construct
MPAAKRVKLDGGDKKYSIGLDIGTNSVGWAVITDEYKVPSKKFKVLGNTDRHSIKKNLIGALLFDSGETAEATRLKRTARRRYTRRKNRICYLQEIFSNEMAKVDDSFFHRLEESFLVEEDKKHERHPIFGNIVDEVAYHEKYPTIYHLRKKLVDSTDKADLRLIYLALAHMIKFRGHFLIEGDLNPDNSDVDKLFIQLVQTYNQLFEENPINASGVDAKAILSARLSKSRRLENLIAQLPGEKKNGLFGNLIALSLGLTPNFKSNFDLAEDAKLQLSKDTYDDDLDNLLAQIGDQYADLFLAAKNLSDAILLSDILRVNTEITKAPLSASMIKRYDEHHQDLTLLKALVRQQLPEKYKEIFFDQSKNGYAGYIDGGASQEEFYKFIKPILEKMDGTEELLVKLNREDLLRKQRTFDNGSIPHQIHLGELHAILRRQEDFYPFLKDNREKIEKILTFRIPYYVGPLARGNSRFAWMTRKSEETITPWNFEEVVDKGASAQSFIERMTNFDKNLPNEKVLPKHSLLYEYFTVYNELTKVKYVTEGMRKPAFLSGEQKKAIVDLLFKTNRKVTVKQLKEDYFKKIECFDSVEISGVEDRFNASLGTYHDLLKIIKDKDFLDNEENEDILEDIVLTLTLFEDREMIEERLKTYAHLFDDKVMKQLKRRRYTGWGRLSRKLINGIRDKQSGKTILDFLKSDGFANRNFMQLIHDDSLTFKEDIQKAQVSGQGDSLHEHIANLAGSPAIKKGILQTVKVVDELVKVMGRHKPENIVIEMARENQTTQKGQKNSRERMKRIEEGIKELGSQILKEHPVENTQLQNEKLYLYYLQNGRDMYVDQELDINRLSDYDVDHIVPQSFLKDDSIDNKVLTRSDKARGKSDNVPSEEVVKKMKNYWRQLLNAKLITQRKFDNLTKAERGGLSELDKAGFIKRQLVETRQITKHVAQILDSRMNTKYDENDKLIREVKVITLKSKLVSDFRKDFQFYKVREINNYHHAHDAYLNAVVGTALIKKYPKLESEFVYGDYKVYDVRKMIAKSEQEIGKATAKYFFYSNIMNFFKTEITLANGEIRKRPLIETNGETGEIVWDKGRDFATVRKVLSMPQVNIVKKTEVQTGGFSKESILPKRNSDKLIARKKDWDPKKYGGFDSPTVAYSVLVVAKVEKGKSKKLKSVKELLGITIMERSSFEKNPIDFLEAKGYKEVKKDLIIKLPKYSLFELENGRKRMLASAGELQKGNELALPSKYVNFLYLASHYEKLKGSPEDNEQKQLFVEQHKHYLDEIIEQISEFSKRVILADANLDKVLSAYNKHRDKPIREQAENIIHLFTLTNLGAPAAFKYFDTTIDRKRYTSTKEVLDATLIHQSITGLYETRIDLSQLGGDGGGGGGSGGGGSGGGGSGGGGSGGTLNIEDEYRLHETSKEPDVPLGSTWLSDFPQAWAETGGMGLAVRQAPLIIPLKATSTPVSIKQYPMSQEARLGIKPHIQRLLDQGILVPCQSPWNTPLLPVKKPGTNDYRPVQDLREVNKRVEDIHPTVPNPYNLLSGLPPSHQWYTVLDLKDAFFCLRLHPTSQPLFAFEWRDPEMGISGQLTWTRLPQGFKNSPTLFNEALHRDLADFRIQHPDLILLQYVDDLLLAATSEQDCQRGTRALLQTLGNLGYRASAKKAQICQKQVKYLGYLLKEGQRWLTEARKETVMGQPTPKTPRQLREFLGTAGFCRLWIPGFAEMAAPLYPLTKPGTLFNWGPDQQKAYQEIKQALLTAPALGLPDLTKPFELFVDEKQGYAKGVLTQKLGPWRRPVAYLSKKLDPVAAGWPPCLRMVAAIAVLTKDAGKLTMGQPLVILAPHAVEALVKQPPDRWLSNARMTHYQAMLLDTDRVQFGPVVALNPATLLPLPEKEAPHDCLEILAETHGTRPDLTDQPIPDADYTWYTDGSSFLQEGQRRAGAAVTTETEVIWARALPAGTSAQRAELIALTQALKMAEGKKLNVYTDSRYAFATAHVHGEIYRRRGWLTSEGREIKNKNEILALLKALFLPKRLSIIHCPGHQKGNSAEARGNRMADQAAREAAMKAVLETSTLLAGKRTADGSEFEKRTADGSEFESPKKKAKVE

SEQ ID NO: 978 - protein, 2094 aa, synthetic construct
MPAAKRVKLDGGDKKYSIGLDIGTNSVGWAVITDEYKVPSKKFKVLGNTDRHSIKKNLIGALLFDSGETAEATRLKRTARRRYTRRKNRICYLQEIFSNEMAKVDDSFFHRLEESFLVEEDKKHERHPIFGNIVDEVAYHEKYPTIYHLRKKLVDSTDKADLRLIYLALAHMIKFRGHFLIEGDLNPDNSDVDKLFIQLVQTYNQLFEENPINASGVDAKAILSARLSKSRRLENLIAQLPGEKKNGLFGNLIALSLGLTPNFKSNFDLAEDAKLQLSKDTYDDDLDNLLAQIGDQYADLFLAAKNLSDAILLSDILRVNTEITKAPLSASMIKRYDEHHQDLTLLKALVRQQLPEKYKEIFFDQSKNGYAGYIDGGASQEEFYKFIKPILEKMDGTEELLVKLNREDLLRKQRTFDNGSIPHQIHLGELHAILRRQEDFYPFLKDNREKIEKILTFRIPYYVGPLARGNSRFAWMTRKSEETITPWNFEEVVDKGASAQSFIERMTNFDKNLPNEKVLPKHSLLYEYFTVYNELTKVKYVTEGMRKPAFLSGEQKKAIVDLLFKTNRKVTVKQLKEDYFKKIECFDSVEISGVEDRFNASLGTYHDLLKIIKDKDFLDNEENEDILEDIVLTLTLFEDREMIEERLKTYAHLFDDKVMKQLKRRRYTGWGRLSRKLINGIRDKQSGKTILDFLKSDGFANRNFMQLIHDDSLTFKEDIQKAQVSGQGDSLHEHIANLAGSPAIKKGILQTVKVVDELVKVMGRHKPENIVIEMARENQTTQKGQKNSRERMKRIEEGIKELGSQILKEHPVENTQLQNEKLYLYYLQNGRDMYVDQELDINRLSDYDVDHIVPQSFLKDDSIDNKVLTRSDKARGKSDNVPSEEVVKKMKNYWRQLLNAKLITQRKFDNLTKAERGGLSELDKAGFIKRQLVETRQITKHVAQILDSRMNTKYDENDKLIREVKVITLKSKLVSDFRKDFQFYKVREINNYHHAHDAYLNAVVGTALIKKYPKLESEFVYGDYKVYDVRKMIAKSEQEIGKATAKYFFYSNIMNFFKTEITLANGEIRKRPLIETNGETGEIVWDKGRDFATVRKVLSMPQVNIVKKTEVQTGGFSKESILPKRNSDKLIARKKDWDPKKYGGFDSPTVAYSVLVVAKVEKGKSKKLKSVKELLGITIMERSSFEKNPIDFLEAKGYKEVKKDLIIKLPKYSLFELENGRKRMLASAGELQKGNELALPSKYVNFLYLASHYEKLKGSPEDNEQKQLFVEQHKHYLDEIIEQISEFSKRVILADANLDKVLSAYNKHRDKPIREQAENIIHLFTLTNLGAPAAFKYFDTTIDRKRYTSTKEVLDATLIHQSITGLYETRIDLSQLGGDGGPAPAPAPAPGGTLNIEDEYRLHETSKEPDVPLGSTWLSDFPQAWAETGGMGLAVRQAPLIIPLKATSTPVSIKQYPMSQEARLGIKPHIQRLLDQGILVPCQSPWNTPLLPVKKPGTNDYRPVQDLREVNKRVEDIHPTVPNPYNLLSGLPPSHQWYTVLDLKDAFFCLRLHPTSQPLFAFEWRDPEMGISGQLTWTRLPQGFKNSPTLFNEALHRDLADFRIQHPDLILLQYVDDLLLAATSEQDCQRGTRALLQTLGNLGYRASAKKAQICQKQVKYLGYLLKEGQRWLTEARKETVMGQPTPKTPRQLREFLGTAGFCRLWIPGFAEMAAPLYPLTKPGTLFNWGPDQQKAYQEIKQALLTAPALGLPDLTKPFELFVDEKQGYAKGVLTQKLGPWRRPVAYLSKKLDPVAAGWPPCLRMVAAIAVLTKDAGKLTMGQPLVILAPHAVEALVKQPPDRWLSNARMTHYQAMLLDTDRVQFGPVVALNPATLLPLPEKEAPHDCLEILAETHGTRPDLTDQPIPDADYTWYTDGSSFLQEGQRRAGAAVTTETEVIWARALPAGTSAQRAELIALTQALKMAEGKKLNVYTDSRYAFATAHVHGEIYRRRGWLTSEGREIKNKNEILALLKALFLPKRLSIIHCPGHQKGNSAEARGNRMADQAAREAAMKAVLETSTLLAGKRTADGSEFEKRTADGSEFESPKKKAKVE

SEQ ID NO: 979 - protein, 2096 aa, synthetic construct
MPAAKRVKLDGGDKKYSIGLDIGTNSVGWAVITDEYKVPSKKFKVLGNTDRHSIKKNLIGALLFDSGETAEATRLKRTARRRYTRRKNRICYLQEIFSNEMAKVDDSFFHRLEESFLVEEDKKHERHPIFGNIVDEVAYHEKYPTIYHLRKKLVDSTDKADLRLIYLALAHMIKFRGHFLIEGDLNPDNSDVDKLFIQLVQTYNQLFEENPINASGVDAKAILSARLSKSRRLENLIAQLPGEKKNGLFGNLIALSLGLTPNFKSNFDLAEDAKLQLSKDTYDDDLDNLLAQIGDQYADLFLAAKNLSDAILLSDILRVNTEITKAPLSASMIKRYDEHHQDLTLLKALVRQQLPEKYKEIFFDQSKNGYAGYIDGGASQEEFYKFIKPILEKMDGTEELLVKLNREDLLRKQRTFDNGSIPHQIHLGELHAILRRQEDFYPFLKDNREKIEKILTFRIPYYVGPLARGNSRFAWMTRKSEETITPWNFEEVVDKGASAQSFIERMTNFDKNLPNEKVLPKHSLLYEYFTVYNELTKVKYVTEGMRKPAFLSGEQKKAIVDLLFKTNRKVTVKQLKEDYFKKIECFDSVEISGVEDRFNASLGTYHDLLKIIKDKDFLDNEENEDILEDIVLTLTLFEDREMIEERLKTYAHLFDDKVMKQLKRRRYTGWGRLSRKLINGIRDKQSGKTILDFLKSDGFANRNFMQLIHDDSLTFKEDIQKAQVSGQGDSLHEHIANLAGSPAIKKGILQTVKVVDELVKVMGRHKPENIVIEMARENQTTQKGQKNSRERMKRIEEGIKELGSQILKEHPVENTQLQNEKLYLYYLQNGRDMYVDQELDINRLSDYDVDHIVPQSFLKDDSIDNKVLTRSDKARGKSDNVPSEEVVKKMKNYWRQLLNAKLITQRKFDNLTKAERGGLSELDKAGFIKRQLVETRQITKHVAQILDSRMNTKYDENDKLIREVKVITLKSKLVSDFRKDFQFYKVREINNYHHAHDAYLNAVVGTALIKKYPKLESEFVYGDYKVYDVRKMIAKSEQEIGKATAKYFFYSNIMNFFKTEITLANGEIRKRPLIETNGETGEIVWDKGRDFATVRKVLSMPQVNIVKKTEVQTGGFSKESILPKRNSDKLIARKKDWDPKKYGGFDSPTVAYSVLVVAKVEKGKSKKLKSVKELLGITIMERSSFEKNPIDFLEAKGYKEVKKDLIIKLPKYSLFELENGRKRMLASAGELQKGNELALPSKYVNFLYLASHYEKLKGSPEDNEQKQLFVEQHKHYLDEIIEQISEFSKRVILADANLDKVLSAYNKHRDKPIREQAENIIHLFTLTNLGAPAAFKYFDTTIDRKRYTSTKEVLDATLIHQSITGLYETRIDLSQLGGDGGGGGEAAAKGGSGGTLNIEDEYRLHETSKEPDVPLGSTWLSDFPQAWAETGGMGLAVRQAPLIIPLKATSTPVSIKQYPMSQEARLGIKPHIQRLLDQGILVPCQSPWNTPLLPVKKPGTNDYRPVQDLREVNKRVEDIHPTVPNPYNLLSGLPPSHQWYTVLDLKDAFFCLRLHPTSQPLFAFEWRDPEMGISGQLTWTRLPQGFKNSPTLFNEALHRDLADFRIQHPDLILLQYVDDLLLAATSEQDCQRGTRALLQTLGNLGYRASAKKAQICQKQVKYLGYLLKEGQRWLTEARKETVMGQPTPKTPRQLREFLGTAGFCRLWIPGFAEMAAPLYPLTKPGTLFNWGPDQQKAYQEIKQALLTAPALGLPDLTKPFELFVDEKQGYAKGVLTQKLGPWRRPVAYLSKKLDPVAAGWPPCLRMVAAIAVLTKDAGKLTMGQPLVILAPHAVEALVKQPPDRWLSNARMTHYQAMLLDTDRVQFGPVVALNPATLLPLPEKEAPHDCLEILAETHGTRPDLTDQPIPDADYTWYTDGSSFLQEGQRRAGAAVTTETEVIWARALPAGTSAQRAELIALTQALKMAEGKKLNVYTDSRYAFATAHVHGEIYRRRGWLTSEGREIKNKNEILALLKALFLPKRLSIIHCPGHQKGNSAEARGNRMADQAAREAAMKAVLETSTLLAGKRTADGSEFEKRTADGSEFESPKKKAKVE

SEQ ID NO: 980 - protein, 2094 aa, synthetic construct
MPAAKRVKLDGGDKKYSIGLDIGTNSVGWAVITDEYKVPSKKFKVLGNTDRHSIKKNLIGALLFDSGETAEATRLKRTARRRYTRRKNRICYLQEIFSNEMAKVDDSFFHRLEESFLVEEDKKHERHPIFGNIVDEVAYHEKYPTIYHLRKKLVDSTDKADLRLIYLALAHMIKFRGHFLIEGDLNPDNSDVDKLFIQLVQTYNQLFEENPINASGVDAKAILSARLSKSRRLENLIAQLPGEKKNGLFGNLIALSLGLTPNFKSNFDLAEDAKLQLSKDTYDDDLDNLLAQIGDQYADLFLAAKNLSDAILLSDILRVNTEITKAPLSASMIKRYDEHHQDLTLLKALVRQQLPEKYKEIFFDQSKNGYAGYIDGGASQEEFYKFIKPILEKMDGTEELLVKLNREDLLRKQRTFDNGSIPHQIHLGELHAILRRQEDFYPFLKDNREKIEKILTFRIPYYVGPLARGNSRFAWMTRKSEETITPWNFEEVVDKGASAQSFIERMTNFDKNLPNEKVLPKHSLLYEYFTVYNELTKVKYVTEGMRKPAFLSGEQKKAIVDLLFKTNRKVTVKQLKEDYFKKIECFDSVEISGVEDRFNASLGTYHDLLKIIKDKDFLDNEENEDILEDIVLTLTLFEDREMIEERLKTYAHLFDDKVMKQLKRRRYTGWGRLSRKLINGIRDKQSGKTILDFLKSDGFANRNFMQLIHDDSLTFKEDIQKAQVSGQGDSLHEHIANLAGSPAIKKGILQTVKVVDELVKVMGRHKPENIVIEMARENQTTQKGQKNSRERMKRIEEGIKELGSQILKEHPVENTQLQNEKLYLYYLQNGRDMYVDQELDINRLSDYDVDHIVPQSFLKDDSIDNKVLTRSDKARGKSDNVPSEEVVKKMKNYWRQLLNAKLITQRKFDNLTKAERGGLSELDKAGFIKRQLVETRQITKHVAQILDSRMNTKYDENDKLIREVKVITLKSKLVSDFRKDFQFYKVREINNYHHAHDAYLNAVVGTALIKKYPKLESEFVYGDYKVYDVRKMIAKSEQEIGKATAKYFFYSNIMNFFKTEITLANGEIRKRPLIETNGETGEIVWDKGRDFATVRKVLSMPQVNIVKKTEVQTGGFSKESILPKRNSDKLIARKKDWDPKKYGGFDSPTVAYSVLVVAKVEKGKSKKLKSVKELLGITIMERSSFEKNPIDFLEAKGYKEVKKDLIIKLPKYSLFELENGRKRMLASAGELQKGNELALPSKYVNFLYLASHYEKLKGSPEDNEQKQLFVEQHKHYLDEIIEQISEFSKRVILADANLDKVLSAYNKHRDKPIREQAENIIHLFTLTNLGAPAAFKYFDTTIDRKRYTSTKEVLDATLIHQSITGLYETRIDLSQLGGDGGGGSGGSGGSGGTLNIEDEYRLHETSKEPDVPLGSTWLSDFPQAWAETGGMGLAVRQAPLIIPLKATSTPVSIKQYPMSQEARLGIKPHIQRLLDQGILVPCQSPWNTPLLPVKKPGTNDYRPVQDLREVNKRVEDIHPTVPNPYNLLSGLPPSHQWYTVLDLKDAFFCLRLHPTSQPLFAFEWRDPEMGISGQLTWTRLPQGFKNSPTLFNEALHRDLADFRIQHPDLILLQYVDDLLLAATSEQDCQRGTRALLQTLGNLGYRASAKKAQICQKQVKYLGYLLKEGQRWLTEARKETVMGQPTPKTPRQLREFLGTAGFCRLWIPGFAEMAAPLYPLTKPGTLFNWGPDQQKAYQEIKQALLTAPALGLPDLTKPFELFVDEKQGYAKGVLTQKLGPWRRPVAYLSKKLDPVAAGWPPCLRMVAAIAVLTKDAGKLTMGQPLVILAPHAVEALVKQPPDRWLSNARMTHYQAMLLDTDRVQFGPVVALNPATLLPLPEKEAPHDCLEILAETHGTRPDLTDQPIPDADYTWYTDGSSFLQEGQRRAGAAVTTETEVIWARALPAGTSAQRAELIALTQALKMAEGKKLNVYTDSRYAFATAHVHGEIYRRRGWLTSEGREIKNKNEILALLKALFLPKRLSIIHCPGHQKGNSAEARGNRMADQAAREAAMKAVLETSTLLAGKRTADGSEFEKRTADGSEFESPKKKAKVE

SEQ ID NO: 981 - protein, 2100 aa, synthetic construct
MPAAKRVKLDGGDKKYSIGLDIGTNSVGWAVITDEYKVPSKKFKVLGNTDRHSIKKNLIGALLFDSGETAEATRLKRTARRRYTRRKNRICYLQEIFSNEMAKVDDSFFHRLEESFLVEEDKKHERHPIFGNIVDEVAYHEKYPTIYHLRKKLVDSTDKADLRLIYLALAHMIKFRGHFLIEGDLNPDNSDVDKLFIQLVQTYNQLFEENPINASGVDAKAILSARLSKSRRLENLIAQLPGEKKNGLFGNLIALSLGLTPNFKSNFDLAEDAKLQLSKDTYDDDLDNLLAQIGDQYADLFLAAKNLSDAILLSDILRVNTEITKAPLSASMIKRYDEHHQDLTLLKALVRQQLPEKYKEIFFDQSKNGYAGYIDGGASQEEFYKFIKPILEKMDGTEELLVKLNREDLLRKQRTFDNGSIPHQIHLGELHAILRRQEDFYPFLKDNREKIEKILTFRIPYYVGPLARGNSRFAWMTRKSEETITPWNFEEVVDKGASAQSFIERMTNFDKNLPNEKVLPKHSLLYEYFTVYNELTKVKYVTEGMRKPAFLSGEQKKAIVDLLFKTNRKVTVKQLKEDYFKKIECFDSVEISGVEDRFNASLGTYHDLLKIIKDKDFLDNEENEDILEDIVLTLTLFEDREMIEERLKTYAHLFDDKVMKQLKRRRYTGWGRLSRKLINGIRDKQSGKTILDFLKSDGFANRNFMQLIHDDSLTFKEDIQKAQVSGQGDSLHEHIANLAGSPAIKKGILQTVKVVDELVKVMGRHKPENIVIEMARENQTTQKGQKNSRERMKRIEEGIKELGSQILKEHPVENTQLQNEKLYLYYLQNGRDMYVDQELDINRLSDYDVDHIVPQSFLKDDSIDNKVLTRSDKARGKSDNVPSEEVVKKMKNYWRQLLNAKLITQRKFDNLTKAERGGLSELDKAGFIKRQLVETRQITKHVAQILDSRMNTKYDENDKLIREVKVITLKSKLVSDFRKDFQFYKVREINNYHHAHDAYLNAVVGTALIKKYPKLESEFVYGDYKVYDVRKMIAKSEQEIGKATAKYFFYSNIMNFFKTEITLANGEIRKRPLIETNGETGEIVWDKGRDFATVRKVLSMPQVNIVKKTEVQTGGFSKESILPKRNSDKLIARKKDWDPKKYGGFDSPTVAYSVLVVAKVEKGKSKKLKSVKELLGITIMERSSFEKNPIDFLEAKGYKEVKKDLIIKLPKYSLFELENGRKRMLASAGELQKGNELALPSKYVNFLYLASHYEKLKGSPEDNEQKQLFVEQHKHYLDEIIEQISEFSKRVILADANLDKVLSAYNKHRDKPIREQAENIIHLFTLTNLGAPAAFKYFDTTIDRKRYTSTKEVLDATLIHQSITGLYETRIDLSQLGGDGGEAAAKGGGGSEAAAKGGTLNIEDEYRLHETSKEPDVPLGSTWLSDFPQAWAETGGMGLAVRQAPLIIPLKATSTPVSIKQYPMSQEARLGIKPHIQRLLDQGILVPCQSPWNTPLLPVKKPGTNDYRPVQDLREVNKRVEDIHPTVPNPYNLLSGLPPSHQWYTVLDLKDAFFCLRLHPTSQPLFAFEWRDPEMGISGQLTWTRLPQGFKNSPTLFNEALHRDLADFRIQHPDLILLQYVDDLLLAATSEQDCQRGTRALLQTLGNLGYRASAKKAQICQKQVKYLGYLLKEGQRWLTEARKETVMGQPTPKTPRQLREFLGTAGFCRLWIPGFAEMAAPLYPLTKPGTLFNWGPDQQKAYQEIKQALLTAPALGLPDLTKPFELFVDEKQGYAKGVLTQKLGPWRRPVAYLSKKLDPVAAGWPPCLRMVAAIAVLTKDAGKLTMGQPLVILAPHAVEALVKQPPDRWLSNARMTHYQAMLLDTDRVQFGPVVALNPATLLPLPEKEAPHDCLEILAETHGTRPDLTDQPIPDADYTWYTDGSSFLQEGQRRAGAAVTTETEVIWARALPAGTSAQRAELIALTQALKMAEGKKLNVYTDSRYAFATAHVHGEIYRRRGWLTSEGREIKNKNEILALLKALFLPKRLSIIHCPGHQKGNSAEARGNRMADQAAREAAMKAVLETSTLLAGKRTADGSEFEKRTADGSEFESPKKKAKVE

SEQ ID NO: 982 - protein, 2093 aa, synthetic construct
MPAAKRVKLDGGDKKYSIGLDIGTNSVGWAVITDEYKVPSKKFKVLGNTDRHSIKKNLIGALLFDSGETAEATRLKRTARRRYTRRKNRICYLQEIFSNEMAKVDDSFFHRLEESFLVEEDKKHERHPIFGNIVDEVAYHEKYPTIYHLRKKLVDSTDKADLRLIYLALAHMIKFRGHFLIEGDLNPDNSDVDKLFIQLVQTYNQLFEENPINASGVDAKAILSARLSKSRRLENLIAQLPGEKKNGLFGNLIALSLGLTPNFKSNFDLAEDAKLQLSKDTYDDDLDNLLAQIGDQYADLFLAAKNLSDAILLSDILRVNTEITKAPLSASMIKRYDEHHQDLTLLKALVRQQLPEKYKEIFFDQSKNGYAGYIDGGASQEEFYKFIKPILEKMDGTEELLVKLNREDLLRKQRTFDNGSIPHQIHLGELHAILRRQEDFYPFLKDNREKIEKILTFRIPYYVGPLARGNSRFAWMTRKSEETITPWNFEEVVDKGASAQSFIERMTNFDKNLPNEKVLPKHSLLYEYFTVYNELTKVKYVTEGMRKPAFLSGEQKKAIVDLLFKTNRKVTVKQLKEDYFKKIECFDSVEISGVEDRFNASLGTYHDLLKIIKDKDFLDNEENEDILEDIVLTLTLFEDREMIEERLKTYAHLFDDKVMKQLKRRRYTGWGRLSRKLINGIRDKQSGKTILDFLKSDGFANRNFMQLIHDDSLTFKEDIQKAQVSGQGDSLHEHIANLAGSPAIKKGILQTVKVVDELVKVMGRHKPENIVIEMARENQTTQKGQKNSRERMKRIEEGIKELGSQILKEHPVENTQLQNEKLYLYYLQNGRDMYVDQELDINRLSDYDVDHIVPQSFLKDDSIDNKVLTRSDKARGKSDNVPSEEVVKKMKNYWRQLLNAKLITQRKFDNLTKAERGGLSELDKAGFIKRQLVETRQITKHVAQILDSRMNTKYDENDKLIREVKVITLKSKLVSDFRKDFQFYKVREINNYHHAHDAYLNAVVGTALIKKYPKLESEFVYGDYKVYDVRKMIAKSEQEIGKATAKYFFYSNIMNFFKTEITLANGEIRKRPLIETNGETGEIVWDKGRDFATVRKVLSMPQVNIVKKTEVQTGGFSKESILPKRNSDKLIARKKDWDPKKYGGFDSPTVAYSVLVVAKVEKGKSKKLKSVKELLGITIMERSSFEKNPIDFLEAKGYKEVKKDLIIKLPKYSLFELENGRKRMLASAGELQKGNELALPSKYVNFLYLASHYEKLKGSPEDNEQKQLFVEQHKHYLDEIIEQISEFSKRVILADANLDKVLSAYNKHRDKPIREQAENIIHLFTLTNLGAPAAFKYFDTTIDRKRYTSTKEVLDATLIHQSITGLYETRIDLSQLGGDGGEAAAKPAPGGTLNIEDEYRLHETSKEPDVPLGSTWLSDFPQAWAETGGMGLAVRQAPLIIPLKATSTPVSIKQYPMSQEARLGIKPHIQRLLDQGILVPCQSPWNTPLLPVKKPGTNDYRPVQDLREVNKRVEDIHPTVPNPYNLLSGLPPSHQWYTVLDLKDAFFCLRLHPTSQPLFAFEWRDPEMGISGQLTWTRLPQGFKNSPTLFNEALHRDLADFRIQHPDLILLQYVDDLLLAATSEQDCQRGTRALLQTLGNLGYRASAKKAQICQKQVKYLGYLLKEGQRWLTEARKETVMGQPTPKTPRQLREFLGTAGFCRLWIPGFAEMAAPLYPLTKPGTLFNWGPDQQKAYQEIKQALLTAPALGLPDLTKPFELFVDEKQGYAKGVLTQKLGPWRRPVAYLSKKLDPVAAGWPPCLRMVAAIAVLTKDAGKLTMGQPLVILAPHAVEALVKQPPDRWLSNARMTHYQAMLLDTDRVQFGPVVALNPATLLPLPEKEAPHDCLEILAETHGTRPDLTDQPIPDADYTWYTDGSSFLQEGQRRAGAAVTTETEVIWARALPAGTSAQRAELIALTQALKMAEGKKLNVYTDSRYAFATAHVHGEIYRRRGWLTSEGREIKNKNEILALLKALFLPKRLSIIHCPGHQKGNSAEARGNRMADQAAREAAMKAVLETSTLLAGKRTADGSEFEKRTADGSEFESPKKKAKVE

SEQ ID NO: 983 - protein, 2090 aa, synthetic construct
MPAAKRVKLDGGDKKYSIGLDIGTNSVGWAVITDEYKVPSKKFKVLGNTDRHSIKKNLIGALLFDSGETAEATRLKRTARRRYTRRKNRICYLQEIFSNEMAKVDDSFFHRLEESFLVEEDKKHERHPIFGNIVDEVAYHEKYPTIYHLRKKLVDSTDKADLRLIYLALAHMIKFRGHFLIEGDLNPDNSDVDKLFIQLVQTYNQLFEENPINASGVDAKAILSARLSKSRRLENLIAQLPGEKKNGLFGNLIALSLGLTPNFKSNFDLAEDAKLQLSKDTYDDDLDNLLAQIGDQYADLFLAAKNLSDAILLSDILRVNTEITKAPLSASMIKRYDEHHQDLTLLKALVRQQLPEKYKEIFFDQSKNGYAGYIDGGASQEEFYKFIKPILEKMDGTEELLVKLNREDLLRKQRTFDNGSIPHQIHLGELHAILRRQEDFYPFLKDNREKIEKILTFRIPYYVGPLARGNSRFAWMTRKSEETITPWNFEEVVDKGASAQSFIERMTNFDKNLPNEKVLPKHSLLYEYFTVYNELTKVKYVTEGMRKPAFLSGEQKKAIVDLLFKTNRKVTVKQLKEDYFKKIECFDSVEISGVEDRFNASLGTYHDLLKIIKDKDFLDNEENEDILEDIVLTLTLFEDREMIEERLKTYAHLFDDKVMKQLKRRRYTGWGRLSRKLINGIRDKQSGKTILDFLKSDGFANRNFMQLIHDDSLTFKEDIQKAQVSGQGDSLHEHIANLAGSPAIKKGILQTVKVVDELVKVMGRHKPENIVIEMARENQTTQKGQKNSRERMKRIEEGIKELGSQILKEHPVENTQLQNEKLYLYYLQNGRDMYVDQELDINRLSDYDVDHIVPQSFLKDDSIDNKVLTRSDKARGKSDNVPSEEVVKKMKNYWRQLLNAKLITQRKFDNLTKAERGGLSELDKAGFIKRQLVETRQITKHVAQILDSRMNTKYDENDKLIREVKVITLKSKLVSDFRKDFQFYKVREINNYHHAHDAYLNAVVGTALIKKYPKLESEFVYGDYKVYDVRKMIAKSEQEIGKATAKYFFYSNIMNFFKTEITLANGEIRKRPLIETNGETGEIVWDKGRDFATVRKVLSMPQVNIVKKTEVQTGGFSKESILPKRNSDKLIARKKDWDPKKYGGFDSPTVAYSVLVVAKVEKGKSKKLKSVKELLGITIMERSSFEKNPIDFLEAKGYKEVKKDLIIKLPKYSLFELENGRKRMLASAGELQKGNELALPSKYVNFLYLASHYEKLKGSPEDNEQKQLFVEQHKHYLDEIIEQISEFSKRVILADANLDKVLSAYNKHRDKPIREQAENIIHLFTLTNLGAPAAFKYFDTTIDRKRYTSTKEVLDATLIHQSITGLYETRIDLSQLGGDGGPAPAPGGTLNIEDEYRLHETSKEPDVPLGSTWLSDFPQAWAETGGMGLAVRQAPLIIPLKATSTPVSIKQYPMSQEARLGIKPHIQRLLDQGILVPCQSPWNTPLLPVKKPGTNDYRPVQDLREVNKRVEDIHPTVPNPYNLLSGLPPSHQWYTVLDLKDAFFCLRLHPTSQPLFAFEWRDPEMGISGQLTWTRLPQGFKNSPTLFNEALHRDLADFRIQHPDLILLQYVDDLLLAATSEQDCQRGTRALLQTLGNLGYRASAKKAQICQKQVKYLGYLLKEGQRWLTEARKETVMGQPTPKTPRQLREFLGTAGFCRLWIPGFAEMAAPLYPLTKPGTLFNWGPDQQKAYQEIKQALLTAPALGLPDLTKPFELFVDEKQGYAKGVLTQKLGPWRRPVAYLSKKLDPVAAGWPPCLRMVAAIAVLTKDAGKLTMGQPLVILAPHAVEALVKQPPDRWLSNARMTHYQAMLLDTDRVQFGPVVALNPATLLPLPEKEAPHDCLEILAETHGTRPDLTDQPIPDADYTWYTDGSSFLQEGQRRAGAAVTTETEVIWARALPAGTSAQRAELIALTQALKMAEGKKLNVYTDSRYAFATAHVHGEIYRRRGWLTSEGREIKNKNEILALLKALFLPKRLSIIHCPGHQKGNSAEARGNRMADQAAREAAMKAVLETSTLLAGKRTADGSEFEKRTADGSEFESPKKKAKVE

SEQ ID NO: 984 - protein, 2094 aa, synthetic construct
MPAAKRVKLDGGDKKYSIGLDIGTNSVGWAVITDEYKVPSKKFKVLGNTDRHSIKKNLIGALLFDSGETAEATRLKRTARRRYTRRKNRICYLQEIFSNEMAKVDDSFFHRLEESFLVEEDKKHERHPIFGNIVDEVAYHEKYPTIYHLRKKLVDSTDKADLRLIYLALAHMIKFRGHFLIEGDLNPDNSDVDKLFIQLVQTYNQLFEENPINASGVDAKAILSARLSKSRRLENLIAQLPGEKKNGLFGNLIALSLGLTPNFKSNFDLAEDAKLQLSKDTYDDDLDNLLAQIGDQYADLFLAAKNLSDAILLSDILRVNTEITKAPLSASMIKRYDEHHQDLTLLKALVRQQLPEKYKEIFFDQSKNGYAGYIDGGASQEEFYKFIKPILEKMDGTEELLVKLNREDLLRKQRTFDNGSIPHQIHLGELHAILRRQEDFYPFLKDNREKIEKILTFRIPYYVGPLARGNSRFAWMTRKSEETITPWNFEEVVDKGASAQSFIERMTNFDKNLPNEKVLPKHSLLYEYFTVYNELTKVKYVTEGMRKPAFLSGEQKKAIVDLLFKTNRKVTVKQLKEDYFKKIECFDSVEISGVEDRFNASLGTYHDLLKIIKDKDFLDNEENEDILEDIVLTLTLFEDREMIEERLKTYAHLFDDKVMKQLKRRRYTGWGRLSRKLINGIRDKQSGKTILDFLKSDGFANRNFMQLIHDDSLTFKEDIQKAQVSGQGDSLHEHIANLAGSPAIKKGILQTVKVVDELVKVMGRHKPENIVIEMARENQTTQKGQKNSRERMKRIEEGIKELGSQILKEHPVENTQLQNEKLYLYYLQNGRDMYVDQELDINRLSDYDVDHIVPQSFLKDDSIDNKVLTRSDKARGKSDNVPSEEVVKKMKNYWRQLLNAKLITQRKFDNLTKAERGGLSELDKAGFIKRQLVETRQITKHVAQILDSRMNTKYDENDKLIREVKVITLKSKLVSDFRKDFQFYKVREINNYHHAHDAYLNAVVGTALIKKYPKLESEFVYGDYKVYDVRKMIAKSEQEIGKATAKYFFYSNIMNFFKTEITLANGEIRKRPLIETNGETGEIVWDKGRDFATVRKVLSMPQVNIVKKTEVQTGGFSKESILPKRNSDKLIARKKDWDPKKYGGFDSPTVAYSVLVVAKVEKGKSKKLKSVKELLGITIMERSSFEKNPIDFLEAKGYKEVKKDLIIKLPKYSLFELENGRKRMLASAGELQKGNELALPSKYVNFLYLASHYEKLKGSPEDNEQKQLFVEQHKHYLDEIIEQISEFSKRVILADANLDKVLSAYNKHRDKPIREQAENIIHLFTLTNLGAPAAFKYFDTTIDRKRYTSTKEVLDATLIHQSITGLYETRIDLSQLGGDGGGGGPAPGGSGGTLNIEDEYRLHETSKEPDVPLGSTWLSDFPQAWAETGGMGLAVRQAPLIIPLKATSTPVSIKQYPMSQEARLGIKPHIQRLLDQGILVPCQSPWNTPLLPVKKPGTNDYRPVQDLREVNKRVEDIHPTVPNPYNLLSGLPPSHQWYTVLDLKDAFFCLRLHPTSQPLFAFEWRDPEMGISGQLTWTRLPQGFKNSPTLFNEALHRDLADFRIQHPDLILLQYVDDLLLAATSEQDCQRGTRALLQTLGNLGYRASAKKAQICQKQVKYLGYLLKEGQRWLTEARKETVMGQPTPKTPRQLREFLGTAGFCRLWIPGFAEMAAPLYPLTKPGTLFNWGPDQQKAYQEIKQALLTAPALGLPDLTKPFELFVDEKQGYAKGVLTQKLGPWRRPVAYLSKKLDPVAAGWPPCLRMVAAIAVLTKDAGKLTMGQPLVILAPHAVEALVKQPPDRWLSNARMTHYQAMLLDTDRVQFGPVVALNPATLLPLPEKEAPHDCLEILAETHGTRPDLTDQPIPDADYTWYTDGSSFLQEGQRRAGAAVTTETEVIWARALPAGTSAQRAELIALTQALKMAEGKKLNVYTDSRYAFATAHVHGEIYRRRGWLTSEGREIKNKNEILALLKALFLPKRLSIIHCPGHQKGNSAEARGNRMADQAAREAAMKAVLETSTLLAGKRTADGSEFEKRTADGSEFESPKKKAKVE

SEQ ID NO: 985 - protein, 2096 aa, synthetic construct
MPAAKRVKLDGGDKKYSIGLDIGTNSVGWAVITDEYKVPSKKFKVLGNTDRHSIKKNLIGALLFDSGETAEATRLKRTARRRYTRRKNRICYLQEIFSNEMAKVDDSFFHRLEESFLVEEDKKHERHPIFGNIVDEVAYHEKYPTIYHLRKKLVDSTDKADLRLIYLALAHMIKFRGHFLIEGDLNPDNSDVDKLFIQLVQTYNQLFEENPINASGVDAKAILSARLSKSRRLENLIAQLPGEKKNGLFGNLIALSLGLTPNFKSNFDLAEDAKLQLSKDTYDDDLDNLLAQIGDQYADLFLAAKNLSDAILLSDILRVNTEITKAPLSASMIKRYDEHHQDLTLLKALVRQQLPEKYKEIFFDQSKNGYAGYIDGGASQEEFYKFIKPILEKMDGTEELLVKLNREDLLRKQRTFDNGSIPHQIHLGELHAILRRQEDFYPFLKDNREKIEKILTFRIPYYVGPLARGNSRFAWMTRKSEETITPWNFEEVVDKGASAQSFIERMTNFDKNLPNEKVLPKHSLLYEYFTVYNELTKVKYVTEGMRKPAFLSGEQKKAIVDLLFKTNRKVTVKQLKEDYFKKIECFDSVEISGVEDRFNASLGTYHDLLKIIKDKDFLDNEENEDILEDIVLTLTLFEDREMIEERLKTYAHLFDDKVMKQLKRRRYTGWGRLSRKLINGIRDKQSGKTILDFLKSDGFANRNFMQLIHDDSLTFKEDIQKAQVSGQGDSLHEHIANLAGSPAIKKGILQTVKVVDELVKVMGRHKPENIVIEMARENQTTQKGQKNSRERMKRIEEGIKELGSQILKEHPVENTQLQNEKLYLYYLQNGRDMYVDQELDINRLSDYDVDHIVPQSFLKDDSIDNKVLTRSDKARGKSDNVPSEEVVKKMKNYWRQLLNAKLITQRKFDNLTKAERGGLSELDKAGFIKRQLVETRQITKHVAQILDSRMNTKYDENDKLIREVKVITLKSKLVSDFRKDFQFYKVREINNYHHAHDAYLNAVVGTALIKKYPKLESEFVYGDYKVYDVRKMIAKSEQEIGKATAKYFFYSNIMNFFKTEITLANGEIRKRPLIETNGETGEIVWDKGRDFATVRKVLSMPQVNIVKKTEVQTGGFSKESILPKRNSDKLIARKKDWDPKKYGGFDSPTVAYSVLVVAKVEKGKSKKLKSVKELLGITIMERSSFEKNPIDFLEAKGYKEVKKDLIIKLPKYSLFELENGRKRMLASAGELQKGNELALPSKYVNFLYLASHYEKLKGSPEDNEQKQLFVEQHKHYLDEIIEQISEFSKRVILADANLDKVLSAYNKHRDKPIREQAENIIHLFTLTNLGAPAAFKYFDTTIDRKRYTSTKEVLDATLIHQSITGLYETRIDLSQLGGDGGGGGEAAAKPAPGGTLNIEDEYRLHETSKEPDVPLGSTWLSDFPQAWAETGGMGLAVRQAPLIIPLKATSTPVSIKQYPMSQEARLGIKPHIQRLLDQGILVPCQSPWNTPLLPVKKPGTNDYRPVQDLREVNKRVEDIHPTVPNPYNLLSGLPPSHQWYTVLDLKDAFFCLRLHPTSQPLFAFEWRDPEMGISGQLTWTRLPQGFKNSPTLFNEALHRDLADFRIQHPDLILLQYVDDLLLAATSEQDCQRGTRALLQTLGNLGYRASAKKAQICQKQVKYLGYLLKEGQRWLTEARKETVMGQPTPKTPRQLREFLGTAGFCRLWIPGFAEMAAPLYPLTKPGTLFNWGPDQQKAYQEIKQALLTAPALGLPDLTKPFELFVDEKQGYAKGVLTQKLGPWRRPVAYLSKKLDPVAAGWPPCLRMVAAIAVLTKDAGKLTMGQPLVILAPHAVEALVKQPPDRWLSNARMTHYQAMLLDTDRVQFGPVVALNPATLLPLPEKEAPHDCLEILAETHGTRPDLTDQPIPDADYTWYTDGSSFLQEGQRRAGAAVTTETEVIWARALPAGTSAQRAELIALTQALKMAEGKKLNVYTDSRYAFATAHVHGEIYRRRGWLTSEGREIKNKNEILALLKALFLPKRLSIIHCPGHQKGNSAEARGNRMADQAAREAAMKAVLETSTLLAGKRTADGSEFEKRTADGSEFESPKKKAKVE

SEQ ID NO: 986 - protein, 2094 aa, synthetic construct
MPAAKRVKLDGGDKKYSIGLDIGTNSVGWAVITDEYKVPSKKFKVLGNTDRHSIKKNLIGALLFDSGETAEATRLKRTARRRYTRRKNRICYLQEIFSNEMAKVDDSFFHRLEESFLVEEDKKHERHPIFGNIVDEVAYHEKYPTIYHLRKKLVDSTDKADLRLIYLALAHMIKFRGHFLIEGDLNPDNSDVDKLFIQLVQTYNQLFEENPINASGVDAKAILSARLSKSRRLENLIAQLPGEKKNGLFGNLIALSLGLTPNFKSNFDLAEDAKLQLSKDTYDDDLDNLLAQIGDQYADLFLAAKNLSDAILLSDILRVNTEITKAPLSASMIKRYDEHHQDLTLLKALVRQQLPEKYKEIFFDQSKNGYAGYIDGGASQEEFYKFIKPILEKMDGTEELLVKLNREDLLRKQRTFDNGSIPHQIHLGELHAILRRQEDFYPFLKDNREKIEKILTFRIPYYVGPLARGNSRFAWMTRKSEETITPWNFEEVVDKGASAQSFIERMTNFDKNLPNEKVLPKHSLLYEYFTVYNELTKVKYVTEGMRKPAFLSGEQKKAIVDLLFKTNRKVTVKQLKEDYFKKIECFDSVEISGVEDRFNASLGTYHDLLKIIKDKDFLDNEENEDILEDIVLTLTLFEDREMIEERLKTYAHLFDDKVMKQLKRRRYTGWGRLSRKLINGIRDKQSGKTILDFLKSDGFANRNFMQLIHDDSLTFKEDIQKAQVSGQGDSLHEHIANLAGSPAIKKGILQTVKVVDELVKVMGRHKPENIVIEMARENQTTQKGQKNSRERMKRIEEGIKELGSQILKEHPVENTQLQNEKLYLYYLQNGRDMYVDQELDINRLSDYDVDHIVPQSFLKDDSIDNKVLTRSDKARGKSDNVPSEEVVKKMKNYWRQLLNAKLITQRKFDNLTKAERGGLSELDKAGFIKRQLVETRQITKHVAQILDSRMNTKYDENDKLIREVKVITLKSKLVSDFRKDFQFYKVREINNYHHAHDAYLNAVVGTALIKKYPKLESEFVYGDYKVYDVRKMIAKSEQEIGKATAKYFFYSNIMNFFKTEITLANGEIRKRPLIETNGETGEIVWDKGRDFATVRKVLSMPQVNIVKKTEVQTGGFSKESILPKRNSDKLIARKKDWDPKKYGGFDSPTVAYSVLVVAKVEKGKSKKLKSVKELLGITIMERSSFEKNPIDFLEAKGYKEVKKDLIIKLPKYSLFELENGRKRMLASAGELQKGNELALPSKYVNFLYLASHYEKLKGSPEDNEQKQLFVEQHKHYLDEIIEQISEFSKRVILADANLDKVLSAYNKHRDKPIREQAENIIHLFTLTNLGAPAAFKYFDTTIDRKRYTSTKEVLDATLIHQSITGLYETRIDLSQLGGDGGGGSPAPGSSGGTLNIEDEYRLHETSKEPDVPLGSTWLSDFPQAWAETGGMGLAVRQAPLIIPLKATSTPVSIKQYPMSQEARLGIKPHIQRLLDQGILVPCQSPWNTPLLPVKKPGTNDYRPVQDLREVNKRVEDIHPTVPNPYNLLSGLPPSHQWYTVLDLKDAFFCLRLHPTSQPLFAFEWRDPEMGISGQLTWTRLPQGFKNSPTLFNEALHRDLADFRIQHPDLILLQYVDDLLLAATSEQDCQRGTRALLQTLGNLGYRASAKKAQICQKQVKYLGYLLKEGQRWLTEARKETVMGQPTPKTPRQLREFLGTAGFCRLWIPGFAEMAAPLYPLTKPGTLFNWGPDQQKAYQEIKQALLTAPALGLPDLTKPFELFVDEKQGYAKGVLTQKLGPWRRPVAYLSKKLDPVAAGWPPCLRMVAAIAVLTKDAGKLTMGQPLVILAPHAVEALVKQPPDRWLSNARMTHYQAMLLDTDRVQFGPVVALNPATLLPLPEKEAPHDCLEILAETHGTRPDLTDQPIPDADYTWYTDGSSFLQEGQRRAGAAVTTETEVIWARALPAGTSAQRAELIALTQALKMAEGKKLNVYTDSRYAFATAHVHGEIYRRRGWLTSEGREIKNKNEILALLKALFLPKRLSIIHCPGHQKGNSAEARGNRMADQAAREAAMKAVLETSTLLAGKRTADGSEFEKRTADGSEFESPKKKAKVE

SEQ ID NO: 987 - protein, 2094 aa, synthetic construct
MPAAKRVKLDGGDKKYSIGLDIGTNSVGWAVITDEYKVPSKKFKVLGNTDRHSIKKNLIGALLFDSGETAEATRLKRTARRRYTRRKNRICYLQEIFSNEMAKVDDSFFHRLEESFLVEEDKKHERHPIFGNIVDEVAYHEKYPTIYHLRKKLVDSTDKADLRLIYLALAHMIKFRGHFLIEGDLNPDNSDVDKLFIQLVQTYNQLFEENPINASGVDAKAILSARLSKSRRLENLIAQLPGEKKNGLFGNLIALSLGLTPNFKSNFDLAEDAKLQLSKDTYDDDLDNLLAQIGDQYADLFLAAKNLSDAILLSDILRVNTEITKAPLSASMIKRYDEHHQDLTLLKALVRQQLPEKYKEIFFDQSKNGYAGYIDGGASQEEFYKFIKPILEKMDGTEELLVKLNREDLLRKQRTFDNGSIPHQIHLGELHAILRRQEDFYPFLKDNREKIEKILTFRIPYYVGPLARGNSRFAWMTRKSEETITPWNFEEVVDKGASAQSFIERMTNFDKNLPNEKVLPKHSLLYEYFTVYNELTKVKYVTEGMRKPAFLSGEQKKAIVDLLFKTNRKVTVKQLKEDYFKKIECFDSVEISGVEDRFNASLGTYHDLLKIIKDKDFLDNEENEDILEDIVLTLTLFEDREMIEERLKTYAHLFDDKVMKQLKRRRYTGWGRLSRKLINGIRDKQSGKTILDFLKSDGFANRNFMQLIHDDSLTFKEDIQKAQVSGQGDSLHEHIANLAGSPAIKKGILQTVKVVDELVKVMGRHKPENIVIEMARENQTTQKGQKNSRERMKRIEEGIKELGSQILKEHPVENTQLQNEKLYLYYLQNGRDMYVDQELDINRLSDYDVDHIVPQSFLKDDSIDNKVLTRSDKARGKSDNVPSEEVVKKMKNYWRQLLNAKLITQRKFDNLTKAERGGLSELDKAGFIKRQLVETRQITKHVAQILDSRMNTKYDENDKLIREVKVITLKSKLVSDFRKDFQFYKVREINNYHHAHDAYLNAVVGTALIKKYPKLESEFVYGDYKVYDVRKMIAKSEQEIGKATAKYFFYSNIMNFFKTEITLANGEIRKRPLIETNGETGEIVWDKGRDFATVRKVLSMPQVNIVKKTEVQTGGFSKESILPKRNSDKLIARKKDWDPKKYGGFDSPTVAYSVLVVAKVEKGKSKKLKSVKELLGITIMERSSFEKNPIDFLEAKGYKEVKKDLIIKLPKYSLFELENGRKRMLASAGELQKGNELALPSKYVNFLYLASHYEKLKGSPEDNEQKQLFVEQHKHYLDEIIEQISEFSKRVILADANLDKVLSAYNKHRDKPIREQAENIIHLFTLTNLGAPAAFKYFDTTIDRKRYTSTKEVLDATLIHQSITGLYETRIDLSQLGGDGGGSSPAPGGSGGTLNIEDEYRLHETSKEPDVPLGSTWLSDFPQAWAETGGMGLAVRQAPLIIPLKATSTPVSIKQYPMSQEARLGIKPHIQRLLDQGILVPCQSPWNTPLLPVKKPGTNDYRPVQDLREVNKRVEDIHPTVPNPYNLLSGLPPSHQWYTVLDLKDAFFCLRLHPTSQPLFAFEWRDPEMGISGQLTWTRLPQGFKNSPTLFNEALHRDLADFRIQHPDLILLQYVDDLLLAATSEQDCQRGTRALLQTLGNLGYRASAKKAQICQKQVKYLGYLLKEGQRWLTEARKETVMGQPTPKTPRQLREFLGTAGFCRLWIPGFAEMAAPLYPLTKPGTLFNWGPDQQKAYQEIKQALLTAPALGLPDLTKPFELFVDEKQGYAKGVLTQKLGPWRRPVAYLSKKLDPVAAGWPPCLRMVAAIAVLTKDAGKLTMGQPLVILAPHAVEALVKQPPDRWLSNARMTHYQAMLLDTDRVQFGPVVALNPATLLPLPEKEAPHDCLEILAETHGTRPDLTDQPIPDADYTWYTDGSSFLQEGQRRAGAAVTTETEVIWARALPAGTSAQRAELIALTQALKMAEGKKLNVYTDSRYAFATAHVHGEIYRRRGWLTSEGREIKNKNEILALLKALFLPKRLSIIHCPGHQKGNSAEARGNRMADQAAREAAMKAVLETSTLLAGKRTADGSEFEKRTADGSEFESPKKKAKVE

SEQ ID NO: 988 - protein, 2090 aa, synthetic construct
MPAAKRVKLDGGDKKYSIGLDIGTNSVGWAVITDEYKVPSKKFKVLGNTDRHSIKKNLIGALLFDSGETAEATRLKRTARRRYTRRKNRICYLQEIFSNEMAKVDDSFFHRLEESFLVEEDKKHERHPIFGNIVDEVAYHEKYPTIYHLRKKLVDSTDKADLRLIYLALAHMIKFRGHFLIEGDLNPDNSDVDKLFIQLVQTYNQLFEENPINASGVDAKAILSARLSKSRRLENLIAQLPGEKKNGLFGNLIALSLGLTPNFKSNFDLAEDAKLQLSKDTYDDDLDNLLAQIGDQYADLFLAAKNLSDAILLSDILRVNTEITKAPLSASMIKRYDEHHQDLTLLKALVRQQLPEKYKEIFFDQSKNGYAGYIDGGASQEEFYKFIKPILEKMDGTEELLVKLNREDLLRKQRTFDNGSIPHQIHLGELHAILRRQEDFYPFLKDNREKIEKILTFRIPYYVGPLARGNSRFAWMTRKSEETITPWNFEEVVDKGASAQSFIERMTNFDKNLPNEKVLPKHSLLYEYFTVYNELTKVKYVTEGMRKPAFLSGEQKKAIVDLLFKTNRKVTVKQLKEDYFKKIECFDSVEISGVEDRFNASLGTYHDLLKIIKDKDFLDNEENEDILEDIVLTLTLFEDREMIEERLKTYAHLFDDKVMKQLKRRRYTGWGRLSRKLINGIRDKQSGKTILDFLKSDGFANRNFMQLIHDDSLTFKEDIQKAQVSGQGDSLHEHIANLAGSPAIKKGILQTVKVVDELVKVMGRHKPENIVIEMARENQTTQKGQKNSRERMKRIEEGIKELGSQILKEHPVENTQLQNEKLYLYYLQNGRDMYVDQELDINRLSDYDVDHIVPQSFLKDDSIDNKVLTRSDKARGKSDNVPSEEVVKKMKNYWRQLLNAKLITQRKFDNLTKAERGGLSELDKAGFIKRQLVETRQITKHVAQILDSRMNTKYDENDKLIREVKVITLKSKLVSDFRKDFQFYKVREINNYHHAHDAYLNAVVGTALIKKYPKLESEFVYGDYKVYDVRKMIAKSEQEIGKATAKYFFYSNIMNFFKTEITLANGEIRKRPLIETNGETGEIVWDKGRDFATVRKVLSMPQVNIVKKTEVQTGGFSKESILPKRNSDKLIARKKDWDPKKYGGFDSPTVAYSVLVVAKVEKGKSKKLKSVKELLGITIMERSSFEKNPIDFLEAKGYKEVKKDLIIKLPKYSLFELENGRKRMLASAGELQKGNELALPSKYVNFLYLASHYEKLKGSPEDNEQKQLFVEQHKHYLDEIIEQISEFSKRVILADANLDKVLSAYNKHRDKPIREQAENIIHLFTLTNLGAPAAFKYFDTTIDRKRYTSTKEVLDATLIHQSITGLYETRIDLSQLGGDGGEAAAKGGTLNIEDEYRLHETSKEPDVPLGSTWLSDFPQAWAETGGMGLAVRQAPLIIPLKATSTPVSIKQYPMSQEARLGIKPHIQRLLDQGILVPCQSPWNTPLLPVKKPGTNDYRPVQDLREVNKRVEDIHPTVPNPYNLLSGLPPSHQWYTVLDLKDAFFCLRLHPTSQPLFAFEWRDPEMGISGQLTWTRLPQGFKNSPTLFNEALHRDLADFRIQHPDLILLQYVDDLLLAATSEQDCQRGTRALLQTLGNLGYRASAKKAQICQKQVKYLGYLLKEGQRWLTEARKETVMGQPTPKTPRQLREFLGTAGFCRLWIPGFAEMAAPLYPLTKPGTLFNWGPDQQKAYQEIKQALLTAPALGLPDLTKPFELFVDEKQGYAKGVLTQKLGPWRRPVAYLSKKLDPVAAGWPPCLRMVAAIAVLTKDAGKLTMGQPLVILAPHAVEALVKQPPDRWLSNARMTHYQAMLLDTDRVQFGPVVALNPATLLPLPEKEAPHDCLEILAETHGTRPDLTDQPIPDADYTWYTDGSSFLQEGQRRAGAAVTTETEVIWARALPAGTSAQRAELIALTQALKMAEGKKLNVYTDSRYAFATAHVHGEIYRRRGWLTSEGREIKNKNEILALLKALFLPKRLSIIHCPGHQKGNSAEARGNRMADQAAREAAMKAVLETSTLLAGKRTADGSEFEKRTADGSEFESPKKKAKVE

SEQ ID NO: 989 - protein, 2094 aa, synthetic construct
MPAAKRVKLDGGDKKYSIGLDIGTNSVGWAVITDEYKVPSKKFKVLGNTDRHSIKKNLIGALLFDSGETAEATRLKRTARRRYTRRKNRICYLQEIFSNEMAKVDDSFFHRLEESFLVEEDKKHERHPIFGNIVDEVAYHEKYPTIYHLRKKLVDSTDKADLRLIYLALAHMIKFRGHFLIEGDLNPDNSDVDKLFIQLVQTYNQLFEENPINASGVDAKAILSARLSKSRRLENLIAQLPGEKKNGLFGNLIALSLGLTPNFKSNFDLAEDAKLQLSKDTYDDDLDNLLAQIGDQYADLFLAAKNLSDAILLSDILRVNTEITKAPLSASMIKRYDEHHQDLTLLKALVRQQLPEKYKEIFFDQSKNGYAGYIDGGASQEEFYKFIKPILEKMDGTEELLVKLNREDLLRKQRTFDNGSIPHQIHLGELHAILRRQEDFYPFLKDNREKIEKILTFRIPYYVGPLARGNSRFAWMTRKSEETITPWNFEEVVDKGASAQSFIERMTNFDKNLPNEKVLPKHSLLYEYFTVYNELTKVKYVTEGMRKPAFLSGEQKKAIVDLLFKTNRKVTVKQLKEDYFKKIECFDSVEISGVEDRFNASLGTYHDLLKIIKDKDFLDNEENEDILEDIVLTLTLFEDREMIEERLKTYAHLFDDKVMKQLKRRRYTGWGRLSRKLINGIRDKQSGKTILDFLKSDGFANRNFMQLIHDDSLTFKEDIQKAQVSGQGDSLHEHIANLAGSPAIKKGILQTVKVVDELVKVMGRHKPENIVIEMARENQTTQKGQKNSRERMKRIEEGIKELGSQILKEHPVENTQLQNEKLYLYYLQNGRDMYVDQELDINRLSDYDVDHIVPQSFLKDDSIDNKVLTRSDKARGKSDNVPSEEVVKKMKNYWRQLLNAKLITQRKFDNLTKAERGGLSELDKAGFIKRQLVETRQITKHVAQILDSRMNTKYDENDKLIREVKVITLKSKLVSDFRKDFQFYKVREINNYHHAHDAYLNAVVGTALIKKYPKLESEFVYGDYKVYDVRKMIAKSEQEIGKATAKYFFYSNIMNFFKTEITLANGEIRKRPLIETNGETGEIVWDKGRDFATVRKVLSMPQVNIVKKTEVQTGGFSKESILPKRNSDKLIARKKDWDPKKYGGFDSPTVAYSVLVVAKVEKGKSKKLKSVKELLGITIMERSSFEKNPIDFLEAKGYKEVKKDLIIKLPKYSLFELENGRKRMLASAGELQKGNELALPSKYVNFLYLASHYEKLKGSPEDNEQKQLFVEQHKHYLDEIIEQISEFSKRVILADANLDKVLSAYNKHRDKPIREQAENIIHLFTLTNLGAPAAFKYFDTTIDRKRYTSTKEVLDATLIHQSITGLYETRIDLSQLGGDGGGGGGGSGSSGGTLNIEDEYRLHETSKEPDVPLGSTWLSDFPQAWAETGGMGLAVRQAPLIIPLKATSTPVSIKQYPMSQEARLGIKPHIQRLLDQGILVPCQSPWNTPLLPVKKPGTNDYRPVQDLREVNKRVEDIHPTVPNPYNLLSGLPPSHQWYTVLDLKDAFFCLRLHPTSQPLFAFEWRDPEMGISGQLTWTRLPQGFKNSPTLFNEALHRDLADFRIQHPDLILLQYVDDLLLAATSEQDCQRGTRALLQTLGNLGYRASAKKAQICQKQVKYLGYLLKEGQRWLTEARKETVMGQPTPKTPRQLREFLGTAGFCRLWIPGFAEMAAPLYPLTKPGTLFNWGPDQQKAYQEIKQALLTAPALGLPDLTKPFELFVDEKQGYAKGVLTQKLGPWRRPVAYLSKKLDPVAAGWPPCLRMVAAIAVLTKDAGKLTMGQPLVILAPHAVEALVKQPPDRWLSNARMTHYQAMLLDTDRVQFGPVVALNPATLLPLPEKEAPHDCLEILAETHGTRPDLTDQPIPDADYTWYTDGSSFLQEGQRRAGAAVTTETEVIWARALPAGTSAQRAELIALTQALKMAEGKKLNVYTDSRYAFATAHVHGEIYRRRGWLTSEGREIKNKNEILALLKALFLPKRLSIIHCPGHQKGNSAEARGNRMADQAAREAAMKAVLETSTLLAGKRTADGSEFEKRTADGSEFESPKKKAKVE

SEQ ID NO: 990 - protein, 2091 aa, synthetic construct
MPAAKRVKLDGGDKKYSIGLDIGTNSVGWAVITDEYKVPSKKFKVLGNTDRHSIKKNLIGALLFDSGETAEATRLKRTARRRYTRRKNRICYLQEIFSNEMAKVDDSFFHRLEESFLVEEDKKHERHPIFGNIVDEVAYHEKYPTIYHLRKKLVDSTDKADLRLIYLALAHMIKFRGHFLIEGDLNPDNSDVDKLFIQLVQTYNQLFEENPINASGVDAKAILSARLSKSRRLENLIAQLPGEKKNGLFGNLIALSLGLTPNFKSNFDLAEDAKLQLSKDTYDDDLDNLLAQIGDQYADLFLAAKNLSDAILLSDILRVNTEITKAPLSASMIKRYDEHHQDLTLLKALVRQQLPEKYKEIFFDQSKNGYAGYIDGGASQEEFYKFIKPILEKMDGTEELLVKLNREDLLRKQRTFDNGSIPHQIHLGELHAILRRQEDFYPFLKDNREKIEKILTFRIPYYVGPLARGNSRFAWMTRKSEETITPWNFEEVVDKGASAQSFIERMTNFDKNLPNEKVLPKHSLLYEYFTVYNELTKVKYVTEGMRKPAFLSGEQKKAIVDLLFKTNRKVTVKQLKEDYFKKIECFDSVEISGVEDRFNASLGTYHDLLKIIKDKDFLDNEENEDILEDIVLTLTLFEDREMIEERLKTYAHLFDDKVMKQLKRRRYTGWGRLSRKLINGIRDKQSGKTILDFLKSDGFANRNFMQLIHDDSLTFKEDIQKAQVSGQGDSLHEHIANLAGSPAIKKGILQTVKVVDELVKVMGRHKPENIVIEMARENQTTQKGQKNSRERMKRIEEGIKELGSQILKEHPVENTQLQNEKLYLYYLQNGRDMYVDQELDINRLSDYDVDHIVPQSFLKDDSIDNKVLTRSDKARGKSDNVPSEEVVKKMKNYWRQLLNAKLITQRKFDNLTKAERGGLSELDKAGFIKRQLVETRQITKHVAQILDSRMNTKYDENDKLIREVKVITLKSKLVSDFRKDFQFYKVREINNYHHAHDAYLNAVVGTALIKKYPKLESEFVYGDYKVYDVRKMIAKSEQEIGKATAKYFFYSNIMNFFKTEITLANGEIRKRPLIETNGETGEIVWDKGRDFATVRKVLSMPQVNIVKKTEVQTGGFSKESILPKRNSDKLIARKKDWDPKKYGGFDSPTVAYSVLVVAKVEKGKSKKLKSVKELLGITIMERSSFEKNPIDFLEAKGYKEVKKDLIIKLPKYSLFELENGRKRMLASAGELQKGNELALPSKYVNFLYLASHYEKLKGSPEDNEQKQLFVEQHKHYLDEIIEQISEFSKRVILADANLDKVLSAYNKHRDKPIREQAENIIHLFTLTNLGAPAAFKYFDTTIDRKRYTSTKEVLDATLIHQSITGLYETRIDLSQLGGDGGPAPGSSGGTLNIEDEYRLHETSKEPDVPLGSTWLSDFPQAWAETGGMGLAVRQAPLIIPLKATSTPVSIKQYPMSQEARLGIKPHIQRLLDQGILVPCQSPWNTPLLPVKKPGTNDYRPVQDLREVNKRVEDIHPTVPNPYNLLSGLPPSHQWYTVLDLKDAFFCLRLHPTSQPLFAFEWRDPEMGISGQLTWTRLPQGFKNSPTLFNEALHRDLADFRIQHPDLILLQYVDDLLLAATSEQDCQRGTRALLQTLGNLGYRASAKKAQICQKQVKYLGYLLKEGQRWLTEARKETVMGQPTPKTPRQLREFLGTAGFCRLWIPGFAEMAAPLYPLTKPGTLFNWGPDQQKAYQEIKQALLTAPALGLPDLTKPFELFVDEKQGYAKGVLTQKLGPWRRPVAYLSKKLDPVAAGWPPCLRMVAAIAVLTKDAGKLTMGQPLVILAPHAVEALVKQPPDRWLSNARMTHYQAMLLDTDRVQFGPVVALNPATLLPLPEKEAPHDCLEILAETHGTRPDLTDQPIPDADYTWYTDGSSFLQEGQRRAGAAVTTETEVIWARALPAGTSAQRAELIALTQALKMAEGKKLNVYTDSRYAFATAHVHGEIYRRRGWLTSEGREIKNKNEILALLKALFLPKRLSIIHCPGHQKGNSAEARGNRMADQAAREAAMKAVLETSTLLAGKRTADGSEFEKRTADGSEFESPKKKAKVE

SEQ ID NO: 991 - protein, 2095 aa, synthetic construct
MPAAKRVKLDGGDKKYSIGLDIGTNSVGWAVITDEYKVPSKKFKVLGNTDRHSIKKNLIGALLFDSGETAEATRLKRTARRRYTRRKNRICYLQEIFSNEMAKVDDSFFHRLEESFLVEEDKKHERHPIFGNIVDEVAYHEKYPTIYHLRKKLVDSTDKADLRLIYLALAHMIKFRGHFLIEGDLNPDNSDVDKLFIQLVQTYNQLFEENPINASGVDAKAILSARLSKSRRLENLIAQLPGEKKNGLFGNLIALSLGLTPNFKSNFDLAEDAKLQLSKDTYDDDLDNLLAQIGDQYADLFLAAKNLSDAILLSDILRVNTEITKAPLSASMIKRYDEHHQDLTLLKALVRQQLPEKYKEIFFDQSKNGYAGYIDGGASQEEFYKFIKPILEKMDGTEELLVKLNREDLLRKQRTFDNGSIPHQIHLGELHAILRRQEDFYPFLKDNREKIEKILTFRIPYYVGPLARGNSRFAWMTRKSEETITPWNFEEVVDKGASAQSFIERMTNFDKNLPNEKVLPKHSLLYEYFTVYNELTKVKYVTEGMRKPAFLSGEQKKAIVDLLFKTNRKVTVKQLKEDYFKKIECFDSVEISGVEDRFNASLGTYHDLLKIIKDKDFLDNEENEDILEDIVLTLTLFEDREMIEERLKTYAHLFDDKVMKQLKRRRYTGWGRLSRKLINGIRDKQSGKTILDFLKSDGFANRNFMQLIHDDSLTFKEDIQKAQVSGQGDSLHEHIANLAGSPAIKKGILQTVKVVDELVKVMGRHKPENIVIEMARENQTTQKGQKNSRERMKRIEEGIKELGSQILKEHPVENTQLQNEKLYLYYLQNGRDMYVDQELDINRLSDYDVDHIVPQSFLKDDSIDNKVLTRSDKARGKSDNVPSEEVVKKMKNYWRQLLNAKLITQRKFDNLTKAERGGLSELDKAGFIKRQLVETRQITKHVAQILDSRMNTKYDENDKLIREVKVITLKSKLVSDFRKDFQFYKVREINNYHHAHDAYLNAVVGTALIKKYPKLESEFVYGDYKVYDVRKMIAKSEQEIGKATAKYFFYSNIMNFFKTEITLANGEIRKRPLIETNGETGEIVWDKGRDFATVRKVLSMPQVNIVKKTEVQTGGFSKESILPKRNSDKLIARKKDWDPKKYGGFDSPTVAYSVLVVAKVEKGKSKKLKSVKELLGITIMERSSFEKNPIDFLEAKGYKEVKKDLIIKLPKYSLFELENGRKRMLASAGELQKGNELALPSKYVNFLYLASHYEKLKGSPEDNEQKQLFVEQHKHYLDEIIEQISEFSKRVILADANLDKVLSAYNKHRDKPIREQAENIIHLFTLTNLGAPAAFKYFDTTIDRKRYTSTKEVLDATLIHQSITGLYETRIDLSQLGGDGGEAAAKEAAAKGGTLNIEDEYRLHETSKEPDVPLGSTWLSDFPQAWAETGGMGLAVRQAPLIIPLKATSTPVSIKQYPMSQEARLGIKPHIQRLLDQGILVPCQSPWNTPLLPVKKPGTNDYRPVQDLREVNKRVEDIHPTVPNPYNLLSGLPPSHQWYTVLDLKDAFFCLRLHPTSQPLFAFEWRDPEMGISGQLTWTRLPQGFKNSPTLFNEALHRDLADFRIQHPDLILLQYVDDLLLAATSEQDCQRGTRALLQTLGNLGYRASAKKAQICQKQVKYLGYLLKEGQRWLTEARKETVMGQPTPKTPRQLREFLGTAGFCRLWIPGFAEMAAPLYPLTKPGTLFNWGPDQQKAYQEIKQALLTAPALGLPDLTKPFELFVDEKQGYAKGVLTQKLGPWRRPVAYLSKKLDPVAAGWPPCLRMVAAIAVLTKDAGKLTMGQPLVILAPHAVEALVKQPPDRWLSNARMTHYQAMLLDTDRVQFGPVVALNPATLLPLPEKEAPHDCLEILAETHGTRPDLTDQPIPDADYTWYTDGSSFLQEGQRRAGAAVTTETEVIWARALPAGTSAQRAELIALTQALKMAEGKKLNVYTDSRYAFATAHVHGEIYRRRGWLTSEGREIKNKNEILALLKALFLPKRLSIIHCPGHQKGNSAEARGNRMADQAAREAAMKAVLETSTLLAGKRTADGSEFEKRTADGSEFESPKKKAKVE

SEQ ID NO: 992 - protein, 2091 aa, synthetic construct
MPAAKRVKLDGGDKKYSIGLDIGTNSVGWAVITDEYKVPSKKFKVLGNTDRHSIKKNLIGALLFDSGETAEATRLKRTARRRYTRRKNRICYLQEIFSNEMAKVDDSFFHRLEESFLVEEDKKHERHPIFGNIVDEVAYHEKYPTIYHLRKKLVDSTDKADLRLIYLALAHMIKFRGHFLIEGDLNPDNSDVDKLFIQLVQTYNQLFEENPINASGVDAKAILSARLSKSRRLENLIAQLPGEKKNGLFGNLIALSLGLTPNFKSNFDLAEDAKLQLSKDTYDDDLDNLLAQIGDQYADLFLAAKNLSDAILLSDILRVNTEITKAPLSASMIKRYDEHHQDLTLLKALVRQQLPEKYKEIFFDQSKNGYAGYIDGGASQEEFYKFIKPILEKMDGTEELLVKLNREDLLRKQRTFDNGSIPHQIHLGELHAILRRQEDFYPFLKDNREKIEKILTFRIPYYVGPLARGNSRFAWMTRKSEETITPWNFEEVVDKGASAQSFIERMTNFDKNLPNEKVLPKHSLLYEYFTVYNELTKVKYVTEGMRKPAFLSGEQKKAIVDLLFKTNRKVTVKQLKEDYFKKIECFDSVEISGVEDRFNASLGTYHDLLKIIKDKDFLDNEENEDILEDIVLTLTLFEDREMIEERLKTYAHLFDDKVMKQLKRRRYTGWGRLSRKLINGIRDKQSGKTILDFLKSDGFANRNFMQLIHDDSLTFKEDIQKAQVSGQGDSLHEHIANLAGSPAIKKGILQTVKVVDELVKVMGRHKPENIVIEMARENQTTQKGQKNSRERMKRIEEGIKELGSQILKEHPVENTQLQNEKLYLYYLQNGRDMYVDQELDINRLSDYDVDHIVPQSFLKDDSIDNKVLTRSDKARGKSDNVPSEEVVKKMKNYWRQLLNAKLITQRKFDNLTKAERGGLSELDKAGFIKRQLVETRQITKHVAQILDSRMNTKYDENDKLIREVKVITLKSKLVSDFRKDFQFYKVREINNYHHAHDAYLNAVVGTALIKKYPKLESEFVYGDYKVYDVRKMIAKSEQEIGKATAKYFFYSNIMNFFKTEITLANGEIRKRPLIETNGETGEIVWDKGRDFATVRKVLSMPQVNIVKKTEVQTGGFSKESILPKRNSDKLIARKKDWDPKKYGGFDSPTVAYSVLVVAKVEKGKSKKLKSVKELLGITIMERSSFEKNPIDFLEAKGYKEVKKDLIIKLPKYSLFELENGRKRMLASAGELQKGNELALPSKYVNFLYLASHYEKLKGSPEDNEQKQLFVEQHKHYLDEIIEQISEFSKRVILADANLDKVLSAYNKHRDKPIREQAENIIHLFTLTNLGAPAAFKYFDTTIDRKRYTSTKEVLDATLIHQSITGLYETRIDLSQLGGDGGGSSGGGGGTLNIEDEYRLHETSKEPDVPLGSTWLSDFPQAWAETGGMGLAVRQAPLIIPLKATSTPVSIKQYPMSQEARLGIKPHIQRLLDQGILVPCQSPWNTPLLPVKKPGTNDYRPVQDLREVNKRVEDIHPTVPNPYNLLSGLPPSHQWYTVLDLKDAFFCLRLHPTSQPLFAFEWRDPEMGISGQLTWTRLPQGFKNSPTLFNEALHRDLADFRIQHPDLILLQYVDDLLLAATSEQDCQRGTRALLQTLGNLGYRASAKKAQICQKQVKYLGYLLKEGQRWLTEARKETVMGQPTPKTPRQLREFLGTAGFCRLWIPGFAEMAAPLYPLTKPGTLFNWGPDQQKAYQEIKQALLTAPALGLPDLTKPFELFVDEKQGYAKGVLTQKLGPWRRPVAYLSKKLDPVAAGWPPCLRMVAAIAVLTKDAGKLTMGQPLVILAPHAVEALVKQPPDRWLSNARMTHYQAMLLDTDRVQFGPVVALNPATLLPLPEKEAPHDCLEILAETHGTRPDLTDQPIPDADYTWYTDGSSFLQEGQRRAGAAVTTETEVIWARALPAGTSAQRAELIALTQALKMAEGKKLNVYTDSRYAFATAHVHGEIYRRRGWLTSEGREIKNKNEILALLKALFLPKRLSIIHCPGHQKGNSAEARGNRMADQAAREAAMKAVLETSTLLAGKRTADGSEFEKRTADGSEFESPKKKAKVE

SEQ ID NO: 993 - protein, 2093 aa, synthetic construct
MPAAKRVKLDGGDKKYSIGLDIGTNSVGWAVITDEYKVPSKKFKVLGNTDRHSIKKNLIGALLFDSGETAEATRLKRTARRRYTRRKNRICYLQEIFSNEMAKVDDSFFHRLEESFLVEEDKKHERHPIFGNIVDEVAYHEKYPTIYHLRKKLVDSTDKADLRLIYLALAHMIKFRGHFLIEGDLNPDNSDVDKLFIQLVQTYNQLFEENPINASGVDAKAILSARLSKSRRLENLIAQLPGEKKNGLFGNLIALSLGLTPNFKSNFDLAEDAKLQLSKDTYDDDLDNLLAQIGDQYADLFLAAKNLSDAILLSDILRVNTEITKAPLSASMIKRYDEHHQDLTLLKALVRQQLPEKYKEIFFDQSKNGYAGYIDGGASQEEFYKFIKPILEKMDGTEELLVKLNREDLLRKQRTFDNGSIPHQIHLGELHAILRRQEDFYPFLKDNREKIEKILTFRIPYYVGPLARGNSRFAWMTRKSEETITPWNFEEVVDKGASAQSFIERMTNFDKNLPNEKVLPKHSLLYEYFTVYNELTKVKYVTEGMRKPAFLSGEQKKAIVDLLFKTNRKVTVKQLKEDYFKKIECFDSVEISGVEDRFNASLGTYHDLLKIIKDKDFLDNEENEDILEDIVLTLTLFEDREMIEERLKTYAHLFDDKVMKQLKRRRYTGWGRLSRKLINGIRDKQSGKTILDFLKSDGFANRNFMQLIHDDSLTFKEDIQKAQVSGQGDSLHEHIANLAGSPAIKKGILQTVKVVDELVKVMGRHKPENIVIEMARENQTTQKGQKNSRERMKRIEEGIKELGSQILKEHPVENTQLQNEKLYLYYLQNGRDMYVDQELDINRLSDYDVDHIVPQSFLKDDSIDNKVLTRSDKARGKSDNVPSEEVVKKMKNYWRQLLNAKLITQRKFDNLTKAERGGLSELDKAGFIKRQLVETRQITKHVAQILDSRMNTKYDENDKLIREVKVITLKSKLVSDFRKDFQFYKVREINNYHHAHDAYLNAVVGTALIKKYPKLESEFVYGDYKVYDVRKMIAKSEQEIGKATAKYFFYSNIMNFFKTEITLANGEIRKRPLIETNGETGEIVWDKGRDFATVRKVLSMPQVNIVKKTEVQTGGFSKESILPKRNSDKLIARKKDWDPKKYGGFDSPTVAYSVLVVAKVEKGKSKKLKSVKELLGITIMERSSFEKNPIDFLEAKGYKEVKKDLIIKLPKYSLFELENGRKRMLASAGELQKGNELALPSKYVNFLYLASHYEKLKGSPEDNEQKQLFVEQHKHYLDEIIEQISEFSKRVILADANLDKVLSAYNKHRDKPIREQAENIIHLFTLTNLGAPAAFKYFDTTIDRKRYTSTKEVLDATLIHQSITGLYETRIDLSQLGGDGGGGSEAAAKGGTLNIEDEYRLHETSKEPDVPLGSTWLSDFPQAWAETGGMGLAVRQAPLIIPLKATSTPVSIKQYPMSQEARLGIKPHIQRLLDQGILVPCQSPWNTPLLPVKKPGTNDYRPVQDLREVNKRVEDIHPTVPNPYNLLSGLPPSHQWYTVLDLKDAFFCLRLHPTSQPLFAFEWRDPEMGISGQLTWTRLPQGFKNSPTLFNEALHRDLADFRIQHPDLILLQYVDDLLLAATSEQDCQRGTRALLQTLGNLGYRASAKKAQICQKQVKYLGYLLKEGQRWLTEARKETVMGQPTPKTPRQLREFLGTAGFCRLWIPGFAEMAAPLYPLTKPGTLFNWGPDQQKAYQEIKQALLTAPALGLPDLTKPFELFVDEKQGYAKGVLTQKLGPWRRPVAYLSKKLDPVAAGWPPCLRMVAAIAVLTKDAGKLTMGQPLVILAPHAVEALVKQPPDRWLSNARMTHYQAMLLDTDRVQFGPVVALNPATLLPLPEKEAPHDCLEILAETHGTRPDLTDQPIPDADYTWYTDGSSFLQEGQRRAGAAVTTETEVIWARALPAGTSAQRAELIALTQALKMAEGKKLNVYTDSRYAFATAHVHGEIYRRRGWLTSEGREIKNKNEILALLKALFLPKRLSIIHCPGHQKGNSAEARGNRMADQAAREAAMKAVLETSTLLAGKRTADGSEFEKRTADGSEFESPKKKAKVE

SEQ ID NO: 994 - protein, 2100 aa, synthetic construct
MPAAKRVKLDGGDKKYSIGLDIGTNSVGWAVITDEYKVPSKKFKVLGNTDRHSIKKNLIGALLFDSGETAEATRLKRTARRRYTRRKNRICYLQEIFSNEMAKVDDSFFHRLEESFLVEEDKKHERHPIFGNIVDEVAYHEKYPTIYHLRKKLVDSTDKADLRLIYLALAHMIKFRGHFLIEGDLNPDNSDVDKLFIQLVQTYNQLFEENPINASGVDAKAILSARLSKSRRLENLIAQLPGEKKNGLFGNLIALSLGLTPNFKSNFDLAEDAKLQLSKDTYDDDLDNLLAQIGDQYADLFLAAKNLSDAILLSDILRVNTEITKAPLSASMIKRYDEHHQDLTLLKALVRQQLPEKYKEIFFDQSKNGYAGYIDGGASQEEFYKFIKPILEKMDGTEELLVKLNREDLLRKQRTFDNGSIPHQIHLGELHAILRRQEDFYPFLKDNREKIEKILTFRIPYYVGPLARGNSRFAWMTRKSEETITPWNFEEVVDKGASAQSFIERMTNFDKNLPNEKVLPKHSLLYEYFTVYNELTKVKYVTEGMRKPAFLSGEQKKAIVDLLFKTNRKVTVKQLKEDYFKKIECFDSVEISGVEDRFNASLGTYHDLLKIIKDKDFLDNEENEDILEDIVLTLTLFEDREMIEERLKTYAHLFDDKVMKQLKRRRYTGWGRLSRKLINGIRDKQSGKTILDFLKSDGFANRNFMQLIHDDSLTFKEDIQKAQVSGQGDSLHEHIANLAGSPAIKKGILQTVKVVDELVKVMGRHKPENIVIEMARENQTTQKGQKNSRERMKRIEEGIKELGSQILKEHPVENTQLQNEKLYLYYLQNGRDMYVDQELDINRLSDYDVDHIVPQSFLKDDSIDNKVLTRSDKARGKSDNVPSEEVVKKMKNYWRQLLNAKLITQRKFDNLTKAERGGLSELDKAGFIKRQLVETRQITKHVAQILDSRMNTKYDENDKLIREVKVITLKSKLVSDFRKDFQFYKVREINNYHHAHDAYLNAVVGTALIKKYPKLESEFVYGDYKVYDVRKMIAKSEQEIGKATAKYFFYSNIMNFFKTEITLANGEIRKRPLIETNGETGEIVWDKGRDFATVRKVLSMPQVNIVKKTEVQTGGFSKESILPKRNSDKLIARKKDWDPKKYGGFDSPTVAYSVLVVAKVEKGKSKKLKSVKELLGITIMERSSFEKNPIDFLEAKGYKEVKKDLIIKLPKYSLFELENGRKRMLASAGELQKGNELALPSKYVNFLYLASHYEKLKGSPEDNEQKQLFVEQHKHYLDEIIEQISEFSKRVILADANLDKVLSAYNKHRDKPIREQAENIIHLFTLTNLGAPAAFKYFDTTIDRKRYTSTKEVLDATLIHQSITGLYETRIDLSQLGGDGGGGSGGSGGSGGSGGSGGTLNIEDEYRLHETSKEPDVPLGSTWLSDFPQAWAETGGMGLAVRQAPLIIPLKATSTPVSIKQYPMSQEARLGIKPHIQRLLDQGILVPCQSPWNTPLLPVKKPGTNDYRPVQDLREVNKRVEDIHPTVPNPYNLLSGLPPSHQWYTVLDLKDAFFCLRLHPTSQPLFAFEWRDPEMGISGQLTWTRLPQGFKNSPTLFNEALHRDLADFRIQHPDLILLQYVDDLLLAATSEQDCQRGTRALLQTLGNLGYRASAKKAQICQKQVKYLGYLLKEGQRWLTEARKETVMGQPTPKTPRQLREFLGTAGFCRLWIPGFAEMAAPLYPLTKPGTLFNWGPDQQKAYQEIKQALLTAPALGLPDLTKPFELFVDEKQGYAKGVLTQKLGPWRRPVAYLSKKLDPVAAGWPPCLRMVAAIAVLTKDAGKLTMGQPLVILAPHAVEALVKQPPDRWLSNARMTHYQAMLLDTDRVQFGPVVALNPATLLPLPEKEAPHDCLEILAETHGTRPDLTDQPIPDADYTWYTDGSSFLQEGQRRAGAAVTTETEVIWARALPAGTSAQRAELIALTQALKMAEGKKLNVYTDSRYAFATAHVHGEIYRRRGWLTSEGREIKNKNEILALLKALFLPKRLSIIHCPGHQKGNSAEARGNRMADQAAREAAMKAVLETSTLLAGKRTADGSEFEKRTADGSEFESPKKKAKVE

SEQ ID NO: 995 - protein, 2094 aa, synthetic construct
MPAAKRVKLDGGDKKYSIGLDIGTNSVGWAVITDEYKVPSKKFKVLGNTDRHSIKKNLIGALLFDSGETAEATRLKRTARRRYTRRKNRICYLQEIFSNEMAKVDDSFFHRLEESFLVEEDKKHERHPIFGNIVDEVAYHEKYPTIYHLRKKLVDSTDKADLRLIYLALAHMIKFRGHFLIEGDLNPDNSDVDKLFIQLVQTYNQLFEENPINASGVDAKAILSARLSKSRRLENLIAQLPGEKKNGLFGNLIALSLGLTPNFKSNFDLAEDAKLQLSKDTYDDDLDNLLAQIGDQYADLFLAAKNLSDAILLSDILRVNTEITKAPLSASMIKRYDEHHQDLTLLKALVRQQLPEKYKEIFFDQSKNGYAGYIDGGASQEEFYKFIKPILEKMDGTEELLVKLNREDLLRKQRTFDNGSIPHQIHLGELHAILRRQEDFYPFLKDNREKIEKILTFRIPYYVGPLARGNSRFAWMTRKSEETITPWNFEEVVDKGASAQSFIERMTNFDKNLPNEKVLPKHSLLYEYFTVYNELTKVKYVTEGMRKPAFLSGEQKKAIVDLLFKTNRKVTVKQLKEDYFKKIECFDSVEISGVEDRFNASLGTYHDLLKIIKDKDFLDNEENEDILEDIVLTLTLFEDREMIEERLKTYAHLFDDKVMKQLKRRRYTGWGRLSRKLINGIRDKQSGKTILDFLKSDGFANRNFMQLIHDDSLTFKEDIQKAQVSGQGDSLHEHIANLAGSPAIKKGILQTVKVVDELVKVMGRHKPENIVIEMARENQTTQKGQKNSRERMKRIEEGIKELGSQILKEHPVENTQLQNEKLYLYYLQNGRDMYVDQELDINRLSDYDVDHIVPQSFLKDDSIDNKVLTRSDKARGKSDNVPSEEVVKKMKNYWRQLLNAKLITQRKFDNLTKAERGGLSELDKAGFIKRQLVETRQITKHVAQILDSRMNTKYDENDKLIREVKVITLKSKLVSDFRKDFQFYKVREINNYHHAHDAYLNAVVGTALIKKYPKLESEFVYGDYKVYDVRKMIAKSEQEIGKATAKYFFYSNIMNFFKTEITLANGEIRKRPLIETNGETGEIVWDKGRDFATVRKVLSMPQVNIVKKTEVQTGGFSKESILPKRNSDKLIARKKDWDPKKYGGFDSPTVAYSVLVVAKVEKGKSKKLKSVKELLGITIMERSSFEKNPIDFLEAKGYKEVKKDLIIKLPKYSLFELENGRKRMLASAGELQKGNELALPSKYVNFLYLASHYEKLKGSPEDNEQKQLFVEQHKHYLDEIIEQISEFSKRVILADANLDKVLSAYNKHRDKPIREQAENIIHLFTLTNLGAPAAFKYFDTTIDRKRYTSTKEVLDATLIHQSITGLYETRIDLSQLGGDGGGGSGSSGGGGGTLNIEDEYRLHETSKEPDVPLGSTWLSDFPQAWAETGGMGLAVRQAPLIIPLKATSTPVSIKQYPMSQEARLGIKPHIQRLLDQGILVPCQSPWNTPLLPVKKPGTNDYRPVQDLREVNKRVEDIHPTVPNPYNLLSGLPPSHQWYTVLDLKDAFFCLRLHPTSQPLFAFEWRDPEMGISGQLTWTRLPQGFKNSPTLFNEALHRDLADFRIQHPDLILLQYVDDLLLAATSEQDCQRGTRALLQTLGNLGYRASAKKAQICQKQVKYLGYLLKEGQRWLTEARKETVMGQPTPKTPRQLREFLGTAGFCRLWIPGFAEMAAPLYPLTKPGTLFNWGPDQQKAYQEIKQALLTAPALGLPDLTKPFELFVDEKQGYAKGVLTQKLGPWRRPVAYLSKKLDPVAAGWPPCLRMVAAIAVLTKDAGKLTMGQPLVILAPHAVEALVKQPPDRWLSNARMTHYQAMLLDTDRVQFGPVVALNPATLLPLPEKEAPHDCLEILAETHGTRPDLTDQPIPDADYTWYTDGSSFLQEGQRRAGAAVTTETEVIWARALPAGTSAQRAELIALTQALKMAEGKKLNVYTDSRYAFATAHVHGEIYRRRGWLTSEGREIKNKNEILALLKALFLPKRLSIIHCPGHQKGNSAEARGNRMADQAAREAAMKAVLETSTLLAGKRTADGSEFEKRTADGSEFESPKKKAKVE

SEQ ID NO: 996 - protein, 2100 aa, synthetic construct
MPAAKRVKLDGGDKKYSIGLDIGTNSVGWAVITDEYKVPSKKFKVLGNTDRHSIKKNLIGALLFDSGETAEATRLKRTARRRYTRRKNRICYLQEIFSNEMAKVDDSFFHRLEESFLVEEDKKHERHPIFGNIVDEVAYHEKYPTIYHLRKKLVDSTDKADLRLIYLALAHMIKFRGHFLIEGDLNPDNSDVDKLFIQLVQTYNQLFEENPINASGVDAKAILSARLSKSRRLENLIAQLPGEKKNGLFGNLIALSLGLTPNFKSNFDLAEDAKLQLSKDTYDDDLDNLLAQIGDQYADLFLAAKNLSDAILLSDILRVNTEITKAPLSASMIKRYDEHHQDLTLLKALVRQQLPEKYKEIFFDQSKNGYAGYIDGGASQEEFYKFIKPILEKMDGTEELLVKLNREDLLRKQRTFDNGSIPHQIHLGELHAILRRQEDFYPFLKDNREKIEKILTFRIPYYVGPLARGNSRFAWMTRKSEETITPWNFEEVVDKGASAQSFIERMTNFDKNLPNEKVLPKHSLLYEYFTVYNELTKVKYVTEGMRKPAFLSGEQKKAIVDLLFKTNRKVTVKQLKEDYFKKIECFDSVEISGVEDRFNASLGTYHDLLKIIKDKDFLDNEENEDILEDIVLTLTLFEDREMIEERLKTYAHLFDDKVMKQLKRRRYTGWGRLSRKLINGIRDKQSGKTILDFLKSDGFANRNFMQLIHDDSLTFKEDIQKAQVSGQGDSLHEHIANLAGSPAIKKGILQTVKVVDELVKVMGRHKPENIVIEMARENQTTQKGQKNSRERMKRIEEGIKELGSQILKEHPVENTQLQNEKLYLYYLQNGRDMYVDQELDINRLSDYDVDHIVPQSFLKDDSIDNKVLTRSDKARGKSDNVPSEEVVKKMKNYWRQLLNAKLITQRKFDNLTKAERGGLSELDKAGFIKRQLVETRQITKHVAQILDSRMNTKYDENDKLIREVKVITLKSKLVSDFRKDFQFYKVREINNYHHAHDAYLNAVVGTALIKKYPKLESEFVYGDYKVYDVRKMIAKSEQEIGKATAKYFFYSNIMNFFKTEITLANGEIRKRPLIETNGETGEIVWDKGRDFATVRKVLSMPQVNIVKKTEVQTGGFSKESILPKRNSDKLIARKKDWDPKKYGGFDSPTVAYSVLVVAKVEKGKSKKLKSVKELLGITIMERSSFEKNPIDFLEAKGYKEVKKDLIIKLPKYSLFELENGRKRMLASAGELQKGNELALPSKYVNFLYLASHYEKLKGSPEDNEQKQLFVEQHKHYLDEIIEQISEFSKRVILADANLDKVLSAYNKHRDKPIREQAENIIHLFTLTNLGAPAAFKYFDTTIDRKRYTSTKEVLDATLIHQSITGLYETRIDLSQLGGDGGEAAAKEAAAKEAAAKGGTLNIEDEYRLHETSKEPDVPLGSTWLSDFPQAWAETGGMGLAVRQAPLIIPLKATSTPVSIKQYPMSQEARLGIKPHIQRLLDQGILVPCQSPWNTPLLPVKKPGTNDYRPVQDLREVNKRVEDIHPTVPNPYNLLSGLPPSHQWYTVLDLKDAFFCLRLHPTSQPLFAFEWRDPEMGISGQLTWTRLPQGFKNSPTLFNEALHRDLADFRIQHPDLILLQYVDDLLLAATSEQDCQRGTRALLQTLGNLGYRASAKKAQICQKQVKYLGYLLKEGQRWLTEARKETVMGQPTPKTPRQLREFLGTAGFCRLWIPGFAEMAAPLYPLTKPGTLFNWGPDQQKAYQEIKQALLTAPALGLPDLTKPFELFVDEKQGYAKGVLTQKLGPWRRPVAYLSKKLDPVAAGWPPCLRMVAAIAVLTKDAGKLTMGQPLVILAPHAVEALVKQPPDRWLSNARMTHYQAMLLDTDRVQFGPVVALNPATLLPLPEKEAPHDCLEILAETHGTRPDLTDQPIPDADYTWYTDGSSFLQEGQRRAGAAVTTETEVIWARALPAGTSAQRAELIALTQALKMAEGKKLNVYTDSRYAFATAHVHGEIYRRRGWLTSEGREIKNKNEILALLKALFLPKRLSIIHCPGHQKGNSAEARGNRMADQAAREAAMKAVLETSTLLAGKRTADGSEFEKRTADGSEFESPKKKAKVE

SEQ ID NO: 997 - protein, 2088 aa, synthetic construct
MPAAKRVKLDGGDKKYSIGLDIGTNSVGWAVITDEYKVPSKKFKVLGNTDRHSIKKNLIGALLFDSGETAEATRLKRTARRRYTRRKNRICYLQEIFSNEMAKVDDSFFHRLEESFLVEEDKKHERHPIFGNIVDEVAYHEKYPTIYHLRKKLVDSTDKADLRLIYLALAHMIKFRGHFLIEGDLNPDNSDVDKLFIQLVQTYNQLFEENPINASGVDAKAILSARLSKSRRLENLIAQLPGEKKNGLFGNLIALSLGLTPNFKSNFDLAEDAKLQLSKDTYDDDLDNLLAQIGDQYADLFLAAKNLSDAILLSDILRVNTEITKAPLSASMIKRYDEHHQDLTLLKALVRQQLPEKYKEIFFDQSKNGYAGYIDGGASQEEFYKFIKPILEKMDGTEELLVKLNREDLLRKQRTFDNGSIPHQIHLGELHAILRRQEDFYPFLKDNREKIEKILTFRIPYYVGPLARGNSRFAWMTRKSEETITPWNFEEVVDKGASAQSFIERMTNFDKNLPNEKVLPKHSLLYEYFTVYNELTKVKYVTEGMRKPAFLSGEQKKAIVDLLFKTNRKVTVKQLKEDYFKKIECFDSVEISGVEDRFNASLGTYHDLLKIIKDKDFLDNEENEDILEDIVLTLTLFEDREMIEERLKTYAHLFDDKVMKQLKRRRYTGWGRLSRKLINGIRDKQSGKTILDFLKSDGFANRNFMQLIHDDSLTFKEDIQKAQVSGQGDSLHEHIANLAGSPAIKKGILQTVKVVDELVKVMGRHKPENIVIEMARENQTTQKGQKNSRERMKRIEEGIKELGSQILKEHPVENTQLQNEKLYLYYLQNGRDMYVDQELDINRLSDYDVDHIVPQSFLKDDSIDNKVLTRSDKARGKSDNVPSEEVVKKMKNYWRQLLNAKLITQRKFDNLTKAERGGLSELDKAGFIKRQLVETRQITKHVAQILDSRMNTKYDENDKLIREVKVITLKSKLVSDFRKDFQFYKVREINNYHHAHDAYLNAVVGTALIKKYPKLESEFVYGDYKVYDVRKMIAKSEQEIGKATAKYFFYSNIMNFFKTEITLANGEIRKRPLIETNGETGEIVWDKGRDFATVRKVLSMPQVNIVKKTEVQTGGFSKESILPKRNSDKLIARKKDWDPKKYGGFDSPTVAYSVLVVAKVEKGKSKKLKSVKELLGITIMERSSFEKNPIDFLEAKGYKEVKKDLIIKLPKYSLFELENGRKRMLASAGELQKGNELALPSKYVNFLYLASHYEKLKGSPEDNEQKQLFVEQHKHYLDEIIEQISEFSKRVILADANLDKVLSAYNKHRDKPIREQAENIIHLFTLTNLGAPAAFKYFDTTIDRKRYTSTKEVLDATLIHQSITGLYETRIDLSQLGGDGGGGGGGTLNIEDEYRLHETSKEPDVPLGSTWLSDFPQAWAETGGMGLAVRQAPLIIPLKATSTPVSIKQYPMSQEARLGIKPHIQRLLDQGILVPCQSPWNTPLLPVKKPGTNDYRPVQDLREVNKRVEDIHPTVPNPYNLLSGLPPSHQWYTVLDLKDAFFCLRLHPTSQPLFAFEWRDPEMGISGQLTWTRLPQGFKNSPTLFNEALHRDLADFRIQHPDLILLQYVDDLLLAATSEQDCQRGTRALLQTLGNLGYRASAKKAQICQKQVKYLGYLLKEGQRWLTEARKETVMGQPTPKTPRQLREFLGTAGFCRLWIPGFAEMAAPLYPLTKPGTLFNWGPDQQKAYQEIKQALLTAPALGLPDLTKPFELFVDEKQGYAKGVLTQKLGPWRRPVAYLSKKLDPVAAGWPPCLRMVAAIAVLTKDAGKLTMGQPLVILAPHAVEALVKQPPDRWLSNARMTHYQAMLLDTDRVQFGPVVALNPATLLPLPEKEAPHDCLEILAETHGTRPDLTDQPIPDADYTWYTDGSSFLQEGQRRAGAAVTTETEVIWARALPAGTSAQRAELIALTQALKMAEGKKLNVYTDSRYAFATAHVHGEIYRRRGWLTSEGREIKNKNEILALLKALFLPKRLSIIHCPGHQKGNSAEARGNRMADQAAREAAMKAVLETSTLLAGKRTADGSEFEKRTADGSEFESPKKKAKVE

SEQ ID NO: 998 - protein, 2090 aa, synthetic construct
MPAAKRVKLDGGDKKYSIGLDIGTNSVGWAVITDEYKVPSKKFKVLGNTDRHSIKKNLIGALLFDSGETAEATRLKRTARRRYTRRKNRICYLQEIFSNEMAKVDDSFFHRLEESFLVEEDKKHERHPIFGNIVDEVAYHEKYPTIYHLRKKLVDSTDKADLRLIYLALAHMIKFRGHFLIEGDLNPDNSDVDKLFIQLVQTYNQLFEENPINASGVDAKAILSARLSKSRRLENLIAQLPGEKKNGLFGNLIALSLGLTPNFKSNFDLAEDAKLQLSKDTYDDDLDNLLAQIGDQYADLFLAAKNLSDAILLSDILRVNTEITKAPLSASMIKRYDEHHQDLTLLKALVRQQLPEKYKEIFFDQSKNGYAGYIDGGASQEEFYKFIKPILEKMDGTEELLVKLNREDLLRKQRTFDNGSIPHQIHLGELHAILRRQEDFYPFLKDNREKIEKILTFRIPYYVGPLARGNSRFAWMTRKSEETITPWNFEEVVDKGASAQSFIERMTNFDKNLPNEKVLPKHSLLYEYFTVYNELTKVKYVTEGMRKPAFLSGEQKKAIVDLLFKTNRKVTVKQLKEDYFKKIECFDSVEISGVEDRFNASLGTYHDLLKIIKDKDFLDNEENEDILEDIVLTLTLFEDREMIEERLKTYAHLFDDKVMKQLKRRRYTGWGRLSRKLINGIRDKQSGKTILDFLKSDGFANRNFMQLIHDDSLTFKEDIQKAQVSGQGDSLHEHIANLAGSPAIKKGILQTVKVVDELVKVMGRHKPENIVIEMARENQTTQKGQKNSRERMKRIEEGIKELGSQILKEHPVENTQLQNEKLYLYYLQNGRDMYVDQELDINRLSDYDVDHIVPQSFLKDDSIDNKVLTRSDKARGKSDNVPSEEVVKKMKNYWRQLLNAKLITQRKFDNLTKAERGGLSELDKAGFIKRQLVETRQITKHVAQILDSRMNTKYDENDKLIREVKVITLKSKLVSDFRKDFQFYKVREINNYHHAHDAYLNAVVGTALIKKYPKLESEFVYGDYKVYDVRKMIAKSEQEIGKATAKYFFYSNIMNFFKTEITLANGEIRKRPLIETNGETGEIVWDKGRDFATVRKVLSMPQVNIVKKTEVQTGGFSKESILPKRNSDKLIARKKDWDPKKYGGFDSPTVAYSVLVVAKVEKGKSKKLKSVKELLGITIMERSSFEKNPIDFLEAKGYKEVKKDLIIKLPKYSLFELENGRKRMLASAGELQKGNELALPSKYVNFLYLASHYEKLKGSPEDNEQKQLFVEQHKHYLDEIIEQISEFSKRVILADANLDKVLSAYNKHRDKPIREQAENIIHLFTLTNLGAPAAFKYFDTTIDRKRYTSTKEVLDATLIHQSITGLYETRIDLSQLGGDGGGGGGSGGTLNIEDEYRLHETSKEPDVPLGSTWLSDFPQAWAETGGMGLAVRQAPLIIPLKATSTPVSIKQYPMSQEARLGIKPHIQRLLDQGILVPCQSPWNTPLLPVKKPGTNDYRPVQDLREVNKRVEDIHPTVPNPYNLLSGLPPSHQWYTVLDLKDAFFCLRLHPTSQPLFAFEWRDPEMGISGQLTWTRLPQGFKNSPTLFNEALHRDLADFRIQHPDLILLQYVDDLLLAATSEQDCQRGTRALLQTLGNLGYRASAKKAQICQKQVKYLGYLLKEGQRWLTEARKETVMGQPTPKTPRQLREFLGTAGFCRLWIPGFAEMAAPLYPLTKPGTLFNWGPDQQKAYQEIKQALLTAPALGLPDLTKPFELFVDEKQGYAKGVLTQKLGPWRRPVAYLSKKLDPVAAGWPPCLRMVAAIAVLTKDAGKLTMGQPLVILAPHAVEALVKQPPDRWLSNARMTHYQAMLLDTDRVQFGPVVALNPATLLPLPEKEAPHDCLEILAETHGTRPDLTDQPIPDADYTWYTDGSSFLQEGQRRAGAAVTTETEVIWARALPAGTSAQRAELIALTQALKMAEGKKLNVYTDSRYAFATAHVHGEIYRRRGWLTSEGREIKNKNEILALLKALFLPKRLSIIHCPGHQKGNSAEARGNRMADQAAREAAMKAVLETSTLLAGKRTADGSEFEKRTADGSEFESPKKKAKVE

SEQ ID NO: 999 - protein, 2094 aa, synthetic construct
MPAAKRVKLDGGDKKYSIGLDIGTNSVGWAVITDEYKVPSKKFKVLGNTDRHSIKKNLIGALLFDSGETAEATRLKRTARRRYTRRKNRICYLQEIFSNEMAKVDDSFFHRLEESFLVEEDKKHERHPIFGNIVDEVAYHEKYPTIYHLRKKLVDSTDKADLRLIYLALAHMIKFRGHFLIEGDLNPDNSDVDKLFIQLVQTYNQLFEENPINASGVDAKAILSARLSKSRRLENLIAQLPGEKKNGLFGNLIALSLGLTPNFKSNFDLAEDAKLQLSKDTYDDDLDNLLAQIGDQYADLFLAAKNLSDAILLSDILRVNTEITKAPLSASMIKRYDEHHQDLTLLKALVRQQLPEKYKEIFFDQSKNGYAGYIDGGASQEEFYKFIKPILEKMDGTEELLVKLNREDLLRKQRTFDNGSIPHQIHLGELHAILRRQEDFYPFLKDNREKIEKILTFRIPYYVGPLARGNSRFAWMTRKSEETITPWNFEEVVDKGASAQSFIERMTNFDKNLPNEKVLPKHSLLYEYFTVYNELTKVKYVTEGMRKPAFLSGEQKKAIVDLLFKTNRKVTVKQLKEDYFKKIECFDSVEISGVEDRFNASLGTYHDLLKIIKDKDFLDNEENEDILEDIVLTLTLFEDREMIEERLKTYAHLFDDKVMKQLKRRRYTGWGRLSRKLINGIRDKQSGKTILDFLKSDGFANRNFMQLIHDDSLTFKEDIQKAQVSGQGDSLHEHIANLAGSPAIKKGILQTVKVVDELVKVMGRHKPENIVIEMARENQTTQKGQKNSRERMKRIEEGIKELGSQILKEHPVENTQLQNEKLYLYYLQNGRDMYVDQELDINRLSDYDVDHIVPQSFLKDDSIDNKVLTRSDKARGKSDNVPSEEVVKKMKNYWRQLLNAKLITQRKFDNLTKAERGGLSELDKAGFIKRQLVETRQITKHVAQILDSRMNTKYDENDKLIREVKVITLKSKLVSDFRKDFQFYKVREINNYHHAHDAYLNAVVGTALIKKYPKLESEFVYGDYKVYDVRKMIAKSEQEIGKATAKYFFYSNIMNFFKTEITLANGEIRKRPLIETNGETGEIVWDKGRDFATVRKVLSMPQVNIVKKTEVQTGGFSKESILPKRNSDKLIARKKDWDPKKYGGFDSPTVAYSVLVVAKVEKGKSKKLKSVKELLGITIMERSSFEKNPIDFLEAKGYKEVKKDLIIKLPKYSLFELENGRKRMLASAGELQKGNELALPSKYVNFLYLASHYEKLKGSPEDNEQKQLFVEQHKHYLDEIIEQISEFSKRVILADANLDKVLSAYNKHRDKPIREQAENIIHLFTLTNLGAPAAFKYFDTTIDRKRYTSTKEVLDATLIHQSITGLYETRIDLSQLGGDGGGGGGGSPAPGGTLNIEDEYRLHETSKEPDVPLGSTWLSDFPQAWAETGGMGLAVRQAPLIIPLKATSTPVSIKQYPMSQEARLGIKPHIQRLLDQGILVPCQSPWNTPLLPVKKPGTNDYRPVQDLREVNKRVEDIHPTVPNPYNLLSGLPPSHQWYTVLDLKDAFFCLRLHPTSQPLFAFEWRDPEMGISGQLTWTRLPQGFKNSPTLFNEALHRDLADFRIQHPDLILLQYVDDLLLAATSEQDCQRGTRALLQTLGNLGYRASAKKAQICQKQVKYLGYLLKEGQRWLTEARKETVMGQPTPKTPRQLREFLGTAGFCRLWIPGFAEMAAPLYPLTKPGTLFNWGPDQQKAYQEIKQALLTAPALGLPDLTKPFELFVDEKQGYAKGVLTQKLGPWRRPVAYLSKKLDPVAAGWPPCLRMVAAIAVLTKDAGKLTMGQPLVILAPHAVEALVKQPPDRWLSNARMTHYQAMLLDTDRVQFGPVVALNPATLLPLPEKEAPHDCLEILAETHGTRPDLTDQPIPDADYTWYTDGSSFLQEGQRRAGAAVTTETEVIWARALPAGTSAQRAELIALTQALKMAEGKKLNVYTDSRYAFATAHVHGEIYRRRGWLTSEGREIKNKNEILALLKALFLPKRLSIIHCPGHQKGNSAEARGNRMADQAAREAAMKAVLETSTLLAGKRTADGSEFEKRTADGSEFESPKKKAKVE

SEQ ID NO: 1000 - protein, 2094 aa, synthetic construct
MPAAKRVKLDGGDKKYSIGLDIGTNSVGWAVITDEYKVPSKKFKVLGNTDRHSIKKNLIGALLFDSGETAEATRLKRTARRRYTRRKNRICYLQEIFSNEMAKVDDSFFHRLEESFLVEEDKKHERHPIFGNIVDEVAYHEKYPTIYHLRKKLVDSTDKADLRLIYLALAHMIKFRGHFLIEGDLNPDNSDVDKLFIQLVQTYNQLFEENPINASGVDAKAILSARLSKSRRLENLIAQLPGEKKNGLFGNLIALSLGLTPNFKSNFDLAEDAKLQLSKDTYDDDLDNLLAQIGDQYADLFLAAKNLSDAILLSDILRVNTEITKAPLSASMIKRYDEHHQDLTLLKALVRQQLPEKYKEIFFDQSKNGYAGYIDGGASQEEFYKFIKPILEKMDGTEELLVKLNREDLLRKQRTFDNGSIPHQIHLGELHAILRRQEDFYPFLKDNREKIEKILTFRIPYYVGPLARGNSRFAWMTRKSEETITPWNFEEVVDKGASAQSFIERMTNFDKNLPNEKVLPKHSLLYEYFTVYNELTKVKYVTEGMRKPAFLSGEQKKAIVDLLFKTNRKVTVKQLKEDYFKKIECFDSVEISGVEDRFNASLGTYHDLLKIIKDKDFLDNEENEDILEDIVLTLTLFEDREMIEERLKTYAHLFDDKVMKQLKRRRYTGWGRLSRKLINGIRDKQSGKTILDFLKSDGFANRNFMQLIHDDSLTFKEDIQKAQVSGQGDSLHEHIANLAGSPAIKKGILQTVKVVDELVKVMGRHKPENIVIEMARENQTTQKGQKNSRERMKRIEEGIKELGSQILKEHPVENTQLQNEKLYLYYLQNGRDMYVDQELDINRLSDYDVDHIVPQSFLKDDSIDNKVLTRSDKARGKSDNVPSEEVVKKMKNYWRQLLNAKLITQRKFDNLTKAERGGLSELDKAGFIKRQLVETRQITKHVAQILDSRMNTKYDENDKLIREVKVITLKSKLVSDFRKDFQFYKVREINNYHHAHDAYLNAVVGTALIKKYPKLESEFVYGDYKVYDVRKMIAKSEQEIGKATAKYFFYSNIMNFFKTEITLANGEIRKRPLIETNGETGEIVWDKGRDFATVRKVLSMPQVNIVKKTEVQTGGFSKESILPKRNSDKLIARKKDWDPKKYGGFDSPTVAYSVLVVAKVEKGKSKKLKSVKELLGITIMERSSFEKNPIDFLEAKGYKEVKKDLIIKLPKYSLFELENGRKRMLASAGELQKGNELALPSKYVNFLYLASHYEKLKGSPEDNEQKQLFVEQHKHYLDEIIEQISEFSKRVILADANLDKVLSAYNKHRDKPIREQAENIIHLFTLTNLGAPAAFKYFDTTIDRKRYTSTKEVLDATLIHQSITGLYETRIDLSQLGGDGGGSSPAPGGGGGTLNIEDEYRLHETSKEPDVPLGSTWLSDFPQAWAETGGMGLAVRQAPLIIPLKATSTPVSIKQYPMSQEARLGIKPHIQRLLDQGILVPCQSPWNTPLLPVKKPGTNDYRPVQDLREVNKRVEDIHPTVPNPYNLLSGLPPSHQWYTVLDLKDAFFCLRLHPTSQPLFAFEWRDPEMGISGQLTWTRLPQGFKNSPTLFNEALHRDLADFRIQHPDLILLQYVDDLLLAATSEQDCQRGTRALLQTLGNLGYRASAKKAQICQKQVKYLGYLLKEGQRWLTEARKETVMGQPTPKTPRQLREFLGTAGFCRLWIPGFAEMAAPLYPLTKPGTLFNWGPDQQKAYQEIKQALLTAPALGLPDLTKPFELFVDEKQGYAKGVLTQKLGPWRRPVAYLSKKLDPVAAGWPPCLRMVAAIAVLTKDAGKLTMGQPLVILAPHAVEALVKQPPDRWLSNARMTHYQAMLLDTDRVQFGPVVALNPATLLPLPEKEAPHDCLEILAETHGTRPDLTDQPIPDADYTWYTDGSSFLQEGQRRAGAAVTTETEVIWARALPAGTSAQRAELIALTQALKMAEGKKLNVYTDSRYAFATAHVHGEIYRRRGWLTSEGREIKNKNEILALLKALFLPKRLSIIHCPGHQKGNSAEARGNRMADQAAREAAMKAVLETSTLLAGKRTADGSEFEKRTADGSEFESPKKKAKVE

SEQ ID NO: 1001 - protein, 2094 aa, synthetic construct
MPAAKRVKLDGGDKKYSIGLDIGTNSVGWAVITDEYKVPSKKFKVLGNTDRHSIKKNLIGALLFDSGETAEATRLKRTARRRYTRRKNRICYLQEIFSNEMAKVDDSFFHRLEESFLVEEDKKHERHPIFGNIVDEVAYHEKYPTIYHLRKKLVDSTDKADLRLIYLALAHMIKFRGHFLIEGDLNPDNSDVDKLFIQLVQTYNQLFEENPINASGVDAKAILSARLSKSRRLENLIAQLPGEKKNGLFGNLIALSLGLTPNFKSNFDLAEDAKLQLSKDTYDDDLDNLLAQIGDQYADLFLAAKNLSDAILLSDILRVNTEITKAPLSASMIKRYDEHHQDLTLLKALVRQQLPEKYKEIFFDQSKNGYAGYIDGGASQEEFYKFIKPILEKMDGTEELLVKLNREDLLRKQRTFDNGSIPHQIHLGELHAILRRQEDFYPFLKDNREKIEKILTFRIPYYVGPLARGNSRFAWMTRKSEETITPWNFEEVVDKGASAQSFIERMTNFDKNLPNEKVLPKHSLLYEYFTVYNELTKVKYVTEGMRKPAFLSGEQKKAIVDLLFKTNRKVTVKQLKEDYFKKIECFDSVEISGVEDRFNASLGTYHDLLKIIKDKDFLDNEENEDILEDIVLTLTLFEDREMIEERLKTYAHLFDDKVMKQLKRRRYTGWGRLSRKLINGIRDKQSGKTILDFLKSDGFANRNFMQLIHDDSLTFKEDIQKAQVSGQGDSLHEHIANLAGSPAIKKGILQTVKVVDELVKVMGRHKPENIVIEMARENQTTQKGQKNSRERMKRIEEGIKELGSQILKEHPVENTQLQNEKLYLYYLQNGRDMYVDQELDINRLSDYDVDHIVPQSFLKDDSIDNKVLTRSDKARGKSDNVPSEEVVKKMKNYWRQLLNAKLITQRKFDNLTKAERGGLSELDKAGFIKRQLVETRQITKHVAQILDSRMNTKYDENDKLIREVKVITLKSKLVSDFRKDFQFYKVREINNYHHAHDAYLNAVVGTALIKKYPKLESEFVYGDYKVYDVRKMIAKSEQEIGKATAKYFFYSNIMNFFKTEITLANGEIRKRPLIETNGETGEIVWDKGRDFATVRKVLSMPQVNIVKKTEVQTGGFSKESILPKRNSDKLIARKKDWDPKKYGGFDSPTVAYSVLVVAKVEKGKSKKLKSVKELLGITIMERSSFEKNPIDFLEAKGYKEVKKDLIIKLPKYSLFELENGRKRMLASAGELQKGNELALPSKYVNFLYLASHYEKLKGSPEDNEQKQLFVEQHKHYLDEIIEQISEFSKRVILADANLDKVLSAYNKHRDKPIREQAENIIHLFTLTNLGAPAAFKYFDTTIDRKRYTSTKEVLDATLIHQSITGLYETRIDLSQLGGDGGGGSPAPGGGGGTLNIEDEYRLHETSKEPDVPLGSTWLSDFPQAWAETGGMGLAVRQAPLIIPLKATSTPVSIKQYPMSQEARLGIKPHIQRLLDQGILVPCQSPWNTPLLPVKKPGTNDYRPVQDLREVNKRVEDIHPTVPNPYNLLSGLPPSHQWYTVLDLKDAFFCLRLHPTSQPLFAFEWRDPEMGISGQLTWTRLPQGFKNSPTLFNEALHRDLADFRIQHPDLILLQYVDDLLLAATSEQDCQRGTRALLQTLGNLGYRASAKKAQICQKQVKYLGYLLKEGQRWLTEARKETVMGQPTPKTPRQLREFLGTAGFCRLWIPGFAEMAAPLYPLTKPGTLFNWGPDQQKAYQEIKQALLTAPALGLPDLTKPFELFVDEKQGYAKGVLTQKLGPWRRPVAYLSKKLDPVAAGWPPCLRMVAAIAVLTKDAGKLTMGQPLVILAPHAVEALVKQPPDRWLSNARMTHYQAMLLDTDRVQFGPVVALNPATLLPLPEKEAPHDCLEILAETHGTRPDLTDQPIPDADYTWYTDGSSFLQEGQRRAGAAVTTETEVIWARALPAGTSAQRAELIALTQALKMAEGKKLNVYTDSRYAFATAHVHGEIYRRRGWLTSEGREIKNKNEILALLKALFLPKRLSIIHCPGHQKGNSAEARGNRMADQAAREAAMKAVLETSTLLAGKRTADGSEFEKRTADGSEFESPKKKAKVE

SEQ ID NO: 1002 - protein, 2095 aa, synthetic construct
MPAAKRVKLDGGDKKYSIGLDIGTNSVGWAVITDEYKVPSKKFKVLGNTDRHSIKKNLIGALLFDSGETAEATRLKRTARRRYTRRKNRICYLQEIFSNEMAKVDDSFFHRLEESFLVEEDKKHERHPIFGNIVDEVAYHEKYPTIYHLRKKLVDSTDKADLRLIYLALAHMIKFRGHFLIEGDLNPDNSDVDKLFIQLVQTYNQLFEENPINASGVDAKAILSARLSKSRRLENLIAQLPGEKKNGLFGNLIALSLGLTPNFKSNFDLAEDAKLQLSKDTYDDDLDNLLAQIGDQYADLFLAAKNLSDAILLSDILRVNTEITKAPLSASMIKRYDEHHQDLTLLKALVRQQLPEKYKEIFFDQSKNGYAGYIDGGASQEEFYKFIKPILEKMDGTEELLVKLNREDLLRKQRTFDNGSIPHQIHLGELHAILRRQEDFYPFLKDNREKIEKILTFRIPYYVGPLARGNSRFAWMTRKSEETITPWNFEEVVDKGASAQSFIERMTNFDKNLPNEKVLPKHSLLYEYFTVYNELTKVKYVTEGMRKPAFLSGEQKKAIVDLLFKTNRKVTVKQLKEDYFKKIECFDSVEISGVEDRFNASLGTYHDLLKIIKDKDFLDNEENEDILEDIVLTLTLFEDREMIEERLKTYAHLFDDKVMKQLKRRRYTGWGRLSRKLINGIRDKQSGKTILDFLKSDGFANRNFMQLIHDDSLTFKEDIQKAQVSGQGDSLHEHIANLAGSPAIKKGILQTVKVVDELVKVMGRHKPENIVIEMARENQTTQKGQKNSRERMKRIEEGIKELGSQILKEHPVENTQLQNEKLYLYYLQNGRDMYVDQELDINRLSDYDVDHIVPQSFLKDDSIDNKVLTRSDKARGKSDNVPSEEVVKKMKNYWRQLLNAKLITQRKFDNLTKAERGGLSELDKAGFIKRQLVETRQITKHVAQILDSRMNTKYDENDKLIREVKVITLKSKLVSDFRKDFQFYKVREINNYHHAHDAYLNAVVGTALIKKYPKLESEFVYGDYKVYDVRKMIAKSEQEIGKATAKYFFYSNIMNFFKTEITLANGEIRKRPLIETNGETGEIVWDKGRDFATVRKVLSMPQVNIVKKTEVQTGGFSKESILPKRNSDKLIARKKDWDPKKYGGFDSPTVAYSVLVVAKVEKGKSKKLKSVKELLGITIMERSSFEKNPIDFLEAKGYKEVKKDLIIKLPKYSLFELENGRKRMLASAGELQKGNELALPSKYVNFLYLASHYEKLKGSPEDNEQKQLFVEQHKHYLDEIIEQISEFSKRVILADANLDKVLSAYNKHRDKPIREQAENIIHLFTLTNLGAPAAFKYFDTTIDRKRYTSTKEVLDATLIHQSITGLYETRIDLSQLGGDGGGGGGSGGGGSGGTLNIEDEYRLHETSKEPDVPLGSTWLSDFPQAWAETGGMGLAVRQAPLIIPLKATSTPVSIKQYPMSQEARLGIKPHIQRLLDQGILVPCQSPWNTPLLPVKKPGTNDYRPVQDLREVNKRVEDIHPTVPNPYNLLSGLPPSHQWYTVLDLKDAFFCLRLHPTSQPLFAFEWRDPEMGISGQLTWTRLPQGFKNSPTLFNEALHRDLADFRIQHPDLILLQYVDDLLLAATSEQDCQRGTRALLQTLGNLGYRASAKKAQICQKQVKYLGYLLKEGQRWLTEARKETVMGQPTPKTPRQLREFLGTAGFCRLWIPGFAEMAAPLYPLTKPGTLFNWGPDQQKAYQEIKQALLTAPALGLPDLTKPFELFVDEKQGYAKGVLTQKLGPWRRPVAYLSKKLDPVAAGWPPCLRMVAAIAVLTKDAGKLTMGQPLVILAPHAVEALVKQPPDRWLSNARMTHYQAMLLDTDRVQFGPVVALNPATLLPLPEKEAPHDCLEILAETHGTRPDLTDQPIPDADYTWYTDGSSFLQEGQRRAGAAVTTETEVIWARALPAGTSAQRAELIALTQALKMAEGKKLNVYTDSRYAFATAHVHGEIYRRRGWLTSEGREIKNKNEILALLKALFLPKRLSIIHCPGHQKGNSAEARGNRMADQAAREAAMKAVLETSTLLAGKRTADGSEFEKRTADGSEFESPKKKAKVE

SEQ ID NO: 1003 - protein, 2088 aa, synthetic construct
MPAAKRVKLDGGDKKYSIGLDIGTNSVGWAVITDEYKVPSKKFKVLGNTDRHSIKKNLIGALLFDSGETAEATRLKRTARRRYTRRKNRICYLQEIFSNEMAKVDDSFFHRLEESFLVEEDKKHERHPIFGNIVDEVAYHEKYPTIYHLRKKLVDSTDKADLRLIYLALAHMIKFRGHFLIEGDLNPDNSDVDKLFIQLVQTYNQLFEENPINASGVDAKAILSARLSKSRRLENLIAQLPGEKKNGLFGNLIALSLGLTPNFKSNFDLAEDAKLQLSKDTYDDDLDNLLAQIGDQYADLFLAAKNLSDAILLSDILRVNTEITKAPLSASMIKRYDEHHQDLTLLKALVRQQLPEKYKEIFFDQSKNGYAGYIDGGASQEEFYKFIKPILEKMDGTEELLVKLNREDLLRKQRTFDNGSIPHQIHLGELHAILRRQEDFYPFLKDNREKIEKILTFRIPYYVGPLARGNSRFAWMTRKSEETITPWNFEEVVDKGASAQSFIERMTNFDKNLPNEKVLPKHSLLYEYFTVYNELTKVKYVTEGMRKPAFLSGEQKKAIVDLLFKTNRKVTVKQLKEDYFKKIECFDSVEISGVEDRFNASLGTYHDLLKIIKDKDFLDNEENEDILEDIVLTLTLFEDREMIEERLKTYAHLFDDKVMKQLKRRRYTGWGRLSRKLINGIRDKQSGKTILDFLKSDGFANRNFMQLIHDDSLTFKEDIQKAQVSGQGDSLHEHIANLAGSPAIKKGILQTVKVVDELVKVMGRHKPENIVIEMARENQTTQKGQKNSRERMKRIEEGIKELGSQILKEHPVENTQLQNEKLYLYYLQNGRDMYVDQELDINRLSDYDVDHIVPQSFLKDDSIDNKVLTRSDKARGKSDNVPSEEVVKKMKNYWRQLLNAKLITQRKFDNLTKAERGGLSELDKAGFIKRQLVETRQITKHVAQILDSRMNTKYDENDKLIREVKVITLKSKLVSDFRKDFQFYKVREINNYHHAHDAYLNAVVGTALIKKYPKLESEFVYGDYKVYDVRKMIAKSEQEIGKATAKYFFYSNIMNFFKTEITLANGEIRKRPLIETNGETGEIVWDKGRDFATVRKVLSMPQVNIVKKTEVQTGGFSKESILPKRNSDKLIARKKDWDPKKYGGFDSPTVAYSVLVVAKVEKGKSKKLKSVKELLGITIMERSSFEKNPIDFLEAKGYKEVKKDLIIKLPKYSLFELENGRKRMLASAGELQKGNELALPSKYVNFLYLASHYEKLKGSPEDNEQKQLFVEQHKHYLDEIIEQISEFSKRVILADANLDKVLSAYNKHRDKPIREQAENIIHLFTLTNLGAPAAFKYFDTTIDRKRYTSTKEVLDATLIHQSITGLYETRIDLSQLGGDGGGGSGGTLNIEDEYRLHETSKEPDVPLGSTWLSDFPQAWAETGGMGLAVRQAPLIIPLKATSTPVSIKQYPMSQEARLGIKPHIQRLLDQGILVPCQSPWNTPLLPVKKPGTNDYRPVQDLREVNKRVEDIHPTVPNPYNLLSGLPPSHQWYTVLDLKDAFFCLRLHPTSQPLFAFEWRDPEMGISGQLTWTRLPQGFKNSPTLFNEALHRDLADFRIQHPDLILLQYVDDLLLAATSEQDCQRGTRALLQTLGNLGYRASAKKAQICQKQVKYLGYLLKEGQRWLTEARKETVMGQPTPKTPRQLREFLGTAGFCRLWIPGFAEMAAPLYPLTKPGTLFNWGPDQQKAYQEIKQALLTAPALGLPDLTKPFELFVDEKQGYAKGVLTQKLGPWRRPVAYLSKKLDPVAAGWPPCLRMVAAIAVLTKDAGKLTMGQPLVILAPHAVEALVKQPPDRWLSNARMTHYQAMLLDTDRVQFGPVVALNPATLLPLPEKEAPHDCLEILAETHGTRPDLTDQPIPDADYTWYTDGSSFLQEGQRRAGAAVTTETEVIWARALPAGTSAQRAELIALTQALKMAEGKKLNVYTDSRYAFATAHVHGEIYRRRGWLTSEGREIKNKNEILALLKALFLPKRLSIIHCPGHQKGNSAEARGNRMADQAAREAAMKAVLETSTLLAGKRTADGSEFEKRTADGSEFESPKKKAKVE

SEQ ID NO: 1004 - protein, 2094 aa, synthetic construct
MPAAKRVKLDGGDKKYSIGLDIGTNSVGWAVITDEYKVPSKKFKVLGNTDRHSIKKNLIGALLFDSGETAEATRLKRTARRRYTRRKNRICYLQEIFSNEMAKVDDSFFHRLEESFLVEEDKKHERHPIFGNIVDEVAYHEKYPTIYHLRKKLVDSTDKADLRLIYLALAHMIKFRGHFLIEGDLNPDNSDVDKLFIQLVQTYNQLFEENPINASGVDAKAILSARLSKSRRLENLIAQLPGEKKNGLFGNLIALSLGLTPNFKSNFDLAEDAKLQLSKDTYDDDLDNLLAQIGDQYADLFLAAKNLSDAILLSDILRVNTEITKAPLSASMIKRYDEHHQDLTLLKALVRQQLPEKYKEIFFDQSKNGYAGYIDGGASQEEFYKFIKPILEKMDGTEELLVKLNREDLLRKQRTFDNGSIPHQIHLGELHAILRRQEDFYPFLKDNREKIEKILTFRIPYYVGPLARGNSRFAWMTRKSEETITPWNFEEVVDKGASAQSFIERMTNFDKNLPNEKVLPKHSLLYEYFTVYNELTKVKYVTEGMRKPAFLSGEQKKAIVDLLFKTNRKVTVKQLKEDYFKKIECFDSVEISGVEDRFNASLGTYHDLLKIIKDKDFLDNEENEDILEDIVLTLTLFEDREMIEERLKTYAHLFDDKVMKQLKRRRYTGWGRLSRKLINGIRDKQSGKTILDFLKSDGFANRNFMQLIHDDSLTFKEDIQKAQVSGQGDSLHEHIANLAGSPAIKKGILQTVKVVDELVKVMGRHKPENIVIEMARENQTTQKGQKNSRERMKRIEEGIKELGSQILKEHPVENTQLQNEKLYLYYLQNGRDMYVDQELDINRLSDYDVDHIVPQSFLKDDSIDNKVLTRSDKARGKSDNVPSEEVVKKMKNYWRQLLNAKLITQRKFDNLTKAERGGLSELDKAGFIKRQLVETRQITKHVAQILDSRMNTKYDENDKLIREVKVITLKSKLVSDFRKDFQFYKVREINNYHHAHDAYLNAVVGTALIKKYPKLESEFVYGDYKVYDVRKMIAKSEQEIGKATAKYFFYSNIMNFFKTEITLANGEIRKRPLIETNGETGEIVWDKGRDFATVRKVLSMPQVNIVKKTEVQTGGFSKESILPKRNSDKLIARKKDWDPKKYGGFDSPTVAYSVLVVAKVEKGKSKKLKSVKELLGITIMERSSFEKNPIDFLEAKGYKEVKKDLIIKLPKYSLFELENGRKRMLASAGELQKGNELALPSKYVNFLYLASHYEKLKGSPEDNEQKQLFVEQHKHYLDEIIEQISEFSKRVILADANLDKVLSAYNKHRDKPIREQAENIIHLFTLTNLGAPAAFKYFDTTIDRKRYTSTKEVLDATLIHQSITGLYETRIDLSQLGGDGGGSSGGSGGGGGTLNIEDEYRLHETSKEPDVPLGSTWLSDFPQAWAETGGMGLAVRQAPLIIPLKATSTPVSIKQYPMSQEARLGIKPHIQRLLDQGILVPCQSPWNTPLLPVKKPGTNDYRPVQDLREVNKRVEDIHPTVPNPYNLLSGLPPSHQWYTVLDLKDAFFCLRLHPTSQPLFAFEWRDPEMGISGQLTWTRLPQGFKNSPTLFNEALHRDLADFRIQHPDLILLQYVDDLLLAATSEQDCQRGTRALLQTLGNLGYRASAKKAQICQKQVKYLGYLLKEGQRWLTEARKETVMGQPTPKTPRQLREFLGTAGFCRLWIPGFAEMAAPLYPLTKPGTLFNWGPDQQKAYQEIKQALLTAPALGLPDLTKPFELFVDEKQGYAKGVLTQKLGPWRRPVAYLSKKLDPVAAGWPPCLRMVAAIAVLTKDAGKLTMGQPLVILAPHAVEALVKQPPDRWLSNARMTHYQAMLLDTDRVQFGPVVALNPATLLPLPEKEAPHDCLEILAETHGTRPDLTDQPIPDADYTWYTDGSSFLQEGQRRAGAAVTTETEVIWARALPAGTSAQRAELIALTQALKMAEGKKLNVYTDSRYAFATAHVHGEIYRRRGWLTSEGREIKNKNEILALLKALFLPKRLSIIHCPGHQKGNSAEARGNRMADQAAREAAMKAVLETSTLLAGKRTADGSEFEKRTADGSEFESPKKKAKVE

SEQ ID NO: 1005 - protein, 2096 aa, synthetic construct
MPAAKRVKLDGGDKKYSIGLDIGTNSVGWAVITDEYKVPSKKFKVLGNTDRHSIKKNLIGALLFDSGETAEATRLKRTARRRYTRRKNRICYLQEIFSNEMAKVDDSFFHRLEESFLVEEDKKHERHPIFGNIVDEVAYHEKYPTIYHLRKKLVDSTDKADLRLIYLALAHMIKFRGHFLIEGDLNPDNSDVDKLFIQLVQTYNQLFEENPINASGVDAKAILSARLSKSRRLENLIAQLPGEKKNGLFGNLIALSLGLTPNFKSNFDLAEDAKLQLSKDTYDDDLDNLLAQIGDQYADLFLAAKNLSDAILLSDILRVNTEITKAPLSASMIKRYDEHHQDLTLLKALVRQQLPEKYKEIFFDQSKNGYAGYIDGGASQEEFYKFIKPILEKMDGTEELLVKLNREDLLRKQRTFDNGSIPHQIHLGELHAILRRQEDFYPFLKDNREKIEKILTFRIPYYVGPLARGNSRFAWMTRKSEETITPWNFEEVVDKGASAQSFIERMTNFDKNLPNEKVLPKHSLLYEYFTVYNELTKVKYVTEGMRKPAFLSGEQKKAIVDLLFKTNRKVTVKQLKEDYFKKIECFDSVEISGVEDRFNASLGTYHDLLKIIKDKDFLDNEENEDILEDIVLTLTLFEDREMIEERLKTYAHLFDDKVMKQLKRRRYTGWGRLSRKLINGIRDKQSGKTILDFLKSDGFANRNFMQLIHDDSLTFKEDIQKAQVSGQGDSLHEHIANLAGSPAIKKGILQTVKVVDELVKVMGRHKPENIVIEMARENQTTQKGQKNSRERMKRIEEGIKELGSQILKEHPVENTQLQNEKLYLYYLQNGRDMYVDQELDINRLSDYDVDHIVPQSFLKDDSIDNKVLTRSDKARGKSDNVPSEEVVKKMKNYWRQLLNAKLITQRKFDNLTKAERGGLSELDKAGFIKRQLVETRQITKHVAQILDSRMNTKYDENDKLIREVKVITLKSKLVSDFRKDFQFYKVREINNYHHAHDAYLNAVVGTALIKKYPKLESEFVYGDYKVYDVRKMIAKSEQEIGKATAKYFFYSNIMNFFKTEITLANGEIRKRPLIETNGETGEIVWDKGRDFATVRKVLSMPQVNIVKKTEVQTGGFSKESILPKRNSDKLIARKKDWDPKKYGGFDSPTVAYSVLVVAKVEKGKSKKLKSVKELLGITIMERSSFEKNPIDFLEAKGYKEVKKDLIIKLPKYSLFELENGRKRMLASAGELQKGNELALPSKYVNFLYLASHYEKLKGSPEDNEQKQLFVEQHKHYLDEIIEQISEFSKRVILADANLDKVLSAYNKHRDKPIREQAENIIHLFTLTNLGAPAAFKYFDTTIDRKRYTSTKEVLDATLIHQSITGLYETRIDLSQLGGDGGGGSGSSEAAAKGGTLNIEDEYRLHETSKEPDVPLGSTWLSDFPQAWAETGGMGLAVRQAPLIIPLKATSTPVSIKQYPMSQEARLGIKPHIQRLLDQGILVPCQSPWNTPLLPVKKPGTNDYRPVQDLREVNKRVEDIHPTVPNPYNLLSGLPPSHQWYTVLDLKDAFFCLRLHPTSQPLFAFEWRDPEMGISGQLTWTRLPQGFKNSPTLFNEALHRDLADFRIQHPDLILLQYVDDLLLAATSEQDCQRGTRALLQTLGNLGYRASAKKAQICQKQVKYLGYLLKEGQRWLTEARKETVMGQPTPKTPRQLREFLGTAGFCRLWIPGFAEMAAPLYPLTKPGTLFNWGPDQQKAYQEIKQALLTAPALGLPDLTKPFELFVDEKQGYAKGVLTQKLGPWRRPVAYLSKKLDPVAAGWPPCLRMVAAIAVLTKDAGKLTMGQPLVILAPHAVEALVKQPPDRWLSNARMTHYQAMLLDTDRVQFGPVVALNPATLLPLPEKEAPHDCLEILAETHGTRPDLTDQPIPDADYTWYTDGSSFLQEGQRRAGAAVTTETEVIWARALPAGTSAQRAELIALTQALKMAEGKKLNVYTDSRYAFATAHVHGEIYRRRGWLTSEGREIKNKNEILALLKALFLPKRLSIIHCPGHQKGNSAEARGNRMADQAAREAAMKAVLETSTLLAGKRTADGSEFEKRTADGSEFESPKKKAKVE

SEQ ID NO: 1006 - protein, 2131 aa, synthetic construct
MPAAKRVKLDGGDKKYSIGLDIGTNSVGWAVITDEYKVPSKKFKVLGNTDRHSIKKNLIGALLFDSGETAEATRLKRTARRRYTRRKNRICYLQEIFSNEMAKVDDSFFHRLEESFLVEEDKKHERHPIFGNIVDEVAYHEKYPTIYHLRKKLVDSTDKADLRLIYLALAHMIKFRGHFLIEGDLNPDNSDVDKLFIQLVQTYNQLFEENPINASGVDAKAILSARLSKSRRLENLIAQLPGEKKNGLFGNLIALSLGLTPNFKSNFDLAEDAKLQLSKDTYDDDLDNLLAQIGDQYADLFLAAKNLSDAILLSDILRVNTEITKAPLSASMIKRYDEHHQDLTLLKALVRQQLPEKYKEIFFDQSKNGYAGYIDGGASQEEFYKFIKPILEKMDGTEELLVKLNREDLLRKQRTFDNGSIPHQIHLGELHAILRRQEDFYPFLKDNREKIEKILTFRIPYYVGPLARGNSRFAWMTRKSEETITPWNFEEVVDKGASAQSFIERMTNFDKNLPNEKVLPKHSLLYEYFTVYNELTKVKYVTEGMRKPAFLSGEQKKAIVDLLFKTNRKVTVKQLKEDYFKKIECFDSVEISGVEDRFNASLGTYHDLLKIIKDKDFLDNEENEDILEDIVLTLTLFEDREMIEERLKTYAHLFDDKVMKQLKRRRYTGWGRLSRKLINGIRDKQSGKTILDFLKSDGFANRNFMQLIHDDSLTFKEDIQKAQVSGQGDSLHEHIANLAGSPAIKKGILQTVKVVDELVKVMGRHKPENIVIEMARENQTTQKGQKNSRERMKRIEEGIKELGSQILKEHPVENTQLQNEKLYLYYLQNGRDMYVDQELDINRLSDYDVDHIVPQSFLKDDSIDNKVLTRSDKARGKSDNVPSEEVVKKMKNYWRQLLNAKLITQRKFDNLTKAERGGLSELDKAGFIKRQLVETRQITKHVAQILDSRMNTKYDENDKLIREVKVITLKSKLVSDFRKDFQFYKVREINNYHHAHDAYLNAVVGTALIKKYPKLESEFVYGDYKVYDVRKMIAKSEQEIGKATAKYFFYSNIMNFFKTEITLANGEIRKRPLIETNGETGEIVWDKGRDFATVRKVLSMPQVNIVKKTEVQTGGFSKESILPKRNSDKLIARKKDWDPKKYGGFDSPTVAYSVLVVAKVEKGKSKKLKSVKELLGITIMERSSFEKNPIDFLEAKGYKEVKKDLIIKLPKYSLFELENGRKRMLASAGELQKGNELALPSKYVNFLYLASHYEKLKGSPEDNEQKQLFVEQHKHYLDEIIEQISEFSKRVILADANLDKVLSAYNKHRDKPIREQAENIIHLFTLTNLGAPAAFKYFDTTIDRKRYTSTKEVLDATLIHQSITGLYETRIDLSQLGGDGGAEAAAKEAAAKEAAAKEAAAKALEAEAAAKEAAAKEAAAKEAAAKAGGTLNIEDEYRLHETSKEPDVPLGSTWLSDFPQAWAETGGMGLAVRQAPLIIPLKATSTPVSIKQYPMSQEARLGIKPHIQRLLDQGILVPCQSPWNTPLLPVKKPGTNDYRPVQDLREVNKRVEDIHPTVPNPYNLLSGLPPSHQWYTVLDLKDAFFCLRLHPTSQPLFAFEWRDPEMGISGQLTWTRLPQGFKNSPTLFNEALHRDLADFRIQHPDLILLQYVDDLLLAATSEQDCQRGTRALLQTLGNLGYRASAKKAQICQKQVKYLGYLLKEGQRWLTEARKETVMGQPTPKTPRQLREFLGKAGFCRLFIPGFAEMAAPLYPLTKPGTLFNWGPDQQKAYQEIKQALLTAPALGLPDLTKPFELFVDEKQGYAKGVLTQKLGPWRRPVAYLSKKLDPVAAGWPPCLRMVAAIAVLTKDAGKLTMGQPLVILAPHAVEALVKQPPDRWLSNARMTHYQAMLLDTDRVQFGPVVALNPATLLPLPEKEAPHDCLEILAETHGTRPDLTDQPIPDADYTWYTDGSSFLQEGQRRAGAAVTTETEVIWARALPAGTSAQRAELIALTQALKMAEGKKLNVYTDSRYAFATAHVHGEIYRRRGWLTSEGREIKNKNEILALLKALFLPKRLSIIHCPGHQKGNSAEARGNRMADQAAREAAMKAVLETSTLLAGKRTADGSEFEKRTADGSEFESPKKKAKVE

SEQ ID NO: 1007 - protein, 2096 aa, synthetic construct
MPAAKRVKLDGGDKKYSIGLDIGTNSVGWAVITDEYKVPSKKFKVLGNTDRHSIKKNLIGALLFDSGETAEATRLKRTARRRYTRRKNRICYLQEIFSNEMAKVDDSFFHRLEESFLVEEDKKHERHPIFGNIVDEVAYHEKYPTIYHLRKKLVDSTDKADLRLIYLALAHMIKFRGHFLIEGDLNPDNSDVDKLFIQLVQTYNQLFEENPINASGVDAKAILSARLSKSRRLENLIAQLPGEKKNGLFGNLIALSLGLTPNFKSNFDLAEDAKLQLSKDTYDDDLDNLLAQIGDQYADLFLAAKNLSDAILLSDILRVNTEITKAPLSASMIKRYDEHHQDLTLLKALVRQQLPEKYKEIFFDQSKNGYAGYIDGGASQEEFYKFIKPILEKMDGTEELLVKLNREDLLRKQRTFDNGSIPHQIHLGELHAILRRQEDFYPFLKDNREKIEKILTFRIPYYVGPLARGNSRFAWMTRKSEETITPWNFEEVVDKGASAQSFIERMTNFDKNLPNEKVLPKHSLLYEYFTVYNELTKVKYVTEGMRKPAFLSGEQKKAIVDLLFKTNRKVTVKQLKEDYFKKIECFDSVEISGVEDRFNASLGTYHDLLKIIKDKDFLDNEENEDILEDIVLTLTLFEDREMIEERLKTYAHLFDDKVMKQLKRRRYTGWGRLSRKLINGIRDKQSGKTILDFLKSDGFANRNFMQLIHDDSLTFKEDIQKAQVSGQGDSLHEHIANLAGSPAIKKGILQTVKVVDELVKVMGRHKPENIVIEMARENQTTQKGQKNSRERMKRIEEGIKELGSQILKEHPVENTQLQNEKLYLYYLQNGRDMYVDQELDINRLSDYDVDHIVPQSFLKDDSIDNKVLTRSDKARGKSDNVPSEEVVKKMKNYWRQLLNAKLITQRKFDNLTKAERGGLSELDKAGFIKRQLVETRQITKHVAQILDSRMNTKYDENDKLIREVKVITLKSKLVSDFRKDFQFYKVREINNYHHAHDAYLNAVVGTALIKKYPKLESEFVYGDYKVYDVRKMIAKSEQEIGKATAKYFFYSNIMNFFKTEITLANGEIRKRPLIETNGETGEIVWDKGRDFATVRKVLSMPQVNIVKKTEVQTGGFSKESILPKRNSDKLIARKKDWDPKKYGGFDSPTVAYSVLVVAKVEKGKSKKLKSVKELLGITIMERSSFEKNPIDFLEAKGYKEVKKDLIIKLPKYSLFELENGRKRMLASAGELQKGNELALPSKYVNFLYLASHYEKLKGSPEDNEQKQLFVEQHKHYLDEIIEQISEFSKRVILADANLDKVLSAYNKHRDKPIREQAENIIHLFTLTNLGAPAAFKYFDTTIDRKRYTSTKEVLDATLIHQSITGLYETRIDLSQLGGDGGPAPEAAAKGSSGGTLNIEDEYRLHETSKEPDVPLGSTWLSDFPQAWAETGGMGLAVRQAPLIIPLKATSTPVSIKQYPMSQEARLGIKPHIQRLLDQGILVPCQSPWNTPLLPVKKPGTNDYRPVQDLREVNKRVEDIHPTVPNPYNLLSGLPPSHQWYTVLDLKDAFFCLRLHPTSQPLFAFEWRDPEMGISGQLTWTRLPQGFKNSPTLFNEALHRDLADFRIQHPDLILLQYVDDLLLAATSEQDCQRGTRALLQTLGNLGYRASAKKAQICQKQVKYLGYLLKEGQRWLTEARKETVMGQPTPKTPRQLREFLGKAGFCRLFIPGFAEMAAPLYPLTKPGTLFNWGPDQQKAYQEIKQALLTAPALGLPDLTKPFELFVDEKQGYAKGVLTQKLGPWRRPVAYLSKKLDPVAAGWPPCLRMVAAIAVLTKDAGKLTMGQPLVILAPHAVEALVKQPPDRWLSNARMTHYQAMLLDTDRVQFGPVVALNPATLLPLPEKEAPHDCLEILAETHGTRPDLTDQPIPDADYTWYTDGSSFLQEGQRRAGAAVTTETEVIWARALPAGTSAQRAELIALTQALKMAEGKKLNVYTDSRYAFATAHVHGEIYRRRGWLTSEGREIKNKNEILALLKALFLPKRLSIIHCPGHQKGNSAEARGNRMADQAAREAAMKAVLETSTLLAGKRTADGSEFEKRTADGSEFESPKKKAKVE

SEQ ID NO: 1008 - protein, 2105 aa, synthetic construct
MPAAKRVKLDGGDKKYSIGLDIGTNSVGWAVITDEYKVPSKKFKVLGNTDRHSIKKNLIGALLFDSGETAEATRLKRTARRRYTRRKNRICYLQEIFSNEMAKVDDSFFHRLEESFLVEEDKKHERHPIFGNIVDEVAYHEKYPTIYHLRKKLVDSTDKADLRLIYLALAHMIKFRGHFLIEGDLNPDNSDVDKLFIQLVQTYNQLFEENPINASGVDAKAILSARLSKSRRLENLIAQLPGEKKNGLFGNLIALSLGLTPNFKSNFDLAEDAKLQLSKDTYDDDLDNLLAQIGDQYADLFLAAKNLSDAILLSDILRVNTEITKAPLSASMIKRYDEHHQDLTLLKALVRQQLPEKYKEIFFDQSKNGYAGYIDGGASQEEFYKFIKPILEKMDGTEELLVKLNREDLLRKQRTFDNGSIPHQIHLGELHAILRRQEDFYPFLKDNREKIEKILTFRIPYYVGPLARGNSRFAWMTRKSEETITPWNFEEVVDKGASAQSFIERMTNFDKNLPNEKVLPKHSLLYEYFTVYNELTKVKYVTEGMRKPAFLSGEQKKAIVDLLFKTNRKVTVKQLKEDYFKKIECFDSVEISGVEDRFNASLGTYHDLLKIIKDKDFLDNEENEDILEDIVLTLTLFEDREMIEERLKTYAHLFDDKVMKQLKRRRYTGWGRLSRKLINGIRDKQSGKTILDFLKSDGFANRNFMQLIHDDSLTFKEDIQKAQVSGQGDSLHEHIANLAGSPAIKKGILQTVKVVDELVKVMGRHKPENIVIEMARENQTTQKGQKNSRERMKRIEEGIKELGSQILKEHPVENTQLQNEKLYLYYLQNGRDMYVDQELDINRLSDYDVDHIVPQSFLKDDSIDNKVLTRSDKARGKSDNVPSEEVVKKMKNYWRQLLNAKLITQRKFDNLTKAERGGLSELDKAGFIKRQLVETRQITKHVAQILDSRMNTKYDENDKLIREVKVITLKSKLVSDFRKDFQFYKVREINNYHHAHDAYLNAVVGTALIKKYPKLESEFVYGDYKVYDVRKMIAKSEQEIGKATAKYFFYSNIMNFFKTEITLANGEIRKRPLIETNGETGEIVWDKGRDFATVRKVLSMPQVNIVKKTEVQTGGFSKESILPKRNSDKLIARKKDWDPKKYGGFDSPTVAYSVLVVAKVEKGKSKKLKSVKELLGITIMERSSFEKNPIDFLEAKGYKEVKKDLIIKLPKYSLFELENGRKRMLASAGELQKGNELALPSKYVNFLYLASHYEKLKGSPEDNEQKQLFVEQHKHYLDEIIEQISEFSKRVILADANLDKVLSAYNKHRDKPIREQAENIIHLFTLTNLGAPAAFKYFDTTIDRKRYTSTKEVLDATLIHQSITGLYETRIDLSQLGGDGGEAAAKEAAAKEAAAKEAAAKGGTLNIEDEYRLHETSKEPDVPLGSTWLSDFPQAWAETGGMGLAVRQAPLIIPLKATSTPVSIKQYPMSQEARLGIKPHIQRLLDQGILVPCQSPWNTPLLPVKKPGTNDYRPVQDLREVNKRVEDIHPTVPNPYNLLSGLPPSHQWYTVLDLKDAFFCLRLHPTSQPLFAFEWRDPEMGISGQLTWTRLPQGFKNSPTLFNEALHRDLADFRIQHPDLILLQYVDDLLLAATSEQDCQRGTRALLQTLGNLGYRASAKKAQICQKQVKYLGYLLKEGQRWLTEARKETVMGQPTPKTPRQLREFLGKAGFCRLFIPGFAEMAAPLYPLTKPGTLFNWGPDQQKAYQEIKQALLTAPALGLPDLTKPFELFVDEKQGYAKGVLTQKLGPWRRPVAYLSKKLDPVAAGWPPCLRMVAAIAVLTKDAGKLTMGQPLVILAPHAVEALVKQPPDRWLSNARMTHYQAMLLDTDRVQFGPVVALNPATLLPLPEKEAPHDCLEILAETHGTRPDLTDQPIPDADYTWYTDGSSFLQEGQRRAGAAVTTETEVIWARALPAGTSAQRAELIALTQALKMAEGKKLNVYTDSRYAFATAHVHGEIYRRRGWLTSEGREIKNKNEILALLKALFLPKRLSIIHCPGHQKGNSAEARGNRMADQAAREAAMKAVLETSTLLAGKRTADGSEFEKRTADGSEFESPKKKAKVE

SEQ ID NO: 1009 - protein, 2090 aa, synthetic construct
MPAAKRVKLDGGDKKYSIGLDIGTNSVGWAVITDEYKVPSKKFKVLGNTDRHSIKKNLIGALLFDSGETAEATRLKRTARRRYTRRKNRICYLQEIFSNEMAKVDDSFFHRLEESFLVEEDKKHERHPIFGNIVDEVAYHEKYPTIYHLRKKLVDSTDKADLRLIYLALAHMIKFRGHFLIEGDLNPDNSDVDKLFIQLVQTYNQLFEENPINASGVDAKAILSARLSKSRRLENLIAQLPGEKKNGLFGNLIALSLGLTPNFKSNFDLAEDAKLQLSKDTYDDDLDNLLAQIGDQYADLFLAAKNLSDAILLSDILRVNTEITKAPLSASMIKRYDEHHQDLTLLKALVRQQLPEKYKEIFFDQSKNGYAGYIDGGASQEEFYKFIKPILEKMDGTEELLVKLNREDLLRKQRTFDNGSIPHQIHLGELHAILRRQEDFYPFLKDNREKIEKILTFRIPYYVGPLARGNSRFAWMTRKSEETITPWNFEEVVDKGASAQSFIERMTNFDKNLPNEKVLPKHSLLYEYFTVYNELTKVKYVTEGMRKPAFLSGEQKKAIVDLLFKTNRKVTVKQLKEDYFKKIECFDSVEISGVEDRFNASLGTYHDLLKIIKDKDFLDNEENEDILEDIVLTLTLFEDREMIEERLKTYAHLFDDKVMKQLKRRRYTGWGRLSRKLINGIRDKQSGKTILDFLKSDGFANRNFMQLIHDDSLTFKEDIQKAQVSGQGDSLHEHIANLAGSPAIKKGILQTVKVVDELVKVMGRHKPENIVIEMARENQTTQKGQKNSRERMKRIEEGIKELGSQILKEHPVENTQLQNEKLYLYYLQNGRDMYVDQELDINRLSDYDVDHIVPQSFLKDDSIDNKVLTRSDKARGKSDNVPSEEVVKKMKNYWRQLLNAKLITQRKFDNLTKAERGGLSELDKAGFIKRQLVETRQITKHVAQILDSRMNTKYDENDKLIREVKVITLKSKLVSDFRKDFQFYKVREINNYHHAHDAYLNAVVGTALIKKYPKLESEFVYGDYKVYDVRKMIAKSEQEIGKATAKYFFYSNIMNFFKTEITLANGEIRKRPLIETNGETGEIVWDKGRDFATVRKVLSMPQVNIVKKTEVQTGGFSKESILPKRNSDKLIARKKDWDPKKYGGFDSPTVAYSVLVVAKVEKGKSKKLKSVKELLGITIMERSSFEKNPIDFLEAKGYKEVKKDLIIKLPKYSLFELENGRKRMLASAGELQKGNELALPSKYVNFLYLASHYEKLKGSPEDNEQKQLFVEQHKHYLDEIIEQISEFSKRVILADANLDKVLSAYNKHRDKPIREQAENIIHLFTLTNLGAPAAFKYFDTTIDRKRYTSTKEVLDATLIHQSITGLYETRIDLSQLGGDGGEAAAKGGTLNIEDEYRLHETSKEPDVPLGSTWLSDFPQAWAETGGMGLAVRQAPLIIPLKATSTPVSIKQYPMSQEARLGIKPHIQRLLDQGILVPCQSPWNTPLLPVKKPGTNDYRPVQDLREVNKRVEDIHPTVPNPYNLLSGLPPSHQWYTVLDLKDAFFCLRLHPTSQPLFAFEWRDPEMGISGQLTWTRLPQGFKNSPTLFNEALHRDLADFRIQHPDLILLQYVDDLLLAATSEQDCQRGTRALLQTLGNLGYRASAKKAQICQKQVKYLGYLLKEGQRWLTEARKETVMGQPTPKTPRQLREFLGKAGFCRLFIPGFAEMAAPLYPLTKPGTLFNWGPDQQKAYQEIKQALLTAPALGLPDLTKPFELFVDEKQGYAKGVLTQKLGPWRRPVAYLSKKLDPVAAGWPPCLRMVAAIAVLTKDAGKLTMGQPLVILAPHAVEALVKQPPDRWLSNARMTHYQAMLLDTDRVQFGPVVALNPATLLPLPEKEAPHDCLEILAETHGTRPDLTDQPIPDADYTWYTDGSSFLQEGQRRAGAAVTTETEVIWARALPAGTSAQRAELIALTQALKMAEGKKLNVYTDSRYAFATAHVHGEIYRRRGWLTSEGREIKNKNEILALLKALFLPKRLSIIHCPGHQKGNSAEARGNRMADQAAREAAMKAVLETSTLLAGKRTADGSEFEKRTADGSEFESPKKKAKVE

SEQ ID NO: 1010 - protein, 2096 aa, synthetic construct
MPAAKRVKLDGGDKKYSIGLDIGTNSVGWAVITDEYKVPSKKFKVLGNTDRHSIKKNLIGALLFDSGETAEATRLKRTARRRYTRRKNRICYLQEIFSNEMAKVDDSFFHRLEESFLVEEDKKHERHPIFGNIVDEVAYHEKYPTIYHLRKKLVDSTDKADLRLIYLALAHMIKFRGHFLIEGDLNPDNSDVDKLFIQLVQTYNQLFEENPINASGVDAKAILSARLSKSRRLENLIAQLPGEKKNGLFGNLIALSLGLTPNFKSNFDLAEDAKLQLSKDTYDDDLDNLLAQIGDQYADLFLAAKNLSDAILLSDILRVNTEITKAPLSASMIKRYDEHHQDLTLLKALVRQQLPEKYKEIFFDQSKNGYAGYIDGGASQEEFYKFIKPILEKMDGTEELLVKLNREDLLRKQRTFDNGSIPHQIHLGELHAILRRQEDFYPFLKDNREKIEKILTFRIPYYVGPLARGNSRFAWMTRKSEETITPWNFEEVVDKGASAQSFIERMTNFDKNLPNEKVLPKHSLLYEYFTVYNELTKVKYVTEGMRKPAFLSGEQKKAIVDLLFKTNRKVTVKQLKEDYFKKIECFDSVEISGVEDRFNASLGTYHDLLKIIKDKDFLDNEENEDILEDIVLTLTLFEDREMIEERLKTYAHLFDDKVMKQLKRRRYTGWGRLSRKLINGIRDKQSGKTILDFLKSDGFANRNFMQLIHDDSLTFKEDIQKAQVSGQGDSLHEHIANLAGSPAIKKGILQTVKVVDELVKVMGRHKPENIVIEMARENQTTQKGQKNSRERMKRIEEGIKELGSQILKEHPVENTQLQNEKLYLYYLQNGRDMYVDQELDINRLSDYDVDHIVPQSFLKDDSIDNKVLTRSDKARGKSDNVPSEEVVKKMKNYWRQLLNAKLITQRKFDNLTKAERGGLSELDKAGFIKRQLVETRQITKHVAQILDSRMNTKYDENDKLIREVKVITLKSKLVSDFRKDFQFYKVREINNYHHAHDAYLNAVVGTALIKKYPKLESEFVYGDYKVYDVRKMIAKSEQEIGKATAKYFFYSNIMNFFKTEITLANGEIRKRPLIETNGETGEIVWDKGRDFATVRKVLSMPQVNIVKKTEVQTGGFSKESILPKRNSDKLIARKKDWDPKKYGGFDSPTVAYSVLVVAKVEKGKSKKLKSVKELLGITIMERSSFEKNPIDFLEAKGYKEVKKDLIIKLPKYSLFELENGRKRMLASAGELQKGNELALPSKYVNFLYLASHYEKLKGSPEDNEQKQLFVEQHKHYLDEIIEQISEFSKRVILADANLDKVLSAYNKHRDKPIREQAENIIHLFTLTNLGAPAAFKYFDTTIDRKRYTSTKEVLDATLIHQSITGLYETRIDLSQLGGDGGGSSPAPEAAAKGGTLNIEDEYRLHETSKEPDVPLGSTWLSDFPQAWAETGGMGLAVRQAPLIIPLKATSTPVSIKQYPMSQEARLGIKPHIQRLLDQGILVPCQSPWNTPLLPVKKPGTNDYRPVQDLREVNKRVEDIHPTVPNPYNLLSGLPPSHQWYTVLDLKDAFFCLRLHPTSQPLFAFEWRDPEMGISGQLTWTRLPQGFKNSPTLFNEALHRDLADFRIQHPDLILLQYVDDLLLAATSEQDCQRGTRALLQTLGNLGYRASAKKAQICQKQVKYLGYLLKEGQRWLTEARKETVMGQPTPKTPRQLREFLGKAGFCRLFIPGFAEMAAPLYPLTKPGTLFNWGPDQQKAYQEIKQALLTAPALGLPDLTKPFELFVDEKQGYAKGVLTQKLGPWRRPVAYLSKKLDPVAAGWPPCLRMVAAIAVLTKDAGKLTMGQPLVILAPHAVEALVKQPPDRWLSNARMTHYQAMLLDTDRVQFGPVVALNPATLLPLPEKEAPHDCLEILAETHGTRPDLTDQPIPDADYTWYTDGSSFLQEGQRRAGAAVTTETEVIWARALPAGTSAQRAELIALTQALKMAEGKKLNVYTDSRYAFATAHVHGEIYRRRGWLTSEGREIKNKNEILALLKALFLPKRLSIIHCPGHQKGNSAEARGNRMADQAAREAAMKAVLETSTLLAGKRTADGSEFEKRTADGSEFESPKKKAKVE

SEQ ID NO: 1011 - protein, 2088 aa, synthetic construct
MPAAKRVKLDGGDKKYSIGLDIGTNSVGWAVITDEYKVPSKKFKVLGNTDRHSIKKNLIGALLFDSGETAEATRLKRTARRRYTRRKNRICYLQEIFSNEMAKVDDSFFHRLEESFLVEEDKKHERHPIFGNIVDEVAYHEKYPTIYHLRKKLVDSTDKADLRLIYLALAHMIKFRGHFLIEGDLNPDNSDVDKLFIQLVQTYNQLFEENPINASGVDAKAILSARLSKSRRLENLIAQLPGEKKNGLFGNLIALSLGLTPNFKSNFDLAEDAKLQLSKDTYDDDLDNLLAQIGDQYADLFLAAKNLSDAILLSDILRVNTEITKAPLSASMIKRYDEHHQDLTLLKALVRQQLPEKYKEIFFDQSKNGYAGYIDGGASQEEFYKFIKPILEKMDGTEELLVKLNREDLLRKQRTFDNGSIPHQIHLGELHAILRRQEDFYPFLKDNREKIEKILTFRIPYYVGPLARGNSRFAWMTRKSEETITPWNFEEVVDKGASAQSFIERMTNFDKNLPNEKVLPKHSLLYEYFTVYNELTKVKYVTEGMRKPAFLSGEQKKAIVDLLFKTNRKVTVKQLKEDYFKKIECFDSVEISGVEDRFNASLGTYHDLLKIIKDKDFLDNEENEDILEDIVLTLTLFEDREMIEERLKTYAHLFDDKVMKQLKRRRYTGWGRLSRKLINGIRDKQSGKTILDFLKSDGFANRNFMQLIHDDSLTFKEDIQKAQVSGQGDSLHEHIANLAGSPAIKKGILQTVKVVDELVKVMGRHKPENIVIEMARENQTTQKGQKNSRERMKRIEEGIKELGSQILKEHPVENTQLQNEKLYLYYLQNGRDMYVDQELDINRLSDYDVDHIVPQSFLKDDSIDNKVLTRSDKARGKSDNVPSEEVVKKMKNYWRQLLNAKLITQRKFDNLTKAERGGLSELDKAGFIKRQLVETRQITKHVAQILDSRMNTKYDENDKLIREVKVITLKSKLVSDFRKDFQFYKVREINNYHHAHDAYLNAVVGTALIKKYPKLESEFVYGDYKVYDVRKMIAKSEQEIGKATAKYFFYSNIMNFFKTEITLANGEIRKRPLIETNGETGEIVWDKGRDFATVRKVLSMPQVNIVKKTEVQTGGFSKESILPKRNSDKLIARKKDWDPKKYGGFDSPTVAYSVLVVAKVEKGKSKKLKSVKELLGITIMERSSFEKNPIDFLEAKGYKEVKKDLIIKLPKYSLFELENGRKRMLASAGELQKGNELALPSKYVNFLYLASHYEKLKGSPEDNEQKQLFVEQHKHYLDEIIEQISEFSKRVILADANLDKVLSAYNKHRDKPIREQAENIIHLFTLTNLGAPAAFKYFDTTIDRKRYTSTKEVLDATLIHQSITGLYETRIDLSQLGGDGGGSSGGTLNIEDEYRLHETSKEPDVPLGSTWLSDFPQAWAETGGMGLAVRQAPLIIPLKATSTPVSIKQYPMSQEARLGIKPHIQRLLDQGILVPCQSPWNTPLLPVKKPGTNDYRPVQDLREVNKRVEDIHPTVPNPYNLLSGLPPSHQWYTVLDLKDAFFCLRLHPTSQPLFAFEWRDPEMGISGQLTWTRLPQGFKNSPTLFNEALHRDLADFRIQHPDLILLQYVDDLLLAATSEQDCQRGTRALLQTLGNLGYRASAKKAQICQKQVKYLGYLLKEGQRWLTEARKETVMGQPTPKTPRQLREFLGKAGFCRLFIPGFAEMAAPLYPLTKPGTLFNWGPDQQKAYQEIKQALLTAPALGLPDLTKPFELFVDEKQGYAKGVLTQKLGPWRRPVAYLSKKLDPVAAGWPPCLRMVAAIAVLTKDAGKLTMGQPLVILAPHAVEALVKQPPDRWLSNARMTHYQAMLLDTDRVQFGPVVALNPATLLPLPEKEAPHDCLEILAETHGTRPDLTDQPIPDADYTWYTDGSSFLQEGQRRAGAAVTTETEVIWARALPAGTSAQRAELIALTQALKMAEGKKLNVYTDSRYAFATAHVHGEIYRRRGWLTSEGREIKNKNEILALLKALFLPKRLSIIHCPGHQKGNSAEARGNRMADQAAREAAMKAVLETSTLLAGKRTADGSEFEKRTADGSEFESPKKKAKVE

SEQ ID NO: 1012 - protein, 2096 aa, synthetic construct
MPAAKRVKLDGGDKKYSIGLDIGTNSVGWAVITDEYKVPSKKFKVLGNTDRHSIKKNLIGALLFDSGETAEATRLKRTARRRYTRRKNRICYLQEIFSNEMAKVDDSFFHRLEESFLVEEDKKHERHPIFGNIVDEVAYHEKYPTIYHLRKKLVDSTDKADLRLIYLALAHMIKFRGHFLIEGDLNPDNSDVDKLFIQLVQTYNQLFEENPINASGVDAKAILSARLSKSRRLENLIAQLPGEKKNGLFGNLIALSLGLTPNFKSNFDLAEDAKLQLSKDTYDDDLDNLLAQIGDQYADLFLAAKNLSDAILLSDILRVNTEITKAPLSASMIKRYDEHHQDLTLLKALVRQQLPEKYKEIFFDQSKNGYAGYIDGGASQEEFYKFIKPILEKMDGTEELLVKLNREDLLRKQRTFDNGSIPHQIHLGELHAILRRQEDFYPFLKDNREKIEKILTFRIPYYVGPLARGNSRFAWMTRKSEETITPWNFEEVVDKGASAQSFIERMTNFDKNLPNEKVLPKHSLLYEYFTVYNELTKVKYVTEGMRKPAFLSGEQKKAIVDLLFKTNRKVTVKQLKEDYFKKIECFDSVEISGVEDRFNASLGTYHDLLKIIKDKDFLDNEENEDILEDIVLTLTLFEDREMIEERLKTYAHLFDDKVMKQLKRRRYTGWGRLSRKLINGIRDKQSGKTILDFLKSDGFANRNFMQLIHDDSLTFKEDIQKAQVSGQGDSLHEHIANLAGSPAIKKGILQTVKVVDELVKVMGRHKPENIVIEMARENQTTQKGQKNSRERMKRIEEGIKELGSQILKEHPVENTQLQNEKLYLYYLQNGRDMYVDQELDINRLSDYDVDHIVPQSFLKDDSIDNKVLTRSDKARGKSDNVPSEEVVKKMKNYWRQLLNAKLITQRKFDNLTKAERGGLSELDKAGFIKRQLVETRQITKHVAQILDSRMNTKYDENDKLIREVKVITLKSKLVSDFRKDFQFYKVREINNYHHAHDAYLNAVVGTALIKKYPKLESEFVYGDYKVYDVRKMIAKSEQEIGKATAKYFFYSNIMNFFKTEITLANGEIRKRPLIETNGETGEIVWDKGRDFATVRKVLSMPQVNIVKKTEVQTGGFSKESILPKRNSDKLIARKKDWDPKKYGGFDSPTVAYSVLVVAKVEKGKSKKLKSVKELLGITIMERSSFEKNPIDFLEAKGYKEVKKDLIIKLPKYSLFELENGRKRMLASAGELQKGNELALPSKYVNFLYLASHYEKLKGSPEDNEQKQLFVEQHKHYLDEIIEQISEFSKRVILADANLDKVLSAYNKHRDKPIREQAENIIHLFTLTNLGAPAAFKYFDTTIDRKRYTSTKEVLDATLIHQSITGLYETRIDLSQLGGDGGEAAAKGSSGGGGGTLNIEDEYRLHETSKEPDVPLGSTWLSDFPQAWAETGGMGLAVRQAPLIIPLKATSTPVSIKQYPMSQEARLGIKPHIQRLLDQGILVPCQSPWNTPLLPVKKPGTNDYRPVQDLREVNKRVEDIHPTVPNPYNLLSGLPPSHQWYTVLDLKDAFFCLRLHPTSQPLFAFEWRDPEMGISGQLTWTRLPQGFKNSPTLFNEALHRDLADFRIQHPDLILLQYVDDLLLAATSEQDCQRGTRALLQTLGNLGYRASAKKAQICQKQVKYLGYLLKEGQRWLTEARKETVMGQPTPKTPRQLREFLGKAGFCRLFIPGFAEMAAPLYPLTKPGTLFNWGPDQQKAYQEIKQALLTAPALGLPDLTKPFELFVDEKQGYAKGVLTQKLGPWRRPVAYLSKKLDPVAAGWPPCLRMVAAIAVLTKDAGKLTMGQPLVILAPHAVEALVKQPPDRWLSNARMTHYQAMLLDTDRVQFGPVVALNPATLLPLPEKEAPHDCLEILAETHGTRPDLTDQPIPDADYTWYTDGSSFLQEGQRRAGAAVTTETEVIWARALPAGTSAQRAELIALTQALKMAEGKKLNVYTDSRYAFATAHVHGEIYRRRGWLTSEGREIKNKNEILALLKALFLPKRLSIIHCPGHQKGNSAEARGNRMADQAAREAAMKAVLETSTLLAGKRTADGSEFEKRTADGSEFESPKKKAKVE

SEQ ID NO: 1013 - protein, 2094 aa, synthetic construct
MPAAKRVKLDGGDKKYSIGLDIGTNSVGWAVITDEYKVPSKKFKVLGNTDRHSIKKNLIGALLFDSGETAEATRLKRTARRRYTRRKNRICYLQEIFSNEMAKVDDSFFHRLEESFLVEEDKKHERHPIFGNIVDEVAYHEKYPTIYHLRKKLVDSTDKADLRLIYLALAHMIKFRGHFLIEGDLNPDNSDVDKLFIQLVQTYNQLFEENPINASGVDAKAILSARLSKSRRLENLIAQLPGEKKNGLFGNLIALSLGLTPNFKSNFDLAEDAKLQLSKDTYDDDLDNLLAQIGDQYADLFLAAKNLSDAILLSDILRVNTEITKAPLSASMIKRYDEHHQDLTLLKALVRQQLPEKYKEIFFDQSKNGYAGYIDGGASQEEFYKFIKPILEKMDGTEELLVKLNREDLLRKQRTFDNGSIPHQIHLGELHAILRRQEDFYPFLKDNREKIEKILTFRIPYYVGPLARGNSRFAWMTRKSEETITPWNFEEVVDKGASAQSFIERMTNFDKNLPNEKVLPKHSLLYEYFTVYNELTKVKYVTEGMRKPAFLSGEQKKAIVDLLFKTNRKVTVKQLKEDYFKKIECFDSVEISGVEDRFNASLGTYHDLLKIIKDKDFLDNEENEDILEDIVLTLTLFEDREMIEERLKTYAHLFDDKVMKQLKRRRYTGWGRLSRKLINGIRDKQSGKTILDFLKSDGFANRNFMQLIHDDSLTFKEDIQKAQVSGQGDSLHEHIANLAGSPAIKKGILQTVKVVDELVKVMGRHKPENIVIEMARENQTTQKGQKNSRERMKRIEEGIKELGSQILKEHPVENTQLQNEKLYLYYLQNGRDMYVDQELDINRLSDYDVDHIVPQSFLKDDSIDNKVLTRSDKARGKSDNVPSEEVVKKMKNYWRQLLNAKLITQRKFDNLTKAERGGLSELDKAGFIKRQLVETRQITKHVAQILDSRMNTKYDENDKLIREVKVITLKSKLVSDFRKDFQFYKVREINNYHHAHDAYLNAVVGTALIKKYPKLESEFVYGDYKVYDVRKMIAKSEQEIGKATAKYFFYSNIMNFFKTEITLANGEIRKRPLIETNGETGEIVWDKGRDFATVRKVLSMPQVNIVKKTEVQTGGFSKESILPKRNSDKLIARKKDWDPKKYGGFDSPTVAYSVLVVAKVEKGKSKKLKSVKELLGITIMERSSFEKNPIDFLEAKGYKEVKKDLIIKLPKYSLFELENGRKRMLASAGELQKGNELALPSKYVNFLYLASHYEKLKGSPEDNEQKQLFVEQHKHYLDEIIEQISEFSKRVILADANLDKVLSAYNKHRDKPIREQAENIIHLFTLTNLGAPAAFKYFDTTIDRKRYTSTKEVLDATLIHQSITGLYETRIDLSQLGGDGGGGGPAPGSSGGTLNIEDEYRLHETSKEPDVPLGSTWLSDFPQAWAETGGMGLAVRQAPLIIPLKATSTPVSIKQYPMSQEARLGIKPHIQRLLDQGILVPCQSPWNTPLLPVKKPGTNDYRPVQDLREVNKRVEDIHPTVPNPYNLLSGLPPSHQWYTVLDLKDAFFCLRLHPTSQPLFAFEWRDPEMGISGQLTWTRLPQGFKNSPTLFNEALHRDLADFRIQHPDLILLQYVDDLLLAATSEQDCQRGTRALLQTLGNLGYRASAKKAQICQKQVKYLGYLLKEGQRWLTEARKETVMGQPTPKTPRQLREFLGKAGFCRLFIPGFAEMAAPLYPLTKPGTLFNWGPDQQKAYQEIKQALLTAPALGLPDLTKPFELFVDEKQGYAKGVLTQKLGPWRRPVAYLSKKLDPVAAGWPPCLRMVAAIAVLTKDAGKLTMGQPLVILAPHAVEALVKQPPDRWLSNARMTHYQAMLLDTDRVQFGPVVALNPATLLPLPEKEAPHDCLEILAETHGTRPDLTDQPIPDADYTWYTDGSSFLQEGQRRAGAAVTTETEVIWARALPAGTSAQRAELIALTQALKMAEGKKLNVYTDSRYAFATAHVHGEIYRRRGWLTSEGREIKNKNEILALLKALFLPKRLSIIHCPGHQKGNSAEARGNRMADQAAREAAMKAVLETSTLLAGKRTADGSEFEKRTADGSEFESPKKKAKVE

SEQ ID NO: 1014 - protein, 2094 aa, synthetic construct
MPAAKRVKLDGGDKKYSIGLDIGTNSVGWAVITDEYKVPSKKFKVLGNTDRHSIKKNLIGALLFDSGETAEATRLKRTARRRYTRRKNRICYLQEIFSNEMAKVDDSFFHRLEESFLVEEDKKHERHPIFGNIVDEVAYHEKYPTIYHLRKKLVDSTDKADLRLIYLALAHMIKFRGHFLIEGDLNPDNSDVDKLFIQLVQTYNQLFEENPINASGVDAKAILSARLSKSRRLENLIAQLPGEKKNGLFGNLIALSLGLTPNFKSNFDLAEDAKLQLSKDTYDDDLDNLLAQIGDQYADLFLAAKNLSDAILLSDILRVNTEITKAPLSASMIKRYDEHHQDLTLLKALVRQQLPEKYKEIFFDQSKNGYAGYIDGGASQEEFYKFIKPILEKMDGTEELLVKLNREDLLRKQRTFDNGSIPHQIHLGELHAILRRQEDFYPFLKDNREKIEKILTFRIPYYVGPLARGNSRFAWMTRKSEETITPWNFEEVVDKGASAQSFIERMTNFDKNLPNEKVLPKHSLLYEYFTVYNELTKVKYVTEGMRKPAFLSGEQKKAIVDLLFKTNRKVTVKQLKEDYFKKIECFDSVEISGVEDRFNASLGTYHDLLKIIKDKDFLDNEENEDILEDIVLTLTLFEDREMIEERLKTYAHLFDDKVMKQLKRRRYTGWGRLSRKLINGIRDKQSGKTILDFLKSDGFANRNFMQLIHDDSLTFKEDIQKAQVSGQGDSLHEHIANLAGSPAIKKGILQTVKVVDELVKVMGRHKPENIVIEMARENQTTQKGQKNSRERMKRIEEGIKELGSQILKEHPVENTQLQNEKLYLYYLQNGRDMYVDQELDINRLSDYDVDHIVPQSFLKDDSIDNKVLTRSDKARGKSDNVPSEEVVKKMKNYWRQLLNAKLITQRKFDNLTKAERGGLSELDKAGFIKRQLVETRQITKHVAQILDSRMNTKYDENDKLIREVKVITLKSKLVSDFRKDFQFYKVREINNYHHAHDAYLNAVVGTALIKKYPKLESEFVYGDYKVYDVRKMIAKSEQEIGKATAKYFFYSNIMNFFKTEITLANGEIRKRPLIETNGETGEIVWDKGRDFATVRKVLSMPQVNIVKKTEVQTGGFSKESILPKRNSDKLIARKKDWDPKKYGGFDSPTVAYSVLVVAKVEKGKSKKLKSVKELLGITIMERSSFEKNPIDFLEAKGYKEVKKDLIIKLPKYSLFELENGRKRMLASAGELQKGNELALPSKYVNFLYLASHYEKLKGSPEDNEQKQLFVEQHKHYLDEIIEQISEFSKRVILADANLDKVLSAYNKHRDKPIREQAENIIHLFTLTNLGAPAAFKYFDTTIDRKRYTSTKEVLDATLIHQSITGLYETRIDLSQLGGDGGGSSPAPGGSGGTLNIEDEYRLHETSKEPDVPLGSTWLSDFPQAWAETGGMGLAVRQAPLIIPLKATSTPVSIKQYPMSQEARLGIKPHIQRLLDQGILVPCQSPWNTPLLPVKKPGTNDYRPVQDLREVNKRVEDIHPTVPNPYNLLSGLPPSHQWYTVLDLKDAFFCLRLHPTSQPLFAFEWRDPEMGISGQLTWTRLPQGFKNSPTLFNEALHRDLADFRIQHPDLILLQYVDDLLLAATSEQDCQRGTRALLQTLGNLGYRASAKKAQICQKQVKYLGYLLKEGQRWLTEARKETVMGQPTPKTPRQLREFLGKAGFCRLFIPGFAEMAAPLYPLTKPGTLFNWGPDQQKAYQEIKQALLTAPALGLPDLTKPFELFVDEKQGYAKGVLTQKLGPWRRPVAYLSKKLDPVAAGWPPCLRMVAAIAVLTKDAGKLTMGQPLVILAPHAVEALVKQPPDRWLSNARMTHYQAMLLDTDRVQFGPVVALNPATLLPLPEKEAPHDCLEILAETHGTRPDLTDQPIPDADYTWYTDGSSFLQEGQRRAGAAVTTETEVIWARALPAGTSAQRAELIALTQALKMAEGKKLNVYTDSRYAFATAHVHGEIYRRRGWLTSEGREIKNKNEILALLKALFLPKRLSIIHCPGHQKGNSAEARGNRMADQAAREAAMKAVLETSTLLAGKRTADGSEFEKRTADGSEFESPKKKAKVE

SEQ ID NO: 1015 - protein, 2094 aa, synthetic construct
MPAAKRVKLDGGDKKYSIGLDIGTNSVGWAVITDEYKVPSKKFKVLGNTDRHSIKKNLIGALLFDSGETAEATRLKRTARRRYTRRKNRICYLQEIFSNEMAKVDDSFFHRLEESFLVEEDKKHERHPIFGNIVDEVAYHEKYPTIYHLRKKLVDSTDKADLRLIYLALAHMIKFRGHFLIEGDLNPDNSDVDKLFIQLVQTYNQLFEENPINASGVDAKAILSARLSKSRRLENLIAQLPGEKKNGLFGNLIALSLGLTPNFKSNFDLAEDAKLQLSKDTYDDDLDNLLAQIGDQYADLFLAAKNLSDAILLSDILRVNTEITKAPLSASMIKRYDEHHQDLTLLKALVRQQLPEKYKEIFFDQSKNGYAGYIDGGASQEEFYKFIKPILEKMDGTEELLVKLNREDLLRKQRTFDNGSIPHQIHLGELHAILRRQEDFYPFLKDNREKIEKILTFRIPYYVGPLARGNSRFAWMTRKSEETITPWNFEEVVDKGASAQSFIERMTNFDKNLPNEKVLPKHSLLYEYFTVYNELTKVKYVTEGMRKPAFLSGEQKKAIVDLLFKTNRKVTVKQLKEDYFKKIECFDSVEISGVEDRFNASLGTYHDLLKIIKDKDFLDNEENEDILEDIVLTLTLFEDREMIEERLKTYAHLFDDKVMKQLKRRRYTGWGRLSRKLINGIRDKQSGKTILDFLKSDGFANRNFMQLIHDDSLTFKEDIQKAQVSGQGDSLHEHIANLAGSPAIKKGILQTVKVVDELVKVMGRHKPENIVIEMARENQTTQKGQKNSRERMKRIEEGIKELGSQILKEHPVENTQLQNEKLYLYYLQNGRDMYVDQELDINRLSDYDVDHIVPQSFLKDDSIDNKVLTRSDKARGKSDNVPSEEVVKKMKNYWRQLLNAKLITQRKFDNLTKAERGGLSELDKAGFIKRQLVETRQITKHVAQILDSRMNTKYDENDKLIREVKVITLKSKLVSDFRKDFQFYKVREINNYHHAHDAYLNAVVGTALIKKYPKLESEFVYGDYKVYDVRKMIAKSEQEIGKATAKYFFYSNIMNFFKTEITLANGEIRKRPLIETNGETGEIVWDKGRDFATVRKVLSMPQVNIVKKTEVQTGGFSKESILPKRNSDKLIARKKDWDPKKYGGFDSPTVAYSVLVVAKVEKGKSKKLKSVKELLGITIMERSSFEKNPIDFLEAKGYKEVKKDLIIKLPKYSLFELENGRKRMLASAGELQKGNELALPSKYVNFLYLASHYEKLKGSPEDNEQKQLFVEQHKHYLDEIIEQISEFSKRVILADANLDKVLSAYNKHRDKPIREQAENIIHLFTLTNLGAPAAFKYFDTTIDRKRYTSTKEVLDATLIHQSITGLYETRIDLSQLGGDGGGGGGGSPAPGGTLNIEDEYRLHETSKEPDVPLGSTWLSDFPQAWAETGGMGLAVRQAPLIIPLKATSTPVSIKQYPMSQEARLGIKPHIQRLLDQGILVPCQSPWNTPLLPVKKPGTNDYRPVQDLREVNKRVEDIHPTVPNPYNLLSGLPPSHQWYTVLDLKDAFFCLRLHPTSQPLFAFEWRDPEMGISGQLTWTRLPQGFKNSPTLFNEALHRDLADFRIQHPDLILLQYVDDLLLAATSEQDCQRGTRALLQTLGNLGYRASAKKAQICQKQVKYLGYLLKEGQRWLTEARKETVMGQPTPKTPRQLREFLGKAGFCRLFIPGFAEMAAPLYPLTKPGTLFNWGPDQQKAYQEIKQALLTAPALGLPDLTKPFELFVDEKQGYAKGVLTQKLGPWRRPVAYLSKKLDPVAAGWPPCLRMVAAIAVLTKDAGKLTMGQPLVILAPHAVEALVKQPPDRWLSNARMTHYQAMLLDTDRVQFGPVVALNPATLLPLPEKEAPHDCLEILAETHGTRPDLTDQPIPDADYTWYTDGSSFLQEGQRRAGAAVTTETEVIWARALPAGTSAQRAELIALTQALKMAEGKKLNVYTDSRYAFATAHVHGEIYRRRGWLTSEGREIKNKNEILALLKALFLPKRLSIIHCPGHQKGNSAEARGNRMADQAAREAAMKAVLETSTLLAGKRTADGSEFEKRTADGSEFESPKKKAKVE

SEQ ID NO: 1016 - protein, 2091 aa, synthetic construct
MPAAKRVKLDGGDKKYSIGLDIGTNSVGWAVITDEYKVPSKKFKVLGNTDRHSIKKNLIGALLFDSGETAEATRLKRTARRRYTRRKNRICYLQEIFSNEMAKVDDSFFHRLEESFLVEEDKKHERHPIFGNIVDEVAYHEKYPTIYHLRKKLVDSTDKADLRLIYLALAHMIKFRGHFLIEGDLNPDNSDVDKLFIQLVQTYNQLFEENPINASGVDAKAILSARLSKSRRLENLIAQLPGEKKNGLFGNLIALSLGLTPNFKSNFDLAEDAKLQLSKDTYDDDLDNLLAQIGDQYADLFLAAKNLSDAILLSDILRVNTEITKAPLSASMIKRYDEHHQDLTLLKALVRQQLPEKYKEIFFDQSKNGYAGYIDGGASQEEFYKFIKPILEKMDGTEELLVKLNREDLLRKQRTFDNGSIPHQIHLGELHAILRRQEDFYPFLKDNREKIEKILTFRIPYYVGPLARGNSRFAWMTRKSEETITPWNFEEVVDKGASAQSFIERMTNFDKNLPNEKVLPKHSLLYEYFTVYNELTKVKYVTEGMRKPAFLSGEQKKAIVDLLFKTNRKVTVKQLKEDYFKKIECFDSVEISGVEDRFNASLGTYHDLLKIIKDKDFLDNEENEDILEDIVLTLTLFEDREMIEERLKTYAHLFDDKVMKQLKRRRYTGWGRLSRKLINGIRDKQSGKTILDFLKSDGFANRNFMQLIHDDSLTFKEDIQKAQVSGQGDSLHEHIANLAGSPAIKKGILQTVKVVDELVKVMGRHKPENIVIEMARENQTTQKGQKNSRERMKRIEEGIKELGSQILKEHPVENTQLQNEKLYLYYLQNGRDMYVDQELDINRLSDYDVDHIVPQSFLKDDSIDNKVLTRSDKARGKSDNVPSEEVVKKMKNYWRQLLNAKLITQRKFDNLTKAERGGLSELDKAGFIKRQLVETRQITKHVAQILDSRMNTKYDENDKLIREVKVITLKSKLVSDFRKDFQFYKVREINNYHHAHDAYLNAVVGTALIKKYPKLESEFVYGDYKVYDVRKMIAKSEQEIGKATAKYFFYSNIMNFFKTEITLANGEIRKRPLIETNGETGEIVWDKGRDFATVRKVLSMPQVNIVKKTEVQTGGFSKESILPKRNSDKLIARKKDWDPKKYGGFDSPTVAYSVLVVAKVEKGKSKKLKSVKELLGITIMERSSFEKNPIDFLEAKGYKEVKKDLIIKLPKYSLFELENGRKRMLASAGELQKGNELALPSKYVNFLYLASHYEKLKGSPEDNEQKQLFVEQHKHYLDEIIEQISEFSKRVILADANLDKVLSAYNKHRDKPIREQAENIIHLFTLTNLGAPAAFKYFDTTIDRKRYTSTKEVLDATLIHQSITGLYETRIDLSQLGGDGGGGSGSSGGTLNIEDEYRLHETSKEPDVPLGSTWLSDFPQAWAETGGMGLAVRQAPLIIPLKATSTPVSIKQYPMSQEARLGIKPHIQRLLDQGILVPCQSPWNTPLLPVKKPGTNDYRPVQDLREVNKRVEDIHPTVPNPYNLLSGLPPSHQWYTVLDLKDAFFCLRLHPTSQPLFAFEWRDPEMGISGQLTWTRLPQGFKNSPTLFNEALHRDLADFRIQHPDLILLQYVDDLLLAATSEQDCQRGTRALLQTLGNLGYRASAKKAQICQKQVKYLGYLLKEGQRWLTEARKETVMGQPTPKTPRQLREFLGKAGFCRLFIPGFAEMAAPLYPLTKPGTLFNWGPDQQKAYQEIKQALLTAPALGLPDLTKPFELFVDEKQGYAKGVLTQKLGPWRRPVAYLSKKLDPVAAGWPPCLRMVAAIAVLTKDAGKLTMGQPLVILAPHAVEALVKQPPDRWLSNARMTHYQAMLLDTDRVQFGPVVALNPATLLPLPEKEAPHDCLEILAETHGTRPDLTDQPIPDADYTWYTDGSSFLQEGQRRAGAAVTTETEVIWARALPAGTSAQRAELIALTQALKMAEGKKLNVYTDSRYAFATAHVHGEIYRRRGWLTSEGREIKNKNEILALLKALFLPKRLSIIHCPGHQKGNSAEARGNRMADQAAREAAMKAVLETSTLLAGKRTADGSEFEKRTADGSEFESPKKKAKVE

SEQ ID NO: 1017 - protein, 2091 aa, synthetic construct
MPAAKRVKLDGGDKKYSIGLDIGTNSVGWAVITDEYKVPSKKFKVLGNTDRHSIKKNLIGALLFDSGETAEATRLKRTARRRYTRRKNRICYLQEIFSNEMAKVDDSFFHRLEESFLVEEDKKHERHPIFGNIVDEVAYHEKYPTIYHLRKKLVDSTDKADLRLIYLALAHMIKFRGHFLIEGDLNPDNSDVDKLFIQLVQTYNQLFEENPINASGVDAKAILSARLSKSRRLENLIAQLPGEKKNGLFGNLIALSLGLTPNFKSNFDLAEDAKLQLSKDTYDDDLDNLLAQIGDQYADLFLAAKNLSDAILLSDILRVNTEITKAPLSASMIKRYDEHHQDLTLLKALVRQQLPEKYKEIFFDQSKNGYAGYIDGGASQEEFYKFIKPILEKMDGTEELLVKLNREDLLRKQRTFDNGSIPHQIHLGELHAILRRQEDFYPFLKDNREKIEKILTFRIPYYVGPLARGNSRFAWMTRKSEETITPWNFEEVVDKGASAQSFIERMTNFDKNLPNEKVLPKHSLLYEYFTVYNELTKVKYVTEGMRKPAFLSGEQKKAIVDLLFKTNRKVTVKQLKEDYFKKIECFDSVEISGVEDRFNASLGTYHDLLKIIKDKDFLDNEENEDILEDIVLTLTLFEDREMIEERLKTYAHLFDDKVMKQLKRRRYTGWGRLSRKLINGIRDKQSGKTILDFLKSDGFANRNFMQLIHDDSLTFKEDIQKAQVSGQGDSLHEHIANLAGSPAIKKGILQTVKVVDELVKVMGRHKPENIVIEMARENQTTQKGQKNSRERMKRIEEGIKELGSQILKEHPVENTQLQNEKLYLYYLQNGRDMYVDQELDINRLSDYDVDHIVPQSFLKDDSIDNKVLTRSDKARGKSDNVPSEEVVKKMKNYWRQLLNAKLITQRKFDNLTKAERGGLSELDKAGFIKRQLVETRQITKHVAQILDSRMNTKYDENDKLIREVKVITLKSKLVSDFRKDFQFYKVREINNYHHAHDAYLNAVVGTALIKKYPKLESEFVYGDYKVYDVRKMIAKSEQEIGKATAKYFFYSNIMNFFKTEITLANGEIRKRPLIETNGETGEIVWDKGRDFATVRKVLSMPQVNIVKKTEVQTGGFSKESILPKRNSDKLIARKKDWDPKKYGGFDSPTVAYSVLVVAKVEKGKSKKLKSVKELLGITIMERSSFEKNPIDFLEAKGYKEVKKDLIIKLPKYSLFELENGRKRMLASAGELQKGNELALPSKYVNFLYLASHYEKLKGSPEDNEQKQLFVEQHKHYLDEIIEQISEFSKRVILADANLDKVLSAYNKHRDKPIREQAENIIHLFTLTNLGAPAAFKYFDTTIDRKRYTSTKEVLDATLIHQSITGLYETRIDLSQLGGDGGGGSPAPGGTLNIEDEYRLHETSKEPDVPLGSTWLSDFPQAWAETGGMGLAVRQAPLIIPLKATSTPVSIKQYPMSQEARLGIKPHIQRLLDQGILVPCQSPWNTPLLPVKKPGTNDYRPVQDLREVNKRVEDIHPTVPNPYNLLSGLPPSHQWYTVLDLKDAFFCLRLHPTSQPLFAFEWRDPEMGISGQLTWTRLPQGFKNSPTLFNEALHRDLADFRIQHPDLILLQYVDDLLLAATSEQDCQRGTRALLQTLGNLGYRASAKKAQICQKQVKYLGYLLKEGQRWLTEARKETVMGQPTPKTPRQLREFLGKAGFCRLFIPGFAEMAAPLYPLTKPGTLFNWGPDQQKAYQEIKQALLTAPALGLPDLTKPFELFVDEKQGYAKGVLTQKLGPWRRPVAYLSKKLDPVAAGWPPCLRMVAAIAVLTKDAGKLTMGQPLVILAPHAVEALVKQPPDRWLSNARMTHYQAMLLDTDRVQFGPVVALNPATLLPLPEKEAPHDCLEILAETHGTRPDLTDQPIPDADYTWYTDGSSFLQEGQRRAGAAVTTETEVIWARALPAGTSAQRAELIALTQALKMAEGKKLNVYTDSRYAFATAHVHGEIYRRRGWLTSEGREIKNKNEILALLKALFLPKRLSIIHCPGHQKGNSAEARGNRMADQAAREAAMKAVLETSTLLAGKRTADGSEFEKRTADGSEFESPKKKAKVE

SEQ ID NO: 1018 - protein, 2096 aa, synthetic construct
MPAAKRVKLDGGDKKYSIGLDIGTNSVGWAVITDEYKVPSKKFKVLGNTDRHSIKKNLIGALLFDSGETAEATRLKRTARRRYTRRKNRICYLQEIFSNEMAKVDDSFFHRLEESFLVEEDKKHERHPIFGNIVDEVAYHEKYPTIYHLRKKLVDSTDKADLRLIYLALAHMIKFRGHFLIEGDLNPDNSDVDKLFIQLVQTYNQLFEENPINASGVDAKAILSARLSKSRRLENLIAQLPGEKKNGLFGNLIALSLGLTPNFKSNFDLAEDAKLQLSKDTYDDDLDNLLAQIGDQYADLFLAAKNLSDAILLSDILRVNTEITKAPLSASMIKRYDEHHQDLTLLKALVRQQLPEKYKEIFFDQSKNGYAGYIDGGASQEEFYKFIKPILEKMDGTEELLVKLNREDLLRKQRTFDNGSIPHQIHLGELHAILRRQEDFYPFLKDNREKIEKILTFRIPYYVGPLARGNSRFAWMTRKSEETITPWNFEEVVDKGASAQSFIERMTNFDKNLPNEKVLPKHSLLYEYFTVYNELTKVKYVTEGMRKPAFLSGEQKKAIVDLLFKTNRKVTVKQLKEDYFKKIECFDSVEISGVEDRFNASLGTYHDLLKIIKDKDFLDNEENEDILEDIVLTLTLFEDREMIEERLKTYAHLFDDKVMKQLKRRRYTGWGRLSRKLINGIRDKQSGKTILDFLKSDGFANRNFMQLIHDDSLTFKEDIQKAQVSGQGDSLHEHIANLAGSPAIKKGILQTVKVVDELVKVMGRHKPENIVIEMARENQTTQKGQKNSRERMKRIEEGIKELGSQILKEHPVENTQLQNEKLYLYYLQNGRDMYVDQELDINRLSDYDVDHIVPQSFLKDDSIDNKVLTRSDKARGKSDNVPSEEVVKKMKNYWRQLLNAKLITQRKFDNLTKAERGGLSELDKAGFIKRQLVETRQITKHVAQILDSRMNTKYDENDKLIREVKVITLKSKLVSDFRKDFQFYKVREINNYHHAHDAYLNAVVGTALIKKYPKLESEFVYGDYKVYDVRKMIAKSEQEIGKATAKYFFYSNIMNFFKTEITLANGEIRKRPLIETNGETGEIVWDKGRDFATVRKVLSMPQVNIVKKTEVQTGGFSKESILPKRNSDKLIARKKDWDPKKYGGFDSPTVAYSVLVVAKVEKGKSKKLKSVKELLGITIMERSSFEKNPIDFLEAKGYKEVKKDLIIKLPKYSLFELENGRKRMLASAGELQKGNELALPSKYVNFLYLASHYEKLKGSPEDNEQKQLFVEQHKHYLDEIIEQISEFSKRVILADANLDKVLSAYNKHRDKPIREQAENIIHLFTLTNLGAPAAFKYFDTTIDRKRYTSTKEVLDATLIHQSITGLYETRIDLSQLGGDGGGGGEAAAKGGSGGTLNIEDEYRLHETSKEPDVPLGSTWLSDFPQAWAETGGMGLAVRQAPLIIPLKATSTPVSIKQYPMSQEARLGIKPHIQRLLDQGILVPCQSPWNTPLLPVKKPGTNDYRPVQDLREVNKRVEDIHPTVPNPYNLLSGLPPSHQWYTVLDLKDAFFCLRLHPTSQPLFAFEWRDPEMGISGQLTWTRLPQGFKNSPTLFNEALHRDLADFRIQHPDLILLQYVDDLLLAATSEQDCQRGTRALLQTLGNLGYRASAKKAQICQKQVKYLGYLLKEGQRWLTEARKETVMGQPTPKTPRQLREFLGKAGFCRLFIPGFAEMAAPLYPLTKPGTLFNWGPDQQKAYQEIKQALLTAPALGLPDLTKPFELFVDEKQGYAKGVLTQKLGPWRRPVAYLSKKLDPVAAGWPPCLRMVAAIAVLTKDAGKLTMGQPLVILAPHAVEALVKQPPDRWLSNARMTHYQAMLLDTDRVQFGPVVALNPATLLPLPEKEAPHDCLEILAETHGTRPDLTDQPIPDADYTWYTDGSSFLQEGQRRAGAAVTTETEVIWARALPAGTSAQRAELIALTQALKMAEGKKLNVYTDSRYAFATAHVHGEIYRRRGWLTSEGREIKNKNEILALLKALFLPKRLSIIHCPGHQKGNSAEARGNRMADQAAREAAMKAVLETSTLLAGKRTADGSEFEKRTADGSEFESPKKKAKVE

SEQ ID NO: 1019 - protein, 2097 aa, synthetic construct
MPAAKRVKLDGGDKKYSIGLDIGTNSVGWAVITDEYKVPSKKFKVLGNTDRHSIKKNLIGALLFDSGETAEATRLKRTARRRYTRRKNRICYLQEIFSNEMAKVDDSFFHRLEESFLVEEDKKHERHPIFGNIVDEVAYHEKYPTIYHLRKKLVDSTDKADLRLIYLALAHMIKFRGHFLIEGDLNPDNSDVDKLFIQLVQTYNQLFEENPINASGVDAKAILSARLSKSRRLENLIAQLPGEKKNGLFGNLIALSLGLTPNFKSNFDLAEDAKLQLSKDTYDDDLDNLLAQIGDQYADLFLAAKNLSDAILLSDILRVNTEITKAPLSASMIKRYDEHHQDLTLLKALVRQQLPEKYKEIFFDQSKNGYAGYIDGGASQEEFYKFIKPILEKMDGTEELLVKLNREDLLRKQRTFDNGSIPHQIHLGELHAILRRQEDFYPFLKDNREKIEKILTFRIPYYVGPLARGNSRFAWMTRKSEETITPWNFEEVVDKGASAQSFIERMTNFDKNLPNEKVLPKHSLLYEYFTVYNELTKVKYVTEGMRKPAFLSGEQKKAIVDLLFKTNRKVTVKQLKEDYFKKIECFDSVEISGVEDRFNASLGTYHDLLKIIKDKDFLDNEENEDILEDIVLTLTLFEDREMIEERLKTYAHLFDDKVMKQLKRRRYTGWGRLSRKLINGIRDKQSGKTILDFLKSDGFANRNFMQLIHDDSLTFKEDIQKAQVSGQGDSLHEHIANLAGSPAIKKGILQTVKVVDELVKVMGRHKPENIVIEMARENQTTQKGQKNSRERMKRIEEGIKELGSQILKEHPVENTQLQNEKLYLYYLQNGRDMYVDQELDINRLSDYDVDHIVPQSFLKDDSIDNKVLTRSDKARGKSDNVPSEEVVKKMKNYWRQLLNAKLITQRKFDNLTKAERGGLSELDKAGFIKRQLVETRQITKHVAQILDSRMNTKYDENDKLIREVKVITLKSKLVSDFRKDFQFYKVREINNYHHAHDAYLNAVVGTALIKKYPKLESEFVYGDYKVYDVRKMIAKSEQEIGKATAKYFFYSNIMNFFKTEITLANGEIRKRPLIETNGETGEIVWDKGRDFATVRKVLSMPQVNIVKKTEVQTGGFSKESILPKRNSDKLIARKKDWDPKKYGGFDSPTVAYSVLVVAKVEKGKSKKLKSVKELLGITIMERSSFEKNPIDFLEAKGYKEVKKDLIIKLPKYSLFELENGRKRMLASAGELQKGNELALPSKYVNFLYLASHYEKLKGSPEDNEQKQLFVEQHKHYLDEIIEQISEFSKRVILADANLDKVLSAYNKHRDKPIREQAENIIHLFTLTNLGAPAAFKYFDTTIDRKRYTSTKEVLDATLIHQSITGLYETRIDLSQLGGDGGGGSGGSGGSGGSGGTLNIEDEYRLHETSKEPDVPLGSTWLSDFPQAWAETGGMGLAVRQAPLIIPLKATSTPVSIKQYPMSQEARLGIKPHIQRLLDQGILVPCQSPWNTPLLPVKKPGTNDYRPVQDLREVNKRVEDIHPTVPNPYNLLSGLPPSHQWYTVLDLKDAFFCLRLHPTSQPLFAFEWRDPEMGISGQLTWTRLPQGFKNSPTLFNEALHRDLADFRIQHPDLILLQYVDDLLLAATSEQDCQRGTRALLQTLGNLGYRASAKKAQICQKQVKYLGYLLKEGQRWLTEARKETVMGQPTPKTPRQLREFLGKAGFCRLFIPGFAEMAAPLYPLTKPGTLFNWGPDQQKAYQEIKQALLTAPALGLPDLTKPFELFVDEKQGYAKGVLTQKLGPWRRPVAYLSKKLDPVAAGWPPCLRMVAAIAVLTKDAGKLTMGQPLVILAPHAVEALVKQPPDRWLSNARMTHYQAMLLDTDRVQFGPVVALNPATLLPLPEKEAPHDCLEILAETHGTRPDLTDQPIPDADYTWYTDGSSFLQEGQRRAGAAVTTETEVIWARALPAGTSAQRAELIALTQALKMAEGKKLNVYTDSRYAFATAHVHGEIYRRRGWLTSEGREIKNKNEILALLKALFLPKRLSIIHCPGHQKGNSAEARGNRMADQAAREAAMKAVLETSTLLAGKRTADGSEFEKRTADGSEFESPKKKAKVE

SEQ ID NO: 1020 - protein, 2098 aa, synthetic construct
MPAAKRVKLDGGDKKYSIGLDIGTNSVGWAVITDEYKVPSKKFKVLGNTDRHSIKKNLIGALLFDSGETAEATRLKRTARRRYTRRKNRICYLQEIFSNEMAKVDDSFFHRLEESFLVEEDKKHERHPIFGNIVDEVAYHEKYPTIYHLRKKLVDSTDKADLRLIYLALAHMIKFRGHFLIEGDLNPDNSDVDKLFIQLVQTYNQLFEENPINASGVDAKAILSARLSKSRRLENLIAQLPGEKKNGLFGNLIALSLGLTPNFKSNFDLAEDAKLQLSKDTYDDDLDNLLAQIGDQYADLFLAAKNLSDAILLSDILRVNTEITKAPLSASMIKRYDEHHQDLTLLKALVRQQLPEKYKEIFFDQSKNGYAGYIDGGASQEEFYKFIKPILEKMDGTEELLVKLNREDLLRKQRTFDNGSIPHQIHLGELHAILRRQEDFYPFLKDNREKIEKILTFRIPYYVGPLARGNSRFAWMTRKSEETITPWNFEEVVDKGASAQSFIERMTNFDKNLPNEKVLPKHSLLYEYFTVYNELTKVKYVTEGMRKPAFLSGEQKKAIVDLLFKTNRKVTVKQLKEDYFKKIECFDSVEISGVEDRFNASLGTYHDLLKIIKDKDFLDNEENEDILEDIVLTLTLFEDREMIEERLKTYAHLFDDKVMKQLKRRRYTGWGRLSRKLINGIRDKQSGKTILDFLKSDGFANRNFMQLIHDDSLTFKEDIQKAQVSGQGDSLHEHIANLAGSPAIKKGILQTVKVVDELVKVMGRHKPENIVIEMARENQTTQKGQKNSRERMKRIEEGIKELGSQILKEHPVENTQLQNEKLYLYYLQNGRDMYVDQELDINRLSDYDVDHIVPQSFLKDDSIDNKVLTRSDKARGKSDNVPSEEVVKKMKNYWRQLLNAKLITQRKFDNLTKAERGGLSELDKAGFIKRQLVETRQITKHVAQILDSRMNTKYDENDKLIREVKVITLKSKLVSDFRKDFQFYKVREINNYHHAHDAYLNAVVGTALIKKYPKLESEFVYGDYKVYDVRKMIAKSEQEIGKATAKYFFYSNIMNFFKTEITLANGEIRKRPLIETNGETGEIVWDKGRDFATVRKVLSMPQVNIVKKTEVQTGGFSKESILPKRNSDKLIARKKDWDPKKYGGFDSPTVAYSVLVVAKVEKGKSKKLKSVKELLGITIMERSSFEKNPIDFLEAKGYKEVKKDLIIKLPKYSLFELENGRKRMLASAGELQKGNELALPSKYVNFLYLASHYEKLKGSPEDNEQKQLFVEQHKHYLDEIIEQISEFSKRVILADANLDKVLSAYNKHRDKPIREQAENIIHLFTLTNLGAPAAFKYFDTTIDRKRYTSTKEVLDATLIHQSITGLYETRIDLSQLGGDGGPAPAPAPAPAPAPGGTLNIEDEYRLHETSKEPDVPLGSTWLSDFPQAWAETGGMGLAVRQAPLIIPLKATSTPVSIKQYPMSQEARLGIKPHIQRLLDQGILVPCQSPWNTPLLPVKKPGTNDYRPVQDLREVNKRVEDIHPTVPNPYNLLSGLPPSHQWYTVLDLKDAFFCLRLHPTSQPLFAFEWRDPEMGISGQLTWTRLPQGFKNSPTLFNEALHRDLADFRIQHPDLILLQYVDDLLLAATSEQDCQRGTRALLQTLGNLGYRASAKKAQICQKQVKYLGYLLKEGQRWLTEARKETVMGQPTPKTPRQLREFLGKAGFCRLFIPGFAEMAAPLYPLTKPGTLFNWGPDQQKAYQEIKQALLTAPALGLPDLTKPFELFVDEKQGYAKGVLTQKLGPWRRPVAYLSKKLDPVAAGWPPCLRMVAAIAVLTKDAGKLTMGQPLVILAPHAVEALVKQPPDRWLSNARMTHYQAMLLDTDRVQFGPVVALNPATLLPLPEKEAPHDCLEILAETHGTRPDLTDQPIPDADYTWYTDGSSFLQEGQRRAGAAVTTETEVIWARALPAGTSAQRAELIALTQALKMAEGKKLNVYTDSRYAFATAHVHGEIYRRRGWLTSEGREIKNKNEILALLKALFLPKRLSIIHCPGHQKGNSAEARGNRMADQAAREAAMKAVLETSTLLAGKRTADGSEFEKRTADGSEFESPKKKAKVE

SEQ ID NO: 1021 - protein, 2115 aa, synthetic construct
MPAAKRVKLDGGDKKYSIGLDIGTNSVGWAVITDEYKVPSKKFKVLGNTDRHSIKKNLIGALLFDSGETAEATRLKRTARRRYTRRKNRICYLQEIFSNEMAKVDDSFFHRLEESFLVEEDKKHERHPIFGNIVDEVAYHEKYPTIYHLRKKLVDSTDKADLRLIYLALAHMIKFRGHFLIEGDLNPDNSDVDKLFIQLVQTYNQLFEENPINASGVDAKAILSARLSKSRRLENLIAQLPGEKKNGLFGNLIALSLGLTPNFKSNFDLAEDAKLQLSKDTYDDDLDNLLAQIGDQYADLFLAAKNLSDAILLSDILRVNTEITKAPLSASMIKRYDEHHQDLTLLKALVRQQLPEKYKEIFFDQSKNGYAGYIDGGASQEEFYKFIKPILEKMDGTEELLVKLNREDLLRKQRTFDNGSIPHQIHLGELHAILRRQEDFYPFLKDNREKIEKILTFRIPYYVGPLARGNSRFAWMTRKSEETITPWNFEEVVDKGASAQSFIERMTNFDKNLPNEKVLPKHSLLYEYFTVYNELTKVKYVTEGMRKPAFLSGEQKKAIVDLLFKTNRKVTVKQLKEDYFKKIECFDSVEISGVEDRFNASLGTYHDLLKIIKDKDFLDNEENEDILEDIVLTLTLFEDREMIEERLKTYAHLFDDKVMKQLKRRRYTGWGRLSRKLINGIRDKQSGKTILDFLKSDGFANRNFMQLIHDDSLTFKEDIQKAQVSGQGDSLHEHIANLAGSPAIKKGILQTVKVVDELVKVMGRHKPENIVIEMARENQTTQKGQKNSRERMKRIEEGIKELGSQILKEHPVENTQLQNEKLYLYYLQNGRDMYVDQELDINRLSDYDVDHIVPQSFLKDDSIDNKVLTRSDKARGKSDNVPSEEVVKKMKNYWRQLLNAKLITQRKFDNLTKAERGGLSELDKAGFIKRQLVETRQITKHVAQILDSRMNTKYDENDKLIREVKVITLKSKLVSDFRKDFQFYKVREINNYHHAHDAYLNAVVGTALIKKYPKLESEFVYGDYKVYDVRKMIAKSEQEIGKATAKYFFYSNIMNFFKTEITLANGEIRKRPLIETNGETGEIVWDKGRDFATVRKVLSMPQVNIVKKTEVQTGGFSKESILPKRNSDKLIARKKDWDPKKYGGFDSPTVAYSVLVVAKVEKGKSKKLKSVKELLGITIMERSSFEKNPIDFLEAKGYKEVKKDLIIKLPKYSLFELENGRKRMLASAGELQKGNELALPSKYVNFLYLASHYEKLKGSPEDNEQKQLFVEQHKHYLDEIIEQISEFSKRVILADANLDKVLSAYNKHRDKPIREQAENIIHLFTLTNLGAPAAFKYFDTTIDRKRYTSTKEVLDATLIHQSITGLYETRIDLSQLGGDGGGGGGSGGGGSGGGGSGGGGSGGGGSGGGGSGGTLNIEDEYRLHETSKEPDVPLGSTWLSDFPQAWAETGGMGLAVRQAPLIIPLKATSTPVSIKQYPMSQEARLGIKPHIQRLLDQGILVPCQSPWNTPLLPVKKPGTNDYRPVQDLREVNKRVEDIHPTVPNPYNLLSGLPPSHQWYTVLDLKDAFFCLRLHPTSQPLFAFEWRDPEMGISGQLTWTRLPQGFKNSPTLFNEALHRDLADFRIQHPDLILLQYVDDLLLAATSEQDCQRGTRALLQTLGNLGYRASAKKAQICQKQVKYLGYLLKEGQRWLTEARKETVMGQPTPKTPRQLREFLGKAGFCRLFIPGFAEMAAPLYPLTKPGTLFNWGPDQQKAYQEIKQALLTAPALGLPDLTKPFELFVDEKQGYAKGVLTQKLGPWRRPVAYLSKKLDPVAAGWPPCLRMVAAIAVLTKDAGKLTMGQPLVILAPHAVEALVKQPPDRWLSNARMTHYQAMLLDTDRVQFGPVVALNPATLLPLPEKEAPHDCLEILAETHGTRPDLTDQPIPDADYTWYTDGSSFLQEGQRRAGAAVTTETEVIWARALPAGTSAQRAELIALTQALKMAEGKKLNVYTDSRYAFATAHVHGEIYRRRGWLTSEGREIKNKNEILALLKALFLPKRLSIIHCPGHQKGNSAEARGNRMADQAAREAAMKAVLETSTLLAGKRTADGSEFEKRTADGSEFESPKKKAKVE

SEQ ID NO: 1022 - protein, 2094 aa, synthetic construct
MPAAKRVKLDGGDKKYSIGLDIGTNSVGWAVITDEYKVPSKKFKVLGNTDRHSIKKNLIGALLFDSGETAEATRLKRTARRRYTRRKNRICYLQEIFSNEMAKVDDSFFHRLEESFLVEEDKKHERHPIFGNIVDEVAYHEKYPTIYHLRKKLVDSTDKADLRLIYLALAHMIKFRGHFLIEGDLNPDNSDVDKLFIQLVQTYNQLFEENPINASGVDAKAILSARLSKSRRLENLIAQLPGEKKNGLFGNLIALSLGLTPNFKSNFDLAEDAKLQLSKDTYDDDLDNLLAQIGDQYADLFLAAKNLSDAILLSDILRVNTEITKAPLSASMIKRYDEHHQDLTLLKALVRQQLPEKYKEIFFDQSKNGYAGYIDGGASQEEFYKFIKPILEKMDGTEELLVKLNREDLLRKQRTFDNGSIPHQIHLGELHAILRRQEDFYPFLKDNREKIEKILTFRIPYYVGPLARGNSRFAWMTRKSEETITPWNFEEVVDKGASAQSFIERMTNFDKNLPNEKVLPKHSLLYEYFTVYNELTKVKYVTEGMRKPAFLSGEQKKAIVDLLFKTNRKVTVKQLKEDYFKKIECFDSVEISGVEDRFNASLGTYHDLLKIIKDKDFLDNEENEDILEDIVLTLTLFEDREMIEERLKTYAHLFDDKVMKQLKRRRYTGWGRLSRKLINGIRDKQSGKTILDFLKSDGFANRNFMQLIHDDSLTFKEDIQKAQVSGQGDSLHEHIANLAGSPAIKKGILQTVKVVDELVKVMGRHKPENIVIEMARENQTTQKGQKNSRERMKRIEEGIKELGSQILKEHPVENTQLQNEKLYLYYLQNGRDMYVDQELDINRLSDYDVDHIVPQSFLKDDSIDNKVLTRSDKARGKSDNVPSEEVVKKMKNYWRQLLNAKLITQRKFDNLTKAERGGLSELDKAGFIKRQLVETRQITKHVAQILDSRMNTKYDENDKLIREVKVITLKSKLVSDFRKDFQFYKVREINNYHHAHDAYLNAVVGTALIKKYPKLESEFVYGDYKVYDVRKMIAKSEQEIGKATAKYFFYSNIMNFFKTEITLANGEIRKRPLIETNGETGEIVWDKGRDFATVRKVLSMPQVNIVKKTEVQTGGFSKESILPKRNSDKLIARKKDWDPKKYGGFDSPTVAYSVLVVAKVEKGKSKKLKSVKELLGITIMERSSFEKNPIDFLEAKGYKEVKKDLIIKLPKYSLFELENGRKRMLASAGELQKGNELALPSKYVNFLYLASHYEKLKGSPEDNEQKQLFVEQHKHYLDEIIEQISEFSKRVILADANLDKVLSAYNKHRDKPIREQAENIIHLFTLTNLGAPAAFKYFDTTIDRKRYTSTKEVLDATLIHQSITGLYETRIDLSQLGGDGGGGSGSSGGGGGTLNIEDEYRLHETSKEPDVPLGSTWLSDFPQAWAETGGMGLAVRQAPLIIPLKATSTPVSIKQYPMSQEARLGIKPHIQRLLDQGILVPCQSPWNTPLLPVKKPGTNDYRPVQDLREVNKRVEDIHPTVPNPYNLLSGLPPSHQWYTVLDLKDAFFCLRLHPTSQPLFAFEWRDPEMGISGQLTWTRLPQGFKNSPTLFNEALHRDLADFRIQHPDLILLQYVDDLLLAATSEQDCQRGTRALLQTLGNLGYRASAKKAQICQKQVKYLGYLLKEGQRWLTEARKETVMGQPTPKTPRQLREFLGKAGFCRLFIPGFAEMAAPLYPLTKPGTLFNWGPDQQKAYQEIKQALLTAPALGLPDLTKPFELFVDEKQGYAKGVLTQKLGPWRRPVAYLSKKLDPVAAGWPPCLRMVAAIAVLTKDAGKLTMGQPLVILAPHAVEALVKQPPDRWLSNARMTHYQAMLLDTDRVQFGPVVALNPATLLPLPEKEAPHDCLEILAETHGTRPDLTDQPIPDADYTWYTDGSSFLQEGQRRAGAAVTTETEVIWARALPAGTSAQRAELIALTQALKMAEGKKLNVYTDSRYAFATAHVHGEIYRRRGWLTSEGREIKNKNEILALLKALFLPKRLSIIHCPGHQKGNSAEARGNRMADQAAREAAMKAVLETSTLLAGKRTADGSEFEKRTADGSEFESPKKKAKVE

SEQ ID NO: 1023 - protein, 2093 aa, synthetic construct
MPAAKRVKLDGGDKKYSIGLDIGTNSVGWAVITDEYKVPSKKFKVLGNTDRHSIKKNLIGALLFDSGETAEATRLKRTARRRYTRRKNRICYLQEIFSNEMAKVDDSFFHRLEESFLVEEDKKHERHPIFGNIVDEVAYHEKYPTIYHLRKKLVDSTDKADLRLIYLALAHMIKFRGHFLIEGDLNPDNSDVDKLFIQLVQTYNQLFEENPINASGVDAKAILSARLSKSRRLENLIAQLPGEKKNGLFGNLIALSLGLTPNFKSNFDLAEDAKLQLSKDTYDDDLDNLLAQIGDQYADLFLAAKNLSDAILLSDILRVNTEITKAPLSASMIKRYDEHHQDLTLLKALVRQQLPEKYKEIFFDQSKNGYAGYIDGGASQEEFYKFIKPILEKMDGTEELLVKLNREDLLRKQRTFDNGSIPHQIHLGELHAILRRQEDFYPFLKDNREKIEKILTFRIPYYVGPLARGNSRFAWMTRKSEETITPWNFEEVVDKGASAQSFIERMTNFDKNLPNEKVLPKHSLLYEYFTVYNELTKVKYVTEGMRKPAFLSGEQKKAIVDLLFKTNRKVTVKQLKEDYFKKIECFDSVEISGVEDRFNASLGTYHDLLKIIKDKDFLDNEENEDILEDIVLTLTLFEDREMIEERLKTYAHLFDDKVMKQLKRRRYTGWGRLSRKLINGIRDKQSGKTILDFLKSDGFANRNFMQLIHDDSLTFKEDIQKAQVSGQGDSLHEHIANLAGSPAIKKGILQTVKVVDELVKVMGRHKPENIVIEMARENQTTQKGQKNSRERMKRIEEGIKELGSQILKEHPVENTQLQNEKLYLYYLQNGRDMYVDQELDINRLSDYDVDHIVPQSFLKDDSIDNKVLTRSDKARGKSDNVPSEEVVKKMKNYWRQLLNAKLITQRKFDNLTKAERGGLSELDKAGFIKRQLVETRQITKHVAQILDSRMNTKYDENDKLIREVKVITLKSKLVSDFRKDFQFYKVREINNYHHAHDAYLNAVVGTALIKKYPKLESEFVYGDYKVYDVRKMIAKSEQEIGKATAKYFFYSNIMNFFKTEITLANGEIRKRPLIETNGETGEIVWDKGRDFATVRKVLSMPQVNIVKKTEVQTGGFSKESILPKRNSDKLIARKKDWDPKKYGGFDSPTVAYSVLVVAKVEKGKSKKLKSVKELLGITIMERSSFEKNPIDFLEAKGYKEVKKDLIIKLPKYSLFELENGRKRMLASAGELQKGNELALPSKYVNFLYLASHYEKLKGSPEDNEQKQLFVEQHKHYLDEIIEQISEFSKRVILADANLDKVLSAYNKHRDKPIREQAENIIHLFTLTNLGAPAAFKYFDTTIDRKRYTSTKEVLDATLIHQSITGLYETRIDLSQLGGDGGEAAAKGGSGGTLNIEDEYRLHETSKEPDVPLGSTWLSDFPQAWAETGGMGLAVRQAPLIIPLKATSTPVSIKQYPMSQEARLGIKPHIQRLLDQGILVPCQSPWNTPLLPVKKPGTNDYRPVQDLREVNKRVEDIHPTVPNPYNLLSGLPPSHQWYTVLDLKDAFFCLRLHPTSQPLFAFEWRDPEMGISGQLTWTRLPQGFKNSPTLFNEALHRDLADFRIQHPDLILLQYVDDLLLAATSEQDCQRGTRALLQTLGNLGYRASAKKAQICQKQVKYLGYLLKEGQRWLTEARKETVMGQPTPKTPRQLREFLGKAGFCRLFIPGFAEMAAPLYPLTKPGTLFNWGPDQQKAYQEIKQALLTAPALGLPDLTKPFELFVDEKQGYAKGVLTQKLGPWRRPVAYLSKKLDPVAAGWPPCLRMVAAIAVLTKDAGKLTMGQPLVILAPHAVEALVKQPPDRWLSNARMTHYQAMLLDTDRVQFGPVVALNPATLLPLPEKEAPHDCLEILAETHGTRPDLTDQPIPDADYTWYTDGSSFLQEGQRRAGAAVTTETEVIWARALPAGTSAQRAELIALTQALKMAEGKKLNVYTDSRYAFATAHVHGEIYRRRGWLTSEGREIKNKNEILALLKALFLPKRLSIIHCPGHQKGNSAEARGNRMADQAAREAAMKAVLETSTLLAGKRTADGSEFEKRTADGSEFESPKKKAKVE

SEQ ID NO: 1024 - protein, 2094 aa, synthetic construct
MPAAKRVKLDGGDKKYSIGLDIGTNSVGWAVITDEYKVPSKKFKVLGNTDRHSIKKNLIGALLFDSGETAEATRLKRTARRRYTRRKNRICYLQEIFSNEMAKVDDSFFHRLEESFLVEEDKKHERHPIFGNIVDEVAYHEKYPTIYHLRKKLVDSTDKADLRLIYLALAHMIKFRGHFLIEGDLNPDNSDVDKLFIQLVQTYNQLFEENPINASGVDAKAILSARLSKSRRLENLIAQLPGEKKNGLFGNLIALSLGLTPNFKSNFDLAEDAKLQLSKDTYDDDLDNLLAQIGDQYADLFLAAKNLSDAILLSDILRVNTEITKAPLSASMIKRYDEHHQDLTLLKALVRQQLPEKYKEIFFDQSKNGYAGYIDGGASQEEFYKFIKPILEKMDGTEELLVKLNREDLLRKQRTFDNGSIPHQIHLGELHAILRRQEDFYPFLKDNREKIEKILTFRIPYYVGPLARGNSRFAWMTRKSEETITPWNFEEVVDKGASAQSFIERMTNFDKNLPNEKVLPKHSLLYEYFTVYNELTKVKYVTEGMRKPAFLSGEQKKAIVDLLFKTNRKVTVKQLKEDYFKKIECFDSVEISGVEDRFNASLGTYHDLLKIIKDKDFLDNEENEDILEDIVLTLTLFEDREMIEERLKTYAHLFDDKVMKQLKRRRYTGWGRLSRKLINGIRDKQSGKTILDFLKSDGFANRNFMQLIHDDSLTFKEDIQKAQVSGQGDSLHEHIANLAGSPAIKKGILQTVKVVDELVKVMGRHKPENIVIEMARENQTTQKGQKNSRERMKRIEEGIKELGSQILKEHPVENTQLQNEKLYLYYLQNGRDMYVDQELDINRLSDYDVDHIVPQSFLKDDSIDNKVLTRSDKARGKSDNVPSEEVVKKMKNYWRQLLNAKLITQRKFDNLTKAERGGLSELDKAGFIKRQLVETRQITKHVAQILDSRMNTKYDENDKLIREVKVITLKSKLVSDFRKDFQFYKVREINNYHHAHDAYLNAVVGTALIKKYPKLESEFVYGDYKVYDVRKMIAKSEQEIGKATAKYFFYSNIMNFFKTEITLANGEIRKRPLIETNGETGEIVWDKGRDFATVRKVLSMPQVNIVKKTEVQTGGFSKESILPKRNSDKLIARKKDWDPKKYGGFDSPTVAYSVLVVAKVEKGKSKKLKSVKELLGITIMERSSFEKNPIDFLEAKGYKEVKKDLIIKLPKYSLFELENGRKRMLASAGELQKGNELALPSKYVNFLYLASHYEKLKGSPEDNEQKQLFVEQHKHYLDEIIEQISEFSKRVILADANLDKVLSAYNKHRDKPIREQAENIIHLFTLTNLGAPAAFKYFDTTIDRKRYTSTKEVLDATLIHQSITGLYETRIDLSQLGGDGGGGGGGSGSSGGTLNIEDEYRLHETSKEPDVPLGSTWLSDFPQAWAETGGMGLAVRQAPLIIPLKATSTPVSIKQYPMSQEARLGIKPHIQRLLDQGILVPCQSPWNTPLLPVKKPGTNDYRPVQDLREVNKRVEDIHPTVPNPYNLLSGLPPSHQWYTVLDLKDAFFCLRLHPTSQPLFAFEWRDPEMGISGQLTWTRLPQGFKNSPTLFNEALHRDLADFRIQHPDLILLQYVDDLLLAATSEQDCQRGTRALLQTLGNLGYRASAKKAQICQKQVKYLGYLLKEGQRWLTEARKETVMGQPTPKTPRQLREFLGKAGFCRLFIPGFAEMAAPLYPLTKPGTLFNWGPDQQKAYQEIKQALLTAPALGLPDLTKPFELFVDEKQGYAKGVLTQKLGPWRRPVAYLSKKLDPVAAGWPPCLRMVAAIAVLTKDAGKLTMGQPLVILAPHAVEALVKQPPDRWLSNARMTHYQAMLLDTDRVQFGPVVALNPATLLPLPEKEAPHDCLEILAETHGTRPDLTDQPIPDADYTWYTDGSSFLQEGQRRAGAAVTTETEVIWARALPAGTSAQRAELIALTQALKMAEGKKLNVYTDSRYAFATAHVHGEIYRRRGWLTSEGREIKNKNEILALLKALFLPKRLSIIHCPGHQKGNSAEARGNRMADQAAREAAMKAVLETSTLLAGKRTADGSEFEKRTADGSEFESPKKKAKVE

SEQ ID NO: 1025 - protein, 2094 aa, synthetic construct
MPAAKRVKLDGGDKKYSIGLDIGTNSVGWAVITDEYKVPSKKFKVLGNTDRHSIKKNLIGALLFDSGETAEATRLKRTARRRYTRRKNRICYLQEIFSNEMAKVDDSFFHRLEESFLVEEDKKHERHPIFGNIVDEVAYHEKYPTIYHLRKKLVDSTDKADLRLIYLALAHMIKFRGHFLIEGDLNPDNSDVDKLFIQLVQTYNQLFEENPINASGVDAKAILSARLSKSRRLENLIAQLPGEKKNGLFGNLIALSLGLTPNFKSNFDLAEDAKLQLSKDTYDDDLDNLLAQIGDQYADLFLAAKNLSDAILLSDILRVNTEITKAPLSASMIKRYDEHHQDLTLLKALVRQQLPEKYKEIFFDQSKNGYAGYIDGGASQEEFYKFIKPILEKMDGTEELLVKLNREDLLRKQRTFDNGSIPHQIHLGELHAILRRQEDFYPFLKDNREKIEKILTFRIPYYVGPLARGNSRFAWMTRKSEETITPWNFEEVVDKGASAQSFIERMTNFDKNLPNEKVLPKHSLLYEYFTVYNELTKVKYVTEGMRKPAFLSGEQKKAIVDLLFKTNRKVTVKQLKEDYFKKIECFDSVEISGVEDRFNASLGTYHDLLKIIKDKDFLDNEENEDILEDIVLTLTLFEDREMIEERLKTYAHLFDDKVMKQLKRRRYTGWGRLSRKLINGIRDKQSGKTILDFLKSDGFANRNFMQLIHDDSLTFKEDIQKAQVSGQGDSLHEHIANLAGSPAIKKGILQTVKVVDELVKVMGRHKPENIVIEMARENQTTQKGQKNSRERMKRIEEGIKELGSQILKEHPVENTQLQNEKLYLYYLQNGRDMYVDQELDINRLSDYDVDHIVPQSFLKDDSIDNKVLTRSDKARGKSDNVPSEEVVKKMKNYWRQLLNAKLITQRKFDNLTKAERGGLSELDKAGFIKRQLVETRQITKHVAQILDSRMNTKYDENDKLIREVKVITLKSKLVSDFRKDFQFYKVREINNYHHAHDAYLNAVVGTALIKKYPKLESEFVYGDYKVYDVRKMIAKSEQEIGKATAKYFFYSNIMNFFKTEITLANGEIRKRPLIETNGETGEIVWDKGRDFATVRKVLSMPQVNIVKKTEVQTGGFSKESILPKRNSDKLIARKKDWDPKKYGGFDSPTVAYSVLVVAKVEKGKSKKLKSVKELLGITIMERSSFEKNPIDFLEAKGYKEVKKDLIIKLPKYSLFELENGRKRMLASAGELQKGNELALPSKYVNFLYLASHYEKLKGSPEDNEQKQLFVEQHKHYLDEIIEQISEFSKRVILADANLDKVLSAYNKHRDKPIREQAENIIHLFTLTNLGAPAAFKYFDTTIDRKRYTSTKEVLDATLIHQSITGLYETRIDLSQLGGDGGGGGPAPGGSGGTLNIEDEYRLHETSKEPDVPLGSTWLSDFPQAWAETGGMGLAVRQAPLIIPLKATSTPVSIKQYPMSQEARLGIKPHIQRLLDQGILVPCQSPWNTPLLPVKKPGTNDYRPVQDLREVNKRVEDIHPTVPNPYNLLSGLPPSHQWYTVLDLKDAFFCLRLHPTSQPLFAFEWRDPEMGISGQLTWTRLPQGFKNSPTLFNEALHRDLADFRIQHPDLILLQYVDDLLLAATSEQDCQRGTRALLQTLGNLGYRASAKKAQICQKQVKYLGYLLKEGQRWLTEARKETVMGQPTPKTPRQLREFLGKAGFCRLFIPGFAEMAAPLYPLTKPGTLFNWGPDQQKAYQEIKQALLTAPALGLPDLTKPFELFVDEKQGYAKGVLTQKLGPWRRPVAYLSKKLDPVAAGWPPCLRMVAAIAVLTKDAGKLTMGQPLVILAPHAVEALVKQPPDRWLSNARMTHYQAMLLDTDRVQFGPVVALNPATLLPLPEKEAPHDCLEILAETHGTRPDLTDQPIPDADYTWYTDGSSFLQEGQRRAGAAVTTETEVIWARALPAGTSAQRAELIALTQALKMAEGKKLNVYTDSRYAFATAHVHGEIYRRRGWLTSEGREIKNKNEILALLKALFLPKRLSIIHCPGHQKGNSAEARGNRMADQAAREAAMKAVLETSTLLAGKRTADGSEFEKRTADGSEFESPKKKAKVE

SEQ ID NO: 1026 - protein, 2110 aa, synthetic construct
MPAAKRVKLDGGDKKYSIGLDIGTNSVGWAVITDEYKVPSKKFKVLGNTDRHSIKKNLIGALLFDSGETAEATRLKRTARRRYTRRKNRICYLQEIFSNEMAKVDDSFFHRLEESFLVEEDKKHERHPIFGNIVDEVAYHEKYPTIYHLRKKLVDSTDKADLRLIYLALAHMIKFRGHFLIEGDLNPDNSDVDKLFIQLVQTYNQLFEENPINASGVDAKAILSARLSKSRRLENLIAQLPGEKKNGLFGNLIALSLGLTPNFKSNFDLAEDAKLQLSKDTYDDDLDNLLAQIGDQYADLFLAAKNLSDAILLSDILRVNTEITKAPLSASMIKRYDEHHQDLTLLKALVRQQLPEKYKEIFFDQSKNGYAGYIDGGASQEEFYKFIKPILEKMDGTEELLVKLNREDLLRKQRTFDNGSIPHQIHLGELHAILRRQEDFYPFLKDNREKIEKILTFRIPYYVGPLARGNSRFAWMTRKSEETITPWNFEEVVDKGASAQSFIERMTNFDKNLPNEKVLPKHSLLYEYFTVYNELTKVKYVTEGMRKPAFLSGEQKKAIVDLLFKTNRKVTVKQLKEDYFKKIECFDSVEISGVEDRFNASLGTYHDLLKIIKDKDFLDNEENEDILEDIVLTLTLFEDREMIEERLKTYAHLFDDKVMKQLKRRRYTGWGRLSRKLINGIRDKQSGKTILDFLKSDGFANRNFMQLIHDDSLTFKEDIQKAQVSGQGDSLHEHIANLAGSPAIKKGILQTVKVVDELVKVMGRHKPENIVIEMARENQTTQKGQKNSRERMKRIEEGIKELGSQILKEHPVENTQLQNEKLYLYYLQNGRDMYVDQELDINRLSDYDVDHIVPQSFLKDDSIDNKVLTRSDKARGKSDNVPSEEVVKKMKNYWRQLLNAKLITQRKFDNLTKAERGGLSELDKAGFIKRQLVETRQITKHVAQILDSRMNTKYDENDKLIREVKVITLKSKLVSDFRKDFQFYKVREINNYHHAHDAYLNAVVGTALIKKYPKLESEFVYGDYKVYDVRKMIAKSEQEIGKATAKYFFYSNIMNFFKTEITLANGEIRKRPLIETNGETGEIVWDKGRDFATVRKVLSMPQVNIVKKTEVQTGGFSKESILPKRNSDKLIARKKDWDPKKYGGFDSPTVAYSVLVVAKVEKGKSKKLKSVKELLGITIMERSSFEKNPIDFLEAKGYKEVKKDLIIKLPKYSLFELENGRKRMLASAGELQKGNELALPSKYVNFLYLASHYEKLKGSPEDNEQKQLFVEQHKHYLDEIIEQISEFSKRVILADANLDKVLSAYNKHRDKPIREQAENIIHLFTLTNLGAPAAFKYFDTTIDRKRYTSTKEVLDATLIHQSITGLYETRIDLSQLGGDGGGGGGSGGGGSGGGGSGGGGSGGGGSGGTLNIEDEYRLHETSKEPDVPLGSTWLSDFPQAWAETGGMGLAVRQAPLIIPLKATSTPVSIKQYPMSQEARLGIKPHIQRLLDQGILVPCQSPWNTPLLPVKKPGTNDYRPVQDLREVNKRVEDIHPTVPNPYNLLSGLPPSHQWYTVLDLKDAFFCLRLHPTSQPLFAFEWRDPEMGISGQLTWTRLPQGFKNSPTLFNEALHRDLADFRIQHPDLILLQYVDDLLLAATSEQDCQRGTRALLQTLGNLGYRASAKKAQICQKQVKYLGYLLKEGQRWLTEARKETVMGQPTPKTPRQLREFLGKAGFCRLFIPGFAEMAAPLYPLTKPGTLFNWGPDQQKAYQEIKQALLTAPALGLPDLTKPFELFVDEKQGYAKGVLTQKLGPWRRPVAYLSKKLDPVAAGWPPCLRMVAAIAVLTKDAGKLTMGQPLVILAPHAVEALVKQPPDRWLSNARMTHYQAMLLDTDRVQFGPVVALNPATLLPLPEKEAPHDCLEILAETHGTRPDLTDQPIPDADYTWYTDGSSFLQEGQRRAGAAVTTETEVIWARALPAGTSAQRAELIALTQALKMAEGKKLNVYTDSRYAFATAHVHGEIYRRRGWLTSEGREIKNKNEILALLKALFLPKRLSIIHCPGHQKGNSAEARGNRMADQAAREAAMKAVLETSTLLAGKRTADGSEFEKRTADGSEFESPKKKAKVE

SEQ ID NO: 1027 - protein, 2096 aa, synthetic construct
MPAAKRVKLDGGDKKYSIGLDIGTNSVGWAVITDEYKVPSKKFKVLGNTDRHSIKKNLIGALLFDSGETAEATRLKRTARRRYTRRKNRICYLQEIFSNEMAKVDDSFFHRLEESFLVEEDKKHERHPIFGNIVDEVAYHEKYPTIYHLRKKLVDSTDKADLRLIYLALAHMIKFRGHFLIEGDLNPDNSDVDKLFIQLVQTYNQLFEENPINASGVDAKAILSARLSKSRRLENLIAQLPGEKKNGLFGNLIALSLGLTPNFKSNFDLAEDAKLQLSKDTYDDDLDNLLAQIGDQYADLFLAAKNLSDAILLSDILRVNTEITKAPLSASMIKRYDEHHQDLTLLKALVRQQLPEKYKEIFFDQSKNGYAGYIDGGASQEEFYKFIKPILEKMDGTEELLVKLNREDLLRKQRTFDNGSIPHQIHLGELHAILRRQEDFYPFLKDNREKIEKILTFRIPYYVGPLARGNSRFAWMTRKSEETITPWNFEEVVDKGASAQSFIERMTNFDKNLPNEKVLPKHSLLYEYFTVYNELTKVKYVTEGMRKPAFLSGEQKKAIVDLLFKTNRKVTVKQLKEDYFKKIECFDSVEISGVEDRFNASLGTYHDLLKIIKDKDFLDNEENEDILEDIVLTLTLFEDREMIEERLKTYAHLFDDKVMKQLKRRRYTGWGRLSRKLINGIRDKQSGKTILDFLKSDGFANRNFMQLIHDDSLTFKEDIQKAQVSGQGDSLHEHIANLAGSPAIKKGILQTVKVVDELVKVMGRHKPENIVIEMARENQTTQKGQKNSRERMKRIEEGIKELGSQILKEHPVENTQLQNEKLYLYYLQNGRDMYVDQELDINRLSDYDVDHIVPQSFLKDDSIDNKVLTRSDKARGKSDNVPSEEVVKKMKNYWRQLLNAKLITQRKFDNLTKAERGGLSELDKAGFIKRQLVETRQITKHVAQILDSRMNTKYDENDKLIREVKVITLKSKLVSDFRKDFQFYKVREINNYHHAHDAYLNAVVGTALIKKYPKLESEFVYGDYKVYDVRKMIAKSEQEIGKATAKYFFYSNIMNFFKTEITLANGEIRKRPLIETNGETGEIVWDKGRDFATVRKVLSMPQVNIVKKTEVQTGGFSKESILPKRNSDKLIARKKDWDPKKYGGFDSPTVAYSVLVVAKVEKGKSKKLKSVKELLGITIMERSSFEKNPIDFLEAKGYKEVKKDLIIKLPKYSLFELENGRKRMLASAGELQKGNELALPSKYVNFLYLASHYEKLKGSPEDNEQKQLFVEQHKHYLDEIIEQISEFSKRVILADANLDKVLSAYNKHRDKPIREQAENIIHLFTLTNLGAPAAFKYFDTTIDRKRYTSTKEVLDATLIHQSITGLYETRIDLSQLGGDGGGSSEAAAKPAPGGTLNIEDEYRLHETSKEPDVPLGSTWLSDFPQAWAETGGMGLAVRQAPLIIPLKATSTPVSIKQYPMSQEARLGIKPHIQRLLDQGILVPCQSPWNTPLLPVKKPGTNDYRPVQDLREVNKRVEDIHPTVPNPYNLLSGLPPSHQWYTVLDLKDAFFCLRLHPTSQPLFAFEWRDPEMGISGQLTWTRLPQGFKNSPTLFNEALHRDLADFRIQHPDLILLQYVDDLLLAATSEQDCQRGTRALLQTLGNLGYRASAKKAQICQKQVKYLGYLLKEGQRWLTEARKETVMGQPTPKTPRQLREFLGKAGFCRLFIPGFAEMAAPLYPLTKPGTLFNWGPDQQKAYQEIKQALLTAPALGLPDLTKPFELFVDEKQGYAKGVLTQKLGPWRRPVAYLSKKLDPVAAGWPPCLRMVAAIAVLTKDAGKLTMGQPLVILAPHAVEALVKQPPDRWLSNARMTHYQAMLLDTDRVQFGPVVALNPATLLPLPEKEAPHDCLEILAETHGTRPDLTDQPIPDADYTWYTDGSSFLQEGQRRAGAAVTTETEVIWARALPAGTSAQRAELIALTQALKMAEGKKLNVYTDSRYAFATAHVHGEIYRRRGWLTSEGREIKNKNEILALLKALFLPKRLSIIHCPGHQKGNSAEARGNRMADQAAREAAMKAVLETSTLLAGKRTADGSEFEKRTADGSEFESPKKKAKVE

SEQ ID NO: 1028 - protein, 2101 aa, synthetic construct
MPAAKRVKLDGGDKKYSIGLDIGTNSVGWAVITDEYKVPSKKFKVLGNTDRHSIKKNLIGALLFDSGETAEATRLKRTARRRYTRRKNRICYLQEIFSNEMAKVDDSFFHRLEESFLVEEDKKHERHPIFGNIVDEVAYHEKYPTIYHLRKKLVDSTDKADLRLIYLALAHMIKFRGHFLIEGDLNPDNSDVDKLFIQLVQTYNQLFEENPINASGVDAKAILSARLSKSRRLENLIAQLPGEKKNGLFGNLIALSLGLTPNFKSNFDLAEDAKLQLSKDTYDDDLDNLLAQIGDQYADLFLAAKNLSDAILLSDILRVNTEITKAPLSASMIKRYDEHHQDLTLLKALVRQQLPEKYKEIFFDQSKNGYAGYIDGGASQEEFYKFIKPILEKMDGTEELLVKLNREDLLRKQRTFDNGSIPHQIHLGELHAILRRQEDFYPFLKDNREKIEKILTFRIPYYVGPLARGNSRFAWMTRKSEETITPWNFEEVVDKGASAQSFIERMTNFDKNLPNEKVLPKHSLLYEYFTVYNELTKVKYVTEGMRKPAFLSGEQKKAIVDLLFKTNRKVTVKQLKEDYFKKIECFDSVEISGVEDRFNASLGTYHDLLKIIKDKDFLDNEENEDILEDIVLTLTLFEDREMIEERLKTYAHLFDDKVMKQLKRRRYTGWGRLSRKLINGIRDKQSGKTILDFLKSDGFANRNFMQLIHDDSLTFKEDIQKAQVSGQGDSLHEHIANLAGSPAIKKGILQTVKVVDELVKVMGRHKPENIVIEMARENQTTQKGQKNSRERMKRIEEGIKELGSQILKEHPVENTQLQNEKLYLYYLQNGRDMYVDQELDINRLSDYDVDHIVPQSFLKDDSIDNKVLTRSDKARGKSDNVPSEEVVKKMKNYWRQLLNAKLITQRKFDNLTKAERGGLSELDKAGFIKRQLVETRQITKHVAQILDSRMNTKYDENDKLIREVKVITLKSKLVSDFRKDFQFYKVREINNYHHAHDAYLNAVVGTALIKKYPKLESEFVYGDYKVYDVRKMIAKSEQEIGKATAKYFFYSNIMNFFKTEITLANGEIRKRPLIETNGETGEIVWDKGRDFATVRKVLSMPQVNIVKKTEVQTGGFSKESILPKRNSDKLIARKKDWDPKKYGGFDSPTVAYSVLVVAKVEKGKSKKLKSVKELLGITIMERSSFEKNPIDFLEAKGYKEVKKDLIIKLPKYSLFELENGRKRMLASAGELQKGNELALPSKYVNFLYLASHYEKLKGSPEDNEQKQLFVEQHKHYLDEIIEQISEFSKRVILADANLDKVLSAYNKHRDKPIREQAENIIHLFTLTNLGAPAAFKYFDTTIDRKRYTSTKEVLDATLIHQSITGLYETRIDLSQLGGDGGSGSETPGTSESATPESGGTLNIEDEYRLHETSKEPDVPLGSTWLSDFPQAWAETGGMGLAVRQAPLIIPLKATSTPVSIKQYPMSQEARLGIKPHIQRLLDQGILVPCQSPWNTPLLPVKKPGTNDYRPVQDLREVNKRVEDIHPTVPNPYNLLSGLPPSHQWYTVLDLKDAFFCLRLHPTSQPLFAFEWRDPEMGISGQLTWTRLPQGFKNSPTLFNEALHRDLADFRIQHPDLILLQYVDDLLLAATSEQDCQRGTRALLQTLGNLGYRASAKKAQICQKQVKYLGYLLKEGQRWLTEARKETVMGQPTPKTPRQLREFLGKAGFCRLFIPGFAEMAAPLYPLTKPGTLFNWGPDQQKAYQEIKQALLTAPALGLPDLTKPFELFVDEKQGYAKGVLTQKLGPWRRPVAYLSKKLDPVAAGWPPCLRMVAAIAVLTKDAGKLTMGQPLVILAPHAVEALVKQPPDRWLSNARMTHYQAMLLDTDRVQFGPVVALNPATLLPLPEKEAPHDCLEILAETHGTRPDLTDQPIPDADYTWYTDGSSFLQEGQRRAGAAVTTETEVIWARALPAGTSAQRAELIALTQALKMAEGKKLNVYTDSRYAFATAHVHGEIYRRRGWLTSEGREIKNKNEILALLKALFLPKRLSIIHCPGHQKGNSAEARGNRMADQAAREAAMKAVLETSTLLAGKRTADGSEFEKRTADGSEFESPKKKAKVE

SEQ ID NO: 1029 - protein, 2110 aa, synthetic construct
MPAAKRVKLDGGDKKYSIGLDIGTNSVGWAVITDEYKVPSKKFKVLGNTDRHSIKKNLIGALLFDSGETAEATRLKRTARRRYTRRKNRICYLQEIFSNEMAKVDDSFFHRLEESFLVEEDKKHERHPIFGNIVDEVAYHEKYPTIYHLRKKLVDSTDKADLRLIYLALAHMIKFRGHFLIEGDLNPDNSDVDKLFIQLVQTYNQLFEENPINASGVDAKAILSARLSKSRRLENLIAQLPGEKKNGLFGNLIALSLGLTPNFKSNFDLAEDAKLQLSKDTYDDDLDNLLAQIGDQYADLFLAAKNLSDAILLSDILRVNTEITKAPLSASMIKRYDEHHQDLTLLKALVRQQLPEKYKEIFFDQSKNGYAGYIDGGASQEEFYKFIKPILEKMDGTEELLVKLNREDLLRKQRTFDNGSIPHQIHLGELHAILRRQEDFYPFLKDNREKIEKILTFRIPYYVGPLARGNSRFAWMTRKSEETITPWNFEEVVDKGASAQSFIERMTNFDKNLPNEKVLPKHSLLYEYFTVYNELTKVKYVTEGMRKPAFLSGEQKKAIVDLLFKTNRKVTVKQLKEDYFKKIECFDSVEISGVEDRFNASLGTYHDLLKIIKDKDFLDNEENEDILEDIVLTLTLFEDREMIEERLKTYAHLFDDKVMKQLKRRRYTGWGRLSRKLINGIRDKQSGKTILDFLKSDGFANRNFMQLIHDDSLTFKEDIQKAQVSGQGDSLHEHIANLAGSPAIKKGILQTVKVVDELVKVMGRHKPENIVIEMARENQTTQKGQKNSRERMKRIEEGIKELGSQILKEHPVENTQLQNEKLYLYYLQNGRDMYVDQELDINRLSDYDVDHIVPQSFLKDDSIDNKVLTRSDKARGKSDNVPSEEVVKKMKNYWRQLLNAKLITQRKFDNLTKAERGGLSELDKAGFIKRQLVETRQITKHVAQILDSRMNTKYDENDKLIREVKVITLKSKLVSDFRKDFQFYKVREINNYHHAHDAYLNAVVGTALIKKYPKLESEFVYGDYKVYDVRKMIAKSEQEIGKATAKYFFYSNIMNFFKTEITLANGEIRKRPLIETNGETGEIVWDKGRDFATVRKVLSMPQVNIVKKTEVQTGGFSKESILPKRNSDKLIARKKDWDPKKYGGFDSPTVAYSVLVVAKVEKGKSKKLKSVKELLGITIMERSSFEKNPIDFLEAKGYKEVKKDLIIKLPKYSLFELENGRKRMLASAGELQKGNELALPSKYVNFLYLASHYEKLKGSPEDNEQKQLFVEQHKHYLDEIIEQISEFSKRVILADANLDKVLSAYNKHRDKPIREQAENIIHLFTLTNLGAPAAFKYFDTTIDRKRYTSTKEVLDATLIHQSITGLYETRIDLSQLGGDGGEAAAKEAAAKEAAAKEAAAKEAAAKGGTLNIEDEYRLHETSKEPDVPLGSTWLSDFPQAWAETGGMGLAVRQAPLIIPLKATSTPVSIKQYPMSQEARLGIKPHIQRLLDQGILVPCQSPWNTPLLPVKKPGTNDYRPVQDLREVNKRVEDIHPTVPNPYNLLSGLPPSHQWYTVLDLKDAFFCLRLHPTSQPLFAFEWRDPEMGISGQLTWTRLPQGFKNSPTLFNEALHRDLADFRIQHPDLILLQYVDDLLLAATSEQDCQRGTRALLQTLGNLGYRASAKKAQICQKQVKYLGYLLKEGQRWLTEARKETVMGQPTPKTPRQLREFLGKAGFCRLFIPGFAEMAAPLYPLTKPGTLFNWGPDQQKAYQEIKQALLTAPALGLPDLTKPFELFVDEKQGYAKGVLTQKLGPWRRPVAYLSKKLDPVAAGWPPCLRMVAAIAVLTKDAGKLTMGQPLVILAPHAVEALVKQPPDRWLSNARMTHYQAMLLDTDRVQFGPVVALNPATLLPLPEKEAPHDCLEILAETHGTRPDLTDQPIPDADYTWYTDGSSFLQEGQRRAGAAVTTETEVIWARALPAGTSAQRAELIALTQALKMAEGKKLNVYTDSRYAFATAHVHGEIYRRRGWLTSEGREIKNKNEILALLKALFLPKRLSIIHCPGHQKGNSAEARGNRMADQAAREAAMKAVLETSTLLAGKRTADGSEFEKRTADGSEFESPKKKAKVE

SEQ ID NO: 1030 - protein, 2091 aa, synthetic construct
MPAAKRVKLDGGDKKYSIGLDIGTNSVGWAVITDEYKVPSKKFKVLGNTDRHSIKKNLIGALLFDSGETAEATRLKRTARRRYTRRKNRICYLQEIFSNEMAKVDDSFFHRLEESFLVEEDKKHERHPIFGNIVDEVAYHEKYPTIYHLRKKLVDSTDKADLRLIYLALAHMIKFRGHFLIEGDLNPDNSDVDKLFIQLVQTYNQLFEENPINASGVDAKAILSARLSKSRRLENLIAQLPGEKKNGLFGNLIALSLGLTPNFKSNFDLAEDAKLQLSKDTYDDDLDNLLAQIGDQYADLFLAAKNLSDAILLSDILRVNTEITKAPLSASMIKRYDEHHQDLTLLKALVRQQLPEKYKEIFFDQSKNGYAGYIDGGASQEEFYKFIKPILEKMDGTEELLVKLNREDLLRKQRTFDNGSIPHQIHLGELHAILRRQEDFYPFLKDNREKIEKILTFRIPYYVGPLARGNSRFAWMTRKSEETITPWNFEEVVDKGASAQSFIERMTNFDKNLPNEKVLPKHSLLYEYFTVYNELTKVKYVTEGMRKPAFLSGEQKKAIVDLLFKTNRKVTVKQLKEDYFKKIECFDSVEISGVEDRFNASLGTYHDLLKIIKDKDFLDNEENEDILEDIVLTLTLFEDREMIEERLKTYAHLFDDKVMKQLKRRRYTGWGRLSRKLINGIRDKQSGKTILDFLKSDGFANRNFMQLIHDDSLTFKEDIQKAQVSGQGDSLHEHIANLAGSPAIKKGILQTVKVVDELVKVMGRHKPENIVIEMARENQTTQKGQKNSRERMKRIEEGIKELGSQILKEHPVENTQLQNEKLYLYYLQNGRDMYVDQELDINRLSDYDVDHIVPQSFLKDDSIDNKVLTRSDKARGKSDNVPSEEVVKKMKNYWRQLLNAKLITQRKFDNLTKAERGGLSELDKAGFIKRQLVETRQITKHVAQILDSRMNTKYDENDKLIREVKVITLKSKLVSDFRKDFQFYKVREINNYHHAHDAYLNAVVGTALIKKYPKLESEFVYGDYKVYDVRKMIAKSEQEIGKATAKYFFYSNIMNFFKTEITLANGEIRKRPLIETNGETGEIVWDKGRDFATVRKVLSMPQVNIVKKTEVQTGGFSKESILPKRNSDKLIARKKDWDPKKYGGFDSPTVAYSVLVVAKVEKGKSKKLKSVKELLGITIMERSSFEKNPIDFLEAKGYKEVKKDLIIKLPKYSLFELENGRKRMLASAGELQKGNELALPSKYVNFLYLASHYEKLKGSPEDNEQKQLFVEQHKHYLDEIIEQISEFSKRVILADANLDKVLSAYNKHRDKPIREQAENIIHLFTLTNLGAPAAFKYFDTTIDRKRYTSTKEVLDATLIHQSITGLYETRIDLSQLGGDGGPAPGGSGGTLNIEDEYRLHETSKEPDVPLGSTWLSDFPQAWAETGGMGLAVRQAPLIIPLKATSTPVSIKQYPMSQEARLGIKPHIQRLLDQGILVPCQSPWNTPLLPVKKPGTNDYRPVQDLREVNKRVEDIHPTVPNPYNLLSGLPPSHQWYTVLDLKDAFFCLRLHPTSQPLFAFEWRDPEMGISGQLTWTRLPQGFKNSPTLFNEALHRDLADFRIQHPDLILLQYVDDLLLAATSEQDCQRGTRALLQTLGNLGYRASAKKAQICQKQVKYLGYLLKEGQRWLTEARKETVMGQPTPKTPRQLREFLGKAGFCRLFIPGFAEMAAPLYPLTKPGTLFNWGPDQQKAYQEIKQALLTAPALGLPDLTKPFELFVDEKQGYAKGVLTQKLGPWRRPVAYLSKKLDPVAAGWPPCLRMVAAIAVLTKDAGKLTMGQPLVILAPHAVEALVKQPPDRWLSNARMTHYQAMLLDTDRVQFGPVVALNPATLLPLPEKEAPHDCLEILAETHGTRPDLTDQPIPDADYTWYTDGSSFLQEGQRRAGAAVTTETEVIWARALPAGTSAQRAELIALTQALKMAEGKKLNVYTDSRYAFATAHVHGEIYRRRGWLTSEGREIKNKNEILALLKALFLPKRLSIIHCPGHQKGNSAEARGNRMADQAAREAAMKAVLETSTLLAGKRTADGSEFEKRTADGSEFESPKKKAKVE

SEQ ID NO: 1031 - protein, 2091 aa, synthetic construct
MPAAKRVKLDGGDKKYSIGLDIGTNSVGWAVITDEYKVPSKKFKVLGNTDRHSIKKNLIGALLFDSGETAEATRLKRTARRRYTRRKNRICYLQEIFSNEMAKVDDSFFHRLEESFLVEEDKKHERHPIFGNIVDEVAYHEKYPTIYHLRKKLVDSTDKADLRLIYLALAHMIKFRGHFLIEGDLNPDNSDVDKLFIQLVQTYNQLFEENPINASGVDAKAILSARLSKSRRLENLIAQLPGEKKNGLFGNLIALSLGLTPNFKSNFDLAEDAKLQLSKDTYDDDLDNLLAQIGDQYADLFLAAKNLSDAILLSDILRVNTEITKAPLSASMIKRYDEHHQDLTLLKALVRQQLPEKYKEIFFDQSKNGYAGYIDGGASQEEFYKFIKPILEKMDGTEELLVKLNREDLLRKQRTFDNGSIPHQIHLGELHAILRRQEDFYPFLKDNREKIEKILTFRIPYYVGPLARGNSRFAWMTRKSEETITPWNFEEVVDKGASAQSFIERMTNFDKNLPNEKVLPKHSLLYEYFTVYNELTKVKYVTEGMRKPAFLSGEQKKAIVDLLFKTNRKVTVKQLKEDYFKKIECFDSVEISGVEDRFNASLGTYHDLLKIIKDKDFLDNEENEDILEDIVLTLTLFEDREMIEERLKTYAHLFDDKVMKQLKRRRYTGWGRLSRKLINGIRDKQSGKTILDFLKSDGFANRNFMQLIHDDSLTFKEDIQKAQVSGQGDSLHEHIANLAGSPAIKKGILQTVKVVDELVKVMGRHKPENIVIEMARENQTTQKGQKNSRERMKRIEEGIKELGSQILKEHPVENTQLQNEKLYLYYLQNGRDMYVDQELDINRLSDYDVDHIVPQSFLKDDSIDNKVLTRSDKARGKSDNVPSEEVVKKMKNYWRQLLNAKLITQRKFDNLTKAERGGLSELDKAGFIKRQLVETRQITKHVAQILDSRMNTKYDENDKLIREVKVITLKSKLVSDFRKDFQFYKVREINNYHHAHDAYLNAVVGTALIKKYPKLESEFVYGDYKVYDVRKMIAKSEQEIGKATAKYFFYSNIMNFFKTEITLANGEIRKRPLIETNGETGEIVWDKGRDFATVRKVLSMPQVNIVKKTEVQTGGFSKESILPKRNSDKLIARKKDWDPKKYGGFDSPTVAYSVLVVAKVEKGKSKKLKSVKELLGITIMERSSFEKNPIDFLEAKGYKEVKKDLIIKLPKYSLFELENGRKRMLASAGELQKGNELALPSKYVNFLYLASHYEKLKGSPEDNEQKQLFVEQHKHYLDEIIEQISEFSKRVILADANLDKVLSAYNKHRDKPIREQAENIIHLFTLTNLGAPAAFKYFDTTIDRKRYTSTKEVLDATLIHQSITGLYETRIDLSQLGGDGGGGGGSSGGTLNIEDEYRLHETSKEPDVPLGSTWLSDFPQAWAETGGMGLAVRQAPLIIPLKATSTPVSIKQYPMSQEARLGIKPHIQRLLDQGILVPCQSPWNTPLLPVKKPGTNDYRPVQDLREVNKRVEDIHPTVPNPYNLLSGLPPSHQWYTVLDLKDAFFCLRLHPTSQPLFAFEWRDPEMGISGQLTWTRLPQGFKNSPTLFNEALHRDLADFRIQHPDLILLQYVDDLLLAATSEQDCQRGTRALLQTLGNLGYRASAKKAQICQKQVKYLGYLLKEGQRWLTEARKETVMGQPTPKTPRQLREFLGKAGFCRLFIPGFAEMAAPLYPLTKPGTLFNWGPDQQKAYQEIKQALLTAPALGLPDLTKPFELFVDEKQGYAKGVLTQKLGPWRRPVAYLSKKLDPVAAGWPPCLRMVAAIAVLTKDAGKLTMGQPLVILAPHAVEALVKQPPDRWLSNARMTHYQAMLLDTDRVQFGPVVALNPATLLPLPEKEAPHDCLEILAETHGTRPDLTDQPIPDADYTWYTDGSSFLQEGQRRAGAAVTTETEVIWARALPAGTSAQRAELIALTQALKMAEGKKLNVYTDSRYAFATAHVHGEIYRRRGWLTSEGREIKNKNEILALLKALFLPKRLSIIHCPGHQKGNSAEARGNRMADQAAREAAMKAVLETSTLLAGKRTADGSEFEKRTADGSEFESPKKKAKVE

SEQ ID NO: 1032 - protein, 2094 aa, synthetic construct
MPAAKRVKLDGGDKKYSIGLDIGTNSVGWAVITDEYKVPSKKFKVLGNTDRHSIKKNLIGALLFDSGETAEATRLKRTARRRYTRRKNRICYLQEIFSNEMAKVDDSFFHRLEESFLVEEDKKHERHPIFGNIVDEVAYHEKYPTIYHLRKKLVDSTDKADLRLIYLALAHMIKFRGHFLIEGDLNPDNSDVDKLFIQLVQTYNQLFEENPINASGVDAKAILSARLSKSRRLENLIAQLPGEKKNGLFGNLIALSLGLTPNFKSNFDLAEDAKLQLSKDTYDDDLDNLLAQIGDQYADLFLAAKNLSDAILLSDILRVNTEITKAPLSASMIKRYDEHHQDLTLLKALVRQQLPEKYKEIFFDQSKNGYAGYIDGGASQEEFYKFIKPILEKMDGTEELLVKLNREDLLRKQRTFDNGSIPHQIHLGELHAILRRQEDFYPFLKDNREKIEKILTFRIPYYVGPLARGNSRFAWMTRKSEETITPWNFEEVVDKGASAQSFIERMTNFDKNLPNEKVLPKHSLLYEYFTVYNELTKVKYVTEGMRKPAFLSGEQKKAIVDLLFKTNRKVTVKQLKEDYFKKIECFDSVEISGVEDRFNASLGTYHDLLKIIKDKDFLDNEENEDILEDIVLTLTLFEDREMIEERLKTYAHLFDDKVMKQLKRRRYTGWGRLSRKLINGIRDKQSGKTILDFLKSDGFANRNFMQLIHDDSLTFKEDIQKAQVSGQGDSLHEHIANLAGSPAIKKGILQTVKVVDELVKVMGRHKPENIVIEMARENQTTQKGQKNSRERMKRIEEGIKELGSQILKEHPVENTQLQNEKLYLYYLQNGRDMYVDQELDINRLSDYDVDHIVPQSFLKDDSIDNKVLTRSDKARGKSDNVPSEEVVKKMKNYWRQLLNAKLITQRKFDNLTKAERGGLSELDKAGFIKRQLVETRQITKHVAQILDSRMNTKYDENDKLIREVKVITLKSKLVSDFRKDFQFYKVREINNYHHAHDAYLNAVVGTALIKKYPKLESEFVYGDYKVYDVRKMIAKSEQEIGKATAKYFFYSNIMNFFKTEITLANGEIRKRPLIETNGETGEIVWDKGRDFATVRKVLSMPQVNIVKKTEVQTGGFSKESILPKRNSDKLIARKKDWDPKKYGGFDSPTVAYSVLVVAKVEKGKSKKLKSVKELLGITIMERSSFEKNPIDFLEAKGYKEVKKDLIIKLPKYSLFELENGRKRMLASAGELQKGNELALPSKYVNFLYLASHYEKLKGSPEDNEQKQLFVEQHKHYLDEIIEQISEFSKRVILADANLDKVLSAYNKHRDKPIREQAENIIHLFTLTNLGAPAAFKYFDTTIDRKRYTSTKEVLDATLIHQSITGLYETRIDLSQLGGDGGPAPAPAPAPGGTLNIEDEYRLHETSKEPDVPLGSTWLSDFPQAWAETGGMGLAVRQAPLIIPLKATSTPVSIKQYPMSQEARLGIKPHIQRLLDQGILVPCQSPWNTPLLPVKKPGTNDYRPVQDLREVNKRVEDIHPTVPNPYNLLSGLPPSHQWYTVLDLKDAFFCLRLHPTSQPLFAFEWRDPEMGISGQLTWTRLPQGFKNSPTLFNEALHRDLADFRIQHPDLILLQYVDDLLLAATSEQDCQRGTRALLQTLGNLGYRASAKKAQICQKQVKYLGYLLKEGQRWLTEARKETVMGQPTPKTPRQLREFLGKAGFCRLFIPGFAEMAAPLYPLTKPGTLFNWGPDQQKAYQEIKQALLTAPALGLPDLTKPFELFVDEKQGYAKGVLTQKLGPWRRPVAYLSKKLDPVAAGWPPCLRMVAAIAVLTKDAGKLTMGQPLVILAPHAVEALVKQPPDRWLSNARMTHYQAMLLDTDRVQFGPVVALNPATLLPLPEKEAPHDCLEILAETHGTRPDLTDQPIPDADYTWYTDGSSFLQEGQRRAGAAVTTETEVIWARALPAGTSAQRAELIALTQALKMAEGKKLNVYTDSRYAFATAHVHGEIYRRRGWLTSEGREIKNKNEILALLKALFLPKRLSIIHCPGHQKGNSAEARGNRMADQAAREAAMKAVLETSTLLAGKRTADGSEFEKRTADGSEFESPKKKAKVE

SEQ ID NO: 1033 - protein, 2094 aa, synthetic construct
MPAAKRVKLDGGDKKYSIGLDIGTNSVGWAVITDEYKVPSKKFKVLGNTDRHSIKKNLIGALLFDSGETAEATRLKRTARRRYTRRKNRICYLQEIFSNEMAKVDDSFFHRLEESFLVEEDKKHERHPIFGNIVDEVAYHEKYPTIYHLRKKLVDSTDKADLRLIYLALAHMIKFRGHFLIEGDLNPDNSDVDKLFIQLVQTYNQLFEENPINASGVDAKAILSARLSKSRRLENLIAQLPGEKKNGLFGNLIALSLGLTPNFKSNFDLAEDAKLQLSKDTYDDDLDNLLAQIGDQYADLFLAAKNLSDAILLSDILRVNTEITKAPLSASMIKRYDEHHQDLTLLKALVRQQLPEKYKEIFFDQSKNGYAGYIDGGASQEEFYKFIKPILEKMDGTEELLVKLNREDLLRKQRTFDNGSIPHQIHLGELHAILRRQEDFYPFLKDNREKIEKILTFRIPYYVGPLARGNSRFAWMTRKSEETITPWNFEEVVDKGASAQSFIERMTNFDKNLPNEKVLPKHSLLYEYFTVYNELTKVKYVTEGMRKPAFLSGEQKKAIVDLLFKTNRKVTVKQLKEDYFKKIECFDSVEISGVEDRFNASLGTYHDLLKIIKDKDFLDNEENEDILEDIVLTLTLFEDREMIEERLKTYAHLFDDKVMKQLKRRRYTGWGRLSRKLINGIRDKQSGKTILDFLKSDGFANRNFMQLIHDDSLTFKEDIQKAQVSGQGDSLHEHIANLAGSPAIKKGILQTVKVVDELVKVMGRHKPENIVIEMARENQTTQKGQKNSRERMKRIEEGIKELGSQILKEHPVENTQLQNEKLYLYYLQNGRDMYVDQELDINRLSDYDVDHIVPQSFLKDDSIDNKVLTRSDKARGKSDNVPSEEVVKKMKNYWRQLLNAKLITQRKFDNLTKAERGGLSELDKAGFIKRQLVETRQITKHVAQILDSRMNTKYDENDKLIREVKVITLKSKLVSDFRKDFQFYKVREINNYHHAHDAYLNAVVGTALIKKYPKLESEFVYGDYKVYDVRKMIAKSEQEIGKATAKYFFYSNIMNFFKTEITLANGEIRKRPLIETNGETGEIVWDKGRDFATVRKVLSMPQVNIVKKTEVQTGGFSKESILPKRNSDKLIARKKDWDPKKYGGFDSPTVAYSVLVVAKVEKGKSKKLKSVKELLGITIMERSSFEKNPIDFLEAKGYKEVKKDLIIKLPKYSLFELENGRKRMLASAGELQKGNELALPSKYVNFLYLASHYEKLKGSPEDNEQKQLFVEQHKHYLDEIIEQISEFSKRVILADANLDKVLSAYNKHRDKPIREQAENIIHLFTLTNLGAPAAFKYFDTTIDRKRYTSTKEVLDATLIHQSITGLYETRIDLSQLGGDGGPAPGSSGGGGGTLNIEDEYRLHETSKEPDVPLGSTWLSDFPQAWAETGGMGLAVRQAPLIIPLKATSTPVSIKQYPMSQEARLGIKPHIQRLLDQGILVPCQSPWNTPLLPVKKPGTNDYRPVQDLREVNKRVEDIHPTVPNPYNLLSGLPPSHQWYTVLDLKDAFFCLRLHPTSQPLFAFEWRDPEMGISGQLTWTRLPQGFKNSPTLFNEALHRDLADFRIQHPDLILLQYVDDLLLAATSEQDCQRGTRALLQTLGNLGYRASAKKAQICQKQVKYLGYLLKEGQRWLTEARKETVMGQPTPKTPRQLREFLGKAGFCRLFIPGFAEMAAPLYPLTKPGTLFNWGPDQQKAYQEIKQALLTAPALGLPDLTKPFELFVDEKQGYAKGVLTQKLGPWRRPVAYLSKKLDPVAAGWPPCLRMVAAIAVLTKDAGKLTMGQPLVILAPHAVEALVKQPPDRWLSNARMTHYQAMLLDTDRVQFGPVVALNPATLLPLPEKEAPHDCLEILAETHGTRPDLTDQPIPDADYTWYTDGSSFLQEGQRRAGAAVTTETEVIWARALPAGTSAQRAELIALTQALKMAEGKKLNVYTDSRYAFATAHVHGEIYRRRGWLTSEGREIKNKNEILALLKALFLPKRLSIIHCPGHQKGNSAEARGNRMADQAAREAAMKAVLETSTLLAGKRTADGSEFEKRTADGSEFESPKKKAKVE

SEQ ID NO: 1034 - protein, 2096 aa, synthetic construct
MPAAKRVKLDGGDKKYSIGLDIGTNSVGWAVITDEYKVPSKKFKVLGNTDRHSIKKNLIGALLFDSGETAEATRLKRTARRRYTRRKNRICYLQEIFSNEMAKVDDSFFHRLEESFLVEEDKKHERHPIFGNIVDEVAYHEKYPTIYHLRKKLVDSTDKADLRLIYLALAHMIKFRGHFLIEGDLNPDNSDVDKLFIQLVQTYNQLFEENPINASGVDAKAILSARLSKSRRLENLIAQLPGEKKNGLFGNLIALSLGLTPNFKSNFDLAEDAKLQLSKDTYDDDLDNLLAQIGDQYADLFLAAKNLSDAILLSDILRVNTEITKAPLSASMIKRYDEHHQDLTLLKALVRQQLPEKYKEIFFDQSKNGYAGYIDGGASQEEFYKFIKPILEKMDGTEELLVKLNREDLLRKQRTFDNGSIPHQIHLGELHAILRRQEDFYPFLKDNREKIEKILTFRIPYYVGPLARGNSRFAWMTRKSEETITPWNFEEVVDKGASAQSFIERMTNFDKNLPNEKVLPKHSLLYEYFTVYNELTKVKYVTEGMRKPAFLSGEQKKAIVDLLFKTNRKVTVKQLKEDYFKKIECFDSVEISGVEDRFNASLGTYHDLLKIIKDKDFLDNEENEDILEDIVLTLTLFEDREMIEERLKTYAHLFDDKVMKQLKRRRYTGWGRLSRKLINGIRDKQSGKTILDFLKSDGFANRNFMQLIHDDSLTFKEDIQKAQVSGQGDSLHEHIANLAGSPAIKKGILQTVKVVDELVKVMGRHKPENIVIEMARENQTTQKGQKNSRERMKRIEEGIKELGSQILKEHPVENTQLQNEKLYLYYLQNGRDMYVDQELDINRLSDYDVDHIVPQSFLKDDSIDNKVLTRSDKARGKSDNVPSEEVVKKMKNYWRQLLNAKLITQRKFDNLTKAERGGLSELDKAGFIKRQLVETRQITKHVAQILDSRMNTKYDENDKLIREVKVITLKSKLVSDFRKDFQFYKVREINNYHHAHDAYLNAVVGTALIKKYPKLESEFVYGDYKVYDVRKMIAKSEQEIGKATAKYFFYSNIMNFFKTEITLANGEIRKRPLIETNGETGEIVWDKGRDFATVRKVLSMPQVNIVKKTEVQTGGFSKESILPKRNSDKLIARKKDWDPKKYGGFDSPTVAYSVLVVAKVEKGKSKKLKSVKELLGITIMERSSFEKNPIDFLEAKGYKEVKKDLIIKLPKYSLFELENGRKRMLASAGELQKGNELALPSKYVNFLYLASHYEKLKGSPEDNEQKQLFVEQHKHYLDEIIEQISEFSKRVILADANLDKVLSAYNKHRDKPIREQAENIIHLFTLTNLGAPAAFKYFDTTIDRKRYTSTKEVLDATLIHQSITGLYETRIDLSQLGGDGGPAPGGSEAAAKGGTLNIEDEYRLHETSKEPDVPLGSTWLSDFPQAWAETGGMGLAVRQAPLIIPLKATSTPVSIKQYPMSQEARLGIKPHIQRLLDQGILVPCQSPWNTPLLPVKKPGTNDYRPVQDLREVNKRVEDIHPTVPNPYNLLSGLPPSHQWYTVLDLKDAFFCLRLHPTSQPLFAFEWRDPEMGISGQLTWTRLPQGFKNSPTLFNEALHRDLADFRIQHPDLILLQYVDDLLLAATSEQDCQRGTRALLQTLGNLGYRASAKKAQICQKQVKYLGYLLKEGQRWLTEARKETVMGQPTPKTPRQLREFLGKAGFCRLFIPGFAEMAAPLYPLTKPGTLFNWGPDQQKAYQEIKQALLTAPALGLPDLTKPFELFVDEKQGYAKGVLTQKLGPWRRPVAYLSKKLDPVAAGWPPCLRMVAAIAVLTKDAGKLTMGQPLVILAPHAVEALVKQPPDRWLSNARMTHYQAMLLDTDRVQFGPVVALNPATLLPLPEKEAPHDCLEILAETHGTRPDLTDQPIPDADYTWYTDGSSFLQEGQRRAGAAVTTETEVIWARALPAGTSAQRAELIALTQALKMAEGKKLNVYTDSRYAFATAHVHGEIYRRRGWLTSEGREIKNKNEILALLKALFLPKRLSIIHCPGHQKGNSAEARGNRMADQAAREAAMKAVLETSTLLAGKRTADGSEFEKRTADGSEFESPKKKAKVE

SEQ ID NO: 1035 - protein, 2096 aa, synthetic construct
MPAAKRVKLDGGDKKYSIGLDIGTNSVGWAVITDEYKVPSKKFKVLGNTDRHSIKKNLIGALLFDSGETAEATRLKRTARRRYTRRKNRICYLQEIFSNEMAKVDDSFFHRLEESFLVEEDKKHERHPIFGNIVDEVAYHEKYPTIYHLRKKLVDSTDKADLRLIYLALAHMIKFRGHFLIEGDLNPDNSDVDKLFIQLVQTYNQLFEENPINASGVDAKAILSARLSKSRRLENLIAQLPGEKKNGLFGNLIALSLGLTPNFKSNFDLAEDAKLQLSKDTYDDDLDNLLAQIGDQYADLFLAAKNLSDAILLSDILRVNTEITKAPLSASMIKRYDEHHQDLTLLKALVRQQLPEKYKEIFFDQSKNGYAGYIDGGASQEEFYKFIKPILEKMDGTEELLVKLNREDLLRKQRTFDNGSIPHQIHLGELHAILRRQEDFYPFLKDNREKIEKILTFRIPYYVGPLARGNSRFAWMTRKSEETITPWNFEEVVDKGASAQSFIERMTNFDKNLPNEKVLPKHSLLYEYFTVYNELTKVKYVTEGMRKPAFLSGEQKKAIVDLLFKTNRKVTVKQLKEDYFKKIECFDSVEISGVEDRFNASLGTYHDLLKIIKDKDFLDNEENEDILEDIVLTLTLFEDREMIEERLKTYAHLFDDKVMKQLKRRRYTGWGRLSRKLINGIRDKQSGKTILDFLKSDGFANRNFMQLIHDDSLTFKEDIQKAQVSGQGDSLHEHIANLAGSPAIKKGILQTVKVVDELVKVMGRHKPENIVIEMARENQTTQKGQKNSRERMKRIEEGIKELGSQILKEHPVENTQLQNEKLYLYYLQNGRDMYVDQELDINRLSDYDVDHIVPQSFLKDDSIDNKVLTRSDKARGKSDNVPSEEVVKKMKNYWRQLLNAKLITQRKFDNLTKAERGGLSELDKAGFIKRQLVETRQITKHVAQILDSRMNTKYDENDKLIREVKVITLKSKLVSDFRKDFQFYKVREINNYHHAHDAYLNAVVGTALIKKYPKLESEFVYGDYKVYDVRKMIAKSEQEIGKATAKYFFYSNIMNFFKTEITLANGEIRKRPLIETNGETGEIVWDKGRDFATVRKVLSMPQVNIVKKTEVQTGGFSKESILPKRNSDKLIARKKDWDPKKYGGFDSPTVAYSVLVVAKVEKGKSKKLKSVKELLGITIMERSSFEKNPIDFLEAKGYKEVKKDLIIKLPKYSLFELENGRKRMLASAGELQKGNELALPSKYVNFLYLASHYEKLKGSPEDNEQKQLFVEQHKHYLDEIIEQISEFSKRVILADANLDKVLSAYNKHRDKPIREQAENIIHLFTLTNLGAPAAFKYFDTTIDRKRYTSTKEVLDATLIHQSITGLYETRIDLSQLGGDGGGGSEAAAKPAPGGTLNIEDEYRLHETSKEPDVPLGSTWLSDFPQAWAETGGMGLAVRQAPLIIPLKATSTPVSIKQYPMSQEARLGIKPHIQRLLDQGILVPCQSPWNTPLLPVKKPGTNDYRPVQDLREVNKRVEDIHPTVPNPYNLLSGLPPSHQWYTVLDLKDAFFCLRLHPTSQPLFAFEWRDPEMGISGQLTWTRLPQGFKNSPTLFNEALHRDLADFRIQHPDLILLQYVDDLLLAATSEQDCQRGTRALLQTLGNLGYRASAKKAQICQKQVKYLGYLLKEGQRWLTEARKETVMGQPTPKTPRQLREFLGKAGFCRLFIPGFAEMAAPLYPLTKPGTLFNWGPDQQKAYQEIKQALLTAPALGLPDLTKPFELFVDEKQGYAKGVLTQKLGPWRRPVAYLSKKLDPVAAGWPPCLRMVAAIAVLTKDAGKLTMGQPLVILAPHAVEALVKQPPDRWLSNARMTHYQAMLLDTDRVQFGPVVALNPATLLPLPEKEAPHDCLEILAETHGTRPDLTDQPIPDADYTWYTDGSSFLQEGQRRAGAAVTTETEVIWARALPAGTSAQRAELIALTQALKMAEGKKLNVYTDSRYAFATAHVHGEIYRRRGWLTSEGREIKNKNEILALLKALFLPKRLSIIHCPGHQKGNSAEARGNRMADQAAREAAMKAVLETSTLLAGKRTADGSEFEKRTADGSEFESPKKKAKVE

SEQ ID NO: 1036 - protein, 2118 aa, synthetic construct
MPAAKRVKLDGGDKKYSIGLDIGTNSVGWAVITDEYKVPSKKFKVLGNTDRHSIKKNLIGALLFDSGETAEATRLKRTARRRYTRRKNRICYLQEIFSNEMAKVDDSFFHRLEESFLVEEDKKHERHPIFGNIVDEVAYHEKYPTIYHLRKKLVDSTDKADLRLIYLALAHMIKFRGHFLIEGDLNPDNSDVDKLFIQLVQTYNQLFEENPINASGVDAKAILSARLSKSRRLENLIAQLPGEKKNGLFGNLIALSLGLTPNFKSNFDLAEDAKLQLSKDTYDDDLDNLLAQIGDQYADLFLAAKNLSDAILLSDILRVNTEITKAPLSASMIKRYDEHHQDLTLLKALVRQQLPEKYKEIFFDQSKNGYAGYIDGGASQEEFYKFIKPILEKMDGTEELLVKLNREDLLRKQRTFDNGSIPHQIHLGELHAILRRQEDFYPFLKDNREKIEKILTFRIPYYVGPLARGNSRFAWMTRKSEETITPWNFEEVVDKGASAQSFIERMTNFDKNLPNEKVLPKHSLLYEYFTVYNELTKVKYVTEGMRKPAFLSGEQKKAIVDLLFKTNRKVTVKQLKEDYFKKIECFDSVEISGVEDRFNASLGTYHDLLKIIKDKDFLDNEENEDILEDIVLTLTLFEDREMIEERLKTYAHLFDDKVMKQLKRRRYTGWGRLSRKLINGIRDKQSGKTILDFLKSDGFANRNFMQLIHDDSLTFKEDIQKAQVSGQGDSLHEHIANLAGSPAIKKGILQTVKVVDELVKVMGRHKPENIVIEMARENQTTQKGQKNSRERMKRIEEGIKELGSQILKEHPVENTQLQNEKLYLYYLQNGRDMYVDQELDINRLSDYDVDHIVPQSFLKDDSIDNKVLTRSDKARGKSDNVPSEEVVKKMKNYWRQLLNAKLITQRKFDNLTKAERGGLSELDKAGFIKRQLVETRQITKHVAQILDSRMNTKYDENDKLIREVKVITLKSKLVSDFRKDFQFYKVREINNYHHAHDAYLNAVVGTALIKKYPKLESEFVYGDYKVYDVRKMIAKSEQEIGKATAKYFFYSNIMNFFKTEITLANGEIRKRPLIETNGETGEIVWDKGRDFATVRKVLSMPQVNIVKKTEVQTGGFSKESILPKRNSDKLIARKKDWDPKKYGGFDSPTVAYSVLVVAKVEKGKSKKLKSVKELLGITIMERSSFEKNPIDFLEAKGYKEVKKDLIIKLPKYSLFELENGRKRMLASAGELQKGNELALPSKYVNFLYLASHYEKLKGSPEDNEQKQLFVEQHKHYLDEIIEQISEFSKRVILADANLDKVLSAYNKHRDKPIREQAENIIHLFTLTNLGAPAAFKYFDTTIDRKRYTSTKEVLDATLIHQSITGLYETRIDLSQLGGDGGSGGSSGGSSGSETPGTSESATPESSGGSSGGSSGGTLNIEDEYRLHETSKEPDVPLGSTWLSDFPQAWAETGGMGLAVRQAPLIIPLKATSTPVSIKQYPMSQEARLGIKPHIQRLLDQGILVPCQSPWNTPLLPVKKPGTNDYRPVQDLREVNKRVEDIHPTVPNPYNLLSGLPPSHQWYTVLDLKDAFFCLRLHPTSQPLFAFEWRDPEMGISGQLTWTRLPQGFKNSPTLFNEALHRDLADFRIQHPDLILLQYVDDLLLAATSEQDCQRGTRALLQTLGNLGYRASAKKAQICQKQVKYLGYLLKEGQRWLTEARKETVMGQPTPKTPRQLREFLGKAGFCRLFIPGFAEMAAPLYPLTKPGTLFNWGPDQQKAYQEIKQALLTAPALGLPDLTKPFELFVDEKQGYAKGVLTQKLGPWRRPVAYLSKKLDPVAAGWPPCLRMVAAIAVLTKDAGKLTMGQPLVILAPHAVEALVKQPPDRWLSNARMTHYQAMLLDTDRVQFGPVVALNPATLLPLPEKEAPHDCLEILAETHGTRPDLTDQPIPDADYTWYTDGSSFLQEGQRRAGAAVTTETEVIWARALPAGTSAQRAELIALTQALKMAEGKKLNVYTDSRYAFATAHVHGEIYRRRGWLTSEGREIKNKNEILALLKALFLPKRLSIIHCPGHQKGNSAEARGNRMADQAAREAAMKAVLETSTLLAGKRTADGSEFEKRTADGSEFESPKKKAKVE

SEQ ID NO: 1037 - protein, 2100 aa, synthetic construct
MPAAKRVKLDGGDKKYSIGLDIGTNSVGWAVITDEYKVPSKKFKVLGNTDRHSIKKNLIGALLFDSGETAEATRLKRTARRRYTRRKNRICYLQEIFSNEMAKVDDSFFHRLEESFLVEEDKKHERHPIFGNIVDEVAYHEKYPTIYHLRKKLVDSTDKADLRLIYLALAHMIKFRGHFLIEGDLNPDNSDVDKLFIQLVQTYNQLFEENPINASGVDAKAILSARLSKSRRLENLIAQLPGEKKNGLFGNLIALSLGLTPNFKSNFDLAEDAKLQLSKDTYDDDLDNLLAQIGDQYADLFLAAKNLSDAILLSDILRVNTEITKAPLSASMIKRYDEHHQDLTLLKALVRQQLPEKYKEIFFDQSKNGYAGYIDGGASQEEFYKFIKPILEKMDGTEELLVKLNREDLLRKQRTFDNGSIPHQIHLGELHAILRRQEDFYPFLKDNREKIEKILTFRIPYYVGPLARGNSRFAWMTRKSEETITPWNFEEVVDKGASAQSFIERMTNFDKNLPNEKVLPKHSLLYEYFTVYNELTKVKYVTEGMRKPAFLSGEQKKAIVDLLFKTNRKVTVKQLKEDYFKKIECFDSVEISGVEDRFNASLGTYHDLLKIIKDKDFLDNEENEDILEDIVLTLTLFEDREMIEERLKTYAHLFDDKVMKQLKRRRYTGWGRLSRKLINGIRDKQSGKTILDFLKSDGFANRNFMQLIHDDSLTFKEDIQKAQVSGQGDSLHEHIANLAGSPAIKKGILQTVKVVDELVKVMGRHKPENIVIEMARENQTTQKGQKNSRERMKRIEEGIKELGSQILKEHPVENTQLQNEKLYLYYLQNGRDMYVDQELDINRLSDYDVDHIVPQSFLKDDSIDNKVLTRSDKARGKSDNVPSEEVVKKMKNYWRQLLNAKLITQRKFDNLTKAERGGLSELDKAGFIKRQLVETRQITKHVAQILDSRMNTKYDENDKLIREVKVITLKSKLVSDFRKDFQFYKVREINNYHHAHDAYLNAVVGTALIKKYPKLESEFVYGDYKVYDVRKMIAKSEQEIGKATAKYFFYSNIMNFFKTEITLANGEIRKRPLIETNGETGEIVWDKGRDFATVRKVLSMPQVNIVKKTEVQTGGFSKESILPKRNSDKLIARKKDWDPKKYGGFDSPTVAYSVLVVAKVEKGKSKKLKSVKELLGITIMERSSFEKNPIDFLEAKGYKEVKKDLIIKLPKYSLFELENGRKRMLASAGELQKGNELALPSKYVNFLYLASHYEKLKGSPEDNEQKQLFVEQHKHYLDEIIEQISEFSKRVILADANLDKVLSAYNKHRDKPIREQAENIIHLFTLTNLGAPAAFKYFDTTIDRKRYTSTKEVLDATLIHQSITGLYETRIDLSQLGGDGGEAAAKGGGGSEAAAKGGTLNIEDEYRLHETSKEPDVPLGSTWLSDFPQAWAETGGMGLAVRQAPLIIPLKATSTPVSIKQYPMSQEARLGIKPHIQRLLDQGILVPCQSPWNTPLLPVKKPGTNDYRPVQDLREVNKRVEDIHPTVPNPYNLLSGLPPSHQWYTVLDLKDAFFCLRLHPTSQPLFAFEWRDPEMGISGQLTWTRLPQGFKNSPTLFNEALHRDLADFRIQHPDLILLQYVDDLLLAATSEQDCQRGTRALLQTLGNLGYRASAKKAQICQKQVKYLGYLLKEGQRWLTEARKETVMGQPTPKTPRQLREFLGKAGFCRLFIPGFAEMAAPLYPLTKPGTLFNWGPDQQKAYQEIKQALLTAPALGLPDLTKPFELFVDEKQGYAKGVLTQKLGPWRRPVAYLSKKLDPVAAGWPPCLRMVAAIAVLTKDAGKLTMGQPLVILAPHAVEALVKQPPDRWLSNARMTHYQAMLLDTDRVQFGPVVALNPATLLPLPEKEAPHDCLEILAETHGTRPDLTDQPIPDADYTWYTDGSSFLQEGQRRAGAAVTTETEVIWARALPAGTSAQRAELIALTQALKMAEGKKLNVYTDSRYAFATAHVHGEIYRRRGWLTSEGREIKNKNEILALLKALFLPKRLSIIHCPGHQKGNSAEARGNRMADQAAREAAMKAVLETSTLLAGKRTADGSEFEKRTADGSEFESPKKKAKVE

SEQ ID NO: 1038 - protein, 2094 aa, synthetic construct
MPAAKRVKLDGGDKKYSIGLDIGTNSVGWAVITDEYKVPSKKFKVLGNTDRHSIKKNLIGALLFDSGETAEATRLKRTARRRYTRRKNRICYLQEIFSNEMAKVDDSFFHRLEESFLVEEDKKHERHPIFGNIVDEVAYHEKYPTIYHLRKKLVDSTDKADLRLIYLALAHMIKFRGHFLIEGDLNPDNSDVDKLFIQLVQTYNQLFEENPINASGVDAKAILSARLSKSRRLENLIAQLPGEKKNGLFGNLIALSLGLTPNFKSNFDLAEDAKLQLSKDTYDDDLDNLLAQIGDQYADLFLAAKNLSDAILLSDILRVNTEITKAPLSASMIKRYDEHHQDLTLLKALVRQQLPEKYKEIFFDQSKNGYAGYIDGGASQEEFYKFIKPILEKMDGTEELLVKLNREDLLRKQRTFDNGSIPHQIHLGELHAILRRQEDFYPFLKDNREKIEKILTFRIPYYVGPLARGNSRFAWMTRKSEETITPWNFEEVVDKGASAQSFIERMTNFDKNLPNEKVLPKHSLLYEYFTVYNELTKVKYVTEGMRKPAFLSGEQKKAIVDLLFKTNRKVTVKQLKEDYFKKIECFDSVEISGVEDRFNASLGTYHDLLKIIKDKDFLDNEENEDILEDIVLTLTLFEDREMIEERLKTYAHLFDDKVMKQLKRRRYTGWGRLSRKLINGIRDKQSGKTILDFLKSDGFANRNFMQLIHDDSLTFKEDIQKAQVSGQGDSLHEHIANLAGSPAIKKGILQTVKVVDELVKVMGRHKPENIVIEMARENQTTQKGQKNSRERMKRIEEGIKELGSQILKEHPVENTQLQNEKLYLYYLQNGRDMYVDQELDINRLSDYDVDHIVPQSFLKDDSIDNKVLTRSDKARGKSDNVPSEEVVKKMKNYWRQLLNAKLITQRKFDNLTKAERGGLSELDKAGFIKRQLVETRQITKHVAQILDSRMNTKYDENDKLIREVKVITLKSKLVSDFRKDFQFYKVREINNYHHAHDAYLNAVVGTALIKKYPKLESEFVYGDYKVYDVRKMIAKSEQEIGKATAKYFFYSNIMNFFKTEITLANGEIRKRPLIETNGETGEIVWDKGRDFATVRKVLSMPQVNIVKKTEVQTGGFSKESILPKRNSDKLIARKKDWDPKKYGGFDSPTVAYSVLVVAKVEKGKSKKLKSVKELLGITIMERSSFEKNPIDFLEAKGYKEVKKDLIIKLPKYSLFELENGRKRMLASAGELQKGNELALPSKYVNFLYLASHYEKLKGSPEDNEQKQLFVEQHKHYLDEIIEQISEFSKRVILADANLDKVLSAYNKHRDKPIREQAENIIHLFTLTNLGAPAAFKYFDTTIDRKRYTSTKEVLDATLIHQSITGLYETRIDLSQLGGDGGGSSPAPGGGGGTLNIEDEYRLHETSKEPDVPLGSTWLSDFPQAWAETGGMGLAVRQAPLIIPLKATSTPVSIKQYPMSQEARLGIKPHIQRLLDQGILVPCQSPWNTPLLPVKKPGTNDYRPVQDLREVNKRVEDIHPTVPNPYNLLSGLPPSHQWYTVLDLKDAFFCLRLHPTSQPLFAFEWRDPEMGISGQLTWTRLPQGFKNSPTLFNEALHRDLADFRIQHPDLILLQYVDDLLLAATSEQDCQRGTRALLQTLGNLGYRASAKKAQICQKQVKYLGYLLKEGQRWLTEARKETVMGQPTPKTPRQLREFLGKAGFCRLFIPGFAEMAAPLYPLTKPGTLFNWGPDQQKAYQEIKQALLTAPALGLPDLTKPFELFVDEKQGYAKGVLTQKLGPWRRPVAYLSKKLDPVAAGWPPCLRMVAAIAVLTKDAGKLTMGQPLVILAPHAVEALVKQPPDRWLSNARMTHYQAMLLDTDRVQFGPVVALNPATLLPLPEKEAPHDCLEILAETHGTRPDLTDQPIPDADYTWYTDGSSFLQEGQRRAGAAVTTETEVIWARALPAGTSAQRAELIALTQALKMAEGKKLNVYTDSRYAFATAHVHGEIYRRRGWLTSEGREIKNKNEILALLKALFLPKRLSIIHCPGHQKGNSAEARGNRMADQAAREAAMKAVLETSTLLAGKRTADGSEFEKRTADGSEFESPKKKAKVE

SEQ ID NO: 1039 - protein, 2096 aa, synthetic construct
MPAAKRVKLDGGDKKYSIGLDIGTNSVGWAVITDEYKVPSKKFKVLGNTDRHSIKKNLIGALLFDSGETAEATRLKRTARRRYTRRKNRICYLQEIFSNEMAKVDDSFFHRLEESFLVEEDKKHERHPIFGNIVDEVAYHEKYPTIYHLRKKLVDSTDKADLRLIYLALAHMIKFRGHFLIEGDLNPDNSDVDKLFIQLVQTYNQLFEENPINASGVDAKAILSARLSKSRRLENLIAQLPGEKKNGLFGNLIALSLGLTPNFKSNFDLAEDAKLQLSKDTYDDDLDNLLAQIGDQYADLFLAAKNLSDAILLSDILRVNTEITKAPLSASMIKRYDEHHQDLTLLKALVRQQLPEKYKEIFFDQSKNGYAGYIDGGASQEEFYKFIKPILEKMDGTEELLVKLNREDLLRKQRTFDNGSIPHQIHLGELHAILRRQEDFYPFLKDNREKIEKILTFRIPYYVGPLARGNSRFAWMTRKSEETITPWNFEEVVDKGASAQSFIERMTNFDKNLPNEKVLPKHSLLYEYFTVYNELTKVKYVTEGMRKPAFLSGEQKKAIVDLLFKTNRKVTVKQLKEDYFKKIECFDSVEISGVEDRFNASLGTYHDLLKIIKDKDFLDNEENEDILEDIVLTLTLFEDREMIEERLKTYAHLFDDKVMKQLKRRRYTGWGRLSRKLINGIRDKQSGKTILDFLKSDGFANRNFMQLIHDDSLTFKEDIQKAQVSGQGDSLHEHIANLAGSPAIKKGILQTVKVVDELVKVMGRHKPENIVIEMARENQTTQKGQKNSRERMKRIEEGIKELGSQILKEHPVENTQLQNEKLYLYYLQNGRDMYVDQELDINRLSDYDVDHIVPQSFLKDDSIDNKVLTRSDKARGKSDNVPSEEVVKKMKNYWRQLLNAKLITQRKFDNLTKAERGGLSELDKAGFIKRQLVETRQITKHVAQILDSRMNTKYDENDKLIREVKVITLKSKLVSDFRKDFQFYKVREINNYHHAHDAYLNAVVGTALIKKYPKLESEFVYGDYKVYDVRKMIAKSEQEIGKATAKYFFYSNIMNFFKTEITLANGEIRKRPLIETNGETGEIVWDKGRDFATVRKVLSMPQVNIVKKTEVQTGGFSKESILPKRNSDKLIARKKDWDPKKYGGFDSPTVAYSVLVVAKVEKGKSKKLKSVKELLGITIMERSSFEKNPIDFLEAKGYKEVKKDLIIKLPKYSLFELENGRKRMLASAGELQKGNELALPSKYVNFLYLASHYEKLKGSPEDNEQKQLFVEQHKHYLDEIIEQISEFSKRVILADANLDKVLSAYNKHRDKPIREQAENIIHLFTLTNLGAPAAFKYFDTTIDRKRYTSTKEVLDATLIHQSITGLYETRIDLSQLGGDGGEAAAKGSSPAPGGTLNIEDEYRLHETSKEPDVPLGSTWLSDFPQAWAETGGMGLAVRQAPLIIPLKATSTPVSIKQYPMSQEARLGIKPHIQRLLDQGILVPCQSPWNTPLLPVKKPGTNDYRPVQDLREVNKRVEDIHPTVPNPYNLLSGLPPSHQWYTVLDLKDAFFCLRLHPTSQPLFAFEWRDPEMGISGQLTWTRLPQGFKNSPTLFNEALHRDLADFRIQHPDLILLQYVDDLLLAATSEQDCQRGTRALLQTLGNLGYRASAKKAQICQKQVKYLGYLLKEGQRWLTEARKETVMGQPTPKTPRQLREFLGKAGFCRLFIPGFAEMAAPLYPLTKPGTLFNWGPDQQKAYQEIKQALLTAPALGLPDLTKPFELFVDEKQGYAKGVLTQKLGPWRRPVAYLSKKLDPVAAGWPPCLRMVAAIAVLTKDAGKLTMGQPLVILAPHAVEALVKQPPDRWLSNARMTHYQAMLLDTDRVQFGPVVALNPATLLPLPEKEAPHDCLEILAETHGTRPDLTDQPIPDADYTWYTDGSSFLQEGQRRAGAAVTTETEVIWARALPAGTSAQRAELIALTQALKMAEGKKLNVYTDSRYAFATAHVHGEIYRRRGWLTSEGREIKNKNEILALLKALFLPKRLSIIHCPGHQKGNSAEARGNRMADQAAREAAMKAVLETSTLLAGKRTADGSEFEKRTADGSEFESPKKKAKVE

SEQ ID NO: 1040 - protein, 2091 aa, synthetic construct
MPAAKRVKLDGGDKKYSIGLDIGTNSVGWAVITDEYKVPSKKFKVLGNTDRHSIKKNLIGALLFDSGETAEATRLKRTARRRYTRRKNRICYLQEIFSNEMAKVDDSFFHRLEESFLVEEDKKHERHPIFGNIVDEVAYHEKYPTIYHLRKKLVDSTDKADLRLIYLALAHMIKFRGHFLIEGDLNPDNSDVDKLFIQLVQTYNQLFEENPINASGVDAKAILSARLSKSRRLENLIAQLPGEKKNGLFGNLIALSLGLTPNFKSNFDLAEDAKLQLSKDTYDDDLDNLLAQIGDQYADLFLAAKNLSDAILLSDILRVNTEITKAPLSASMIKRYDEHHQDLTLLKALVRQQLPEKYKEIFFDQSKNGYAGYIDGGASQEEFYKFIKPILEKMDGTEELLVKLNREDLLRKQRTFDNGSIPHQIHLGELHAILRRQEDFYPFLKDNREKIEKILTFRIPYYVGPLARGNSRFAWMTRKSEETITPWNFEEVVDKGASAQSFIERMTNFDKNLPNEKVLPKHSLLYEYFTVYNELTKVKYVTEGMRKPAFLSGEQKKAIVDLLFKTNRKVTVKQLKEDYFKKIECFDSVEISGVEDRFNASLGTYHDLLKIIKDKDFLDNEENEDILEDIVLTLTLFEDREMIEERLKTYAHLFDDKVMKQLKRRRYTGWGRLSRKLINGIRDKQSGKTILDFLKSDGFANRNFMQLIHDDSLTFKEDIQKAQVSGQGDSLHEHIANLAGSPAIKKGILQTVKVVDELVKVMGRHKPENIVIEMARENQTTQKGQKNSRERMKRIEEGIKELGSQILKEHPVENTQLQNEKLYLYYLQNGRDMYVDQELDINRLSDYDVDHIVPQSFLKDDSIDNKVLTRSDKARGKSDNVPSEEVVKKMKNYWRQLLNAKLITQRKFDNLTKAERGGLSELDKAGFIKRQLVETRQITKHVAQILDSRMNTKYDENDKLIREVKVITLKSKLVSDFRKDFQFYKVREINNYHHAHDAYLNAVVGTALIKKYPKLESEFVYGDYKVYDVRKMIAKSEQEIGKATAKYFFYSNIMNFFKTEITLANGEIRKRPLIETNGETGEIVWDKGRDFATVRKVLSMPQVNIVKKTEVQTGGFSKESILPKRNSDKLIARKKDWDPKKYGGFDSPTVAYSVLVVAKVEKGKSKKLKSVKELLGITIMERSSFEKNPIDFLEAKGYKEVKKDLIIKLPKYSLFELENGRKRMLASAGELQKGNELALPSKYVNFLYLASHYEKLKGSPEDNEQKQLFVEQHKHYLDEIIEQISEFSKRVILADANLDKVLSAYNKHRDKPIREQAENIIHLFTLTNLGAPAAFKYFDTTIDRKRYTSTKEVLDATLIHQSITGLYETRIDLSQLGGDGGGGSGGSGGTLNIEDEYRLHETSKEPDVPLGSTWLSDFPQAWAETGGMGLAVRQAPLIIPLKATSTPVSIKQYPMSQEARLGIKPHIQRLLDQGILVPCQSPWNTPLLPVKKPGTNDYRPVQDLREVNKRVEDIHPTVPNPYNLLSGLPPSHQWYTVLDLKDAFFCLRLHPTSQPLFAFEWRDPEMGISGQLTWTRLPQGFKNSPTLFNEALHRDLADFRIQHPDLILLQYVDDLLLAATSEQDCQRGTRALLQTLGNLGYRASAKKAQICQKQVKYLGYLLKEGQRWLTEARKETVMGQPTPKTPRQLREFLGKAGFCRLFIPGFAEMAAPLYPLTKPGTLFNWGPDQQKAYQEIKQALLTAPALGLPDLTKPFELFVDEKQGYAKGVLTQKLGPWRRPVAYLSKKLDPVAAGWPPCLRMVAAIAVLTKDAGKLTMGQPLVILAPHAVEALVKQPPDRWLSNARMTHYQAMLLDTDRVQFGPVVALNPATLLPLPEKEAPHDCLEILAETHGTRPDLTDQPIPDADYTWYTDGSSFLQEGQRRAGAAVTTETEVIWARALPAGTSAQRAELIALTQALKMAEGKKLNVYTDSRYAFATAHVHGEIYRRRGWLTSEGREIKNKNEILALLKALFLPKRLSIIHCPGHQKGNSAEARGNRMADQAAREAAMKAVLETSTLLAGKRTADGSEFEKRTADGSEFESPKKKAKVE

SEQ ID NO: 1041 - protein, 2096 aa, synthetic construct
MPAAKRVKLDGGDKKYSIGLDIGTNSVGWAVITDEYKVPSKKFKVLGNTDRHSIKKNLIGALLFDSGETAEATRLKRTARRRYTRRKNRICYLQEIFSNEMAKVDDSFFHRLEESFLVEEDKKHERHPIFGNIVDEVAYHEKYPTIYHLRKKLVDSTDKADLRLIYLALAHMIKFRGHFLIEGDLNPDNSDVDKLFIQLVQTYNQLFEENPINASGVDAKAILSARLSKSRRLENLIAQLPGEKKNGLFGNLIALSLGLTPNFKSNFDLAEDAKLQLSKDTYDDDLDNLLAQIGDQYADLFLAAKNLSDAILLSDILRVNTEITKAPLSASMIKRYDEHHQDLTLLKALVRQQLPEKYKEIFFDQSKNGYAGYIDGGASQEEFYKFIKPILEKMDGTEELLVKLNREDLLRKQRTFDNGSIPHQIHLGELHAILRRQEDFYPFLKDNREKIEKILTFRIPYYVGPLARGNSRFAWMTRKSEETITPWNFEEVVDKGASAQSFIERMTNFDKNLPNEKVLPKHSLLYEYFTVYNELTKVKYVTEGMRKPAFLSGEQKKAIVDLLFKTNRKVTVKQLKEDYFKKIECFDSVEISGVEDRFNASLGTYHDLLKIIKDKDFLDNEENEDILEDIVLTLTLFEDREMIEERLKTYAHLFDDKVMKQLKRRRYTGWGRLSRKLINGIRDKQSGKTILDFLKSDGFANRNFMQLIHDDSLTFKEDIQKAQVSGQGDSLHEHIANLAGSPAIKKGILQTVKVVDELVKVMGRHKPENIVIEMARENQTTQKGQKNSRERMKRIEEGIKELGSQILKEHPVENTQLQNEKLYLYYLQNGRDMYVDQELDINRLSDYDVDHIVPQSFLKDDSIDNKVLTRSDKARGKSDNVPSEEVVKKMKNYWRQLLNAKLITQRKFDNLTKAERGGLSELDKAGFIKRQLVETRQITKHVAQILDSRMNTKYDENDKLIREVKVITLKSKLVSDFRKDFQFYKVREINNYHHAHDAYLNAVVGTALIKKYPKLESEFVYGDYKVYDVRKMIAKSEQEIGKATAKYFFYSNIMNFFKTEITLANGEIRKRPLIETNGETGEIVWDKGRDFATVRKVLSMPQVNIVKKTEVQTGGFSKESILPKRNSDKLIARKKDWDPKKYGGFDSPTVAYSVLVVAKVEKGKSKKLKSVKELLGITIMERSSFEKNPIDFLEAKGYKEVKKDLIIKLPKYSLFELENGRKRMLASAGELQKGNELALPSKYVNFLYLASHYEKLKGSPEDNEQKQLFVEQHKHYLDEIIEQISEFSKRVILADANLDKVLSAYNKHRDKPIREQAENIIHLFTLTNLGAPAAFKYFDTTIDRKRYTSTKEVLDATLIHQSITGLYETRIDLSQLGGDGGEAAAKGGSPAPGGTLNIEDEYRLHETSKEPDVPLGSTWLSDFPQAWAETGGMGLAVRQAPLIIPLKATSTPVSIKQYPMSQEARLGIKPHIQRLLDQGILVPCQSPWNTPLLPVKKPGTNDYRPVQDLREVNKRVEDIHPTVPNPYNLLSGLPPSHQWYTVLDLKDAFFCLRLHPTSQPLFAFEWRDPEMGISGQLTWTRLPQGFKNSPTLFNEALHRDLADFRIQHPDLILLQYVDDLLLAATSEQDCQRGTRALLQTLGNLGYRASAKKAQICQKQVKYLGYLLKEGQRWLTEARKETVMGQPTPKTPRQLREFLGKAGFCRLFIPGFAEMAAPLYPLTKPGTLFNWGPDQQKAYQEIKQALLTAPALGLPDLTKPFELFVDEKQGYAKGVLTQKLGPWRRPVAYLSKKLDPVAAGWPPCLRMVAAIAVLTKDAGKLTMGQPLVILAPHAVEALVKQPPDRWLSNARMTHYQAMLLDTDRVQFGPVVALNPATLLPLPEKEAPHDCLEILAETHGTRPDLTDQPIPDADYTWYTDGSSFLQEGQRRAGAAVTTETEVIWARALPAGTSAQRAELIALTQALKMAEGKKLNVYTDSRYAFATAHVHGEIYRRRGWLTSEGREIKNKNEILALLKALFLPKRLSIIHCPGHQKGNSAEARGNRMADQAAREAAMKAVLETSTLLAGKRTADGSEFEKRTADGSEFESPKKKAKVE

SEQ ID NO: 1042 - protein, 2100 aa, synthetic construct
MPAAKRVKLDGGDKKYSIGLDIGTNSVGWAVITDEYKVPSKKFKVLGNTDRHSIKKNLIGALLFDSGETAEATRLKRTARRRYTRRKNRICYLQEIFSNEMAKVDDSFFHRLEESFLVEEDKKHERHPIFGNIVDEVAYHEKYPTIYHLRKKLVDSTDKADLRLIYLALAHMIKFRGHFLIEGDLNPDNSDVDKLFIQLVQTYNQLFEENPINASGVDAKAILSARLSKSRRLENLIAQLPGEKKNGLFGNLIALSLGLTPNFKSNFDLAEDAKLQLSKDTYDDDLDNLLAQIGDQYADLFLAAKNLSDAILLSDILRVNTEITKAPLSASMIKRYDEHHQDLTLLKALVRQQLPEKYKEIFFDQSKNGYAGYIDGGASQEEFYKFIKPILEKMDGTEELLVKLNREDLLRKQRTFDNGSIPHQIHLGELHAILRRQEDFYPFLKDNREKIEKILTFRIPYYVGPLARGNSRFAWMTRKSEETITPWNFEEVVDKGASAQSFIERMTNFDKNLPNEKVLPKHSLLYEYFTVYNELTKVKYVTEGMRKPAFLSGEQKKAIVDLLFKTNRKVTVKQLKEDYFKKIECFDSVEISGVEDRFNASLGTYHDLLKIIKDKDFLDNEENEDILEDIVLTLTLFEDREMIEERLKTYAHLFDDKVMKQLKRRRYTGWGRLSRKLINGIRDKQSGKTILDFLKSDGFANRNFMQLIHDDSLTFKEDIQKAQVSGQGDSLHEHIANLAGSPAIKKGILQTVKVVDELVKVMGRHKPENIVIEMARENQTTQKGQKNSRERMKRIEEGIKELGSQILKEHPVENTQLQNEKLYLYYLQNGRDMYVDQELDINRLSDYDVDHIVPQSFLKDDSIDNKVLTRSDKARGKSDNVPSEEVVKKMKNYWRQLLNAKLITQRKFDNLTKAERGGLSELDKAGFIKRQLVETRQITKHVAQILDSRMNTKYDENDKLIREVKVITLKSKLVSDFRKDFQFYKVREINNYHHAHDAYLNAVVGTALIKKYPKLESEFVYGDYKVYDVRKMIAKSEQEIGKATAKYFFYSNIMNFFKTEITLANGEIRKRPLIETNGETGEIVWDKGRDFATVRKVLSMPQVNIVKKTEVQTGGFSKESILPKRNSDKLIARKKDWDPKKYGGFDSPTVAYSVLVVAKVEKGKSKKLKSVKELLGITIMERSSFEKNPIDFLEAKGYKEVKKDLIIKLPKYSLFELENGRKRMLASAGELQKGNELALPSKYVNFLYLASHYEKLKGSPEDNEQKQLFVEQHKHYLDEIIEQISEFSKRVILADANLDKVLSAYNKHRDKPIREQAENIIHLFTLTNLGAPAAFKYFDTTIDRKRYTSTKEVLDATLIHQSITGLYETRIDLSQLGGDGGGGGGSGGGGSGGGGSGGTLNIEDEYRLHETSKEPDVPLGSTWLSDFPQAWAETGGMGLAVRQAPLIIPLKATSTPVSIKQYPMSQEARLGIKPHIQRLLDQGILVPCQSPWNTPLLPVKKPGTNDYRPVQDLREVNKRVEDIHPTVPNPYNLLSGLPPSHQWYTVLDLKDAFFCLRLHPTSQPLFAFEWRDPEMGISGQLTWTRLPQGFKNSPTLFNEALHRDLADFRIQHPDLILLQYVDDLLLAATSEQDCQRGTRALLQTLGNLGYRASAKKAQICQKQVKYLGYLLKEGQRWLTEARKETVMGQPTPKTPRQLREFLGKAGFCRLFIPGFAEMAAPLYPLTKPGTLFNWGPDQQKAYQEIKQALLTAPALGLPDLTKPFELFVDEKQGYAKGVLTQKLGPWRRPVAYLSKKLDPVAAGWPPCLRMVAAIAVLTKDAGKLTMGQPLVILAPHAVEALVKQPPDRWLSNARMTHYQAMLLDTDRVQFGPVVALNPATLLPLPEKEAPHDCLEILAETHGTRPDLTDQPIPDADYTWYTDGSSFLQEGQRRAGAAVTTETEVIWARALPAGTSAQRAELIALTQALKMAEGKKLNVYTDSRYAFATAHVHGEIYRRRGWLTSEGREIKNKNEILALLKALFLPKRLSIIHCPGHQKGNSAEARGNRMADQAAREAAMKAVLETSTLLAGKRTADGSEFEKRTADGSEFESPKKKAKVE

SEQ ID NO: 1043 - protein, 2094 aa, synthetic construct
MPAAKRVKLDGGDKKYSIGLDIGTNSVGWAVITDEYKVPSKKFKVLGNTDRHSIKKNLIGALLFDSGETAEATRLKRTARRRYTRRKNRICYLQEIFSNEMAKVDDSFFHRLEESFLVEEDKKHERHPIFGNIVDEVAYHEKYPTIYHLRKKLVDSTDKADLRLIYLALAHMIKFRGHFLIEGDLNPDNSDVDKLFIQLVQTYNQLFEENPINASGVDAKAILSARLSKSRRLENLIAQLPGEKKNGLFGNLIALSLGLTPNFKSNFDLAEDAKLQLSKDTYDDDLDNLLAQIGDQYADLFLAAKNLSDAILLSDILRVNTEITKAPLSASMIKRYDEHHQDLTLLKALVRQQLPEKYKEIFFDQSKNGYAGYIDGGASQEEFYKFIKPILEKMDGTEELLVKLNREDLLRKQRTFDNGSIPHQIHLGELHAILRRQEDFYPFLKDNREKIEKILTFRIPYYVGPLARGNSRFAWMTRKSEETITPWNFEEVVDKGASAQSFIERMTNFDKNLPNEKVLPKHSLLYEYFTVYNELTKVKYVTEGMRKPAFLSGEQKKAIVDLLFKTNRKVTVKQLKEDYFKKIECFDSVEISGVEDRFNASLGTYHDLLKIIKDKDFLDNEENEDILEDIVLTLTLFEDREMIEERLKTYAHLFDDKVMKQLKRRRYTGWGRLSRKLINGIRDKQSGKTILDFLKSDGFANRNFMQLIHDDSLTFKEDIQKAQVSGQGDSLHEHIANLAGSPAIKKGILQTVKVVDELVKVMGRHKPENIVIEMARENQTTQKGQKNSRERMKRIEEGIKELGSQILKEHPVENTQLQNEKLYLYYLQNGRDMYVDQELDINRLSDYDVDHIVPQSFLKDDSIDNKVLTRSDKARGKSDNVPSEEVVKKMKNYWRQLLNAKLITQRKFDNLTKAERGGLSELDKAGFIKRQLVETRQITKHVAQILDSRMNTKYDENDKLIREVKVITLKSKLVSDFRKDFQFYKVREINNYHHAHDAYLNAVVGTALIKKYPKLESEFVYGDYKVYDVRKMIAKSEQEIGKATAKYFFYSNIMNFFKTEITLANGEIRKRPLIETNGETGEIVWDKGRDFATVRKVLSMPQVNIVKKTEVQTGGFSKESILPKRNSDKLIARKKDWDPKKYGGFDSPTVAYSVLVVAKVEKGKSKKLKSVKELLGITIMERSSFEKNPIDFLEAKGYKEVKKDLIIKLPKYSLFELENGRKRMLASAGELQKGNELALPSKYVNFLYLASHYEKLKGSPEDNEQKQLFVEQHKHYLDEIIEQISEFSKRVILADANLDKVLSAYNKHRDKPIREQAENIIHLFTLTNLGAPAAFKYFDTTIDRKRYTSTKEVLDATLIHQSITGLYETRIDLSQLGGDGGPAPGSSGGSGGTLNIEDEYRLHETSKEPDVPLGSTWLSDFPQAWAETGGMGLAVRQAPLIIPLKATSTPVSIKQYPMSQEARLGIKPHIQRLLDQGILVPCQSPWNTPLLPVKKPGTNDYRPVQDLREVNKRVEDIHPTVPNPYNLLSGLPPSHQWYTVLDLKDAFFCLRLHPTSQPLFAFEWRDPEMGISGQLTWTRLPQGFKNSPTLFNEALHRDLADFRIQHPDLILLQYVDDLLLAATSEQDCQRGTRALLQTLGNLGYRASAKKAQICQKQVKYLGYLLKEGQRWLTEARKETVMGQPTPKTPRQLREFLGKAGFCRLFIPGFAEMAAPLYPLTKPGTLFNWGPDQQKAYQEIKQALLTAPALGLPDLTKPFELFVDEKQGYAKGVLTQKLGPWRRPVAYLSKKLDPVAAGWPPCLRMVAAIAVLTKDAGKLTMGQPLVILAPHAVEALVKQPPDRWLSNARMTHYQAMLLDTDRVQFGPVVALNPATLLPLPEKEAPHDCLEILAETHGTRPDLTDQPIPDADYTWYTDGSSFLQEGQRRAGAAVTTETEVIWARALPAGTSAQRAELIALTQALKMAEGKKLNVYTDSRYAFATAHVHGEIYRRRGWLTSEGREIKNKNEILALLKALFLPKRLSIIHCPGHQKGNSAEARGNRMADQAAREAAMKAVLETSTLLAGKRTADGSEFEKRTADGSEFESPKKKAKVE

SEQ ID NO: 1044 - protein, 2093 aa, synthetic construct
MPAAKRVKLDGGDKKYSIGLDIGTNSVGWAVITDEYKVPSKKFKVLGNTDRHSIKKNLIGALLFDSGETAEATRLKRTARRRYTRRKNRICYLQEIFSNEMAKVDDSFFHRLEESFLVEEDKKHERHPIFGNIVDEVAYHEKYPTIYHLRKKLVDSTDKADLRLIYLALAHMIKFRGHFLIEGDLNPDNSDVDKLFIQLVQTYNQLFEENPINASGVDAKAILSARLSKSRRLENLIAQLPGEKKNGLFGNLIALSLGLTPNFKSNFDLAEDAKLQLSKDTYDDDLDNLLAQIGDQYADLFLAAKNLSDAILLSDILRVNTEITKAPLSASMIKRYDEHHQDLTLLKALVRQQLPEKYKEIFFDQSKNGYAGYIDGGASQEEFYKFIKPILEKMDGTEELLVKLNREDLLRKQRTFDNGSIPHQIHLGELHAILRRQEDFYPFLKDNREKIEKILTFRIPYYVGPLARGNSRFAWMTRKSEETITPWNFEEVVDKGASAQSFIERMTNFDKNLPNEKVLPKHSLLYEYFTVYNELTKVKYVTEGMRKPAFLSGEQKKAIVDLLFKTNRKVTVKQLKEDYFKKIECFDSVEISGVEDRFNASLGTYHDLLKIIKDKDFLDNEENEDILEDIVLTLTLFEDREMIEERLKTYAHLFDDKVMKQLKRRRYTGWGRLSRKLINGIRDKQSGKTILDFLKSDGFANRNFMQLIHDDSLTFKEDIQKAQVSGQGDSLHEHIANLAGSPAIKKGILQTVKVVDELVKVMGRHKPENIVIEMARENQTTQKGQKNSRERMKRIEEGIKELGSQILKEHPVENTQLQNEKLYLYYLQNGRDMYVDQELDINRLSDYDVDHIVPQSFLKDDSIDNKVLTRSDKARGKSDNVPSEEVVKKMKNYWRQLLNAKLITQRKFDNLTKAERGGLSELDKAGFIKRQLVETRQITKHVAQILDSRMNTKYDENDKLIREVKVITLKSKLVSDFRKDFQFYKVREINNYHHAHDAYLNAVVGTALIKKYPKLESEFVYGDYKVYDVRKMIAKSEQEIGKATAKYFFYSNIMNFFKTEITLANGEIRKRPLIETNGETGEIVWDKGRDFATVRKVLSMPQVNIVKKTEVQTGGFSKESILPKRNSDKLIARKKDWDPKKYGGFDSPTVAYSVLVVAKVEKGKSKKLKSVKELLGITIMERSSFEKNPIDFLEAKGYKEVKKDLIIKLPKYSLFELENGRKRMLASAGELQKGNELALPSKYVNFLYLASHYEKLKGSPEDNEQKQLFVEQHKHYLDEIIEQISEFSKRVILADANLDKVLSAYNKHRDKPIREQAENIIHLFTLTNLGAPAAFKYFDTTIDRKRYTSTKEVLDATLIHQSITGLYETRIDLSQLGGDGGGGGEAAAKGGTLNIEDEYRLHETSKEPDVPLGSTWLSDFPQAWAETGGMGLAVRQAPLIIPLKATSTPVSIKQYPMSQEARLGIKPHIQRLLDQGILVPCQSPWNTPLLPVKKPGTNDYRPVQDLREVNKRVEDIHPTVPNPYNLLSGLPPSHQWYTVLDLKDAFFCLRLHPTSQPLFAFEWRDPEMGISGQLTWTRLPQGFKNSPTLFNEALHRDLADFRIQHPDLILLQYVDDLLLAATSEQDCQRGTRALLQTLGNLGYRASAKKAQICQKQVKYLGYLLKEGQRWLTEARKETVMGQPTPKTPRQLREFLGKAGFCRLFIPGFAEMAAPLYPLTKPGTLFNWGPDQQKAYQEIKQALLTAPALGLPDLTKPFELFVDEKQGYAKGVLTQKLGPWRRPVAYLSKKLDPVAAGWPPCLRMVAAIAVLTKDAGKLTMGQPLVILAPHAVEALVKQPPDRWLSNARMTHYQAMLLDTDRVQFGPVVALNPATLLPLPEKEAPHDCLEILAETHGTRPDLTDQPIPDADYTWYTDGSSFLQEGQRRAGAAVTTETEVIWARALPAGTSAQRAELIALTQALKMAEGKKLNVYTDSRYAFATAHVHGEIYRRRGWLTSEGREIKNKNEILALLKALFLPKRLSIIHCPGHQKGNSAEARGNRMADQAAREAAMKAVLETSTLLAGKRTADGSEFEKRTADGSEFESPKKKAKVE

SEQ ID NO: 1045 - protein, 2100 aa, synthetic construct
MPAAKRVKLDGGDKKYSIGLDIGTNSVGWAVITDEYKVPSKKFKVLGNTDRHSIKKNLIGALLFDSGETAEATRLKRTARRRYTRRKNRICYLQEIFSNEMAKVDDSFFHRLEESFLVEEDKKHERHPIFGNIVDEVAYHEKYPTIYHLRKKLVDSTDKADLRLIYLALAHMIKFRGHFLIEGDLNPDNSDVDKLFIQLVQTYNQLFEENPINASGVDAKAILSARLSKSRRLENLIAQLPGEKKNGLFGNLIALSLGLTPNFKSNFDLAEDAKLQLSKDTYDDDLDNLLAQIGDQYADLFLAAKNLSDAILLSDILRVNTEITKAPLSASMIKRYDEHHQDLTLLKALVRQQLPEKYKEIFFDQSKNGYAGYIDGGASQEEFYKFIKPILEKMDGTEELLVKLNREDLLRKQRTFDNGSIPHQIHLGELHAILRRQEDFYPFLKDNREKIEKILTFRIPYYVGPLARGNSRFAWMTRKSEETITPWNFEEVVDKGASAQSFIERMTNFDKNLPNEKVLPKHSLLYEYFTVYNELTKVKYVTEGMRKPAFLSGEQKKAIVDLLFKTNRKVTVKQLKEDYFKKIECFDSVEISGVEDRFNASLGTYHDLLKIIKDKDFLDNEENEDILEDIVLTLTLFEDREMIEERLKTYAHLFDDKVMKQLKRRRYTGWGRLSRKLINGIRDKQSGKTILDFLKSDGFANRNFMQLIHDDSLTFKEDIQKAQVSGQGDSLHEHIANLAGSPAIKKGILQTVKVVDELVKVMGRHKPENIVIEMARENQTTQKGQKNSRERMKRIEEGIKELGSQILKEHPVENTQLQNEKLYLYYLQNGRDMYVDQELDINRLSDYDVDHIVPQSFLKDDSIDNKVLTRSDKARGKSDNVPSEEVVKKMKNYWRQLLNAKLITQRKFDNLTKAERGGLSELDKAGFIKRQLVETRQITKHVAQILDSRMNTKYDENDKLIREVKVITLKSKLVSDFRKDFQFYKVREINNYHHAHDAYLNAVVGTALIKKYPKLESEFVYGDYKVYDVRKMIAKSEQEIGKATAKYFFYSNIMNFFKTEITLANGEIRKRPLIETNGETGEIVWDKGRDFATVRKVLSMPQVNIVKKTEVQTGGFSKESILPKRNSDKLIARKKDWDPKKYGGFDSPTVAYSVLVVAKVEKGKSKKLKSVKELLGITIMERSSFEKNPIDFLEAKGYKEVKKDLIIKLPKYSLFELENGRKRMLASAGELQKGNELALPSKYVNFLYLASHYEKLKGSPEDNEQKQLFVEQHKHYLDEIIEQISEFSKRVILADANLDKVLSAYNKHRDKPIREQAENIIHLFTLTNLGAPAAFKYFDTTIDRKRYTSTKEVLDATLIHQSITGLYETRIDLSQLGGDGGGSSGSSGSSGSSGSSGGTLNIEDEYRLHETSKEPDVPLGSTWLSDFPQAWAETGGMGLAVRQAPLIIPLKATSTPVSIKQYPMSQEARLGIKPHIQRLLDQGILVPCQSPWNTPLLPVKKPGTNDYRPVQDLREVNKRVEDIHPTVPNPYNLLSGLPPSHQWYTVLDLKDAFFCLRLHPTSQPLFAFEWRDPEMGISGQLTWTRLPQGFKNSPTLFNEALHRDLADFRIQHPDLILLQYVDDLLLAATSEQDCQRGTRALLQTLGNLGYRASAKKAQICQKQVKYLGYLLKEGQRWLTEARKETVMGQPTPKTPRQLREFLGKAGFCRLFIPGFAEMAAPLYPLTKPGTLFNWGPDQQKAYQEIKQALLTAPALGLPDLTKPFELFVDEKQGYAKGVLTQKLGPWRRPVAYLSKKLDPVAAGWPPCLRMVAAIAVLTKDAGKLTMGQPLVILAPHAVEALVKQPPDRWLSNARMTHYQAMLLDTDRVQFGPVVALNPATLLPLPEKEAPHDCLEILAETHGTRPDLTDQPIPDADYTWYTDGSSFLQEGQRRAGAAVTTETEVIWARALPAGTSAQRAELIALTQALKMAEGKKLNVYTDSRYAFATAHVHGEIYRRRGWLTSEGREIKNKNEILALLKALFLPKRLSIIHCPGHQKGNSAEARGNRMADQAAREAAMKAVLETSTLLAGKRTADGSEFEKRTADGSEFESPKKKAKVE

SEQ ID NO: 1046 - protein, 2096 aa, synthetic construct
MPAAKRVKLDGGDKKYSIGLDIGTNSVGWAVITDEYKVPSKKFKVLGNTDRHSIKKNLIGALLFDSGETAEATRLKRTARRRYTRRKNRICYLQEIFSNEMAKVDDSFFHRLEESFLVEEDKKHERHPIFGNIVDEVAYHEKYPTIYHLRKKLVDSTDKADLRLIYLALAHMIKFRGHFLIEGDLNPDNSDVDKLFIQLVQTYNQLFEENPINASGVDAKAILSARLSKSRRLENLIAQLPGEKKNGLFGNLIALSLGLTPNFKSNFDLAEDAKLQLSKDTYDDDLDNLLAQIGDQYADLFLAAKNLSDAILLSDILRVNTEITKAPLSASMIKRYDEHHQDLTLLKALVRQQLPEKYKEIFFDQSKNGYAGYIDGGASQEEFYKFIKPILEKMDGTEELLVKLNREDLLRKQRTFDNGSIPHQIHLGELHAILRRQEDFYPFLKDNREKIEKILTFRIPYYVGPLARGNSRFAWMTRKSEETITPWNFEEVVDKGASAQSFIERMTNFDKNLPNEKVLPKHSLLYEYFTVYNELTKVKYVTEGMRKPAFLSGEQKKAIVDLLFKTNRKVTVKQLKEDYFKKIECFDSVEISGVEDRFNASLGTYHDLLKIIKDKDFLDNEENEDILEDIVLTLTLFEDREMIEERLKTYAHLFDDKVMKQLKRRRYTGWGRLSRKLINGIRDKQSGKTILDFLKSDGFANRNFMQLIHDDSLTFKEDIQKAQVSGQGDSLHEHIANLAGSPAIKKGILQTVKVVDELVKVMGRHKPENIVIEMARENQTTQKGQKNSRERMKRIEEGIKELGSQILKEHPVENTQLQNEKLYLYYLQNGRDMYVDQELDINRLSDYDVDHIVPQSFLKDDSIDNKVLTRSDKARGKSDNVPSEEVVKKMKNYWRQLLNAKLITQRKFDNLTKAERGGLSELDKAGFIKRQLVETRQITKHVAQILDSRMNTKYDENDKLIREVKVITLKSKLVSDFRKDFQFYKVREINNYHHAHDAYLNAVVGTALIKKYPKLESEFVYGDYKVYDVRKMIAKSEQEIGKATAKYFFYSNIMNFFKTEITLANGEIRKRPLIETNGETGEIVWDKGRDFATVRKVLSMPQVNIVKKTEVQTGGFSKESILPKRNSDKLIARKKDWDPKKYGGFDSPTVAYSVLVVAKVEKGKSKKLKSVKELLGITIMERSSFEKNPIDFLEAKGYKEVKKDLIIKLPKYSLFELENGRKRMLASAGELQKGNELALPSKYVNFLYLASHYEKLKGSPEDNEQKQLFVEQHKHYLDEIIEQISEFSKRVILADANLDKVLSAYNKHRDKPIREQAENIIHLFTLTNLGAPAAFKYFDTTIDRKRYTSTKEVLDATLIHQSITGLYETRIDLSQLGGDGGGGSGGGEAAAKGGTLNIEDEYRLHETSKEPDVPLGSTWLSDFPQAWAETGGMGLAVRQAPLIIPLKATSTPVSIKQYPMSQEARLGIKPHIQRLLDQGILVPCQSPWNTPLLPVKKPGTNDYRPVQDLREVNKRVEDIHPTVPNPYNLLSGLPPSHQWYTVLDLKDAFFCLRLHPTSQPLFAFEWRDPEMGISGQLTWTRLPQGFKNSPTLFNEALHRDLADFRIQHPDLILLQYVDDLLLAATSEQDCQRGTRALLQTLGNLGYRASAKKAQICQKQVKYLGYLLKEGQRWLTEARKETVMGQPTPKTPRQLREFLGKAGFCRLFIPGFAEMAAPLYPLTKPGTLFNWGPDQQKAYQEIKQALLTAPALGLPDLTKPFELFVDEKQGYAKGVLTQKLGPWRRPVAYLSKKLDPVAAGWPPCLRMVAAIAVLTKDAGKLTMGQPLVILAPHAVEALVKQPPDRWLSNARMTHYQAMLLDTDRVQFGPVVALNPATLLPLPEKEAPHDCLEILAETHGTRPDLTDQPIPDADYTWYTDGSSFLQEGQRRAGAAVTTETEVIWARALPAGTSAQRAELIALTQALKMAEGKKLNVYTDSRYAFATAHVHGEIYRRRGWLTSEGREIKNKNEILALLKALFLPKRLSIIHCPGHQKGNSAEARGNRMADQAAREAAMKAVLETSTLLAGKRTADGSEFEKRTADGSEFESPKKKAKVE

SEQ ID NO: 1047 - protein, 2091 aa, synthetic construct
MPAAKRVKLDGGDKKYSIGLDIGTNSVGWAVITDEYKVPSKKFKVLGNTDRHSIKKNLIGALLFDSGETAEATRLKRTARRRYTRRKNRICYLQEIFSNEMAKVDDSFFHRLEESFLVEEDKKHERHPIFGNIVDEVAYHEKYPTIYHLRKKLVDSTDKADLRLIYLALAHMIKFRGHFLIEGDLNPDNSDVDKLFIQLVQTYNQLFEENPINASGVDAKAILSARLSKSRRLENLIAQLPGEKKNGLFGNLIALSLGLTPNFKSNFDLAEDAKLQLSKDTYDDDLDNLLAQIGDQYADLFLAAKNLSDAILLSDILRVNTEITKAPLSASMIKRYDEHHQDLTLLKALVRQQLPEKYKEIFFDQSKNGYAGYIDGGASQEEFYKFIKPILEKMDGTEELLVKLNREDLLRKQRTFDNGSIPHQIHLGELHAILRRQEDFYPFLKDNREKIEKILTFRIPYYVGPLARGNSRFAWMTRKSEETITPWNFEEVVDKGASAQSFIERMTNFDKNLPNEKVLPKHSLLYEYFTVYNELTKVKYVTEGMRKPAFLSGEQKKAIVDLLFKTNRKVTVKQLKEDYFKKIECFDSVEISGVEDRFNASLGTYHDLLKIIKDKDFLDNEENEDILEDIVLTLTLFEDREMIEERLKTYAHLFDDKVMKQLKRRRYTGWGRLSRKLINGIRDKQSGKTILDFLKSDGFANRNFMQLIHDDSLTFKEDIQKAQVSGQGDSLHEHIANLAGSPAIKKGILQTVKVVDELVKVMGRHKPENIVIEMARENQTTQKGQKNSRERMKRIEEGIKELGSQILKEHPVENTQLQNEKLYLYYLQNGRDMYVDQELDINRLSDYDVDHIVPQSFLKDDSIDNKVLTRSDKARGKSDNVPSEEVVKKMKNYWRQLLNAKLITQRKFDNLTKAERGGLSELDKAGFIKRQLVETRQITKHVAQILDSRMNTKYDENDKLIREVKVITLKSKLVSDFRKDFQFYKVREINNYHHAHDAYLNAVVGTALIKKYPKLESEFVYGDYKVYDVRKMIAKSEQEIGKATAKYFFYSNIMNFFKTEITLANGEIRKRPLIETNGETGEIVWDKGRDFATVRKVLSMPQVNIVKKTEVQTGGFSKESILPKRNSDKLIARKKDWDPKKYGGFDSPTVAYSVLVVAKVEKGKSKKLKSVKELLGITIMERSSFEKNPIDFLEAKGYKEVKKDLIIKLPKYSLFELENGRKRMLASAGELQKGNELALPSKYVNFLYLASHYEKLKGSPEDNEQKQLFVEQHKHYLDEIIEQISEFSKRVILADANLDKVLSAYNKHRDKPIREQAENIIHLFTLTNLGAPAAFKYFDTTIDRKRYTSTKEVLDATLIHQSITGLYETRIDLSQLGGDGGGSSGSSGGTLNIEDEYRLHETSKEPDVPLGSTWLSDFPQAWAETGGMGLAVRQAPLIIPLKATSTPVSIKQYPMSQEARLGIKPHIQRLLDQGILVPCQSPWNTPLLPVKKPGTNDYRPVQDLREVNKRVEDIHPTVPNPYNLLSGLPPSHQWYTVLDLKDAFFCLRLHPTSQPLFAFEWRDPEMGISGQLTWTRLPQGFKNSPTLFNEALHRDLADFRIQHPDLILLQYVDDLLLAATSEQDCQRGTRALLQTLGNLGYRASAKKAQICQKQVKYLGYLLKEGQRWLTEARKETVMGQPTPKTPRQLREFLGKAGFCRLFIPGFAEMAAPLYPLTKPGTLFNWGPDQQKAYQEIKQALLTAPALGLPDLTKPFELFVDEKQGYAKGVLTQKLGPWRRPVAYLSKKLDPVAAGWPPCLRMVAAIAVLTKDAGKLTMGQPLVILAPHAVEALVKQPPDRWLSNARMTHYQAMLLDTDRVQFGPVVALNPATLLPLPEKEAPHDCLEILAETHGTRPDLTDQPIPDADYTWYTDGSSFLQEGQRRAGAAVTTETEVIWARALPAGTSAQRAELIALTQALKMAEGKKLNVYTDSRYAFATAHVHGEIYRRRGWLTSEGREIKNKNEILALLKALFLPKRLSIIHCPGHQKGNSAEARGNRMADQAAREAAMKAVLETSTLLAGKRTADGSEFEKRTADGSEFESPKKKAKVE

SEQ ID NO: 1048 - protein, 2093 aa, synthetic construct
MPAAKRVKLDGGDKKYSIGLDIGTNSVGWAVITDEYKVPSKKFKVLGNTDRHSIKKNLIGALLFDSGETAEATRLKRTARRRYTRRKNRICYLQEIFSNEMAKVDDSFFHRLEESFLVEEDKKHERHPIFGNIVDEVAYHEKYPTIYHLRKKLVDSTDKADLRLIYLALAHMIKFRGHFLIEGDLNPDNSDVDKLFIQLVQTYNQLFEENPINASGVDAKAILSARLSKSRRLENLIAQLPGEKKNGLFGNLIALSLGLTPNFKSNFDLAEDAKLQLSKDTYDDDLDNLLAQIGDQYADLFLAAKNLSDAILLSDILRVNTEITKAPLSASMIKRYDEHHQDLTLLKALVRQQLPEKYKEIFFDQSKNGYAGYIDGGASQEEFYKFIKPILEKMDGTEELLVKLNREDLLRKQRTFDNGSIPHQIHLGELHAILRRQEDFYPFLKDNREKIEKILTFRIPYYVGPLARGNSRFAWMTRKSEETITPWNFEEVVDKGASAQSFIERMTNFDKNLPNEKVLPKHSLLYEYFTVYNELTKVKYVTEGMRKPAFLSGEQKKAIVDLLFKTNRKVTVKQLKEDYFKKIECFDSVEISGVEDRFNASLGTYHDLLKIIKDKDFLDNEENEDILEDIVLTLTLFEDREMIEERLKTYAHLFDDKVMKQLKRRRYTGWGRLSRKLINGIRDKQSGKTILDFLKSDGFANRNFMQLIHDDSLTFKEDIQKAQVSGQGDSLHEHIANLAGSPAIKKGILQTVKVVDELVKVMGRHKPENIVIEMARENQTTQKGQKNSRERMKRIEEGIKELGSQILKEHPVENTQLQNEKLYLYYLQNGRDMYVDQELDINRLSDYDVDHIVPQSFLKDDSIDNKVLTRSDKARGKSDNVPSEEVVKKMKNYWRQLLNAKLITQRKFDNLTKAERGGLSELDKAGFIKRQLVETRQITKHVAQILDSRMNTKYDENDKLIREVKVITLKSKLVSDFRKDFQFYKVREINNYHHAHDAYLNAVVGTALIKKYPKLESEFVYGDYKVYDVRKMIAKSEQEIGKATAKYFFYSNIMNFFKTEITLANGEIRKRPLIETNGETGEIVWDKGRDFATVRKVLSMPQVNIVKKTEVQTGGFSKESILPKRNSDKLIARKKDWDPKKYGGFDSPTVAYSVLVVAKVEKGKSKKLKSVKELLGITIMERSSFEKNPIDFLEAKGYKEVKKDLIIKLPKYSLFELENGRKRMLASAGELQKGNELALPSKYVNFLYLASHYEKLKGSPEDNEQKQLFVEQHKHYLDEIIEQISEFSKRVILADANLDKVLSAYNKHRDKPIREQAENIIHLFTLTNLGAPAAFKYFDTTIDRKRYTSTKEVLDATLIHQSITGLYETRIDLSQLGGDGGEAAAKPAPGGTLNIEDEYRLHETSKEPDVPLGSTWLSDFPQAWAETGGMGLAVRQAPLIIPLKATSTPVSIKQYPMSQEARLGIKPHIQRLLDQGILVPCQSPWNTPLLPVKKPGTNDYRPVQDLREVNKRVEDIHPTVPNPYNLLSGLPPSHQWYTVLDLKDAFFCLRLHPTSQPLFAFEWRDPEMGISGQLTWTRLPQGFKNSPTLFNEALHRDLADFRIQHPDLILLQYVDDLLLAATSEQDCQRGTRALLQTLGNLGYRASAKKAQICQKQVKYLGYLLKEGQRWLTEARKETVMGQPTPKTPRQLREFLGKAGFCRLFIPGFAEMAAPLYPLTKPGTLFNWGPDQQKAYQEIKQALLTAPALGLPDLTKPFELFVDEKQGYAKGVLTQKLGPWRRPVAYLSKKLDPVAAGWPPCLRMVAAIAVLTKDAGKLTMGQPLVILAPHAVEALVKQPPDRWLSNARMTHYQAMLLDTDRVQFGPVVALNPATLLPLPEKEAPHDCLEILAETHGTRPDLTDQPIPDADYTWYTDGSSFLQEGQRRAGAAVTTETEVIWARALPAGTSAQRAELIALTQALKMAEGKKLNVYTDSRYAFATAHVHGEIYRRRGWLTSEGREIKNKNEILALLKALFLPKRLSIIHCPGHQKGNSAEARGNRMADQAAREAAMKAVLETSTLLAGKRTADGSEFEKRTADGSEFESPKKKAKVE

SEQ ID NO: 1049 - protein, 2105 aa, synthetic construct
MPAAKRVKLDGGDKKYSIGLDIGTNSVGWAVITDEYKVPSKKFKVLGNTDRHSIKKNLIGALLFDSGETAEATRLKRTARRRYTRRKNRICYLQEIFSNEMAKVDDSFFHRLEESFLVEEDKKHERHPIFGNIVDEVAYHEKYPTIYHLRKKLVDSTDKADLRLIYLALAHMIKFRGHFLIEGDLNPDNSDVDKLFIQLVQTYNQLFEENPINASGVDAKAILSARLSKSRRLENLIAQLPGEKKNGLFGNLIALSLGLTPNFKSNFDLAEDAKLQLSKDTYDDDLDNLLAQIGDQYADLFLAAKNLSDAILLSDILRVNTEITKAPLSASMIKRYDEHHQDLTLLKALVRQQLPEKYKEIFFDQSKNGYAGYIDGGASQEEFYKFIKPILEKMDGTEELLVKLNREDLLRKQRTFDNGSIPHQIHLGELHAILRRQEDFYPFLKDNREKIEKILTFRIPYYVGPLARGNSRFAWMTRKSEETITPWNFEEVVDKGASAQSFIERMTNFDKNLPNEKVLPKHSLLYEYFTVYNELTKVKYVTEGMRKPAFLSGEQKKAIVDLLFKTNRKVTVKQLKEDYFKKIECFDSVEISGVEDRFNASLGTYHDLLKIIKDKDFLDNEENEDILEDIVLTLTLFEDREMIEERLKTYAHLFDDKVMKQLKRRRYTGWGRLSRKLINGIRDKQSGKTILDFLKSDGFANRNFMQLIHDDSLTFKEDIQKAQVSGQGDSLHEHIANLAGSPAIKKGILQTVKVVDELVKVMGRHKPENIVIEMARENQTTQKGQKNSRERMKRIEEGIKELGSQILKEHPVENTQLQNEKLYLYYLQNGRDMYVDQELDINRLSDYDVDHIVPQSFLKDDSIDNKVLTRSDKARGKSDNVPSEEVVKKMKNYWRQLLNAKLITQRKFDNLTKAERGGLSELDKAGFIKRQLVETRQITKHVAQILDSRMNTKYDENDKLIREVKVITLKSKLVSDFRKDFQFYKVREINNYHHAHDAYLNAVVGTALIKKYPKLESEFVYGDYKVYDVRKMIAKSEQEIGKATAKYFFYSNIMNFFKTEITLANGEIRKRPLIETNGETGEIVWDKGRDFATVRKVLSMPQVNIVKKTEVQTGGFSKESILPKRNSDKLIARKKDWDPKKYGGFDSPTVAYSVLVVAKVEKGKSKKLKSVKELLGITIMERSSFEKNPIDFLEAKGYKEVKKDLIIKLPKYSLFELENGRKRMLASAGELQKGNELALPSKYVNFLYLASHYEKLKGSPEDNEQKQLFVEQHKHYLDEIIEQISEFSKRVILADANLDKVLSAYNKHRDKPIREQAENIIHLFTLTNLGAPAAFKYFDTTIDRKRYTSTKEVLDATLIHQSITGLYETRIDLSQLGGDGGGGGGSGGGGSGGGGSGGGGSGGTLNIEDEYRLHETSKEPDVPLGSTWLSDFPQAWAETGGMGLAVRQAPLIIPLKATSTPVSIKQYPMSQEARLGIKPHIQRLLDQGILVPCQSPWNTPLLPVKKPGTNDYRPVQDLREVNKRVEDIHPTVPNPYNLLSGLPPSHQWYTVLDLKDAFFCLRLHPTSQPLFAFEWRDPEMGISGQLTWTRLPQGFKNSPTLFNEALHRDLADFRIQHPDLILLQYVDDLLLAATSEQDCQRGTRALLQTLGNLGYRASAKKAQICQKQVKYLGYLLKEGQRWLTEARKETVMGQPTPKTPRQLREFLGKAGFCRLFIPGFAEMAAPLYPLTKPGTLFNWGPDQQKAYQEIKQALLTAPALGLPDLTKPFELFVDEKQGYAKGVLTQKLGPWRRPVAYLSKKLDPVAAGWPPCLRMVAAIAVLTKDAGKLTMGQPLVILAPHAVEALVKQPPDRWLSNARMTHYQAMLLDTDRVQFGPVVALNPATLLPLPEKEAPHDCLEILAETHGTRPDLTDQPIPDADYTWYTDGSSFLQEGQRRAGAAVTTETEVIWARALPAGTSAQRAELIALTQALKMAEGKKLNVYTDSRYAFATAHVHGEIYRRRGWLTSEGREIKNKNEILALLKALFLPKRLSIIHCPGHQKGNSAEARGNRMADQAAREAAMKAVLETSTLLAGKRTADGSEFEKRTADGSEFESPKKKAKVE

SEQ ID NO: 1050 - protein, 2093 aa, synthetic construct
MPAAKRVKLDGGDKKYSIGLDIGTNSVGWAVITDEYKVPSKKFKVLGNTDRHSIKKNLIGALLFDSGETAEATRLKRTARRRYTRRKNRICYLQEIFSNEMAKVDDSFFHRLEESFLVEEDKKHERHPIFGNIVDEVAYHEKYPTIYHLRKKLVDSTDKADLRLIYLALAHMIKFRGHFLIEGDLNPDNSDVDKLFIQLVQTYNQLFEENPINASGVDAKAILSARLSKSRRLENLIAQLPGEKKNGLFGNLIALSLGLTPNFKSNFDLAEDAKLQLSKDTYDDDLDNLLAQIGDQYADLFLAAKNLSDAILLSDILRVNTEITKAPLSASMIKRYDEHHQDLTLLKALVRQQLPEKYKEIFFDQSKNGYAGYIDGGASQEEFYKFIKPILEKMDGTEELLVKLNREDLLRKQRTFDNGSIPHQIHLGELHAILRRQEDFYPFLKDNREKIEKILTFRIPYYVGPLARGNSRFAWMTRKSEETITPWNFEEVVDKGASAQSFIERMTNFDKNLPNEKVLPKHSLLYEYFTVYNELTKVKYVTEGMRKPAFLSGEQKKAIVDLLFKTNRKVTVKQLKEDYFKKIECFDSVEISGVEDRFNASLGTYHDLLKIIKDKDFLDNEENEDILEDIVLTLTLFEDREMIEERLKTYAHLFDDKVMKQLKRRRYTGWGRLSRKLINGIRDKQSGKTILDFLKSDGFANRNFMQLIHDDSLTFKEDIQKAQVSGQGDSLHEHIANLAGSPAIKKGILQTVKVVDELVKVMGRHKPENIVIEMARENQTTQKGQKNSRERMKRIEEGIKELGSQILKEHPVENTQLQNEKLYLYYLQNGRDMYVDQELDINRLSDYDVDHIVPQSFLKDDSIDNKVLTRSDKARGKSDNVPSEEVVKKMKNYWRQLLNAKLITQRKFDNLTKAERGGLSELDKAGFIKRQLVETRQITKHVAQILDSRMNTKYDENDKLIREVKVITLKSKLVSDFRKDFQFYKVREINNYHHAHDAYLNAVVGTALIKKYPKLESEFVYGDYKVYDVRKMIAKSEQEIGKATAKYFFYSNIMNFFKTEITLANGEIRKRPLIETNGETGEIVWDKGRDFATVRKVLSMPQVNIVKKTEVQTGGFSKESILPKRNSDKLIARKKDWDPKKYGGFDSPTVAYSVLVVAKVEKGKSKKLKSVKELLGITIMERSSFEKNPIDFLEAKGYKEVKKDLIIKLPKYSLFELENGRKRMLASAGELQKGNELALPSKYVNFLYLASHYEKLKGSPEDNEQKQLFVEQHKHYLDEIIEQISEFSKRVILADANLDKVLSAYNKHRDKPIREQAENIIHLFTLTNLGAPAAFKYFDTTIDRKRYTSTKEVLDATLIHQSITGLYETRIDLSQLGGDGGEAAAKGGGGGTLNIEDEYRLHETSKEPDVPLGSTWLSDFPQAWAETGGMGLAVRQAPLIIPLKATSTPVSIKQYPMSQEARLGIKPHIQRLLDQGILVPCQSPWNTPLLPVKKPGTNDYRPVQDLREVNKRVEDIHPTVPNPYNLLSGLPPSHQWYTVLDLKDAFFCLRLHPTSQPLFAFEWRDPEMGISGQLTWTRLPQGFKNSPTLFNEALHRDLADFRIQHPDLILLQYVDDLLLAATSEQDCQRGTRALLQTLGNLGYRASAKKAQICQKQVKYLGYLLKEGQRWLTEARKETVMGQPTPKTPRQLREFLGKAGFCRLFIPGFAEMAAPLYPLTKPGTLFNWGPDQQKAYQEIKQALLTAPALGLPDLTKPFELFVDEKQGYAKGVLTQKLGPWRRPVAYLSKKLDPVAAGWPPCLRMVAAIAVLTKDAGKLTMGQPLVILAPHAVEALVKQPPDRWLSNARMTHYQAMLLDTDRVQFGPVVALNPATLLPLPEKEAPHDCLEILAETHGTRPDLTDQPIPDADYTWYTDGSSFLQEGQRRAGAAVTTETEVIWARALPAGTSAQRAELIALTQALKMAEGKKLNVYTDSRYAFATAHVHGEIYRRRGWLTSEGREIKNKNEILALLKALFLPKRLSIIHCPGHQKGNSAEARGNRMADQAAREAAMKAVLETSTLLAGKRTADGSEFEKRTADGSEFESPKKKAKVE

SEQ ID NO: 1051 - protein, 2096 aa, synthetic construct
MPAAKRVKLDGGDKKYSIGLDIGTNSVGWAVITDEYKVPSKKFKVLGNTDRHSIKKNLIGALLFDSGETAEATRLKRTARRRYTRRKNRICYLQEIFSNEMAKVDDSFFHRLEESFLVEEDKKHERHPIFGNIVDEVAYHEKYPTIYHLRKKLVDSTDKADLRLIYLALAHMIKFRGHFLIEGDLNPDNSDVDKLFIQLVQTYNQLFEENPINASGVDAKAILSARLSKSRRLENLIAQLPGEKKNGLFGNLIALSLGLTPNFKSNFDLAEDAKLQLSKDTYDDDLDNLLAQIGDQYADLFLAAKNLSDAILLSDILRVNTEITKAPLSASMIKRYDEHHQDLTLLKALVRQQLPEKYKEIFFDQSKNGYAGYIDGGASQEEFYKFIKPILEKMDGTEELLVKLNREDLLRKQRTFDNGSIPHQIHLGELHAILRRQEDFYPFLKDNREKIEKILTFRIPYYVGPLARGNSRFAWMTRKSEETITPWNFEEVVDKGASAQSFIERMTNFDKNLPNEKVLPKHSLLYEYFTVYNELTKVKYVTEGMRKPAFLSGEQKKAIVDLLFKTNRKVTVKQLKEDYFKKIECFDSVEISGVEDRFNASLGTYHDLLKIIKDKDFLDNEENEDILEDIVLTLTLFEDREMIEERLKTYAHLFDDKVMKQLKRRRYTGWGRLSRKLINGIRDKQSGKTILDFLKSDGFANRNFMQLIHDDSLTFKEDIQKAQVSGQGDSLHEHIANLAGSPAIKKGILQTVKVVDELVKVMGRHKPENIVIEMARENQTTQKGQKNSRERMKRIEEGIKELGSQILKEHPVENTQLQNEKLYLYYLQNGRDMYVDQELDINRLSDYDVDHIVPQSFLKDDSIDNKVLTRSDKARGKSDNVPSEEVVKKMKNYWRQLLNAKLITQRKFDNLTKAERGGLSELDKAGFIKRQLVETRQITKHVAQILDSRMNTKYDENDKLIREVKVITLKSKLVSDFRKDFQFYKVREINNYHHAHDAYLNAVVGTALIKKYPKLESEFVYGDYKVYDVRKMIAKSEQEIGKATAKYFFYSNIMNFFKTEITLANGEIRKRPLIETNGETGEIVWDKGRDFATVRKVLSMPQVNIVKKTEVQTGGFSKESILPKRNSDKLIARKKDWDPKKYGGFDSPTVAYSVLVVAKVEKGKSKKLKSVKELLGITIMERSSFEKNPIDFLEAKGYKEVKKDLIIKLPKYSLFELENGRKRMLASAGELQKGNELALPSKYVNFLYLASHYEKLKGSPEDNEQKQLFVEQHKHYLDEIIEQISEFSKRVILADANLDKVLSAYNKHRDKPIREQAENIIHLFTLTNLGAPAAFKYFDTTIDRKRYTSTKEVLDATLIHQSITGLYETRIDLSQLGGDGGEAAAKGGSGGGGGTLNIEDEYRLHETSKEPDVPLGSTWLSDFPQAWAETGGMGLAVRQAPLIIPLKATSTPVSIKQYPMSQEARLGIKPHIQRLLDQGILVPCQSPWNTPLLPVKKPGTNDYRPVQDLREVNKRVEDIHPTVPNPYNLLSGLPPSHQWYTVLDLKDAFFCLRLHPTSQPLFAFEWRDPEMGISGQLTWTRLPQGFKNSPTLFNEALHRDLADFRIQHPDLILLQYVDDLLLAATSEQDCQRGTRALLQTLGNLGYRASAKKAQICQKQVKYLGYLLKEGQRWLTEARKETVMGQPTPKTPRQLREFLGKAGFCRLFIPGFAEMAAPLYPLTKPGTLFNWGPDQQKAYQEIKQALLTAPALGLPDLTKPFELFVDEKQGYAKGVLTQKLGPWRRPVAYLSKKLDPVAAGWPPCLRMVAAIAVLTKDAGKLTMGQPLVILAPHAVEALVKQPPDRWLSNARMTHYQAMLLDTDRVQFGPVVALNPATLLPLPEKEAPHDCLEILAETHGTRPDLTDQPIPDADYTWYTDGSSFLQEGQRRAGAAVTTETEVIWARALPAGTSAQRAELIALTQALKMAEGKKLNVYTDSRYAFATAHVHGEIYRRRGWLTSEGREIKNKNEILALLKALFLPKRLSIIHCPGHQKGNSAEARGNRMADQAAREAAMKAVLETSTLLAGKRTADGSEFEKRTADGSEFESPKKKAKVE

SEQ ID NO: 1052 - protein, 2115 aa, synthetic construct
MPAAKRVKLDGGDKKYSIGLDIGTNSVGWAVITDEYKVPSKKFKVLGNTDRHSIKKNLIGALLFDSGETAEATRLKRTARRRYTRRKNRICYLQEIFSNEMAKVDDSFFHRLEESFLVEEDKKHERHPIFGNIVDEVAYHEKYPTIYHLRKKLVDSTDKADLRLIYLALAHMIKFRGHFLIEGDLNPDNSDVDKLFIQLVQTYNQLFEENPINASGVDAKAILSARLSKSRRLENLIAQLPGEKKNGLFGNLIALSLGLTPNFKSNFDLAEDAKLQLSKDTYDDDLDNLLAQIGDQYADLFLAAKNLSDAILLSDILRVNTEITKAPLSASMIKRYDEHHQDLTLLKALVRQQLPEKYKEIFFDQSKNGYAGYIDGGASQEEFYKFIKPILEKMDGTEELLVKLNREDLLRKQRTFDNGSIPHQIHLGELHAILRRQEDFYPFLKDNREKIEKILTFRIPYYVGPLARGNSRFAWMTRKSEETITPWNFEEVVDKGASAQSFIERMTNFDKNLPNEKVLPKHSLLYEYFTVYNELTKVKYVTEGMRKPAFLSGEQKKAIVDLLFKTNRKVTVKQLKEDYFKKIECFDSVEISGVEDRFNASLGTYHDLLKIIKDKDFLDNEENEDILEDIVLTLTLFEDREMIEERLKTYAHLFDDKVMKQLKRRRYTGWGRLSRKLINGIRDKQSGKTILDFLKSDGFANRNFMQLIHDDSLTFKEDIQKAQVSGQGDSLHEHIANLAGSPAIKKGILQTVKVVDELVKVMGRHKPENIVIEMARENQTTQKGQKNSRERMKRIEEGIKELGSQILKEHPVENTQLQNEKLYLYYLQNGRDMYVDQELDINRLSDYDVDHIVPQSFLKDDSIDNKVLTRSDKARGKSDNVPSEEVVKKMKNYWRQLLNAKLITQRKFDNLTKAERGGLSELDKAGFIKRQLVETRQITKHVAQILDSRMNTKYDENDKLIREVKVITLKSKLVSDFRKDFQFYKVREINNYHHAHDAYLNAVVGTALIKKYPKLESEFVYGDYKVYDVRKMIAKSEQEIGKATAKYFFYSNIMNFFKTEITLANGEIRKRPLIETNGETGEIVWDKGRDFATVRKVLSMPQVNIVKKTEVQTGGFSKESILPKRNSDKLIARKKDWDPKKYGGFDSPTVAYSVLVVAKVEKGKSKKLKSVKELLGITIMERSSFEKNPIDFLEAKGYKEVKKDLIIKLPKYSLFELENGRKRMLASAGELQKGNELALPSKYVNFLYLASHYEKLKGSPEDNEQKQLFVEQHKHYLDEIIEQISEFSKRVILADANLDKVLSAYNKHRDKPIREQAENIIHLFTLTNLGAPAAFKYFDTTIDRKRYTSTKEVLDATLIHQSITGLYETRIDLSQLGGDGGEAAAKEAAAKEAAAKEAAAKEAAAKEAAAKGGTLNIEDEYRLHETSKEPDVPLGSTWLSDFPQAWAETGGMGLAVRQAPLIIPLKATSTPVSIKQYPMSQEARLGIKPHIQRLLDQGILVPCQSPWNTPLLPVKKPGTNDYRPVQDLREVNKRVEDIHPTVPNPYNLLSGLPPSHQWYTVLDLKDAFFCLRLHPTSQPLFAFEWRDPEMGISGQLTWTRLPQGFKNSPTLFNEALHRDLADFRIQHPDLILLQYVDDLLLAATSEQDCQRGTRALLQTLGNLGYRASAKKAQICQKQVKYLGYLLKEGQRWLTEARKETVMGQPTPKTPRQLREFLGKAGFCRLFIPGFAEMAAPLYPLTKPGTLFNWGPDQQKAYQEIKQALLTAPALGLPDLTKPFELFVDEKQGYAKGVLTQKLGPWRRPVAYLSKKLDPVAAGWPPCLRMVAAIAVLTKDAGKLTMGQPLVILAPHAVEALVKQPPDRWLSNARMTHYQAMLLDTDRVQFGPVVALNPATLLPLPEKEAPHDCLEILAETHGTRPDLTDQPIPDADYTWYTDGSSFLQEGQRRAGAAVTTETEVIWARALPAGTSAQRAELIALTQALKMAEGKKLNVYTDSRYAFATAHVHGEIYRRRGWLTSEGREIKNKNEILALLKALFLPKRLSIIHCPGHQKGNSAEARGNRMADQAAREAAMKAVLETSTLLAGKRTADGSEFEKRTADGSEFESPKKKAKVE

SEQ ID NO: 1053 - protein, 2096 aa, synthetic construct
MPAAKRVKLDGGDKKYSIGLDIGTNSVGWAVITDEYKVPSKKFKVLGNTDRHSIKKNLIGALLFDSGETAEATRLKRTARRRYTRRKNRICYLQEIFSNEMAKVDDSFFHRLEESFLVEEDKKHERHPIFGNIVDEVAYHEKYPTIYHLRKKLVDSTDKADLRLIYLALAHMIKFRGHFLIEGDLNPDNSDVDKLFIQLVQTYNQLFEENPINASGVDAKAILSARLSKSRRLENLIAQLPGEKKNGLFGNLIALSLGLTPNFKSNFDLAEDAKLQLSKDTYDDDLDNLLAQIGDQYADLFLAAKNLSDAILLSDILRVNTEITKAPLSASMIKRYDEHHQDLTLLKALVRQQLPEKYKEIFFDQSKNGYAGYIDGGASQEEFYKFIKPILEKMDGTEELLVKLNREDLLRKQRTFDNGSIPHQIHLGELHAILRRQEDFYPFLKDNREKIEKILTFRIPYYVGPLARGNSRFAWMTRKSEETITPWNFEEVVDKGASAQSFIERMTNFDKNLPNEKVLPKHSLLYEYFTVYNELTKVKYVTEGMRKPAFLSGEQKKAIVDLLFKTNRKVTVKQLKEDYFKKIECFDSVEISGVEDRFNASLGTYHDLLKIIKDKDFLDNEENEDILEDIVLTLTLFEDREMIEERLKTYAHLFDDKVMKQLKRRRYTGWGRLSRKLINGIRDKQSGKTILDFLKSDGFANRNFMQLIHDDSLTFKEDIQKAQVSGQGDSLHEHIANLAGSPAIKKGILQTVKVVDELVKVMGRHKPENIVIEMARENQTTQKGQKNSRERMKRIEEGIKELGSQILKEHPVENTQLQNEKLYLYYLQNGRDMYVDQELDINRLSDYDVDHIVPQSFLKDDSIDNKVLTRSDKARGKSDNVPSEEVVKKMKNYWRQLLNAKLITQRKFDNLTKAERGGLSELDKAGFIKRQLVETRQITKHVAQILDSRMNTKYDENDKLIREVKVITLKSKLVSDFRKDFQFYKVREINNYHHAHDAYLNAVVGTALIKKYPKLESEFVYGDYKVYDVRKMIAKSEQEIGKATAKYFFYSNIMNFFKTEITLANGEIRKRPLIETNGETGEIVWDKGRDFATVRKVLSMPQVNIVKKTEVQTGGFSKESILPKRNSDKLIARKKDWDPKKYGGFDSPTVAYSVLVVAKVEKGKSKKLKSVKELLGITIMERSSFEKNPIDFLEAKGYKEVKKDLIIKLPKYSLFELENGRKRMLASAGELQKGNELALPSKYVNFLYLASHYEKLKGSPEDNEQKQLFVEQHKHYLDEIIEQISEFSKRVILADANLDKVLSAYNKHRDKPIREQAENIIHLFTLTNLGAPAAFKYFDTTIDRKRYTSTKEVLDATLIHQSITGLYETRIDLSQLGGDGGGGGGSSEAAAKGGTLNIEDEYRLHETSKEPDVPLGSTWLSDFPQAWAETGGMGLAVRQAPLIIPLKATSTPVSIKQYPMSQEARLGIKPHIQRLLDQGILVPCQSPWNTPLLPVKKPGTNDYRPVQDLREVNKRVEDIHPTVPNPYNLLSGLPPSHQWYTVLDLKDAFFCLRLHPTSQPLFAFEWRDPEMGISGQLTWTRLPQGFKNSPTLFNEALHRDLADFRIQHPDLILLQYVDDLLLAATSEQDCQRGTRALLQTLGNLGYRASAKKAQICQKQVKYLGYLLKEGQRWLTEARKETVMGQPTPKTPRQLREFLGKAGFCRLFIPGFAEMAAPLYPLTKPGTLFNWGPDQQKAYQEIKQALLTAPALGLPDLTKPFELFVDEKQGYAKGVLTQKLGPWRRPVAYLSKKLDPVAAGWPPCLRMVAAIAVLTKDAGKLTMGQPLVILAPHAVEALVKQPPDRWLSNARMTHYQAMLLDTDRVQFGPVVALNPATLLPLPEKEAPHDCLEILAETHGTRPDLTDQPIPDADYTWYTDGSSFLQEGQRRAGAAVTTETEVIWARALPAGTSAQRAELIALTQALKMAEGKKLNVYTDSRYAFATAHVHGEIYRRRGWLTSEGREIKNKNEILALLKALFLPKRLSIIHCPGHQKGNSAEARGNRMADQAAREAAMKAVLETSTLLAGKRTADGSEFEKRTADGSEFESPKKKAKVE

SEQ ID NO: 1054 - protein, 2096 aa, synthetic construct
MPAAKRVKLDGGDKKYSIGLDIGTNSVGWAVITDEYKVPSKKFKVLGNTDRHSIKKNLIGALLFDSGETAEATRLKRTARRRYTRRKNRICYLQEIFSNEMAKVDDSFFHRLEESFLVEEDKKHERHPIFGNIVDEVAYHEKYPTIYHLRKKLVDSTDKADLRLIYLALAHMIKFRGHFLIEGDLNPDNSDVDKLFIQLVQTYNQLFEENPINASGVDAKAILSARLSKSRRLENLIAQLPGEKKNGLFGNLIALSLGLTPNFKSNFDLAEDAKLQLSKDTYDDDLDNLLAQIGDQYADLFLAAKNLSDAILLSDILRVNTEITKAPLSASMIKRYDEHHQDLTLLKALVRQQLPEKYKEIFFDQSKNGYAGYIDGGASQEEFYKFIKPILEKMDGTEELLVKLNREDLLRKQRTFDNGSIPHQIHLGELHAILRRQEDFYPFLKDNREKIEKILTFRIPYYVGPLARGNSRFAWMTRKSEETITPWNFEEVVDKGASAQSFIERMTNFDKNLPNEKVLPKHSLLYEYFTVYNELTKVKYVTEGMRKPAFLSGEQKKAIVDLLFKTNRKVTVKQLKEDYFKKIECFDSVEISGVEDRFNASLGTYHDLLKIIKDKDFLDNEENEDILEDIVLTLTLFEDREMIEERLKTYAHLFDDKVMKQLKRRRYTGWGRLSRKLINGIRDKQSGKTILDFLKSDGFANRNFMQLIHDDSLTFKEDIQKAQVSGQGDSLHEHIANLAGSPAIKKGILQTVKVVDELVKVMGRHKPENIVIEMARENQTTQKGQKNSRERMKRIEEGIKELGSQILKEHPVENTQLQNEKLYLYYLQNGRDMYVDQELDINRLSDYDVDHIVPQSFLKDDSIDNKVLTRSDKARGKSDNVPSEEVVKKMKNYWRQLLNAKLITQRKFDNLTKAERGGLSELDKAGFIKRQLVETRQITKHVAQILDSRMNTKYDENDKLIREVKVITLKSKLVSDFRKDFQFYKVREINNYHHAHDAYLNAVVGTALIKKYPKLESEFVYGDYKVYDVRKMIAKSEQEIGKATAKYFFYSNIMNFFKTEITLANGEIRKRPLIETNGETGEIVWDKGRDFATVRKVLSMPQVNIVKKTEVQTGGFSKESILPKRNSDKLIARKKDWDPKKYGGFDSPTVAYSVLVVAKVEKGKSKKLKSVKELLGITIMERSSFEKNPIDFLEAKGYKEVKKDLIIKLPKYSLFELENGRKRMLASAGELQKGNELALPSKYVNFLYLASHYEKLKGSPEDNEQKQLFVEQHKHYLDEIIEQISEFSKRVILADANLDKVLSAYNKHRDKPIREQAENIIHLFTLTNLGAPAAFKYFDTTIDRKRYTSTKEVLDATLIHQSITGLYETRIDLSQLGGDGGGSSGGGEAAAKGGTLNIEDEYRLHETSKEPDVPLGSTWLSDFPQAWAETGGMGLAVRQAPLIIPLKATSTPVSIKQYPMSQEARLGIKPHIQRLLDQGILVPCQSPWNTPLLPVKKPGTNDYRPVQDLREVNKRVEDIHPTVPNPYNLLSGLPPSHQWYTVLDLKDAFFCLRLHPTSQPLFAFEWRDPEMGISGQLTWTRLPQGFKNSPTLFNEALHRDLADFRIQHPDLILLQYVDDLLLAATSEQDCQRGTRALLQTLGNLGYRASAKKAQICQKQVKYLGYLLKEGQRWLTEARKETVMGQPTPKTPRQLREFLGKAGFCRLFIPGFAEMAAPLYPLTKPGTLFNWGPDQQKAYQEIKQALLTAPALGLPDLTKPFELFVDEKQGYAKGVLTQKLGPWRRPVAYLSKKLDPVAAGWPPCLRMVAAIAVLTKDAGKLTMGQPLVILAPHAVEALVKQPPDRWLSNARMTHYQAMLLDTDRVQFGPVVALNPATLLPLPEKEAPHDCLEILAETHGTRPDLTDQPIPDADYTWYTDGSSFLQEGQRRAGAAVTTETEVIWARALPAGTSAQRAELIALTQALKMAEGKKLNVYTDSRYAFATAHVHGEIYRRRGWLTSEGREIKNKNEILALLKALFLPKRLSIIHCPGHQKGNSAEARGNRMADQAAREAAMKAVLETSTLLAGKRTADGSEFEKRTADGSEFESPKKKAKVE

SEQ ID NO: 1055 - protein, 2094 aa, synthetic construct
MPAAKRVKLDGGDKKYSIGLDIGTNSVGWAVITDEYKVPSKKFKVLGNTDRHSIKKNLIGALLFDSGETAEATRLKRTARRRYTRRKNRICYLQEIFSNEMAKVDDSFFHRLEESFLVEEDKKHERHPIFGNIVDEVAYHEKYPTIYHLRKKLVDSTDKADLRLIYLALAHMIKFRGHFLIEGDLNPDNSDVDKLFIQLVQTYNQLFEENPINASGVDAKAILSARLSKSRRLENLIAQLPGEKKNGLFGNLIALSLGLTPNFKSNFDLAEDAKLQLSKDTYDDDLDNLLAQIGDQYADLFLAAKNLSDAILLSDILRVNTEITKAPLSASMIKRYDEHHQDLTLLKALVRQQLPEKYKEIFFDQSKNGYAGYIDGGASQEEFYKFIKPILEKMDGTEELLVKLNREDLLRKQRTFDNGSIPHQIHLGELHAILRRQEDFYPFLKDNREKIEKILTFRIPYYVGPLARGNSRFAWMTRKSEETITPWNFEEVVDKGASAQSFIERMTNFDKNLPNEKVLPKHSLLYEYFTVYNELTKVKYVTEGMRKPAFLSGEQKKAIVDLLFKTNRKVTVKQLKEDYFKKIECFDSVEISGVEDRFNASLGTYHDLLKIIKDKDFLDNEENEDILEDIVLTLTLFEDREMIEERLKTYAHLFDDKVMKQLKRRRYTGWGRLSRKLINGIRDKQSGKTILDFLKSDGFANRNFMQLIHDDSLTFKEDIQKAQVSGQGDSLHEHIANLAGSPAIKKGILQTVKVVDELVKVMGRHKPENIVIEMARENQTTQKGQKNSRERMKRIEEGIKELGSQILKEHPVENTQLQNEKLYLYYLQNGRDMYVDQELDINRLSDYDVDHIVPQSFLKDDSIDNKVLTRSDKARGKSDNVPSEEVVKKMKNYWRQLLNAKLITQRKFDNLTKAERGGLSELDKAGFIKRQLVETRQITKHVAQILDSRMNTKYDENDKLIREVKVITLKSKLVSDFRKDFQFYKVREINNYHHAHDAYLNAVVGTALIKKYPKLESEFVYGDYKVYDVRKMIAKSEQEIGKATAKYFFYSNIMNFFKTEITLANGEIRKRPLIETNGETGEIVWDKGRDFATVRKVLSMPQVNIVKKTEVQTGGFSKESILPKRNSDKLIARKKDWDPKKYGGFDSPTVAYSVLVVAKVEKGKSKKLKSVKELLGITIMERSSFEKNPIDFLEAKGYKEVKKDLIIKLPKYSLFELENGRKRMLASAGELQKGNELALPSKYVNFLYLASHYEKLKGSPEDNEQKQLFVEQHKHYLDEIIEQISEFSKRVILADANLDKVLSAYNKHRDKPIREQAENIIHLFTLTNLGAPAAFKYFDTTIDRKRYTSTKEVLDATLIHQSITGLYETRIDLSQLGGDGGGGSPAPGGGGGTLNIEDEYRLHETSKEPDVPLGSTWLSDFPQAWAETGGMGLAVRQAPLIIPLKATSTPVSIKQYPMSQEARLGIKPHIQRLLDQGILVPCQSPWNTPLLPVKKPGTNDYRPVQDLREVNKRVEDIHPTVPNPYNLLSGLPPSHQWYTVLDLKDAFFCLRLHPTSQPLFAFEWRDPEMGISGQLTWTRLPQGFKNSPTLFNEALHRDLADFRIQHPDLILLQYVDDLLLAATSEQDCQRGTRALLQTLGNLGYRASAKKAQICQKQVKYLGYLLKEGQRWLTEARKETVMGQPTPKTPRQLREFLGKAGFCRLFIPGFAEMAAPLYPLTKPGTLFNWGPDQQKAYQEIKQALLTAPALGLPDLTKPFELFVDEKQGYAKGVLTQKLGPWRRPVAYLSKKLDPVAAGWPPCLRMVAAIAVLTKDAGKLTMGQPLVILAPHAVEALVKQPPDRWLSNARMTHYQAMLLDTDRVQFGPVVALNPATLLPLPEKEAPHDCLEILAETHGTRPDLTDQPIPDADYTWYTDGSSFLQEGQRRAGAAVTTETEVIWARALPAGTSAQRAELIALTQALKMAEGKKLNVYTDSRYAFATAHVHGEIYRRRGWLTSEGREIKNKNEILALLKALFLPKRLSIIHCPGHQKGNSAEARGNRMADQAAREAAMKAVLETSTLLAGKRTADGSEFEKRTADGSEFESPKKKAKVE

SEQ ID NO: 1056 - protein, 2096 aa, synthetic construct
MPAAKRVKLDGGDKKYSIGLDIGTNSVGWAVITDEYKVPSKKFKVLGNTDRHSIKKNLIGALLFDSGETAEATRLKRTARRRYTRRKNRICYLQEIFSNEMAKVDDSFFHRLEESFLVEEDKKHERHPIFGNIVDEVAYHEKYPTIYHLRKKLVDSTDKADLRLIYLALAHMIKFRGHFLIEGDLNPDNSDVDKLFIQLVQTYNQLFEENPINASGVDAKAILSARLSKSRRLENLIAQLPGEKKNGLFGNLIALSLGLTPNFKSNFDLAEDAKLQLSKDTYDDDLDNLLAQIGDQYADLFLAAKNLSDAILLSDILRVNTEITKAPLSASMIKRYDEHHQDLTLLKALVRQQLPEKYKEIFFDQSKNGYAGYIDGGASQEEFYKFIKPILEKMDGTEELLVKLNREDLLRKQRTFDNGSIPHQIHLGELHAILRRQEDFYPFLKDNREKIEKILTFRIPYYVGPLARGNSRFAWMTRKSEETITPWNFEEVVDKGASAQSFIERMTNFDKNLPNEKVLPKHSLLYEYFTVYNELTKVKYVTEGMRKPAFLSGEQKKAIVDLLFKTNRKVTVKQLKEDYFKKIECFDSVEISGVEDRFNASLGTYHDLLKIIKDKDFLDNEENEDILEDIVLTLTLFEDREMIEERLKTYAHLFDDKVMKQLKRRRYTGWGRLSRKLINGIRDKQSGKTILDFLKSDGFANRNFMQLIHDDSLTFKEDIQKAQVSGQGDSLHEHIANLAGSPAIKKGILQTVKVVDELVKVMGRHKPENIVIEMARENQTTQKGQKNSRERMKRIEEGIKELGSQILKEHPVENTQLQNEKLYLYYLQNGRDMYVDQELDINRLSDYDVDHIVPQSFLKDDSIDNKVLTRSDKARGKSDNVPSEEVVKKMKNYWRQLLNAKLITQRKFDNLTKAERGGLSELDKAGFIKRQLVETRQITKHVAQILDSRMNTKYDENDKLIREVKVITLKSKLVSDFRKDFQFYKVREINNYHHAHDAYLNAVVGTALIKKYPKLESEFVYGDYKVYDVRKMIAKSEQEIGKATAKYFFYSNIMNFFKTEITLANGEIRKRPLIETNGETGEIVWDKGRDFATVRKVLSMPQVNIVKKTEVQTGGFSKESILPKRNSDKLIARKKDWDPKKYGGFDSPTVAYSVLVVAKVEKGKSKKLKSVKELLGITIMERSSFEKNPIDFLEAKGYKEVKKDLIIKLPKYSLFELENGRKRMLASAGELQKGNELALPSKYVNFLYLASHYEKLKGSPEDNEQKQLFVEQHKHYLDEIIEQISEFSKRVILADANLDKVLSAYNKHRDKPIREQAENIIHLFTLTNLGAPAAFKYFDTTIDRKRYTSTKEVLDATLIHQSITGLYETRIDLSQLGGDGGEAAAKGGGGSSGGTLNIEDEYRLHETSKEPDVPLGSTWLSDFPQAWAETGGMGLAVRQAPLIIPLKATSTPVSIKQYPMSQEARLGIKPHIQRLLDQGILVPCQSPWNTPLLPVKKPGTNDYRPVQDLREVNKRVEDIHPTVPNPYNLLSGLPPSHQWYTVLDLKDAFFCLRLHPTSQPLFAFEWRDPEMGISGQLTWTRLPQGFKNSPTLFNEALHRDLADFRIQHPDLILLQYVDDLLLAATSEQDCQRGTRALLQTLGNLGYRASAKKAQICQKQVKYLGYLLKEGQRWLTEARKETVMGQPTPKTPRQLREFLGKAGFCRLFIPGFAEMAAPLYPLTKPGTLFNWGPDQQKAYQEIKQALLTAPALGLPDLTKPFELFVDEKQGYAKGVLTQKLGPWRRPVAYLSKKLDPVAAGWPPCLRMVAAIAVLTKDAGKLTMGQPLVILAPHAVEALVKQPPDRWLSNARMTHYQAMLLDTDRVQFGPVVALNPATLLPLPEKEAPHDCLEILAETHGTRPDLTDQPIPDADYTWYTDGSSFLQEGQRRAGAAVTTETEVIWARALPAGTSAQRAELIALTQALKMAEGKKLNVYTDSRYAFATAHVHGEIYRRRGWLTSEGREIKNKNEILALLKALFLPKRLSIIHCPGHQKGNSAEARGNRMADQAAREAAMKAVLETSTLLAGKRTADGSEFEKRTADGSEFESPKKKAKVE

SEQ ID NO: 1057 - protein, 2089 aa, synthetic construct
MPAAKRVKLDGGDKKYSIGLDIGTNSVGWAVITDEYKVPSKKFKVLGNTDRHSIKKNLIGALLFDSGETAEATRLKRTARRRYTRRKNRICYLQEIFSNEMAKVDDSFFHRLEESFLVEEDKKHERHPIFGNIVDEVAYHEKYPTIYHLRKKLVDSTDKADLRLIYLALAHMIKFRGHFLIEGDLNPDNSDVDKLFIQLVQTYNQLFEENPINASGVDAKAILSARLSKSRRLENLIAQLPGEKKNGLFGNLIALSLGLTPNFKSNFDLAEDAKLQLSKDTYDDDLDNLLAQIGDQYADLFLAAKNLSDAILLSDILRVNTEITKAPLSASMIKRYDEHHQDLTLLKALVRQQLPEKYKEIFFDQSKNGYAGYIDGGASQEEFYKFIKPILEKMDGTEELLVKLNREDLLRKQRTFDNGSIPHQIHLGELHAILRRQEDFYPFLKDNREKIEKILTFRIPYYVGPLARGNSRFAWMTRKSEETITPWNFEEVVDKGASAQSFIERMTNFDKNLPNEKVLPKHSLLYEYFTVYNELTKVKYVTEGMRKPAFLSGEQKKAIVDLLFKTNRKVTVKQLKEDYFKKIECFDSVEISGVEDRFNASLGTYHDLLKIIKDKDFLDNEENEDILEDIVLTLTLFEDREMIEERLKTYAHLFDDKVMKQLKRRRYTGWGRLSRKLINGIRDKQSGKTILDFLKSDGFANRNFMQLIHDDSLTFKEDIQKAQVSGQGDSLHEHIANLAGSPAIKKGILQTVKVVDELVKVMGRHKPENIVIEMARENQTTQKGQKNSRERMKRIEEGIKELGSQILKEHPVENTQLQNEKLYLYYLQNGRDMYVDQELDINRLSDYDVDHIVPQSFLKDDSIDNKVLTRSDKARGKSDNVPSEEVVKKMKNYWRQLLNAKLITQRKFDNLTKAERGGLSELDKAGFIKRQLVETRQITKHVAQILDSRMNTKYDENDKLIREVKVITLKSKLVSDFRKDFQFYKVREINNYHHAHDAYLNAVVGTALIKKYPKLESEFVYGDYKVYDVRKMIAKSEQEIGKATAKYFFYSNIMNFFKTEITLANGEIRKRPLIETNGETGEIVWDKGRDFATVRKVLSMPQVNIVKKTEVQTGGFSKESILPKRNSDKLIARKKDWDPKKYGGFDSPTVAYSVLVVAKVEKGKSKKLKSVKELLGITIMERSSFEKNPIDFLEAKGYKEVKKDLIIKLPKYSLFELENGRKRMLASAGELQKGNELALPSKYVNFLYLASHYEKLKGSPEDNEQKQLFVEQHKHYLDEIIEQISEFSKRVILADANLDKVLSAYNKHRDKPIREQAENIIHLFTLTNLGAPAAFKYFDTTIDRKRYTSTKEVLDATLIHQSITGLYETRIDLSQLGGDGGGGGGGGTLNIEDEYRLHETSKEPDVPLGSTWLSDFPQAWAETGGMGLAVRQAPLIIPLKATSTPVSIKQYPMSQEARLGIKPHIQRLLDQGILVPCQSPWNTPLLPVKKPGTNDYRPVQDLREVNKRVEDIHPTVPNPYNLLSGLPPSHQWYTVLDLKDAFFCLRLHPTSQPLFAFEWRDPEMGISGQLTWTRLPQGFKNSPTLFNEALHRDLADFRIQHPDLILLQYVDDLLLAATSEQDCQRGTRALLQTLGNLGYRASAKKAQICQKQVKYLGYLLKEGQRWLTEARKETVMGQPTPKTPRQLREFLGKAGFCRLFIPGFAEMAAPLYPLTKPGTLFNWGPDQQKAYQEIKQALLTAPALGLPDLTKPFELFVDEKQGYAKGVLTQKLGPWRRPVAYLSKKLDPVAAGWPPCLRMVAAIAVLTKDAGKLTMGQPLVILAPHAVEALVKQPPDRWLSNARMTHYQAMLLDTDRVQFGPVVALNPATLLPLPEKEAPHDCLEILAETHGTRPDLTDQPIPDADYTWYTDGSSFLQEGQRRAGAAVTTETEVIWARALPAGTSAQRAELIALTQALKMAEGKKLNVYTDSRYAFATAHVHGEIYRRRGWLTSEGREIKNKNEILALLKALFLPKRLSIIHCPGHQKGNSAEARGNRMADQAAREAAMKAVLETSTLLAGKRTADGSEFEKRTADGSEFESPKKKAKVE

SEQ ID NO: 1058 - protein, 2096 aa, synthetic construct
MPAAKRVKLDGGDKKYSIGLDIGTNSVGWAVITDEYKVPSKKFKVLGNTDRHSIKKNLIGALLFDSGETAEATRLKRTARRRYTRRKNRICYLQEIFSNEMAKVDDSFFHRLEESFLVEEDKKHERHPIFGNIVDEVAYHEKYPTIYHLRKKLVDSTDKADLRLIYLALAHMIKFRGHFLIEGDLNPDNSDVDKLFIQLVQTYNQLFEENPINASGVDAKAILSARLSKSRRLENLIAQLPGEKKNGLFGNLIALSLGLTPNFKSNFDLAEDAKLQLSKDTYDDDLDNLLAQIGDQYADLFLAAKNLSDAILLSDILRVNTEITKAPLSASMIKRYDEHHQDLTLLKALVRQQLPEKYKEIFFDQSKNGYAGYIDGGASQEEFYKFIKPILEKMDGTEELLVKLNREDLLRKQRTFDNGSIPHQIHLGELHAILRRQEDFYPFLKDNREKIEKILTFRIPYYVGPLARGNSRFAWMTRKSEETITPWNFEEVVDKGASAQSFIERMTNFDKNLPNEKVLPKHSLLYEYFTVYNELTKVKYVTEGMRKPAFLSGEQKKAIVDLLFKTNRKVTVKQLKEDYFKKIECFDSVEISGVEDRFNASLGTYHDLLKIIKDKDFLDNEENEDILEDIVLTLTLFEDREMIEERLKTYAHLFDDKVMKQLKRRRYTGWGRLSRKLINGIRDKQSGKTILDFLKSDGFANRNFMQLIHDDSLTFKEDIQKAQVSGQGDSLHEHIANLAGSPAIKKGILQTVKVVDELVKVMGRHKPENIVIEMARENQTTQKGQKNSRERMKRIEEGIKELGSQILKEHPVENTQLQNEKLYLYYLQNGRDMYVDQELDINRLSDYDVDHIVPQSFLKDDSIDNKVLTRSDKARGKSDNVPSEEVVKKMKNYWRQLLNAKLITQRKFDNLTKAERGGLSELDKAGFIKRQLVETRQITKHVAQILDSRMNTKYDENDKLIREVKVITLKSKLVSDFRKDFQFYKVREINNYHHAHDAYLNAVVGTALIKKYPKLESEFVYGDYKVYDVRKMIAKSEQEIGKATAKYFFYSNIMNFFKTEITLANGEIRKRPLIETNGETGEIVWDKGRDFATVRKVLSMPQVNIVKKTEVQTGGFSKESILPKRNSDKLIARKKDWDPKKYGGFDSPTVAYSVLVVAKVEKGKSKKLKSVKELLGITIMERSSFEKNPIDFLEAKGYKEVKKDLIIKLPKYSLFELENGRKRMLASAGELQKGNELALPSKYVNFLYLASHYEKLKGSPEDNEQKQLFVEQHKHYLDEIIEQISEFSKRVILADANLDKVLSAYNKHRDKPIREQAENIIHLFTLTNLGAPAAFKYFDTTIDRKRYTSTKEVLDATLIHQSITGLYETRIDLSQLGGDGGEAAAKGGGPAPGGTLNIEDEYRLHETSKEPDVPLGSTWLSDFPQAWAETGGMGLAVRQAPLIIPLKATSTPVSIKQYPMSQEARLGIKPHIQRLLDQGILVPCQSPWNTPLLPVKKPGTNDYRPVQDLREVNKRVEDIHPTVPNPYNLLSGLPPSHQWYTVLDLKDAFFCLRLHPTSQPLFAFEWRDPEMGISGQLTWTRLPQGFKNSPTLFNEALHRDLADFRIQHPDLILLQYVDDLLLAATSEQDCQRGTRALLQTLGNLGYRASAKKAQICQKQVKYLGYLLKEGQRWLTEARKETVMGQPTPKTPRQLREFLGKAGFCRLFIPGFAEMAAPLYPLTKPGTLFNWGPDQQKAYQEIKQALLTAPALGLPDLTKPFELFVDEKQGYAKGVLTQKLGPWRRPVAYLSKKLDPVAAGWPPCLRMVAAIAVLTKDAGKLTMGQPLVILAPHAVEALVKQPPDRWLSNARMTHYQAMLLDTDRVQFGPVVALNPATLLPLPEKEAPHDCLEILAETHGTRPDLTDQPIPDADYTWYTDGSSFLQEGQRRAGAAVTTETEVIWARALPAGTSAQRAELIALTQALKMAEGKKLNVYTDSRYAFATAHVHGEIYRRRGWLTSEGREIKNKNEILALLKALFLPKRLSIIHCPGHQKGNSAEARGNRMADQAAREAAMKAVLETSTLLAGKRTADGSEFEKRTADGSEFESPKKKAKVE

SEQ ID NO: 1059 - protein, 2096 aa, synthetic construct
MPAAKRVKLDGGDKKYSIGLDIGTNSVGWAVITDEYKVPSKKFKVLGNTDRHSIKKNLIGALLFDSGETAEATRLKRTARRRYTRRKNRICYLQEIFSNEMAKVDDSFFHRLEESFLVEEDKKHERHPIFGNIVDEVAYHEKYPTIYHLRKKLVDSTDKADLRLIYLALAHMIKFRGHFLIEGDLNPDNSDVDKLFIQLVQTYNQLFEENPINASGVDAKAILSARLSKSRRLENLIAQLPGEKKNGLFGNLIALSLGLTPNFKSNFDLAEDAKLQLSKDTYDDDLDNLLAQIGDQYADLFLAAKNLSDAILLSDILRVNTEITKAPLSASMIKRYDEHHQDLTLLKALVRQQLPEKYKEIFFDQSKNGYAGYIDGGASQEEFYKFIKPILEKMDGTEELLVKLNREDLLRKQRTFDNGSIPHQIHLGELHAILRRQEDFYPFLKDNREKIEKILTFRIPYYVGPLARGNSRFAWMTRKSEETITPWNFEEVVDKGASAQSFIERMTNFDKNLPNEKVLPKHSLLYEYFTVYNELTKVKYVTEGMRKPAFLSGEQKKAIVDLLFKTNRKVTVKQLKEDYFKKIECFDSVEISGVEDRFNASLGTYHDLLKIIKDKDFLDNEENEDILEDIVLTLTLFEDREMIEERLKTYAHLFDDKVMKQLKRRRYTGWGRLSRKLINGIRDKQSGKTILDFLKSDGFANRNFMQLIHDDSLTFKEDIQKAQVSGQGDSLHEHIANLAGSPAIKKGILQTVKVVDELVKVMGRHKPENIVIEMARENQTTQKGQKNSRERMKRIEEGIKELGSQILKEHPVENTQLQNEKLYLYYLQNGRDMYVDQELDINRLSDYDVDHIVPQSFLKDDSIDNKVLTRSDKARGKSDNVPSEEVVKKMKNYWRQLLNAKLITQRKFDNLTKAERGGLSELDKAGFIKRQLVETRQITKHVAQILDSRMNTKYDENDKLIREVKVITLKSKLVSDFRKDFQFYKVREINNYHHAHDAYLNAVVGTALIKKYPKLESEFVYGDYKVYDVRKMIAKSEQEIGKATAKYFFYSNIMNFFKTEITLANGEIRKRPLIETNGETGEIVWDKGRDFATVRKVLSMPQVNIVKKTEVQTGGFSKESILPKRNSDKLIARKKDWDPKKYGGFDSPTVAYSVLVVAKVEKGKSKKLKSVKELLGITIMERSSFEKNPIDFLEAKGYKEVKKDLIIKLPKYSLFELENGRKRMLASAGELQKGNELALPSKYVNFLYLASHYEKLKGSPEDNEQKQLFVEQHKHYLDEIIEQISEFSKRVILADANLDKVLSAYNKHRDKPIREQAENIIHLFTLTNLGAPAAFKYFDTTIDRKRYTSTKEVLDATLIHQSITGLYETRIDLSQLGGDGGGGSGSSEAAAKGGTLNIEDEYRLHETSKEPDVPLGSTWLSDFPQAWAETGGMGLAVRQAPLIIPLKATSTPVSIKQYPMSQEARLGIKPHIQRLLDQGILVPCQSPWNTPLLPVKKPGTNDYRPVQDLREVNKRVEDIHPTVPNPYNLLSGLPPSHQWYTVLDLKDAFFCLRLHPTSQPLFAFEWRDPEMGISGQLTWTRLPQGFKNSPTLFNEALHRDLADFRIQHPDLILLQYVDDLLLAATSEQDCQRGTRALLQTLGNLGYRASAKKAQICQKQVKYLGYLLKEGQRWLTEARKETVMGQPTPKTPRQLREFLGKAGFCRLFIPGFAEMAAPLYPLTKPGTLFNWGPDQQKAYQEIKQALLTAPALGLPDLTKPFELFVDEKQGYAKGVLTQKLGPWRRPVAYLSKKLDPVAAGWPPCLRMVAAIAVLTKDAGKLTMGQPLVILAPHAVEALVKQPPDRWLSNARMTHYQAMLLDTDRVQFGPVVALNPATLLPLPEKEAPHDCLEILAETHGTRPDLTDQPIPDADYTWYTDGSSFLQEGQRRAGAAVTTETEVIWARALPAGTSAQRAELIALTQALKMAEGKKLNVYTDSRYAFATAHVHGEIYRRRGWLTSEGREIKNKNEILALLKALFLPKRLSIIHCPGHQKGNSAEARGNRMADQAAREAAMKAVLETSTLLAGKRTADGSEFEKRTADGSEFESPKKKAKVE

SEQ ID NO: 1060 - protein, 2096 aa, synthetic construct
MPAAKRVKLDGGDKKYSIGLDIGTNSVGWAVITDEYKVPSKKFKVLGNTDRHSIKKNLIGALLFDSGETAEATRLKRTARRRYTRRKNRICYLQEIFSNEMAKVDDSFFHRLEESFLVEEDKKHERHPIFGNIVDEVAYHEKYPTIYHLRKKLVDSTDKADLRLIYLALAHMIKFRGHFLIEGDLNPDNSDVDKLFIQLVQTYNQLFEENPINASGVDAKAILSARLSKSRRLENLIAQLPGEKKNGLFGNLIALSLGLTPNFKSNFDLAEDAKLQLSKDTYDDDLDNLLAQIGDQYADLFLAAKNLSDAILLSDILRVNTEITKAPLSASMIKRYDEHHQDLTLLKALVRQQLPEKYKEIFFDQSKNGYAGYIDGGASQEEFYKFIKPILEKMDGTEELLVKLNREDLLRKQRTFDNGSIPHQIHLGELHAILRRQEDFYPFLKDNREKIEKILTFRIPYYVGPLARGNSRFAWMTRKSEETITPWNFEEVVDKGASAQSFIERMTNFDKNLPNEKVLPKHSLLYEYFTVYNELTKVKYVTEGMRKPAFLSGEQKKAIVDLLFKTNRKVTVKQLKEDYFKKIECFDSVEISGVEDRFNASLGTYHDLLKIIKDKDFLDNEENEDILEDIVLTLTLFEDREMIEERLKTYAHLFDDKVMKQLKRRRYTGWGRLSRKLINGIRDKQSGKTILDFLKSDGFANRNFMQLIHDDSLTFKEDIQKAQVSGQGDSLHEHIANLAGSPAIKKGILQTVKVVDELVKVMGRHKPENIVIEMARENQTTQKGQKNSRERMKRIEEGIKELGSQILKEHPVENTQLQNEKLYLYYLQNGRDMYVDQELDINRLSDYDVDHIVPQSFLKDDSIDNKVLTRSDKARGKSDNVPSEEVVKKMKNYWRQLLNAKLITQRKFDNLTKAERGGLSELDKAGFIKRQLVETRQITKHVAQILDSRMNTKYDENDKLIREVKVITLKSKLVSDFRKDFQFYKVREINNYHHAHDAYLNAVVGTALIKKYPKLESEFVYGDYKVYDVRKMIAKSEQEIGKATAKYFFYSNIMNFFKTEITLANGEIRKRPLIETNGETGEIVWDKGRDFATVRKVLSMPQVNIVKKTEVQTGGFSKESILPKRNSDKLIARKKDWDPKKYGGFDSPTVAYSVLVVAKVEKGKSKKLKSVKELLGITIMERSSFEKNPIDFLEAKGYKEVKKDLIIKLPKYSLFELENGRKRMLASAGELQKGNELALPSKYVNFLYLASHYEKLKGSPEDNEQKQLFVEQHKHYLDEIIEQISEFSKRVILADANLDKVLSAYNKHRDKPIREQAENIIHLFTLTNLGAPAAFKYFDTTIDRKRYTSTKEVLDATLIHQSITGLYETRIDLSQLGGDGGGSSGGSEAAAKGGTLNIEDEYRLHETSKEPDVPLGSTWLSDFPQAWAETGGMGLAVRQAPLIIPLKATSTPVSIKQYPMSQEARLGIKPHIQRLLDQGILVPCQSPWNTPLLPVKKPGTNDYRPVQDLREVNKRVEDIHPTVPNPYNLLSGLPPSHQWYTVLDLKDAFFCLRLHPTSQPLFAFEWRDPEMGISGQLTWTRLPQGFKNSPTLFNEALHRDLADFRIQHPDLILLQYVDDLLLAATSEQDCQRGTRALLQTLGNLGYRASAKKAQICQKQVKYLGYLLKEGQRWLTEARKETVMGQPTPKTPRQLREFLGKAGFCRLFIPGFAEMAAPLYPLTKPGTLFNWGPDQQKAYQEIKQALLTAPALGLPDLTKPFELFVDEKQGYAKGVLTQKLGPWRRPVAYLSKKLDPVAAGWPPCLRMVAAIAVLTKDAGKLTMGQPLVILAPHAVEALVKQPPDRWLSNARMTHYQAMLLDTDRVQFGPVVALNPATLLPLPEKEAPHDCLEILAETHGTRPDLTDQPIPDADYTWYTDGSSFLQEGQRRAGAAVTTETEVIWARALPAGTSAQRAELIALTQALKMAEGKKLNVYTDSRYAFATAHVHGEIYRRRGWLTSEGREIKNKNEILALLKALFLPKRLSIIHCPGHQKGNSAEARGNRMADQAAREAAMKAVLETSTLLAGKRTADGSEFEKRTADGSEFESPKKKAKVE

SEQ ID NO: 1061 - protein, 2094 aa, synthetic construct
MPAAKRVKLDGGDKKYSIGLDIGTNSVGWAVITDEYKVPSKKFKVLGNTDRHSIKKNLIGALLFDSGETAEATRLKRTARRRYTRRKNRICYLQEIFSNEMAKVDDSFFHRLEESFLVEEDKKHERHPIFGNIVDEVAYHEKYPTIYHLRKKLVDSTDKADLRLIYLALAHMIKFRGHFLIEGDLNPDNSDVDKLFIQLVQTYNQLFEENPINASGVDAKAILSARLSKSRRLENLIAQLPGEKKNGLFGNLIALSLGLTPNFKSNFDLAEDAKLQLSKDTYDDDLDNLLAQIGDQYADLFLAAKNLSDAILLSDILRVNTEITKAPLSASMIKRYDEHHQDLTLLKALVRQQLPEKYKEIFFDQSKNGYAGYIDGGASQEEFYKFIKPILEKMDGTEELLVKLNREDLLRKQRTFDNGSIPHQIHLGELHAILRRQEDFYPFLKDNREKIEKILTFRIPYYVGPLARGNSRFAWMTRKSEETITPWNFEEVVDKGASAQSFIERMTNFDKNLPNEKVLPKHSLLYEYFTVYNELTKVKYVTEGMRKPAFLSGEQKKAIVDLLFKTNRKVTVKQLKEDYFKKIECFDSVEISGVEDRFNASLGTYHDLLKIIKDKDFLDNEENEDILEDIVLTLTLFEDREMIEERLKTYAHLFDDKVMKQLKRRRYTGWGRLSRKLINGIRDKQSGKTILDFLKSDGFANRNFMQLIHDDSLTFKEDIQKAQVSGQGDSLHEHIANLAGSPAIKKGILQTVKVVDELVKVMGRHKPENIVIEMARENQTTQKGQKNSRERMKRIEEGIKELGSQILKEHPVENTQLQNEKLYLYYLQNGRDMYVDQELDINRLSDYDVDHIVPQSFLKDDSIDNKVLTRSDKARGKSDNVPSEEVVKKMKNYWRQLLNAKLITQRKFDNLTKAERGGLSELDKAGFIKRQLVETRQITKHVAQILDSRMNTKYDENDKLIREVKVITLKSKLVSDFRKDFQFYKVREINNYHHAHDAYLNAVVGTALIKKYPKLESEFVYGDYKVYDVRKMIAKSEQEIGKATAKYFFYSNIMNFFKTEITLANGEIRKRPLIETNGETGEIVWDKGRDFATVRKVLSMPQVNIVKKTEVQTGGFSKESILPKRNSDKLIARKKDWDPKKYGGFDSPTVAYSVLVVAKVEKGKSKKLKSVKELLGITIMERSSFEKNPIDFLEAKGYKEVKKDLIIKLPKYSLFELENGRKRMLASAGELQKGNELALPSKYVNFLYLASHYEKLKGSPEDNEQKQLFVEQHKHYLDEIIEQISEFSKRVILADANLDKVLSAYNKHRDKPIREQAENIIHLFTLTNLGAPAAFKYFDTTIDRKRYTSTKEVLDATLIHQSITGLYETRIDLSQLGGDGGGSSGGSPAPGGTLNIEDEYRLHETSKEPDVPLGSTWLSDFPQAWAETGGMGLAVRQAPLIIPLKATSTPVSIKQYPMSQEARLGIKPHIQRLLDQGILVPCQSPWNTPLLPVKKPGTNDYRPVQDLREVNKRVEDIHPTVPNPYNLLSGLPPSHQWYTVLDLKDAFFCLRLHPTSQPLFAFEWRDPEMGISGQLTWTRLPQGFKNSPTLFNEALHRDLADFRIQHPDLILLQYVDDLLLAATSEQDCQRGTRALLQTLGNLGYRASAKKAQICQKQVKYLGYLLKEGQRWLTEARKETVMGQPTPKTPRQLREFLGKAGFCRLFIPGFAEMAAPLYPLTKPGTLFNWGPDQQKAYQEIKQALLTAPALGLPDLTKPFELFVDEKQGYAKGVLTQKLGPWRRPVAYLSKKLDPVAAGWPPCLRMVAAIAVLTKDAGKLTMGQPLVILAPHAVEALVKQPPDRWLSNARMTHYQAMLLDTDRVQFGPVVALNPATLLPLPEKEAPHDCLEILAETHGTRPDLTDQPIPDADYTWYTDGSSFLQEGQRRAGAAVTTETEVIWARALPAGTSAQRAELIALTQALKMAEGKKLNVYTDSRYAFATAHVHGEIYRRRGWLTSEGREIKNKNEILALLKALFLPKRLSIIHCPGHQKGNSAEARGNRMADQAAREAAMKAVLETSTLLAGKRTADGSEFEKRTADGSEFESPKKKAKVE

SEQ ID NO: 1062 - protein, 2091 aa, synthetic construct
MPAAKRVKLDGGDKKYSIGLDIGTNSVGWAVITDEYKVPSKKFKVLGNTDRHSIKKNLIGALLFDSGETAEATRLKRTARRRYTRRKNRICYLQEIFSNEMAKVDDSFFHRLEESFLVEEDKKHERHPIFGNIVDEVAYHEKYPTIYHLRKKLVDSTDKADLRLIYLALAHMIKFRGHFLIEGDLNPDNSDVDKLFIQLVQTYNQLFEENPINASGVDAKAILSARLSKSRRLENLIAQLPGEKKNGLFGNLIALSLGLTPNFKSNFDLAEDAKLQLSKDTYDDDLDNLLAQIGDQYADLFLAAKNLSDAILLSDILRVNTEITKAPLSASMIKRYDEHHQDLTLLKALVRQQLPEKYKEIFFDQSKNGYAGYIDGGASQEEFYKFIKPILEKMDGTEELLVKLNREDLLRKQRTFDNGSIPHQIHLGELHAILRRQEDFYPFLKDNREKIEKILTFRIPYYVGPLARGNSRFAWMTRKSEETITPWNFEEVVDKGASAQSFIERMTNFDKNLPNEKVLPKHSLLYEYFTVYNELTKVKYVTEGMRKPAFLSGEQKKAIVDLLFKTNRKVTVKQLKEDYFKKIECFDSVEISGVEDRFNASLGTYHDLLKIIKDKDFLDNEENEDILEDIVLTLTLFEDREMIEERLKTYAHLFDDKVMKQLKRRRYTGWGRLSRKLINGIRDKQSGKTILDFLKSDGFANRNFMQLIHDDSLTFKEDIQKAQVSGQGDSLHEHIANLAGSPAIKKGILQTVKVVDELVKVMGRHKPENIVIEMARENQTTQKGQKNSRERMKRIEEGIKELGSQILKEHPVENTQLQNEKLYLYYLQNGRDMYVDQELDINRLSDYDVDHIVPQSFLKDDSIDNKVLTRSDKARGKSDNVPSEEVVKKMKNYWRQLLNAKLITQRKFDNLTKAERGGLSELDKAGFIKRQLVETRQITKHVAQILDSRMNTKYDENDKLIREVKVITLKSKLVSDFRKDFQFYKVREINNYHHAHDAYLNAVVGTALIKKYPKLESEFVYGDYKVYDVRKMIAKSEQEIGKATAKYFFYSNIMNFFKTEITLANGEIRKRPLIETNGETGEIVWDKGRDFATVRKVLSMPQVNIVKKTEVQTGGFSKESILPKRNSDKLIARKKDWDPKKYGGFDSPTVAYSVLVVAKVEKGKSKKLKSVKELLGITIMERSSFEKNPIDFLEAKGYKEVKKDLIIKLPKYSLFELENGRKRMLASAGELQKGNELALPSKYVNFLYLASHYEKLKGSPEDNEQKQLFVEQHKHYLDEIIEQISEFSKRVILADANLDKVLSAYNKHRDKPIREQAENIIHLFTLTNLGAPAAFKYFDTTIDRKRYTSTKEVLDATLIHQSITGLYETRIDLSQLGGDGGGSSGGSGGTLNIEDEYRLHETSKEPDVPLGSTWLSDFPQAWAETGGMGLAVRQAPLIIPLKATSTPVSIKQYPMSQEARLGIKPHIQRLLDQGILVPCQSPWNTPLLPVKKPGTNDYRPVQDLREVNKRVEDIHPTVPNPYNLLSGLPPSHQWYTVLDLKDAFFCLRLHPTSQPLFAFEWRDPEMGISGQLTWTRLPQGFKNSPTLFNEALHRDLADFRIQHPDLILLQYVDDLLLAATSEQDCQRGTRALLQTLGNLGYRASAKKAQICQKQVKYLGYLLKEGQRWLTEARKETVMGQPTPKTPRQLREFLGKAGFCRLFIPGFAEMAAPLYPLTKPGTLFNWGPDQQKAYQEIKQALLTAPALGLPDLTKPFELFVDEKQGYAKGVLTQKLGPWRRPVAYLSKKLDPVAAGWPPCLRMVAAIAVLTKDAGKLTMGQPLVILAPHAVEALVKQPPDRWLSNARMTHYQAMLLDTDRVQFGPVVALNPATLLPLPEKEAPHDCLEILAETHGTRPDLTDQPIPDADYTWYTDGSSFLQEGQRRAGAAVTTETEVIWARALPAGTSAQRAELIALTQALKMAEGKKLNVYTDSRYAFATAHVHGEIYRRRGWLTSEGREIKNKNEILALLKALFLPKRLSIIHCPGHQKGNSAEARGNRMADQAAREAAMKAVLETSTLLAGKRTADGSEFEKRTADGSEFESPKKKAKVE

SEQ ID NO: 1063 - protein, 2094 aa, synthetic construct
MPAAKRVKLDGGDKKYSIGLDIGTNSVGWAVITDEYKVPSKKFKVLGNTDRHSIKKNLIGALLFDSGETAEATRLKRTARRRYTRRKNRICYLQEIFSNEMAKVDDSFFHRLEESFLVEEDKKHERHPIFGNIVDEVAYHEKYPTIYHLRKKLVDSTDKADLRLIYLALAHMIKFRGHFLIEGDLNPDNSDVDKLFIQLVQTYNQLFEENPINASGVDAKAILSARLSKSRRLENLIAQLPGEKKNGLFGNLIALSLGLTPNFKSNFDLAEDAKLQLSKDTYDDDLDNLLAQIGDQYADLFLAAKNLSDAILLSDILRVNTEITKAPLSASMIKRYDEHHQDLTLLKALVRQQLPEKYKEIFFDQSKNGYAGYIDGGASQEEFYKFIKPILEKMDGTEELLVKLNREDLLRKQRTFDNGSIPHQIHLGELHAILRRQEDFYPFLKDNREKIEKILTFRIPYYVGPLARGNSRFAWMTRKSEETITPWNFEEVVDKGASAQSFIERMTNFDKNLPNEKVLPKHSLLYEYFTVYNELTKVKYVTEGMRKPAFLSGEQKKAIVDLLFKTNRKVTVKQLKEDYFKKIECFDSVEISGVEDRFNASLGTYHDLLKIIKDKDFLDNEENEDILEDIVLTLTLFEDREMIEERLKTYAHLFDDKVMKQLKRRRYTGWGRLSRKLINGIRDKQSGKTILDFLKSDGFANRNFMQLIHDDSLTFKEDIQKAQVSGQGDSLHEHIANLAGSPAIKKGILQTVKVVDELVKVMGRHKPENIVIEMARENQTTQKGQKNSRERMKRIEEGIKELGSQILKEHPVENTQLQNEKLYLYYLQNGRDMYVDQELDINRLSDYDVDHIVPQSFLKDDSIDNKVLTRSDKARGKSDNVPSEEVVKKMKNYWRQLLNAKLITQRKFDNLTKAERGGLSELDKAGFIKRQLVETRQITKHVAQILDSRMNTKYDENDKLIREVKVITLKSKLVSDFRKDFQFYKVREINNYHHAHDAYLNAVVGTALIKKYPKLESEFVYGDYKVYDVRKMIAKSEQEIGKATAKYFFYSNIMNFFKTEITLANGEIRKRPLIETNGETGEIVWDKGRDFATVRKVLSMPQVNIVKKTEVQTGGFSKESILPKRNSDKLIARKKDWDPKKYGGFDSPTVAYSVLVVAKVEKGKSKKLKSVKELLGITIMERSSFEKNPIDFLEAKGYKEVKKDLIIKLPKYSLFELENGRKRMLASAGELQKGNELALPSKYVNFLYLASHYEKLKGSPEDNEQKQLFVEQHKHYLDEIIEQISEFSKRVILADANLDKVLSAYNKHRDKPIREQAENIIHLFTLTNLGAPAAFKYFDTTIDRKRYTSTKEVLDATLIHQSITGLYETRIDLSQLGGDGGGGSGSSPAPGGTLNIEDEYRLHETSKEPDVPLGSTWLSDFPQAWAETGGMGLAVRQAPLIIPLKATSTPVSIKQYPMSQEARLGIKPHIQRLLDQGILVPCQSPWNTPLLPVKKPGTNDYRPVQDLREVNKRVEDIHPTVPNPYNLLSGLPPSHQWYTVLDLKDAFFCLRLHPTSQPLFAFEWRDPEMGISGQLTWTRLPQGFKNSPTLFNEALHRDLADFRIQHPDLILLQYVDDLLLAATSEQDCQRGTRALLQTLGNLGYRASAKKAQICQKQVKYLGYLLKEGQRWLTEARKETVMGQPTPKTPRQLREFLGKAGFCRLFIPGFAEMAAPLYPLTKPGTLFNWGPDQQKAYQEIKQALLTAPALGLPDLTKPFELFVDEKQGYAKGVLTQKLGPWRRPVAYLSKKLDPVAAGWPPCLRMVAAIAVLTKDAGKLTMGQPLVILAPHAVEALVKQPPDRWLSNARMTHYQAMLLDTDRVQFGPVVALNPATLLPLPEKEAPHDCLEILAETHGTRPDLTDQPIPDADYTWYTDGSSFLQEGQRRAGAAVTTETEVIWARALPAGTSAQRAELIALTQALKMAEGKKLNVYTDSRYAFATAHVHGEIYRRRGWLTSEGREIKNKNEILALLKALFLPKRLSIIHCPGHQKGNSAEARGNRMADQAAREAAMKAVLETSTLLAGKRTADGSEFEKRTADGSEFESPKKKAKVE

SEQ ID NO: 1064 - protein, 2096 aa, synthetic construct
MPAAKRVKLDGGDKKYSIGLDIGTNSVGWAVITDEYKVPSKKFKVLGNTDRHSIKKNLIGALLFDSGETAEATRLKRTARRRYTRRKNRICYLQEIFSNEMAKVDDSFFHRLEESFLVEEDKKHERHPIFGNIVDEVAYHEKYPTIYHLRKKLVDSTDKADLRLIYLALAHMIKFRGHFLIEGDLNPDNSDVDKLFIQLVQTYNQLFEENPINASGVDAKAILSARLSKSRRLENLIAQLPGEKKNGLFGNLIALSLGLTPNFKSNFDLAEDAKLQLSKDTYDDDLDNLLAQIGDQYADLFLAAKNLSDAILLSDILRVNTEITKAPLSASMIKRYDEHHQDLTLLKALVRQQLPEKYKEIFFDQSKNGYAGYIDGGASQEEFYKFIKPILEKMDGTEELLVKLNREDLLRKQRTFDNGSIPHQIHLGELHAILRRQEDFYPFLKDNREKIEKILTFRIPYYVGPLARGNSRFAWMTRKSEETITPWNFEEVVDKGASAQSFIERMTNFDKNLPNEKVLPKHSLLYEYFTVYNELTKVKYVTEGMRKPAFLSGEQKKAIVDLLFKTNRKVTVKQLKEDYFKKIECFDSVEISGVEDRFNASLGTYHDLLKIIKDKDFLDNEENEDILEDIVLTLTLFEDREMIEERLKTYAHLFDDKVMKQLKRRRYTGWGRLSRKLINGIRDKQSGKTILDFLKSDGFANRNFMQLIHDDSLTFKEDIQKAQVSGQGDSLHEHIANLAGSPAIKKGILQTVKVVDELVKVMGRHKPENIVIEMARENQTTQKGQKNSRERMKRIEEGIKELGSQILKEHPVENTQLQNEKLYLYYLQNGRDMYVDQELDINRLSDYDVDHIVPQSFLKDDSIDNKVLTRSDKARGKSDNVPSEEVVKKMKNYWRQLLNAKLITQRKFDNLTKAERGGLSELDKAGFIKRQLVETRQITKHVAQILDSRMNTKYDENDKLIREVKVITLKSKLVSDFRKDFQFYKVREINNYHHAHDAYLNAVVGTALIKKYPKLESEFVYGDYKVYDVRKMIAKSEQEIGKATAKYFFYSNIMNFFKTEITLANGEIRKRPLIETNGETGEIVWDKGRDFATVRKVLSMPQVNIVKKTEVQTGGFSKESILPKRNSDKLIARKKDWDPKKYGGFDSPTVAYSVLVVAKVEKGKSKKLKSVKELLGITIMERSSFEKNPIDFLEAKGYKEVKKDLIIKLPKYSLFELENGRKRMLASAGELQKGNELALPSKYVNFLYLASHYEKLKGSPEDNEQKQLFVEQHKHYLDEIIEQISEFSKRVILADANLDKVLSAYNKHRDKPIREQAENIIHLFTLTNLGAPAAFKYFDTTIDRKRYTSTKEVLDATLIHQSITGLYETRIDLSQLGGDGGEAAAKPAPGSSGGTLNIEDEYRLHETSKEPDVPLGSTWLSDFPQAWAETGGMGLAVRQAPLIIPLKATSTPVSIKQYPMSQEARLGIKPHIQRLLDQGILVPCQSPWNTPLLPVKKPGTNDYRPVQDLREVNKRVEDIHPTVPNPYNLLSGLPPSHQWYTVLDLKDAFFCLRLHPTSQPLFAFEWRDPEMGISGQLTWTRLPQGFKNSPTLFNEALHRDLADFRIQHPDLILLQYVDDLLLAATSEQDCQRGTRALLQTLGNLGYRASAKKAQICQKQVKYLGYLLKEGQRWLTEARKETVMGQPTPKTPRQLREFLGKAGFCRLFIPGFAEMAAPLYPLTKPGTLFNWGPDQQKAYQEIKQALLTAPALGLPDLTKPFELFVDEKQGYAKGVLTQKLGPWRRPVAYLSKKLDPVAAGWPPCLRMVAAIAVLTKDAGKLTMGQPLVILAPHAVEALVKQPPDRWLSNARMTHYQAMLLDTDRVQFGPVVALNPATLLPLPEKEAPHDCLEILAETHGTRPDLTDQPIPDADYTWYTDGSSFLQEGQRRAGAAVTTETEVIWARALPAGTSAQRAELIALTQALKMAEGKKLNVYTDSRYAFATAHVHGEIYRRRGWLTSEGREIKNKNEILALLKALFLPKRLSIIHCPGHQKGNSAEARGNRMADQAAREAAMKAVLETSTLLAGKRTADGSEFEKRTADGSEFESPKKKAKVE

SEQ ID NO: 1065 - protein, 2094 aa, synthetic construct
MPAAKRVKLDGGDKKYSIGLDIGTNSVGWAVITDEYKVPSKKFKVLGNTDRHSIKKNLIGALLFDSGETAEATRLKRTARRRYTRRKNRICYLQEIFSNEMAKVDDSFFHRLEESFLVEEDKKHERHPIFGNIVDEVAYHEKYPTIYHLRKKLVDSTDKADLRLIYLALAHMIKFRGHFLIEGDLNPDNSDVDKLFIQLVQTYNQLFEENPINASGVDAKAILSARLSKSRRLENLIAQLPGEKKNGLFGNLIALSLGLTPNFKSNFDLAEDAKLQLSKDTYDDDLDNLLAQIGDQYADLFLAAKNLSDAILLSDILRVNTEITKAPLSASMIKRYDEHHQDLTLLKALVRQQLPEKYKEIFFDQSKNGYAGYIDGGASQEEFYKFIKPILEKMDGTEELLVKLNREDLLRKQRTFDNGSIPHQIHLGELHAILRRQEDFYPFLKDNREKIEKILTFRIPYYVGPLARGNSRFAWMTRKSEETITPWNFEEVVDKGASAQSFIERMTNFDKNLPNEKVLPKHSLLYEYFTVYNELTKVKYVTEGMRKPAFLSGEQKKAIVDLLFKTNRKVTVKQLKEDYFKKIECFDSVEISGVEDRFNASLGTYHDLLKIIKDKDFLDNEENEDILEDIVLTLTLFEDREMIEERLKTYAHLFDDKVMKQLKRRRYTGWGRLSRKLINGIRDKQSGKTILDFLKSDGFANRNFMQLIHDDSLTFKEDIQKAQVSGQGDSLHEHIANLAGSPAIKKGILQTVKVVDELVKVMGRHKPENIVIEMARENQTTQKGQKNSRERMKRIEEGIKELGSQILKEHPVENTQLQNEKLYLYYLQNGRDMYVDQELDINRLSDYDVDHIVPQSFLKDDSIDNKVLTRSDKARGKSDNVPSEEVVKKMKNYWRQLLNAKLITQRKFDNLTKAERGGLSELDKAGFIKRQLVETRQITKHVAQILDSRMNTKYDENDKLIREVKVITLKSKLVSDFRKDFQFYKVREINNYHHAHDAYLNAVVGTALIKKYPKLESEFVYGDYKVYDVRKMIAKSEQEIGKATAKYFFYSNIMNFFKTEITLANGEIRKRPLIETNGETGEIVWDKGRDFATVRKVLSMPQVNIVKKTEVQTGGFSKESILPKRNSDKLIARKKDWDPKKYGGFDSPTVAYSVLVVAKVEKGKSKKLKSVKELLGITIMERSSFEKNPIDFLEAKGYKEVKKDLIIKLPKYSLFELENGRKRMLASAGELQKGNELALPSKYVNFLYLASHYEKLKGSPEDNEQKQLFVEQHKHYLDEIIEQISEFSKRVILADANLDKVLSAYNKHRDKPIREQAENIIHLFTLTNLGAPAAFKYFDTTIDRKRYTSTKEVLDATLIHQSITGLYETRIDLSQLGGDGGGGSGGSGGSGGTLNIEDEYRLHETSKEPDVPLGSTWLSDFPQAWAETGGMGLAVRQAPLIIPLKATSTPVSIKQYPMSQEARLGIKPHIQRLLDQGILVPCQSPWNTPLLPVKKPGTNDYRPVQDLREVNKRVEDIHPTVPNPYNLLSGLPPSHQWYTVLDLKDAFFCLRLHPTSQPLFAFEWRDPEMGISGQLTWTRLPQGFKNSPTLFNEALHRDLADFRIQHPDLILLQYVDDLLLAATSEQDCQRGTRALLQTLGNLGYRASAKKAQICQKQVKYLGYLLKEGQRWLTEARKETVMGQPTPKTPRQLREFLGKAGFCRLFIPGFAEMAAPLYPLTKPGTLFNWGPDQQKAYQEIKQALLTAPALGLPDLTKPFELFVDEKQGYAKGVLTQKLGPWRRPVAYLSKKLDPVAAGWPPCLRMVAAIAVLTKDAGKLTMGQPLVILAPHAVEALVKQPPDRWLSNARMTHYQAMLLDTDRVQFGPVVALNPATLLPLPEKEAPHDCLEILAETHGTRPDLTDQPIPDADYTWYTDGSSFLQEGQRRAGAAVTTETEVIWARALPAGTSAQRAELIALTQALKMAEGKKLNVYTDSRYAFATAHVHGEIYRRRGWLTSEGREIKNKNEILALLKALFLPKRLSIIHCPGHQKGNSAEARGNRMADQAAREAAMKAVLETSTLLAGKRTADGSEFEKRTADGSEFESPKKKAKVE

SEQ ID NO: 1066 - protein, 2096 aa, synthetic construct
MPAAKRVKLDGGDKKYSIGLDIGTNSVGWAVITDEYKVPSKKFKVLGNTDRHSIKKNLIGALLFDSGETAEATRLKRTARRRYTRRKNRICYLQEIFSNEMAKVDDSFFHRLEESFLVEEDKKHERHPIFGNIVDEVAYHEKYPTIYHLRKKLVDSTDKADLRLIYLALAHMIKFRGHFLIEGDLNPDNSDVDKLFIQLVQTYNQLFEENPINASGVDAKAILSARLSKSRRLENLIAQLPGEKKNGLFGNLIALSLGLTPNFKSNFDLAEDAKLQLSKDTYDDDLDNLLAQIGDQYADLFLAAKNLSDAILLSDILRVNTEITKAPLSASMIKRYDEHHQDLTLLKALVRQQLPEKYKEIFFDQSKNGYAGYIDGGASQEEFYKFIKPILEKMDGTEELLVKLNREDLLRKQRTFDNGSIPHQIHLGELHAILRRQEDFYPFLKDNREKIEKILTFRIPYYVGPLARGNSRFAWMTRKSEETITPWNFEEVVDKGASAQSFIERMTNFDKNLPNEKVLPKHSLLYEYFTVYNELTKVKYVTEGMRKPAFLSGEQKKAIVDLLFKTNRKVTVKQLKEDYFKKIECFDSVEISGVEDRFNASLGTYHDLLKIIKDKDFLDNEENEDILEDIVLTLTLFEDREMIEERLKTYAHLFDDKVMKQLKRRRYTGWGRLSRKLINGIRDKQSGKTILDFLKSDGFANRNFMQLIHDDSLTFKEDIQKAQVSGQGDSLHEHIANLAGSPAIKKGILQTVKVVDELVKVMGRHKPENIVIEMARENQTTQKGQKNSRERMKRIEEGIKELGSQILKEHPVENTQLQNEKLYLYYLQNGRDMYVDQELDINRLSDYDVDHIVPQSFLKDDSIDNKVLTRSDKARGKSDNVPSEEVVKKMKNYWRQLLNAKLITQRKFDNLTKAERGGLSELDKAGFIKRQLVETRQITKHVAQILDSRMNTKYDENDKLIREVKVITLKSKLVSDFRKDFQFYKVREINNYHHAHDAYLNAVVGTALIKKYPKLESEFVYGDYKVYDVRKMIAKSEQEIGKATAKYFFYSNIMNFFKTEITLANGEIRKRPLIETNGETGEIVWDKGRDFATVRKVLSMPQVNIVKKTEVQTGGFSKESILPKRNSDKLIARKKDWDPKKYGGFDSPTVAYSVLVVAKVEKGKSKKLKSVKELLGITIMERSSFEKNPIDFLEAKGYKEVKKDLIIKLPKYSLFELENGRKRMLASAGELQKGNELALPSKYVNFLYLASHYEKLKGSPEDNEQKQLFVEQHKHYLDEIIEQISEFSKRVILADANLDKVLSAYNKHRDKPIREQAENIIHLFTLTNLGAPAAFKYFDTTIDRKRYTSTKEVLDATLIHQSITGLYETRIDLSQLGGDGGPAPEAAAKGGSGGTLNIEDEYRLHETSKEPDVPLGSTWLSDFPQAWAETGGMGLAVRQAPLIIPLKATSTPVSIKQYPMSQEARLGIKPHIQRLLDQGILVPCQSPWNTPLLPVKKPGTNDYRPVQDLREVNKRVEDIHPTVPNPYNLLSGLPPSHQWYTVLDLKDAFFCLRLHPTSQPLFAFEWRDPEMGISGQLTWTRLPQGFKNSPTLFNEALHRDLADFRIQHPDLILLQYVDDLLLAATSEQDCQRGTRALLQTLGNLGYRASAKKAQICQKQVKYLGYLLKEGQRWLTEARKETVMGQPTPKTPRQLREFLGKAGFCRLFIPGFAEMAAPLYPLTKPGTLFNWGPDQQKAYQEIKQALLTAPALGLPDLTKPFELFVDEKQGYAKGVLTQKLGPWRRPVAYLSKKLDPVAAGWPPCLRMVAAIAVLTKDAGKLTMGQPLVILAPHAVEALVKQPPDRWLSNARMTHYQAMLLDTDRVQFGPVVALNPATLLPLPEKEAPHDCLEILAETHGTRPDLTDQPIPDADYTWYTDGSSFLQEGQRRAGAAVTTETEVIWARALPAGTSAQRAELIALTQALKMAEGKKLNVYTDSRYAFATAHVHGEIYRRRGWLTSEGREIKNKNEILALLKALFLPKRLSIIHCPGHQKGNSAEARGNRMADQAAREAAMKAVLETSTLLAGKRTADGSEFEKRTADGSEFESPKKKAKVE

SEQ ID NO: 1067 - protein, 2103 aa, synthetic construct
MPAAKRVKLDGGDKKYSIGLDIGTNSVGWAVITDEYKVPSKKFKVLGNTDRHSIKKNLIGALLFDSGETAEATRLKRTARRRYTRRKNRICYLQEIFSNEMAKVDDSFFHRLEESFLVEEDKKHERHPIFGNIVDEVAYHEKYPTIYHLRKKLVDSTDKADLRLIYLALAHMIKFRGHFLIEGDLNPDNSDVDKLFIQLVQTYNQLFEENPINASGVDAKAILSARLSKSRRLENLIAQLPGEKKNGLFGNLIALSLGLTPNFKSNFDLAEDAKLQLSKDTYDDDLDNLLAQIGDQYADLFLAAKNLSDAILLSDILRVNTEITKAPLSASMIKRYDEHHQDLTLLKALVRQQLPEKYKEIFFDQSKNGYAGYIDGGASQEEFYKFIKPILEKMDGTEELLVKLNREDLLRKQRTFDNGSIPHQIHLGELHAILRRQEDFYPFLKDNREKIEKILTFRIPYYVGPLARGNSRFAWMTRKSEETITPWNFEEVVDKGASAQSFIERMTNFDKNLPNEKVLPKHSLLYEYFTVYNELTKVKYVTEGMRKPAFLSGEQKKAIVDLLFKTNRKVTVKQLKEDYFKKIECFDSVEISGVEDRFNASLGTYHDLLKIIKDKDFLDNEENEDILEDIVLTLTLFEDREMIEERLKTYAHLFDDKVMKQLKRRRYTGWGRLSRKLINGIRDKQSGKTILDFLKSDGFANRNFMQLIHDDSLTFKEDIQKAQVSGQGDSLHEHIANLAGSPAIKKGILQTVKVVDELVKVMGRHKPENIVIEMARENQTTQKGQKNSRERMKRIEEGIKELGSQILKEHPVENTQLQNEKLYLYYLQNGRDMYVDQELDINRLSDYDVDHIVPQSFLKDDSIDNKVLTRSDKARGKSDNVPSEEVVKKMKNYWRQLLNAKLITQRKFDNLTKAERGGLSELDKAGFIKRQLVETRQITKHVAQILDSRMNTKYDENDKLIREVKVITLKSKLVSDFRKDFQFYKVREINNYHHAHDAYLNAVVGTALIKKYPKLESEFVYGDYKVYDVRKMIAKSEQEIGKATAKYFFYSNIMNFFKTEITLANGEIRKRPLIETNGETGEIVWDKGRDFATVRKVLSMPQVNIVKKTEVQTGGFSKESILPKRNSDKLIARKKDWDPKKYGGFDSPTVAYSVLVVAKVEKGKSKKLKSVKELLGITIMERSSFEKNPIDFLEAKGYKEVKKDLIIKLPKYSLFELENGRKRMLASAGELQKGNELALPSKYVNFLYLASHYEKLKGSPEDNEQKQLFVEQHKHYLDEIIEQISEFSKRVILADANLDKVLSAYNKHRDKPIREQAENIIHLFTLTNLGAPAAFKYFDTTIDRKRYTSTKEVLDATLIHQSITGLYETRIDLSQLGGDGGGSSGSSGSSGSSGSSGSSGGTLNIEDEYRLHETSKEPDVPLGSTWLSDFPQAWAETGGMGLAVRQAPLIIPLKATSTPVSIKQYPMSQEARLGIKPHIQRLLDQGILVPCQSPWNTPLLPVKKPGTNDYRPVQDLREVNKRVEDIHPTVPNPYNLLSGLPPSHQWYTVLDLKDAFFCLRLHPTSQPLFAFEWRDPEMGISGQLTWTRLPQGFKNSPTLFNEALHRDLADFRIQHPDLILLQYVDDLLLAATSEQDCQRGTRALLQTLGNLGYRASAKKAQICQKQVKYLGYLLKEGQRWLTEARKETVMGQPTPKTPRQLREFLGKAGFCRLFIPGFAEMAAPLYPLTKPGTLFNWGPDQQKAYQEIKQALLTAPALGLPDLTKPFELFVDEKQGYAKGVLTQKLGPWRRPVAYLSKKLDPVAAGWPPCLRMVAAIAVLTKDAGKLTMGQPLVILAPHAVEALVKQPPDRWLSNARMTHYQAMLLDTDRVQFGPVVALNPATLLPLPEKEAPHDCLEILAETHGTRPDLTDQPIPDADYTWYTDGSSFLQEGQRRAGAAVTTETEVIWARALPAGTSAQRAELIALTQALKMAEGKKLNVYTDSRYAFATAHVHGEIYRRRGWLTSEGREIKNKNEILALLKALFLPKRLSIIHCPGHQKGNSAEARGNRMADQAAREAAMKAVLETSTLLAGKRTADGSEFEKRTADGSEFESPKKKAKVE

SEQ ID NO: 1068 - protein, 2096 aa, synthetic construct
MPAAKRVKLDGGDKKYSIGLDIGTNSVGWAVITDEYKVPSKKFKVLGNTDRHSIKKNLIGALLFDSGETAEATRLKRTARRRYTRRKNRICYLQEIFSNEMAKVDDSFFHRLEESFLVEEDKKHERHPIFGNIVDEVAYHEKYPTIYHLRKKLVDSTDKADLRLIYLALAHMIKFRGHFLIEGDLNPDNSDVDKLFIQLVQTYNQLFEENPINASGVDAKAILSARLSKSRRLENLIAQLPGEKKNGLFGNLIALSLGLTPNFKSNFDLAEDAKLQLSKDTYDDDLDNLLAQIGDQYADLFLAAKNLSDAILLSDILRVNTEITKAPLSASMIKRYDEHHQDLTLLKALVRQQLPEKYKEIFFDQSKNGYAGYIDGGASQEEFYKFIKPILEKMDGTEELLVKLNREDLLRKQRTFDNGSIPHQIHLGELHAILRRQEDFYPFLKDNREKIEKILTFRIPYYVGPLARGNSRFAWMTRKSEETITPWNFEEVVDKGASAQSFIERMTNFDKNLPNEKVLPKHSLLYEYFTVYNELTKVKYVTEGMRKPAFLSGEQKKAIVDLLFKTNRKVTVKQLKEDYFKKIECFDSVEISGVEDRFNASLGTYHDLLKIIKDKDFLDNEENEDILEDIVLTLTLFEDREMIEERLKTYAHLFDDKVMKQLKRRRYTGWGRLSRKLINGIRDKQSGKTILDFLKSDGFANRNFMQLIHDDSLTFKEDIQKAQVSGQGDSLHEHIANLAGSPAIKKGILQTVKVVDELVKVMGRHKPENIVIEMARENQTTQKGQKNSRERMKRIEEGIKELGSQILKEHPVENTQLQNEKLYLYYLQNGRDMYVDQELDINRLSDYDVDHIVPQSFLKDDSIDNKVLTRSDKARGKSDNVPSEEVVKKMKNYWRQLLNAKLITQRKFDNLTKAERGGLSELDKAGFIKRQLVETRQITKHVAQILDSRMNTKYDENDKLIREVKVITLKSKLVSDFRKDFQFYKVREINNYHHAHDAYLNAVVGTALIKKYPKLESEFVYGDYKVYDVRKMIAKSEQEIGKATAKYFFYSNIMNFFKTEITLANGEIRKRPLIETNGETGEIVWDKGRDFATVRKVLSMPQVNIVKKTEVQTGGFSKESILPKRNSDKLIARKKDWDPKKYGGFDSPTVAYSVLVVAKVEKGKSKKLKSVKELLGITIMERSSFEKNPIDFLEAKGYKEVKKDLIIKLPKYSLFELENGRKRMLASAGELQKGNELALPSKYVNFLYLASHYEKLKGSPEDNEQKQLFVEQHKHYLDEIIEQISEFSKRVILADANLDKVLSAYNKHRDKPIREQAENIIHLFTLTNLGAPAAFKYFDTTIDRKRYTSTKEVLDATLIHQSITGLYETRIDLSQLGGDGGEAAAKGSSGGSGGTLNIEDEYRLHETSKEPDVPLGSTWLSDFPQAWAETGGMGLAVRQAPLIIPLKATSTPVSIKQYPMSQEARLGIKPHIQRLLDQGILVPCQSPWNTPLLPVKKPGTNDYRPVQDLREVNKRVEDIHPTVPNPYNLLSGLPPSHQWYTVLDLKDAFFCLRLHPTSQPLFAFEWRDPEMGISGQLTWTRLPQGFKNSPTLFNEALHRDLADFRIQHPDLILLQYVDDLLLAATSEQDCQRGTRALLQTLGNLGYRASAKKAQICQKQVKYLGYLLKEGQRWLTEARKETVMGQPTPKTPRQLREFLGKAGFCRLFIPGFAEMAAPLYPLTKPGTLFNWGPDQQKAYQEIKQALLTAPALGLPDLTKPFELFVDEKQGYAKGVLTQKLGPWRRPVAYLSKKLDPVAAGWPPCLRMVAAIAVLTKDAGKLTMGQPLVILAPHAVEALVKQPPDRWLSNARMTHYQAMLLDTDRVQFGPVVALNPATLLPLPEKEAPHDCLEILAETHGTRPDLTDQPIPDADYTWYTDGSSFLQEGQRRAGAAVTTETEVIWARALPAGTSAQRAELIALTQALKMAEGKKLNVYTDSRYAFATAHVHGEIYRRRGWLTSEGREIKNKNEILALLKALFLPKRLSIIHCPGHQKGNSAEARGNRMADQAAREAAMKAVLETSTLLAGKRTADGSEFEKRTADGSEFESPKKKAKVE

SEQ ID NO: 1069 - protein, 2096 aa, synthetic construct
MPAAKRVKLDGGDKKYSIGLDIGTNSVGWAVITDEYKVPSKKFKVLGNTDRHSIKKNLIGALLFDSGETAEATRLKRTARRRYTRRKNRICYLQEIFSNEMAKVDDSFFHRLEESFLVEEDKKHERHPIFGNIVDEVAYHEKYPTIYHLRKKLVDSTDKADLRLIYLALAHMIKFRGHFLIEGDLNPDNSDVDKLFIQLVQTYNQLFEENPINASGVDAKAILSARLSKSRRLENLIAQLPGEKKNGLFGNLIALSLGLTPNFKSNFDLAEDAKLQLSKDTYDDDLDNLLAQIGDQYADLFLAAKNLSDAILLSDILRVNTEITKAPLSASMIKRYDEHHQDLTLLKALVRQQLPEKYKEIFFDQSKNGYAGYIDGGASQEEFYKFIKPILEKMDGTEELLVKLNREDLLRKQRTFDNGSIPHQIHLGELHAILRRQEDFYPFLKDNREKIEKILTFRIPYYVGPLARGNSRFAWMTRKSEETITPWNFEEVVDKGASAQSFIERMTNFDKNLPNEKVLPKHSLLYEYFTVYNELTKVKYVTEGMRKPAFLSGEQKKAIVDLLFKTNRKVTVKQLKEDYFKKIECFDSVEISGVEDRFNASLGTYHDLLKIIKDKDFLDNEENEDILEDIVLTLTLFEDREMIEERLKTYAHLFDDKVMKQLKRRRYTGWGRLSRKLINGIRDKQSGKTILDFLKSDGFANRNFMQLIHDDSLTFKEDIQKAQVSGQGDSLHEHIANLAGSPAIKKGILQTVKVVDELVKVMGRHKPENIVIEMARENQTTQKGQKNSRERMKRIEEGIKELGSQILKEHPVENTQLQNEKLYLYYLQNGRDMYVDQELDINRLSDYDVDHIVPQSFLKDDSIDNKVLTRSDKARGKSDNVPSEEVVKKMKNYWRQLLNAKLITQRKFDNLTKAERGGLSELDKAGFIKRQLVETRQITKHVAQILDSRMNTKYDENDKLIREVKVITLKSKLVSDFRKDFQFYKVREINNYHHAHDAYLNAVVGTALIKKYPKLESEFVYGDYKVYDVRKMIAKSEQEIGKATAKYFFYSNIMNFFKTEITLANGEIRKRPLIETNGETGEIVWDKGRDFATVRKVLSMPQVNIVKKTEVQTGGFSKESILPKRNSDKLIARKKDWDPKKYGGFDSPTVAYSVLVVAKVEKGKSKKLKSVKELLGITIMERSSFEKNPIDFLEAKGYKEVKKDLIIKLPKYSLFELENGRKRMLASAGELQKGNELALPSKYVNFLYLASHYEKLKGSPEDNEQKQLFVEQHKHYLDEIIEQISEFSKRVILADANLDKVLSAYNKHRDKPIREQAENIIHLFTLTNLGAPAAFKYFDTTIDRKRYTSTKEVLDATLIHQSITGLYETRIDLSQLGGDGGPAPAPAPAPAPGGTLNIEDEYRLHETSKEPDVPLGSTWLSDFPQAWAETGGMGLAVRQAPLIIPLKATSTPVSIKQYPMSQEARLGIKPHIQRLLDQGILVPCQSPWNTPLLPVKKPGTNDYRPVQDLREVNKRVEDIHPTVPNPYNLLSGLPPSHQWYTVLDLKDAFFCLRLHPTSQPLFAFEWRDPEMGISGQLTWTRLPQGFKNSPTLFNEALHRDLADFRIQHPDLILLQYVDDLLLAATSEQDCQRGTRALLQTLGNLGYRASAKKAQICQKQVKYLGYLLKEGQRWLTEARKETVMGQPTPKTPRQLREFLGKAGFCRLFIPGFAEMAAPLYPLTKPGTLFNWGPDQQKAYQEIKQALLTAPALGLPDLTKPFELFVDEKQGYAKGVLTQKLGPWRRPVAYLSKKLDPVAAGWPPCLRMVAAIAVLTKDAGKLTMGQPLVILAPHAVEALVKQPPDRWLSNARMTHYQAMLLDTDRVQFGPVVALNPATLLPLPEKEAPHDCLEILAETHGTRPDLTDQPIPDADYTWYTDGSSFLQEGQRRAGAAVTTETEVIWARALPAGTSAQRAELIALTQALKMAEGKKLNVYTDSRYAFATAHVHGEIYRRRGWLTSEGREIKNKNEILALLKALFLPKRLSIIHCPGHQKGNSAEARGNRMADQAAREAAMKAVLETSTLLAGKRTADGSEFEKRTADGSEFESPKKKAKVE

SEQ ID NO: 1070 - protein, 2091 aa, synthetic construct
MPAAKRVKLDGGDKKYSIGLDIGTNSVGWAVITDEYKVPSKKFKVLGNTDRHSIKKNLIGALLFDSGETAEATRLKRTARRRYTRRKNRICYLQEIFSNEMAKVDDSFFHRLEESFLVEEDKKHERHPIFGNIVDEVAYHEKYPTIYHLRKKLVDSTDKADLRLIYLALAHMIKFRGHFLIEGDLNPDNSDVDKLFIQLVQTYNQLFEENPINASGVDAKAILSARLSKSRRLENLIAQLPGEKKNGLFGNLIALSLGLTPNFKSNFDLAEDAKLQLSKDTYDDDLDNLLAQIGDQYADLFLAAKNLSDAILLSDILRVNTEITKAPLSASMIKRYDEHHQDLTLLKALVRQQLPEKYKEIFFDQSKNGYAGYIDGGASQEEFYKFIKPILEKMDGTEELLVKLNREDLLRKQRTFDNGSIPHQIHLGELHAILRRQEDFYPFLKDNREKIEKILTFRIPYYVGPLARGNSRFAWMTRKSEETITPWNFEEVVDKGASAQSFIERMTNFDKNLPNEKVLPKHSLLYEYFTVYNELTKVKYVTEGMRKPAFLSGEQKKAIVDLLFKTNRKVTVKQLKEDYFKKIECFDSVEISGVEDRFNASLGTYHDLLKIIKDKDFLDNEENEDILEDIVLTLTLFEDREMIEERLKTYAHLFDDKVMKQLKRRRYTGWGRLSRKLINGIRDKQSGKTILDFLKSDGFANRNFMQLIHDDSLTFKEDIQKAQVSGQGDSLHEHIANLAGSPAIKKGILQTVKVVDELVKVMGRHKPENIVIEMARENQTTQKGQKNSRERMKRIEEGIKELGSQILKEHPVENTQLQNEKLYLYYLQNGRDMYVDQELDINRLSDYDVDHIVPQSFLKDDSIDNKVLTRSDKARGKSDNVPSEEVVKKMKNYWRQLLNAKLITQRKFDNLTKAERGGLSELDKAGFIKRQLVETRQITKHVAQILDSRMNTKYDENDKLIREVKVITLKSKLVSDFRKDFQFYKVREINNYHHAHDAYLNAVVGTALIKKYPKLESEFVYGDYKVYDVRKMIAKSEQEIGKATAKYFFYSNIMNFFKTEITLANGEIRKRPLIETNGETGEIVWDKGRDFATVRKVLSMPQVNIVKKTEVQTGGFSKESILPKRNSDKLIARKKDWDPKKYGGFDSPTVAYSVLVVAKVEKGKSKKLKSVKELLGITIMERSSFEKNPIDFLEAKGYKEVKKDLIIKLPKYSLFELENGRKRMLASAGELQKGNELALPSKYVNFLYLASHYEKLKGSPEDNEQKQLFVEQHKHYLDEIIEQISEFSKRVILADANLDKVLSAYNKHRDKPIREQAENIIHLFTLTNLGAPAAFKYFDTTIDRKRYTSTKEVLDATLIHQSITGLYETRIDLSQLGGDGGGSSGGGGGTLNIEDEYRLHETSKEPDVPLGSTWLSDFPQAWAETGGMGLAVRQAPLIIPLKATSTPVSIKQYPMSQEARLGIKPHIQRLLDQGILVPCQSPWNTPLLPVKKPGTNDYRPVQDLREVNKRVEDIHPTVPNPYNLLSGLPPSHQWYTVLDLKDAFFCLRLHPTSQPLFAFEWRDPEMGISGQLTWTRLPQGFKNSPTLFNEALHRDLADFRIQHPDLILLQYVDDLLLAATSEQDCQRGTRALLQTLGNLGYRASAKKAQICQKQVKYLGYLLKEGQRWLTEARKETVMGQPTPKTPRQLREFLGKAGFCRLFIPGFAEMAAPLYPLTKPGTLFNWGPDQQKAYQEIKQALLTAPALGLPDLTKPFELFVDEKQGYAKGVLTQKLGPWRRPVAYLSKKLDPVAAGWPPCLRMVAAIAVLTKDAGKLTMGQPLVILAPHAVEALVKQPPDRWLSNARMTHYQAMLLDTDRVQFGPVVALNPATLLPLPEKEAPHDCLEILAETHGTRPDLTDQPIPDADYTWYTDGSSFLQEGQRRAGAAVTTETEVIWARALPAGTSAQRAELIALTQALKMAEGKKLNVYTDSRYAFATAHVHGEIYRRRGWLTSEGREIKNKNEILALLKALFLPKRLSIIHCPGHQKGNSAEARGNRMADQAAREAAMKAVLETSTLLAGKRTADGSEFEKRTADGSEFESPKKKAKVE

SEQ ID NO: 1071 - protein, 2094 aa, synthetic construct
MPAAKRVKLDGGDKKYSIGLDIGTNSVGWAVITDEYKVPSKKFKVLGNTDRHSIKKNLIGALLFDSGETAEATRLKRTARRRYTRRKNRICYLQEIFSNEMAKVDDSFFHRLEESFLVEEDKKHERHPIFGNIVDEVAYHEKYPTIYHLRKKLVDSTDKADLRLIYLALAHMIKFRGHFLIEGDLNPDNSDVDKLFIQLVQTYNQLFEENPINASGVDAKAILSARLSKSRRLENLIAQLPGEKKNGLFGNLIALSLGLTPNFKSNFDLAEDAKLQLSKDTYDDDLDNLLAQIGDQYADLFLAAKNLSDAILLSDILRVNTEITKAPLSASMIKRYDEHHQDLTLLKALVRQQLPEKYKEIFFDQSKNGYAGYIDGGASQEEFYKFIKPILEKMDGTEELLVKLNREDLLRKQRTFDNGSIPHQIHLGELHAILRRQEDFYPFLKDNREKIEKILTFRIPYYVGPLARGNSRFAWMTRKSEETITPWNFEEVVDKGASAQSFIERMTNFDKNLPNEKVLPKHSLLYEYFTVYNELTKVKYVTEGMRKPAFLSGEQKKAIVDLLFKTNRKVTVKQLKEDYFKKIECFDSVEISGVEDRFNASLGTYHDLLKIIKDKDFLDNEENEDILEDIVLTLTLFEDREMIEERLKTYAHLFDDKVMKQLKRRRYTGWGRLSRKLINGIRDKQSGKTILDFLKSDGFANRNFMQLIHDDSLTFKEDIQKAQVSGQGDSLHEHIANLAGSPAIKKGILQTVKVVDELVKVMGRHKPENIVIEMARENQTTQKGQKNSRERMKRIEEGIKELGSQILKEHPVENTQLQNEKLYLYYLQNGRDMYVDQELDINRLSDYDVDHIVPQSFLKDDSIDNKVLTRSDKARGKSDNVPSEEVVKKMKNYWRQLLNAKLITQRKFDNLTKAERGGLSELDKAGFIKRQLVETRQITKHVAQILDSRMNTKYDENDKLIREVKVITLKSKLVSDFRKDFQFYKVREINNYHHAHDAYLNAVVGTALIKKYPKLESEFVYGDYKVYDVRKMIAKSEQEIGKATAKYFFYSNIMNFFKTEITLANGEIRKRPLIETNGETGEIVWDKGRDFATVRKVLSMPQVNIVKKTEVQTGGFSKESILPKRNSDKLIARKKDWDPKKYGGFDSPTVAYSVLVVAKVEKGKSKKLKSVKELLGITIMERSSFEKNPIDFLEAKGYKEVKKDLIIKLPKYSLFELENGRKRMLASAGELQKGNELALPSKYVNFLYLASHYEKLKGSPEDNEQKQLFVEQHKHYLDEIIEQISEFSKRVILADANLDKVLSAYNKHRDKPIREQAENIIHLFTLTNLGAPAAFKYFDTTIDRKRYTSTKEVLDATLIHQSITGLYETRIDLSQLGGDGGPAPGGSGGGGGTLNIEDEYRLHETSKEPDVPLGSTWLSDFPQAWAETGGMGLAVRQAPLIIPLKATSTPVSIKQYPMSQEARLGIKPHIQRLLDQGILVPCQSPWNTPLLPVKKPGTNDYRPVQDLREVNKRVEDIHPTVPNPYNLLSGLPPSHQWYTVLDLKDAFFCLRLHPTSQPLFAFEWRDPEMGISGQLTWTRLPQGFKNSPTLFNEALHRDLADFRIQHPDLILLQYVDDLLLAATSEQDCQRGTRALLQTLGNLGYRASAKKAQICQKQVKYLGYLLKEGQRWLTEARKETVMGQPTPKTPRQLREFLGKAGFCRLFIPGFAEMAAPLYPLTKPGTLFNWGPDQQKAYQEIKQALLTAPALGLPDLTKPFELFVDEKQGYAKGVLTQKLGPWRRPVAYLSKKLDPVAAGWPPCLRMVAAIAVLTKDAGKLTMGQPLVILAPHAVEALVKQPPDRWLSNARMTHYQAMLLDTDRVQFGPVVALNPATLLPLPEKEAPHDCLEILAETHGTRPDLTDQPIPDADYTWYTDGSSFLQEGQRRAGAAVTTETEVIWARALPAGTSAQRAELIALTQALKMAEGKKLNVYTDSRYAFATAHVHGEIYRRRGWLTSEGREIKNKNEILALLKALFLPKRLSIIHCPGHQKGNSAEARGNRMADQAAREAAMKAVLETSTLLAGKRTADGSEFEKRTADGSEFESPKKKAKVE

SEQ ID NO: 1072 - protein, 2097 aa, synthetic construct
MPAAKRVKLDGGDKKYSIGLDIGTNSVGWAVITDEYKVPSKKFKVLGNTDRHSIKKNLIGALLFDSGETAEATRLKRTARRRYTRRKNRICYLQEIFSNEMAKVDDSFFHRLEESFLVEEDKKHERHPIFGNIVDEVAYHEKYPTIYHLRKKLVDSTDKADLRLIYLALAHMIKFRGHFLIEGDLNPDNSDVDKLFIQLVQTYNQLFEENPINASGVDAKAILSARLSKSRRLENLIAQLPGEKKNGLFGNLIALSLGLTPNFKSNFDLAEDAKLQLSKDTYDDDLDNLLAQIGDQYADLFLAAKNLSDAILLSDILRVNTEITKAPLSASMIKRYDEHHQDLTLLKALVRQQLPEKYKEIFFDQSKNGYAGYIDGGASQEEFYKFIKPILEKMDGTEELLVKLNREDLLRKQRTFDNGSIPHQIHLGELHAILRRQEDFYPFLKDNREKIEKILTFRIPYYVGPLARGNSRFAWMTRKSEETITPWNFEEVVDKGASAQSFIERMTNFDKNLPNEKVLPKHSLLYEYFTVYNELTKVKYVTEGMRKPAFLSGEQKKAIVDLLFKTNRKVTVKQLKEDYFKKIECFDSVEISGVEDRFNASLGTYHDLLKIIKDKDFLDNEENEDILEDIVLTLTLFEDREMIEERLKTYAHLFDDKVMKQLKRRRYTGWGRLSRKLINGIRDKQSGKTILDFLKSDGFANRNFMQLIHDDSLTFKEDIQKAQVSGQGDSLHEHIANLAGSPAIKKGILQTVKVVDELVKVMGRHKPENIVIEMARENQTTQKGQKNSRERMKRIEEGIKELGSQILKEHPVENTQLQNEKLYLYYLQNGRDMYVDQELDINRLSDYDVDHIVPQSFLKDDSIDNKVLTRSDKARGKSDNVPSEEVVKKMKNYWRQLLNAKLITQRKFDNLTKAERGGLSELDKAGFIKRQLVETRQITKHVAQILDSRMNTKYDENDKLIREVKVITLKSKLVSDFRKDFQFYKVREINNYHHAHDAYLNAVVGTALIKKYPKLESEFVYGDYKVYDVRKMIAKSEQEIGKATAKYFFYSNIMNFFKTEITLANGEIRKRPLIETNGETGEIVWDKGRDFATVRKVLSMPQVNIVKKTEVQTGGFSKESILPKRNSDKLIARKKDWDPKKYGGFDSPTVAYSVLVVAKVEKGKSKKLKSVKELLGITIMERSSFEKNPIDFLEAKGYKEVKKDLIIKLPKYSLFELENGRKRMLASAGELQKGNELALPSKYVNFLYLASHYEKLKGSPEDNEQKQLFVEQHKHYLDEIIEQISEFSKRVILADANLDKVLSAYNKHRDKPIREQAENIIHLFTLTNLGAPAAFKYFDTTIDRKRYTSTKEVLDATLIHQSITGLYETRIDLSQLGGDGGGSAGSAAGSGEFGGTLNIEDEYRLHETSKEPDVPLGSTWLSDFPQAWAETGGMGLAVRQAPLIIPLKATSTPVSIKQYPMSQEARLGIKPHIQRLLDQGILVPCQSPWNTPLLPVKKPGTNDYRPVQDLREVNKRVEDIHPTVPNPYNLLSGLPPSHQWYTVLDLKDAFFCLRLHPTSQPLFAFEWRDPEMGISGQLTWTRLPQGFKNSPTLFNEALHRDLADFRIQHPDLILLQYVDDLLLAATSEQDCQRGTRALLQTLGNLGYRASAKKAQICQKQVKYLGYLLKEGQRWLTEARKETVMGQPTPKTPRQLREFLGKAGFCRLFIPGFAEMAAPLYPLTKPGTLFNWGPDQQKAYQEIKQALLTAPALGLPDLTKPFELFVDEKQGYAKGVLTQKLGPWRRPVAYLSKKLDPVAAGWPPCLRMVAAIAVLTKDAGKLTMGQPLVILAPHAVEALVKQPPDRWLSNARMTHYQAMLLDTDRVQFGPVVALNPATLLPLPEKEAPHDCLEILAETHGTRPDLTDQPIPDADYTWYTDGSSFLQEGQRRAGAAVTTETEVIWARALPAGTSAQRAELIALTQALKMAEGKKLNVYTDSRYAFATAHVHGEIYRRRGWLTSEGREIKNKNEILALLKALFLPKRLSIIHCPGHQKGNSAEARGNRMADQAAREAAMKAVLETSTLLAGKRTADGSEFEKRTADGSEFESPKKKAKVE

SEQ ID NO: 1073 - protein, 2094 aa, synthetic construct
MPAAKRVKLDGGDKKYSIGLDIGTNSVGWAVITDEYKVPSKKFKVLGNTDRHSIKKNLIGALLFDSGETAEATRLKRTARRRYTRRKNRICYLQEIFSNEMAKVDDSFFHRLEESFLVEEDKKHERHPIFGNIVDEVAYHEKYPTIYHLRKKLVDSTDKADLRLIYLALAHMIKFRGHFLIEGDLNPDNSDVDKLFIQLVQTYNQLFEENPINASGVDAKAILSARLSKSRRLENLIAQLPGEKKNGLFGNLIALSLGLTPNFKSNFDLAEDAKLQLSKDTYDDDLDNLLAQIGDQYADLFLAAKNLSDAILLSDILRVNTEITKAPLSASMIKRYDEHHQDLTLLKALVRQQLPEKYKEIFFDQSKNGYAGYIDGGASQEEFYKFIKPILEKMDGTEELLVKLNREDLLRKQRTFDNGSIPHQIHLGELHAILRRQEDFYPFLKDNREKIEKILTFRIPYYVGPLARGNSRFAWMTRKSEETITPWNFEEVVDKGASAQSFIERMTNFDKNLPNEKVLPKHSLLYEYFTVYNELTKVKYVTEGMRKPAFLSGEQKKAIVDLLFKTNRKVTVKQLKEDYFKKIECFDSVEISGVEDRFNASLGTYHDLLKIIKDKDFLDNEENEDILEDIVLTLTLFEDREMIEERLKTYAHLFDDKVMKQLKRRRYTGWGRLSRKLINGIRDKQSGKTILDFLKSDGFANRNFMQLIHDDSLTFKEDIQKAQVSGQGDSLHEHIANLAGSPAIKKGILQTVKVVDELVKVMGRHKPENIVIEMARENQTTQKGQKNSRERMKRIEEGIKELGSQILKEHPVENTQLQNEKLYLYYLQNGRDMYVDQELDINRLSDYDVDHIVPQSFLKDDSIDNKVLTRSDKARGKSDNVPSEEVVKKMKNYWRQLLNAKLITQRKFDNLTKAERGGLSELDKAGFIKRQLVETRQITKHVAQILDSRMNTKYDENDKLIREVKVITLKSKLVSDFRKDFQFYKVREINNYHHAHDAYLNAVVGTALIKKYPKLESEFVYGDYKVYDVRKMIAKSEQEIGKATAKYFFYSNIMNFFKTEITLANGEIRKRPLIETNGETGEIVWDKGRDFATVRKVLSMPQVNIVKKTEVQTGGFSKESILPKRNSDKLIARKKDWDPKKYGGFDSPTVAYSVLVVAKVEKGKSKKLKSVKELLGITIMERSSFEKNPIDFLEAKGYKEVKKDLIIKLPKYSLFELENGRKRMLASAGELQKGNELALPSKYVNFLYLASHYEKLKGSPEDNEQKQLFVEQHKHYLDEIIEQISEFSKRVILADANLDKVLSAYNKHRDKPIREQAENIIHLFTLTNLGAPAAFKYFDTTIDRKRYTSTKEVLDATLIHQSITGLYETRIDLSQLGGDGGGGGGSSPAPGGTLNIEDEYRLHETSKEPDVPLGSTWLSDFPQAWAETGGMGLAVRQAPLIIPLKATSTPVSIKQYPMSQEARLGIKPHIQRLLDQGILVPCQSPWNTPLLPVKKPGTNDYRPVQDLREVNKRVEDIHPTVPNPYNLLSGLPPSHQWYTVLDLKDAFFCLRLHPTSQPLFAFEWRDPEMGISGQLTWTRLPQGFKNSPTLFNEALHRDLADFRIQHPDLILLQYVDDLLLAATSEQDCQRGTRALLQTLGNLGYRASAKKAQICQKQVKYLGYLLKEGQRWLTEARKETVMGQPTPKTPRQLREFLGKAGFCRLFIPGFAEMAAPLYPLTKPGTLFNWGPDQQKAYQEIKQALLTAPALGLPDLTKPFELFVDEKQGYAKGVLTQKLGPWRRPVAYLSKKLDPVAAGWPPCLRMVAAIAVLTKDAGKLTMGQPLVILAPHAVEALVKQPPDRWLSNARMTHYQAMLLDTDRVQFGPVVALNPATLLPLPEKEAPHDCLEILAETHGTRPDLTDQPIPDADYTWYTDGSSFLQEGQRRAGAAVTTETEVIWARALPAGTSAQRAELIALTQALKMAEGKKLNVYTDSRYAFATAHVHGEIYRRRGWLTSEGREIKNKNEILALLKALFLPKRLSIIHCPGHQKGNSAEARGNRMADQAAREAAMKAVLETSTLLAGKRTADGSEFEKRTADGSEFESPKKKAKVE

SEQ ID NO: 1074 - protein, 2095 aa, synthetic construct
MPAAKRVKLDGGDKKYSIGLDIGTNSVGWAVITDEYKVPSKKFKVLGNTDRHSIKKNLIGALLFDSGETAEATRLKRTARRRYTRRKNRICYLQEIFSNEMAKVDDSFFHRLEESFLVEEDKKHERHPIFGNIVDEVAYHEKYPTIYHLRKKLVDSTDKADLRLIYLALAHMIKFRGHFLIEGDLNPDNSDVDKLFIQLVQTYNQLFEENPINASGVDAKAILSARLSKSRRLENLIAQLPGEKKNGLFGNLIALSLGLTPNFKSNFDLAEDAKLQLSKDTYDDDLDNLLAQIGDQYADLFLAAKNLSDAILLSDILRVNTEITKAPLSASMIKRYDEHHQDLTLLKALVRQQLPEKYKEIFFDQSKNGYAGYIDGGASQEEFYKFIKPILEKMDGTEELLVKLNREDLLRKQRTFDNGSIPHQIHLGELHAILRRQEDFYPFLKDNREKIEKILTFRIPYYVGPLARGNSRFAWMTRKSEETITPWNFEEVVDKGASAQSFIERMTNFDKNLPNEKVLPKHSLLYEYFTVYNELTKVKYVTEGMRKPAFLSGEQKKAIVDLLFKTNRKVTVKQLKEDYFKKIECFDSVEISGVEDRFNASLGTYHDLLKIIKDKDFLDNEENEDILEDIVLTLTLFEDREMIEERLKTYAHLFDDKVMKQLKRRRYTGWGRLSRKLINGIRDKQSGKTILDFLKSDGFANRNFMQLIHDDSLTFKEDIQKAQVSGQGDSLHEHIANLAGSPAIKKGILQTVKVVDELVKVMGRHKPENIVIEMARENQTTQKGQKNSRERMKRIEEGIKELGSQILKEHPVENTQLQNEKLYLYYLQNGRDMYVDQELDINRLSDYDVDHIVPQSFLKDDSIDNKVLTRSDKARGKSDNVPSEEVVKKMKNYWRQLLNAKLITQRKFDNLTKAERGGLSELDKAGFIKRQLVETRQITKHVAQILDSRMNTKYDENDKLIREVKVITLKSKLVSDFRKDFQFYKVREINNYHHAHDAYLNAVVGTALIKKYPKLESEFVYGDYKVYDVRKMIAKSEQEIGKATAKYFFYSNIMNFFKTEITLANGEIRKRPLIETNGETGEIVWDKGRDFATVRKVLSMPQVNIVKKTEVQTGGFSKESILPKRNSDKLIARKKDWDPKKYGGFDSPTVAYSVLVVAKVEKGKSKKLKSVKELLGITIMERSSFEKNPIDFLEAKGYKEVKKDLIIKLPKYSLFELENGRKRMLASAGELQKGNELALPSKYVNFLYLASHYEKLKGSPEDNEQKQLFVEQHKHYLDEIIEQISEFSKRVILADANLDKVLSAYNKHRDKPIREQAENIIHLFTLTNLGAPAAFKYFDTTIDRKRYTSTKEVLDATLIHQSITGLYETRIDLSQLGGDGGGGGGSGGGGSGGTLNIEDEYRLHETSKEPDVPLGSTWLSDFPQAWAETGGMGLAVRQAPLIIPLKATSTPVSIKQYPMSQEARLGIKPHIQRLLDQGILVPCQSPWNTPLLPVKKPGTNDYRPVQDLREVNKRVEDIHPTVPNPYNLLSGLPPSHQWYTVLDLKDAFFCLRLHPTSQPLFAFEWRDPEMGISGQLTWTRLPQGFKNSPTLFNEALHRDLADFRIQHPDLILLQYVDDLLLAATSEQDCQRGTRALLQTLGNLGYRASAKKAQICQKQVKYLGYLLKEGQRWLTEARKETVMGQPTPKTPRQLREFLGKAGFCRLFIPGFAEMAAPLYPLTKPGTLFNWGPDQQKAYQEIKQALLTAPALGLPDLTKPFELFVDEKQGYAKGVLTQKLGPWRRPVAYLSKKLDPVAAGWPPCLRMVAAIAVLTKDAGKLTMGQPLVILAPHAVEALVKQPPDRWLSNARMTHYQAMLLDTDRVQFGPVVALNPATLLPLPEKEAPHDCLEILAETHGTRPDLTDQPIPDADYTWYTDGSSFLQEGQRRAGAAVTTETEVIWARALPAGTSAQRAELIALTQALKMAEGKKLNVYTDSRYAFATAHVHGEIYRRRGWLTSEGREIKNKNEILALLKALFLPKRLSIIHCPGHQKGNSAEARGNRMADQAAREAAMKAVLETSTLLAGKRTADGSEFEKRTADGSEFESPKKKAKVE

SEQ ID NO: 1075 - protein, 2096 aa, synthetic construct
MPAAKRVKLDGGDKKYSIGLDIGTNSVGWAVITDEYKVPSKKFKVLGNTDRHSIKKNLIGALLFDSGETAEATRLKRTARRRYTRRKNRICYLQEIFSNEMAKVDDSFFHRLEESFLVEEDKKHERHPIFGNIVDEVAYHEKYPTIYHLRKKLVDSTDKADLRLIYLALAHMIKFRGHFLIEGDLNPDNSDVDKLFIQLVQTYNQLFEENPINASGVDAKAILSARLSKSRRLENLIAQLPGEKKNGLFGNLIALSLGLTPNFKSNFDLAEDAKLQLSKDTYDDDLDNLLAQIGDQYADLFLAAKNLSDAILLSDILRVNTEITKAPLSASMIKRYDEHHQDLTLLKALVRQQLPEKYKEIFFDQSKNGYAGYIDGGASQEEFYKFIKPILEKMDGTEELLVKLNREDLLRKQRTFDNGSIPHQIHLGELHAILRRQEDFYPFLKDNREKIEKILTFRIPYYVGPLARGNSRFAWMTRKSEETITPWNFEEVVDKGASAQSFIERMTNFDKNLPNEKVLPKHSLLYEYFTVYNELTKVKYVTEGMRKPAFLSGEQKKAIVDLLFKTNRKVTVKQLKEDYFKKIECFDSVEISGVEDRFNASLGTYHDLLKIIKDKDFLDNEENEDILEDIVLTLTLFEDREMIEERLKTYAHLFDDKVMKQLKRRRYTGWGRLSRKLINGIRDKQSGKTILDFLKSDGFANRNFMQLIHDDSLTFKEDIQKAQVSGQGDSLHEHIANLAGSPAIKKGILQTVKVVDELVKVMGRHKPENIVIEMARENQTTQKGQKNSRERMKRIEEGIKELGSQILKEHPVENTQLQNEKLYLYYLQNGRDMYVDQELDINRLSDYDVDHIVPQSFLKDDSIDNKVLTRSDKARGKSDNVPSEEVVKKMKNYWRQLLNAKLITQRKFDNLTKAERGGLSELDKAGFIKRQLVETRQITKHVAQILDSRMNTKYDENDKLIREVKVITLKSKLVSDFRKDFQFYKVREINNYHHAHDAYLNAVVGTALIKKYPKLESEFVYGDYKVYDVRKMIAKSEQEIGKATAKYFFYSNIMNFFKTEITLANGEIRKRPLIETNGETGEIVWDKGRDFATVRKVLSMPQVNIVKKTEVQTGGFSKESILPKRNSDKLIARKKDWDPKKYGGFDSPTVAYSVLVVAKVEKGKSKKLKSVKELLGITIMERSSFEKNPIDFLEAKGYKEVKKDLIIKLPKYSLFELENGRKRMLASAGELQKGNELALPSKYVNFLYLASHYEKLKGSPEDNEQKQLFVEQHKHYLDEIIEQISEFSKRVILADANLDKVLSAYNKHRDKPIREQAENIIHLFTLTNLGAPAAFKYFDTTIDRKRYTSTKEVLDATLIHQSITGLYETRIDLSQLGGDGGGSSEAAAKGGSGGTLNIEDEYRLHETSKEPDVPLGSTWLSDFPQAWAETGGMGLAVRQAPLIIPLKATSTPVSIKQYPMSQEARLGIKPHIQRLLDQGILVPCQSPWNTPLLPVKKPGTNDYRPVQDLREVNKRVEDIHPTVPNPYNLLSGLPPSHQWYTVLDLKDAFFCLRLHPTSQPLFAFEWRDPEMGISGQLTWTRLPQGFKNSPTLFNEALHRDLADFRIQHPDLILLQYVDDLLLAATSEQDCQRGTRALLQTLGNLGYRASAKKAQICQKQVKYLGYLLKEGQRWLTEARKETVMGQPTPKTPRQLREFLGKAGFCRLFIPGFAEMAAPLYPLTKPGTLFNWGPDQQKAYQEIKQALLTAPALGLPDLTKPFELFVDEKQGYAKGVLTQKLGPWRRPVAYLSKKLDPVAAGWPPCLRMVAAIAVLTKDAGKLTMGQPLVILAPHAVEALVKQPPDRWLSNARMTHYQAMLLDTDRVQFGPVVALNPATLLPLPEKEAPHDCLEILAETHGTRPDLTDQPIPDADYTWYTDGSSFLQEGQRRAGAAVTTETEVIWARALPAGTSAQRAELIALTQALKMAEGKKLNVYTDSRYAFATAHVHGEIYRRRGWLTSEGREIKNKNEILALLKALFLPKRLSIIHCPGHQKGNSAEARGNRMADQAAREAAMKAVLETSTLLAGKRTADGSEFEKRTADGSEFESPKKKAKVE

SEQ ID NO: 1076 - protein, 2096 aa, synthetic construct
MPAAKRVKLDGGDKKYSIGLDIGTNSVGWAVITDEYKVPSKKFKVLGNTDRHSIKKNLIGALLFDSGETAEATRLKRTARRRYTRRKNRICYLQEIFSNEMAKVDDSFFHRLEESFLVEEDKKHERHPIFGNIVDEVAYHEKYPTIYHLRKKLVDSTDKADLRLIYLALAHMIKFRGHFLIEGDLNPDNSDVDKLFIQLVQTYNQLFEENPINASGVDAKAILSARLSKSRRLENLIAQLPGEKKNGLFGNLIALSLGLTPNFKSNFDLAEDAKLQLSKDTYDDDLDNLLAQIGDQYADLFLAAKNLSDAILLSDILRVNTEITKAPLSASMIKRYDEHHQDLTLLKALVRQQLPEKYKEIFFDQSKNGYAGYIDGGASQEEFYKFIKPILEKMDGTEELLVKLNREDLLRKQRTFDNGSIPHQIHLGELHAILRRQEDFYPFLKDNREKIEKILTFRIPYYVGPLARGNSRFAWMTRKSEETITPWNFEEVVDKGASAQSFIERMTNFDKNLPNEKVLPKHSLLYEYFTVYNELTKVKYVTEGMRKPAFLSGEQKKAIVDLLFKTNRKVTVKQLKEDYFKKIECFDSVEISGVEDRFNASLGTYHDLLKIIKDKDFLDNEENEDILEDIVLTLTLFEDREMIEERLKTYAHLFDDKVMKQLKRRRYTGWGRLSRKLINGIRDKQSGKTILDFLKSDGFANRNFMQLIHDDSLTFKEDIQKAQVSGQGDSLHEHIANLAGSPAIKKGILQTVKVVDELVKVMGRHKPENIVIEMARENQTTQKGQKNSRERMKRIEEGIKELGSQILKEHPVENTQLQNEKLYLYYLQNGRDMYVDQELDINRLSDYDVDHIVPQSFLKDDSIDNKVLTRSDKARGKSDNVPSEEVVKKMKNYWRQLLNAKLITQRKFDNLTKAERGGLSELDKAGFIKRQLVETRQITKHVAQILDSRMNTKYDENDKLIREVKVITLKSKLVSDFRKDFQFYKVREINNYHHAHDAYLNAVVGTALIKKYPKLESEFVYGDYKVYDVRKMIAKSEQEIGKATAKYFFYSNIMNFFKTEITLANGEIRKRPLIETNGETGEIVWDKGRDFATVRKVLSMPQVNIVKKTEVQTGGFSKESILPKRNSDKLIARKKDWDPKKYGGFDSPTVAYSVLVVAKVEKGKSKKLKSVKELLGITIMERSSFEKNPIDFLEAKGYKEVKKDLIIKLPKYSLFELENGRKRMLASAGELQKGNELALPSKYVNFLYLASHYEKLKGSPEDNEQKQLFVEQHKHYLDEIIEQISEFSKRVILADANLDKVLSAYNKHRDKPIREQAENIIHLFTLTNLGAPAAFKYFDTTIDRKRYTSTKEVLDATLIHQSITGLYETRIDLSQLGGDGGGGGPAPEAAAKGGTLNIEDEYRLHETSKEPDVPLGSTWLSDFPQAWAETGGMGLAVRQAPLIIPLKATSTPVSIKQYPMSQEARLGIKPHIQRLLDQGILVPCQSPWNTPLLPVKKPGTNDYRPVQDLREVNKRVEDIHPTVPNPYNLLSGLPPSHQWYTVLDLKDAFFCLRLHPTSQPLFAFEWRDPEMGISGQLTWTRLPQGFKNSPTLFNEALHRDLADFRIQHPDLILLQYVDDLLLAATSEQDCQRGTRALLQTLGNLGYRASAKKAQICQKQVKYLGYLLKEGQRWLTEARKETVMGQPTPKTPRQLREFLGKAGFCRLFIPGFAEMAAPLYPLTKPGTLFNWGPDQQKAYQEIKQALLTAPALGLPDLTKPFELFVDEKQGYAKGVLTQKLGPWRRPVAYLSKKLDPVAAGWPPCLRMVAAIAVLTKDAGKLTMGQPLVILAPHAVEALVKQPPDRWLSNARMTHYQAMLLDTDRVQFGPVVALNPATLLPLPEKEAPHDCLEILAETHGTRPDLTDQPIPDADYTWYTDGSSFLQEGQRRAGAAVTTETEVIWARALPAGTSAQRAELIALTQALKMAEGKKLNVYTDSRYAFATAHVHGEIYRRRGWLTSEGREIKNKNEILALLKALFLPKRLSIIHCPGHQKGNSAEARGNRMADQAAREAAMKAVLETSTLLAGKRTADGSEFEKRTADGSEFESPKKKAKVE

SEQ ID NO: 1077 - protein, 2097 aa, synthetic construct
MPAAKRVKLDGGDKKYSIGLDIGTNSVGWAVITDEYKVPSKKFKVLGNTDRHSIKKNLIGALLFDSGETAEATRLKRTARRRYTRRKNRICYLQEIFSNEMAKVDDSFFHRLEESFLVEEDKKHERHPIFGNIVDEVAYHEKYPTIYHLRKKLVDSTDKADLRLIYLALAHMIKFRGHFLIEGDLNPDNSDVDKLFIQLVQTYNQLFEENPINASGVDAKAILSARLSKSRRLENLIAQLPGEKKNGLFGNLIALSLGLTPNFKSNFDLAEDAKLQLSKDTYDDDLDNLLAQIGDQYADLFLAAKNLSDAILLSDILRVNTEITKAPLSASMIKRYDEHHQDLTLLKALVRQQLPEKYKEIFFDQSKNGYAGYIDGGASQEEFYKFIKPILEKMDGTEELLVKLNREDLLRKQRTFDNGSIPHQIHLGELHAILRRQEDFYPFLKDNREKIEKILTFRIPYYVGPLARGNSRFAWMTRKSEETITPWNFEEVVDKGASAQSFIERMTNFDKNLPNEKVLPKHSLLYEYFTVYNELTKVKYVTEGMRKPAFLSGEQKKAIVDLLFKTNRKVTVKQLKEDYFKKIECFDSVEISGVEDRFNASLGTYHDLLKIIKDKDFLDNEENEDILEDIVLTLTLFEDREMIEERLKTYAHLFDDKVMKQLKRRRYTGWGRLSRKLINGIRDKQSGKTILDFLKSDGFANRNFMQLIHDDSLTFKEDIQKAQVSGQGDSLHEHIANLAGSPAIKKGILQTVKVVDELVKVMGRHKPENIVIEMARENQTTQKGQKNSRERMKRIEEGIKELGSQILKEHPVENTQLQNEKLYLYYLQNGRDMYVDQELDINRLSDYDVDHIVPQSFLKDDSIDNKVLTRSDKARGKSDNVPSEEVVKKMKNYWRQLLNAKLITQRKFDNLTKAERGGLSELDKAGFIKRQLVETRQITKHVAQILDSRMNTKYDENDKLIREVKVITLKSKLVSDFRKDFQFYKVREINNYHHAHDAYLNAVVGTALIKKYPKLESEFVYGDYKVYDVRKMIAKSEQEIGKATAKYFFYSNIMNFFKTEITLANGEIRKRPLIETNGETGEIVWDKGRDFATVRKVLSMPQVNIVKKTEVQTGGFSKESILPKRNSDKLIARKKDWDPKKYGGFDSPTVAYSVLVVAKVEKGKSKKLKSVKELLGITIMERSSFEKNPIDFLEAKGYKEVKKDLIIKLPKYSLFELENGRKRMLASAGELQKGNELALPSKYVNFLYLASHYEKLKGSPEDNEQKQLFVEQHKHYLDEIIEQISEFSKRVILADANLDKVLSAYNKHRDKPIREQAENIIHLFTLTNLGAPAAFKYFDTTIDRKRYTSTKEVLDATLIHQSITGLYETRIDLSQLGGDGGGSSGSSGSSGSSGGTLNIEDEYRLHETSKEPDVPLGSTWLSDFPQAWAETGGMGLAVRQAPLIIPLKATSTPVSIKQYPMSQEARLGIKPHIQRLLDQGILVPCQSPWNTPLLPVKKPGTNDYRPVQDLREVNKRVEDIHPTVPNPYNLLSGLPPSHQWYTVLDLKDAFFCLRLHPTSQPLFAFEWRDPEMGISGQLTWTRLPQGFKNSPTLFNEALHRDLADFRIQHPDLILLQYVDDLLLAATSEQDCQRGTRALLQTLGNLGYRASAKKAQICQKQVKYLGYLLKEGQRWLTEARKETVMGQPTPKTPRQLREFLGKAGFCRLFIPGFAEMAAPLYPLTKPGTLFNWGPDQQKAYQEIKQALLTAPALGLPDLTKPFELFVDEKQGYAKGVLTQKLGPWRRPVAYLSKKLDPVAAGWPPCLRMVAAIAVLTKDAGKLTMGQPLVILAPHAVEALVKQPPDRWLSNARMTHYQAMLLDTDRVQFGPVVALNPATLLPLPEKEAPHDCLEILAETHGTRPDLTDQPIPDADYTWYTDGSSFLQEGQRRAGAAVTTETEVIWARALPAGTSAQRAELIALTQALKMAEGKKLNVYTDSRYAFATAHVHGEIYRRRGWLTSEGREIKNKNEILALLKALFLPKRLSIIHCPGHQKGNSAEARGNRMADQAAREAAMKAVLETSTLLAGKRTADGSEFEKRTADGSEFESPKKKAKVE

SEQ ID NO: 1078 - protein, 2093 aa, synthetic construct
MPAAKRVKLDGGDKKYSIGLDIGTNSVGWAVITDEYKVPSKKFKVLGNTDRHSIKKNLIGALLFDSGETAEATRLKRTARRRYTRRKNRICYLQEIFSNEMAKVDDSFFHRLEESFLVEEDKKHERHPIFGNIVDEVAYHEKYPTIYHLRKKLVDSTDKADLRLIYLALAHMIKFRGHFLIEGDLNPDNSDVDKLFIQLVQTYNQLFEENPINASGVDAKAILSARLSKSRRLENLIAQLPGEKKNGLFGNLIALSLGLTPNFKSNFDLAEDAKLQLSKDTYDDDLDNLLAQIGDQYADLFLAAKNLSDAILLSDILRVNTEITKAPLSASMIKRYDEHHQDLTLLKALVRQQLPEKYKEIFFDQSKNGYAGYIDGGASQEEFYKFIKPILEKMDGTEELLVKLNREDLLRKQRTFDNGSIPHQIHLGELHAILRRQEDFYPFLKDNREKIEKILTFRIPYYVGPLARGNSRFAWMTRKSEETITPWNFEEVVDKGASAQSFIERMTNFDKNLPNEKVLPKHSLLYEYFTVYNELTKVKYVTEGMRKPAFLSGEQKKAIVDLLFKTNRKVTVKQLKEDYFKKIECFDSVEISGVEDRFNASLGTYHDLLKIIKDKDFLDNEENEDILEDIVLTLTLFEDREMIEERLKTYAHLFDDKVMKQLKRRRYTGWGRLSRKLINGIRDKQSGKTILDFLKSDGFANRNFMQLIHDDSLTFKEDIQKAQVSGQGDSLHEHIANLAGSPAIKKGILQTVKVVDELVKVMGRHKPENIVIEMARENQTTQKGQKNSRERMKRIEEGIKELGSQILKEHPVENTQLQNEKLYLYYLQNGRDMYVDQELDINRLSDYDVDHIVPQSFLKDDSIDNKVLTRSDKARGKSDNVPSEEVVKKMKNYWRQLLNAKLITQRKFDNLTKAERGGLSELDKAGFIKRQLVETRQITKHVAQILDSRMNTKYDENDKLIREVKVITLKSKLVSDFRKDFQFYKVREINNYHHAHDAYLNAVVGTALIKKYPKLESEFVYGDYKVYDVRKMIAKSEQEIGKATAKYFFYSNIMNFFKTEITLANGEIRKRPLIETNGETGEIVWDKGRDFATVRKVLSMPQVNIVKKTEVQTGGFSKESILPKRNSDKLIARKKDWDPKKYGGFDSPTVAYSVLVVAKVEKGKSKKLKSVKELLGITIMERSSFEKNPIDFLEAKGYKEVKKDLIIKLPKYSLFELENGRKRMLASAGELQKGNELALPSKYVNFLYLASHYEKLKGSPEDNEQKQLFVEQHKHYLDEIIEQISEFSKRVILADANLDKVLSAYNKHRDKPIREQAENIIHLFTLTNLGAPAAFKYFDTTIDRKRYTSTKEVLDATLIHQSITGLYETRIDLSQLGGDGGEAAAKGSSGGTLNIEDEYRLHETSKEPDVPLGSTWLSDFPQAWAETGGMGLAVRQAPLIIPLKATSTPVSIKQYPMSQEARLGIKPHIQRLLDQGILVPCQSPWNTPLLPVKKPGTNDYRPVQDLREVNKRVEDIHPTVPNPYNLLSGLPPSHQWYTVLDLKDAFFCLRLHPTSQPLFAFEWRDPEMGISGQLTWTRLPQGFKNSPTLFNEALHRDLADFRIQHPDLILLQYVDDLLLAATSEQDCQRGTRALLQTLGNLGYRASAKKAQICQKQVKYLGYLLKEGQRWLTEARKETVMGQPTPKTPRQLREFLGKAGFCRLFIPGFAEMAAPLYPLTKPGTLFNWGPDQQKAYQEIKQALLTAPALGLPDLTKPFELFVDEKQGYAKGVLTQKLGPWRRPVAYLSKKLDPVAAGWPPCLRMVAAIAVLTKDAGKLTMGQPLVILAPHAVEALVKQPPDRWLSNARMTHYQAMLLDTDRVQFGPVVALNPATLLPLPEKEAPHDCLEILAETHGTRPDLTDQPIPDADYTWYTDGSSFLQEGQRRAGAAVTTETEVIWARALPAGTSAQRAELIALTQALKMAEGKKLNVYTDSRYAFATAHVHGEIYRRRGWLTSEGREIKNKNEILALLKALFLPKRLSIIHCPGHQKGNSAEARGNRMADQAAREAAMKAVLETSTLLAGKRTADGSEFEKRTADGSEFESPKKKAKVE

SEQ ID NO: 1079 - protein, 2100 aa, synthetic construct
MPAAKRVKLDGGDKKYSIGLDIGTNSVGWAVITDEYKVPSKKFKVLGNTDRHSIKKNLIGALLFDSGETAEATRLKRTARRRYTRRKNRICYLQEIFSNEMAKVDDSFFHRLEESFLVEEDKKHERHPIFGNIVDEVAYHEKYPTIYHLRKKLVDSTDKADLRLIYLALAHMIKFRGHFLIEGDLNPDNSDVDKLFIQLVQTYNQLFEENPINASGVDAKAILSARLSKSRRLENLIAQLPGEKKNGLFGNLIALSLGLTPNFKSNFDLAEDAKLQLSKDTYDDDLDNLLAQIGDQYADLFLAAKNLSDAILLSDILRVNTEITKAPLSASMIKRYDEHHQDLTLLKALVRQQLPEKYKEIFFDQSKNGYAGYIDGGASQEEFYKFIKPILEKMDGTEELLVKLNREDLLRKQRTFDNGSIPHQIHLGELHAILRRQEDFYPFLKDNREKIEKILTFRIPYYVGPLARGNSRFAWMTRKSEETITPWNFEEVVDKGASAQSFIERMTNFDKNLPNEKVLPKHSLLYEYFTVYNELTKVKYVTEGMRKPAFLSGEQKKAIVDLLFKTNRKVTVKQLKEDYFKKIECFDSVEISGVEDRFNASLGTYHDLLKIIKDKDFLDNEENEDILEDIVLTLTLFEDREMIEERLKTYAHLFDDKVMKQLKRRRYTGWGRLSRKLINGIRDKQSGKTILDFLKSDGFANRNFMQLIHDDSLTFKEDIQKAQVSGQGDSLHEHIANLAGSPAIKKGILQTVKVVDELVKVMGRHKPENIVIEMARENQTTQKGQKNSRERMKRIEEGIKELGSQILKEHPVENTQLQNEKLYLYYLQNGRDMYVDQELDINRLSDYDVDHIVPQSFLKDDSIDNKVLTRSDKARGKSDNVPSEEVVKKMKNYWRQLLNAKLITQRKFDNLTKAERGGLSELDKAGFIKRQLVETRQITKHVAQILDSRMNTKYDENDKLIREVKVITLKSKLVSDFRKDFQFYKVREINNYHHAHDAYLNAVVGTALIKKYPKLESEFVYGDYKVYDVRKMIAKSEQEIGKATAKYFFYSNIMNFFKTEITLANGEIRKRPLIETNGETGEIVWDKGRDFATVRKVLSMPQVNIVKKTEVQTGGFSKESILPKRNSDKLIARKKDWDPKKYGGFDSPTVAYSVLVVAKVEKGKSKKLKSVKELLGITIMERSSFEKNPIDFLEAKGYKEVKKDLIIKLPKYSLFELENGRKRMLASAGELQKGNELALPSKYVNFLYLASHYEKLKGSPEDNEQKQLFVEQHKHYLDEIIEQISEFSKRVILADANLDKVLSAYNKHRDKPIREQAENIIHLFTLTNLGAPAAFKYFDTTIDRKRYTSTKEVLDATLIHQSITGLYETRIDLSQLGGDGGGGGGSEAAAKGGGGSGGTLNIEDEYRLHETSKEPDVPLGSTWLSDFPQAWAETGGMGLAVRQAPLIIPLKATSTPVSIKQYPMSQEARLGIKPHIQRLLDQGILVPCQSPWNTPLLPVKKPGTNDYRPVQDLREVNKRVEDIHPTVPNPYNLLSGLPPSHQWYTVLDLKDAFFCLRLHPTSQPLFAFEWRDPEMGISGQLTWTRLPQGFKNSPTLFNEALHRDLADFRIQHPDLILLQYVDDLLLAATSEQDCQRGTRALLQTLGNLGYRASAKKAQICQKQVKYLGYLLKEGQRWLTEARKETVMGQPTPKTPRQLREFLGKAGFCRLFIPGFAEMAAPLYPLTKPGTLFNWGPDQQKAYQEIKQALLTAPALGLPDLTKPFELFVDEKQGYAKGVLTQKLGPWRRPVAYLSKKLDPVAAGWPPCLRMVAAIAVLTKDAGKLTMGQPLVILAPHAVEALVKQPPDRWLSNARMTHYQAMLLDTDRVQFGPVVALNPATLLPLPEKEAPHDCLEILAETHGTRPDLTDQPIPDADYTWYTDGSSFLQEGQRRAGAAVTTETEVIWARALPAGTSAQRAELIALTQALKMAEGKKLNVYTDSRYAFATAHVHGEIYRRRGWLTSEGREIKNKNEILALLKALFLPKRLSIIHCPGHQKGNSAEARGNRMADQAAREAAMKAVLETSTLLAGKRTADGSEFEKRTADGSEFESPKKKAKVE

SEQ ID NO: 1080 - protein, 2088 aa, synthetic construct
MPAAKRVKLDGGDKKYSIGLDIGTNSVGWAVITDEYKVPSKKFKVLGNTDRHSIKKNLIGALLFDSGETAEATRLKRTARRRYTRRKNRICYLQEIFSNEMAKVDDSFFHRLEESFLVEEDKKHERHPIFGNIVDEVAYHEKYPTIYHLRKKLVDSTDKADLRLIYLALAHMIKFRGHFLIEGDLNPDNSDVDKLFIQLVQTYNQLFEENPINASGVDAKAILSARLSKSRRLENLIAQLPGEKKNGLFGNLIALSLGLTPNFKSNFDLAEDAKLQLSKDTYDDDLDNLLAQIGDQYADLFLAAKNLSDAILLSDILRVNTEITKAPLSASMIKRYDEHHQDLTLLKALVRQQLPEKYKEIFFDQSKNGYAGYIDGGASQEEFYKFIKPILEKMDGTEELLVKLNREDLLRKQRTFDNGSIPHQIHLGELHAILRRQEDFYPFLKDNREKIEKILTFRIPYYVGPLARGNSRFAWMTRKSEETITPWNFEEVVDKGASAQSFIERMTNFDKNLPNEKVLPKHSLLYEYFTVYNELTKVKYVTEGMRKPAFLSGEQKKAIVDLLFKTNRKVTVKQLKEDYFKKIECFDSVEISGVEDRFNASLGTYHDLLKIIKDKDFLDNEENEDILEDIVLTLTLFEDREMIEERLKTYAHLFDDKVMKQLKRRRYTGWGRLSRKLINGIRDKQSGKTILDFLKSDGFANRNFMQLIHDDSLTFKEDIQKAQVSGQGDSLHEHIANLAGSPAIKKGILQTVKVVDELVKVMGRHKPENIVIEMARENQTTQKGQKNSRERMKRIEEGIKELGSQILKEHPVENTQLQNEKLYLYYLQNGRDMYVDQELDINRLSDYDVDHIVPQSFLKDDSIDNKVLTRSDKARGKSDNVPSEEVVKKMKNYWRQLLNAKLITQRKFDNLTKAERGGLSELDKAGFIKRQLVETRQITKHVAQILDSRMNTKYDENDKLIREVKVITLKSKLVSDFRKDFQFYKVREINNYHHAHDAYLNAVVGTALIKKYPKLESEFVYGDYKVYDVRKMIAKSEQEIGKATAKYFFYSNIMNFFKTEITLANGEIRKRPLIETNGETGEIVWDKGRDFATVRKVLSMPQVNIVKKTEVQTGGFSKESILPKRNSDKLIARKKDWDPKKYGGFDSPTVAYSVLVVAKVEKGKSKKLKSVKELLGITIMERSSFEKNPIDFLEAKGYKEVKKDLIIKLPKYSLFELENGRKRMLASAGELQKGNELALPSKYVNFLYLASHYEKLKGSPEDNEQKQLFVEQHKHYLDEIIEQISEFSKRVILADANLDKVLSAYNKHRDKPIREQAENIIHLFTLTNLGAPAAFKYFDTTIDRKRYTSTKEVLDATLIHQSITGLYETRIDLSQLGGDGGGGGGGTLNIEDEYRLHETSKEPDVPLGSTWLSDFPQAWAETGGMGLAVRQAPLIIPLKATSTPVSIKQYPMSQEARLGIKPHIQRLLDQGILVPCQSPWNTPLLPVKKPGTNDYRPVQDLREVNKRVEDIHPTVPNPYNLLSGLPPSHQWYTVLDLKDAFFCLRLHPTSQPLFAFEWRDPEMGISGQLTWTRLPQGFKNSPTLFNEALHRDLADFRIQHPDLILLQYVDDLLLAATSEQDCQRGTRALLQTLGNLGYRASAKKAQICQKQVKYLGYLLKEGQRWLTEARKETVMGQPTPKTPRQLREFLGKAGFCRLFIPGFAEMAAPLYPLTKPGTLFNWGPDQQKAYQEIKQALLTAPALGLPDLTKPFELFVDEKQGYAKGVLTQKLGPWRRPVAYLSKKLDPVAAGWPPCLRMVAAIAVLTKDAGKLTMGQPLVILAPHAVEALVKQPPDRWLSNARMTHYQAMLLDTDRVQFGPVVALNPATLLPLPEKEAPHDCLEILAETHGTRPDLTDQPIPDADYTWYTDGSSFLQEGQRRAGAAVTTETEVIWARALPAGTSAQRAELIALTQALKMAEGKKLNVYTDSRYAFATAHVHGEIYRRRGWLTSEGREIKNKNEILALLKALFLPKRLSIIHCPGHQKGNSAEARGNRMADQAAREAAMKAVLETSTLLAGKRTADGSEFEKRTADGSEFESPKKKAKVE

SEQ ID NO: 1081 - protein, 2096 aa, synthetic construct
MPAAKRVKLDGGDKKYSIGLDIGTNSVGWAVITDEYKVPSKKFKVLGNTDRHSIKKNLIGALLFDSGETAEATRLKRTARRRYTRRKNRICYLQEIFSNEMAKVDDSFFHRLEESFLVEEDKKHERHPIFGNIVDEVAYHEKYPTIYHLRKKLVDSTDKADLRLIYLALAHMIKFRGHFLIEGDLNPDNSDVDKLFIQLVQTYNQLFEENPINASGVDAKAILSARLSKSRRLENLIAQLPGEKKNGLFGNLIALSLGLTPNFKSNFDLAEDAKLQLSKDTYDDDLDNLLAQIGDQYADLFLAAKNLSDAILLSDILRVNTEITKAPLSASMIKRYDEHHQDLTLLKALVRQQLPEKYKEIFFDQSKNGYAGYIDGGASQEEFYKFIKPILEKMDGTEELLVKLNREDLLRKQRTFDNGSIPHQIHLGELHAILRRQEDFYPFLKDNREKIEKILTFRIPYYVGPLARGNSRFAWMTRKSEETITPWNFEEVVDKGASAQSFIERMTNFDKNLPNEKVLPKHSLLYEYFTVYNELTKVKYVTEGMRKPAFLSGEQKKAIVDLLFKTNRKVTVKQLKEDYFKKIECFDSVEISGVEDRFNASLGTYHDLLKIIKDKDFLDNEENEDILEDIVLTLTLFEDREMIEERLKTYAHLFDDKVMKQLKRRRYTGWGRLSRKLINGIRDKQSGKTILDFLKSDGFANRNFMQLIHDDSLTFKEDIQKAQVSGQGDSLHEHIANLAGSPAIKKGILQTVKVVDELVKVMGRHKPENIVIEMARENQTTQKGQKNSRERMKRIEEGIKELGSQILKEHPVENTQLQNEKLYLYYLQNGRDMYVDQELDINRLSDYDVDHIVPQSFLKDDSIDNKVLTRSDKARGKSDNVPSEEVVKKMKNYWRQLLNAKLITQRKFDNLTKAERGGLSELDKAGFIKRQLVETRQITKHVAQILDSRMNTKYDENDKLIREVKVITLKSKLVSDFRKDFQFYKVREINNYHHAHDAYLNAVVGTALIKKYPKLESEFVYGDYKVYDVRKMIAKSEQEIGKATAKYFFYSNIMNFFKTEITLANGEIRKRPLIETNGETGEIVWDKGRDFATVRKVLSMPQVNIVKKTEVQTGGFSKESILPKRNSDKLIARKKDWDPKKYGGFDSPTVAYSVLVVAKVEKGKSKKLKSVKELLGITIMERSSFEKNPIDFLEAKGYKEVKKDLIIKLPKYSLFELENGRKRMLASAGELQKGNELALPSKYVNFLYLASHYEKLKGSPEDNEQKQLFVEQHKHYLDEIIEQISEFSKRVILADANLDKVLSAYNKHRDKPIREQAENIIHLFTLTNLGAPAAFKYFDTTIDRKRYTSTKEVLDATLIHQSITGLYETRIDLSQLGGDGGGGSEAAAKGGGGGTLNIEDEYRLHETSKEPDVPLGSTWLSDFPQAWAETGGMGLAVRQAPLIIPLKATSTPVSIKQYPMSQEARLGIKPHIQRLLDQGILVPCQSPWNTPLLPVKKPGTNDYRPVQDLREVNKRVEDIHPTVPNPYNLLSGLPPSHQWYTVLDLKDAFFCLRLHPTSQPLFAFEWRDPEMGISGQLTWTRLPQGFKNSPTLFNEALHRDLADFRIQHPDLILLQYVDDLLLAATSEQDCQRGTRALLQTLGNLGYRASAKKAQICQKQVKYLGYLLKEGQRWLTEARKETVMGQPTPKTPRQLREFLGKAGFCRLFIPGFAEMAAPLYPLTKPGTLFNWGPDQQKAYQEIKQALLTAPALGLPDLTKPFELFVDEKQGYAKGVLTQKLGPWRRPVAYLSKKLDPVAAGWPPCLRMVAAIAVLTKDAGKLTMGQPLVILAPHAVEALVKQPPDRWLSNARMTHYQAMLLDTDRVQFGPVVALNPATLLPLPEKEAPHDCLEILAETHGTRPDLTDQPIPDADYTWYTDGSSFLQEGQRRAGAAVTTETEVIWARALPAGTSAQRAELIALTQALKMAEGKKLNVYTDSRYAFATAHVHGEIYRRRGWLTSEGREIKNKNEILALLKALFLPKRLSIIHCPGHQKGNSAEARGNRMADQAAREAAMKAVLETSTLLAGKRTADGSEFEKRTADGSEFESPKKKAKVE

SEQ ID NO: 1082 - protein, 2094 aa, synthetic construct
MPAAKRVKLDGGDKKYSIGLDIGTNSVGWAVITDEYKVPSKKFKVLGNTDRHSIKKNLIGALLFDSGETAEATRLKRTARRRYTRRKNRICYLQEIFSNEMAKVDDSFFHRLEESFLVEEDKKHERHPIFGNIVDEVAYHEKYPTIYHLRKKLVDSTDKADLRLIYLALAHMIKFRGHFLIEGDLNPDNSDVDKLFIQLVQTYNQLFEENPINASGVDAKAILSARLSKSRRLENLIAQLPGEKKNGLFGNLIALSLGLTPNFKSNFDLAEDAKLQLSKDTYDDDLDNLLAQIGDQYADLFLAAKNLSDAILLSDILRVNTEITKAPLSASMIKRYDEHHQDLTLLKALVRQQLPEKYKEIFFDQSKNGYAGYIDGGASQEEFYKFIKPILEKMDGTEELLVKLNREDLLRKQRTFDNGSIPHQIHLGELHAILRRQEDFYPFLKDNREKIEKILTFRIPYYVGPLARGNSRFAWMTRKSEETITPWNFEEVVDKGASAQSFIERMTNFDKNLPNEKVLPKHSLLYEYFTVYNELTKVKYVTEGMRKPAFLSGEQKKAIVDLLFKTNRKVTVKQLKEDYFKKIECFDSVEISGVEDRFNASLGTYHDLLKIIKDKDFLDNEENEDILEDIVLTLTLFEDREMIEERLKTYAHLFDDKVMKQLKRRRYTGWGRLSRKLINGIRDKQSGKTILDFLKSDGFANRNFMQLIHDDSLTFKEDIQKAQVSGQGDSLHEHIANLAGSPAIKKGILQTVKVVDELVKVMGRHKPENIVIEMARENQTTQKGQKNSRERMKRIEEGIKELGSQILKEHPVENTQLQNEKLYLYYLQNGRDMYVDQELDINRLSDYDVDHIVPQSFLKDDSIDNKVLTRSDKARGKSDNVPSEEVVKKMKNYWRQLLNAKLITQRKFDNLTKAERGGLSELDKAGFIKRQLVETRQITKHVAQILDSRMNTKYDENDKLIREVKVITLKSKLVSDFRKDFQFYKVREINNYHHAHDAYLNAVVGTALIKKYPKLESEFVYGDYKVYDVRKMIAKSEQEIGKATAKYFFYSNIMNFFKTEITLANGEIRKRPLIETNGETGEIVWDKGRDFATVRKVLSMPQVNIVKKTEVQTGGFSKESILPKRNSDKLIARKKDWDPKKYGGFDSPTVAYSVLVVAKVEKGKSKKLKSVKELLGITIMERSSFEKNPIDFLEAKGYKEVKKDLIIKLPKYSLFELENGRKRMLASAGELQKGNELALPSKYVNFLYLASHYEKLKGSPEDNEQKQLFVEQHKHYLDEIIEQISEFSKRVILADANLDKVLSAYNKHRDKPIREQAENIIHLFTLTNLGAPAAFKYFDTTIDRKRYTSTKEVLDATLIHQSITGLYETRIDLSQLGGDGGGSSGGSGGGGGTLNIEDEYRLHETSKEPDVPLGSTWLSDFPQAWAETGGMGLAVRQAPLIIPLKATSTPVSIKQYPMSQEARLGIKPHIQRLLDQGILVPCQSPWNTPLLPVKKPGTNDYRPVQDLREVNKRVEDIHPTVPNPYNLLSGLPPSHQWYTVLDLKDAFFCLRLHPTSQPLFAFEWRDPEMGISGQLTWTRLPQGFKNSPTLFNEALHRDLADFRIQHPDLILLQYVDDLLLAATSEQDCQRGTRALLQTLGNLGYRASAKKAQICQKQVKYLGYLLKEGQRWLTEARKETVMGQPTPKTPRQLREFLGKAGFCRLFIPGFAEMAAPLYPLTKPGTLFNWGPDQQKAYQEIKQALLTAPALGLPDLTKPFELFVDEKQGYAKGVLTQKLGPWRRPVAYLSKKLDPVAAGWPPCLRMVAAIAVLTKDAGKLTMGQPLVILAPHAVEALVKQPPDRWLSNARMTHYQAMLLDTDRVQFGPVVALNPATLLPLPEKEAPHDCLEILAETHGTRPDLTDQPIPDADYTWYTDGSSFLQEGQRRAGAAVTTETEVIWARALPAGTSAQRAELIALTQALKMAEGKKLNVYTDSRYAFATAHVHGEIYRRRGWLTSEGREIKNKNEILALLKALFLPKRLSIIHCPGHQKGNSAEARGNRMADQAAREAAMKAVLETSTLLAGKRTADGSEFEKRTADGSEFESPKKKAKVE

SEQ ID NO: 1083 - protein, 2093 aa, synthetic construct
MPAAKRVKLDGGDKKYSIGLDIGTNSVGWAVITDEYKVPSKKFKVLGNTDRHSIKKNLIGALLFDSGETAEATRLKRTARRRYTRRKNRICYLQEIFSNEMAKVDDSFFHRLEESFLVEEDKKHERHPIFGNIVDEVAYHEKYPTIYHLRKKLVDSTDKADLRLIYLALAHMIKFRGHFLIEGDLNPDNSDVDKLFIQLVQTYNQLFEENPINASGVDAKAILSARLSKSRRLENLIAQLPGEKKNGLFGNLIALSLGLTPNFKSNFDLAEDAKLQLSKDTYDDDLDNLLAQIGDQYADLFLAAKNLSDAILLSDILRVNTEITKAPLSASMIKRYDEHHQDLTLLKALVRQQLPEKYKEIFFDQSKNGYAGYIDGGASQEEFYKFIKPILEKMDGTEELLVKLNREDLLRKQRTFDNGSIPHQIHLGELHAILRRQEDFYPFLKDNREKIEKILTFRIPYYVGPLARGNSRFAWMTRKSEETITPWNFEEVVDKGASAQSFIERMTNFDKNLPNEKVLPKHSLLYEYFTVYNELTKVKYVTEGMRKPAFLSGEQKKAIVDLLFKTNRKVTVKQLKEDYFKKIECFDSVEISGVEDRFNASLGTYHDLLKIIKDKDFLDNEENEDILEDIVLTLTLFEDREMIEERLKTYAHLFDDKVMKQLKRRRYTGWGRLSRKLINGIRDKQSGKTILDFLKSDGFANRNFMQLIHDDSLTFKEDIQKAQVSGQGDSLHEHIANLAGSPAIKKGILQTVKVVDELVKVMGRHKPENIVIEMARENQTTQKGQKNSRERMKRIEEGIKELGSQILKEHPVENTQLQNEKLYLYYLQNGRDMYVDQELDINRLSDYDVDHIVPQSFLKDDSIDNKVLTRSDKARGKSDNVPSEEVVKKMKNYWRQLLNAKLITQRKFDNLTKAERGGLSELDKAGFIKRQLVETRQITKHVAQILDSRMNTKYDENDKLIREVKVITLKSKLVSDFRKDFQFYKVREINNYHHAHDAYLNAVVGTALIKKYPKLESEFVYGDYKVYDVRKMIAKSEQEIGKATAKYFFYSNIMNFFKTEITLANGEIRKRPLIETNGETGEIVWDKGRDFATVRKVLSMPQVNIVKKTEVQTGGFSKESILPKRNSDKLIARKKDWDPKKYGGFDSPTVAYSVLVVAKVEKGKSKKLKSVKELLGITIMERSSFEKNPIDFLEAKGYKEVKKDLIIKLPKYSLFELENGRKRMLASAGELQKGNELALPSKYVNFLYLASHYEKLKGSPEDNEQKQLFVEQHKHYLDEIIEQISEFSKRVILADANLDKVLSAYNKHRDKPIREQAENIIHLFTLTNLGAPAAFKYFDTTIDRKRYTSTKEVLDATLIHQSITGLYETRIDLSQLGGDGGGGSEAAAKGGTLNIEDEYRLHETSKEPDVPLGSTWLSDFPQAWAETGGMGLAVRQAPLIIPLKATSTPVSIKQYPMSQEARLGIKPHIQRLLDQGILVPCQSPWNTPLLPVKKPGTNDYRPVQDLREVNKRVEDIHPTVPNPYNLLSGLPPSHQWYTVLDLKDAFFCLRLHPTSQPLFAFEWRDPEMGISGQLTWTRLPQGFKNSPTLFNEALHRDLADFRIQHPDLILLQYVDDLLLAATSEQDCQRGTRALLQTLGNLGYRASAKKAQICQKQVKYLGYLLKEGQRWLTEARKETVMGQPTPKTPRQLREFLGKAGFCRLFIPGFAEMAAPLYPLTKPGTLFNWGPDQQKAYQEIKQALLTAPALGLPDLTKPFELFVDEKQGYAKGVLTQKLGPWRRPVAYLSKKLDPVAAGWPPCLRMVAAIAVLTKDAGKLTMGQPLVILAPHAVEALVKQPPDRWLSNARMTHYQAMLLDTDRVQFGPVVALNPATLLPLPEKEAPHDCLEILAETHGTRPDLTDQPIPDADYTWYTDGSSFLQEGQRRAGAAVTTETEVIWARALPAGTSAQRAELIALTQALKMAEGKKLNVYTDSRYAFATAHVHGEIYRRRGWLTSEGREIKNKNEILALLKALFLPKRLSIIHCPGHQKGNSAEARGNRMADQAAREAAMKAVLETSTLLAGKRTADGSEFEKRTADGSEFESPKKKAKVE

SEQ ID NO: 1084 - protein, 2094 aa, synthetic construct
MPAAKRVKLDGGDKKYSIGLDIGTNSVGWAVITDEYKVPSKKFKVLGNTDRHSIKKNLIGALLFDSGETAEATRLKRTARRRYTRRKNRICYLQEIFSNEMAKVDDSFFHRLEESFLVEEDKKHERHPIFGNIVDEVAYHEKYPTIYHLRKKLVDSTDKADLRLIYLALAHMIKFRGHFLIEGDLNPDNSDVDKLFIQLVQTYNQLFEENPINASGVDAKAILSARLSKSRRLENLIAQLPGEKKNGLFGNLIALSLGLTPNFKSNFDLAEDAKLQLSKDTYDDDLDNLLAQIGDQYADLFLAAKNLSDAILLSDILRVNTEITKAPLSASMIKRYDEHHQDLTLLKALVRQQLPEKYKEIFFDQSKNGYAGYIDGGASQEEFYKFIKPILEKMDGTEELLVKLNREDLLRKQRTFDNGSIPHQIHLGELHAILRRQEDFYPFLKDNREKIEKILTFRIPYYVGPLARGNSRFAWMTRKSEETITPWNFEEVVDKGASAQSFIERMTNFDKNLPNEKVLPKHSLLYEYFTVYNELTKVKYVTEGMRKPAFLSGEQKKAIVDLLFKTNRKVTVKQLKEDYFKKIECFDSVEISGVEDRFNASLGTYHDLLKIIKDKDFLDNEENEDILEDIVLTLTLFEDREMIEERLKTYAHLFDDKVMKQLKRRRYTGWGRLSRKLINGIRDKQSGKTILDFLKSDGFANRNFMQLIHDDSLTFKEDIQKAQVSGQGDSLHEHIANLAGSPAIKKGILQTVKVVDELVKVMGRHKPENIVIEMARENQTTQKGQKNSRERMKRIEEGIKELGSQILKEHPVENTQLQNEKLYLYYLQNGRDMYVDQELDINRLSDYDVDHIVPQSFLKDDSIDNKVLTRSDKARGKSDNVPSEEVVKKMKNYWRQLLNAKLITQRKFDNLTKAERGGLSELDKAGFIKRQLVETRQITKHVAQILDSRMNTKYDENDKLIREVKVITLKSKLVSDFRKDFQFYKVREINNYHHAHDAYLNAVVGTALIKKYPKLESEFVYGDYKVYDVRKMIAKSEQEIGKATAKYFFYSNIMNFFKTEITLANGEIRKRPLIETNGETGEIVWDKGRDFATVRKVLSMPQVNIVKKTEVQTGGFSKESILPKRNSDKLIARKKDWDPKKYGGFDSPTVAYSVLVVAKVEKGKSKKLKSVKELLGITIMERSSFEKNPIDFLEAKGYKEVKKDLIIKLPKYSLFELENGRKRMLASAGELQKGNELALPSKYVNFLYLASHYEKLKGSPEDNEQKQLFVEQHKHYLDEIIEQISEFSKRVILADANLDKVLSAYNKHRDKPIREQAENIIHLFTLTNLGAPAAFKYFDTTIDRKRYTSTKEVLDATLIHQSITGLYETRIDLSQLGGDGGGSSGGGPAPGGTLNIEDEYRLHETSKEPDVPLGSTWLSDFPQAWAETGGMGLAVRQAPLIIPLKATSTPVSIKQYPMSQEARLGIKPHIQRLLDQGILVPCQSPWNTPLLPVKKPGTNDYRPVQDLREVNKRVEDIHPTVPNPYNLLSGLPPSHQWYTVLDLKDAFFCLRLHPTSQPLFAFEWRDPEMGISGQLTWTRLPQGFKNSPTLFNEALHRDLADFRIQHPDLILLQYVDDLLLAATSEQDCQRGTRALLQTLGNLGYRASAKKAQICQKQVKYLGYLLKEGQRWLTEARKETVMGQPTPKTPRQLREFLGKAGFCRLFIPGFAEMAAPLYPLTKPGTLFNWGPDQQKAYQEIKQALLTAPALGLPDLTKPFELFVDEKQGYAKGVLTQKLGPWRRPVAYLSKKLDPVAAGWPPCLRMVAAIAVLTKDAGKLTMGQPLVILAPHAVEALVKQPPDRWLSNARMTHYQAMLLDTDRVQFGPVVALNPATLLPLPEKEAPHDCLEILAETHGTRPDLTDQPIPDADYTWYTDGSSFLQEGQRRAGAAVTTETEVIWARALPAGTSAQRAELIALTQALKMAEGKKLNVYTDSRYAFATAHVHGEIYRRRGWLTSEGREIKNKNEILALLKALFLPKRLSIIHCPGHQKGNSAEARGNRMADQAAREAAMKAVLETSTLLAGKRTADGSEFEKRTADGSEFESPKKKAKVE

SEQ ID NO: 1085 - protein, 2094 aa, synthetic construct
MPAAKRVKLDGGDKKYSIGLDIGTNSVGWAVITDEYKVPSKKFKVLGNTDRHSIKKNLIGALLFDSGETAEATRLKRTARRRYTRRKNRICYLQEIFSNEMAKVDDSFFHRLEESFLVEEDKKHERHPIFGNIVDEVAYHEKYPTIYHLRKKLVDSTDKADLRLIYLALAHMIKFRGHFLIEGDLNPDNSDVDKLFIQLVQTYNQLFEENPINASGVDAKAILSARLSKSRRLENLIAQLPGEKKNGLFGNLIALSLGLTPNFKSNFDLAEDAKLQLSKDTYDDDLDNLLAQIGDQYADLFLAAKNLSDAILLSDILRVNTEITKAPLSASMIKRYDEHHQDLTLLKALVRQQLPEKYKEIFFDQSKNGYAGYIDGGASQEEFYKFIKPILEKMDGTEELLVKLNREDLLRKQRTFDNGSIPHQIHLGELHAILRRQEDFYPFLKDNREKIEKILTFRIPYYVGPLARGNSRFAWMTRKSEETITPWNFEEVVDKGASAQSFIERMTNFDKNLPNEKVLPKHSLLYEYFTVYNELTKVKYVTEGMRKPAFLSGEQKKAIVDLLFKTNRKVTVKQLKEDYFKKIECFDSVEISGVEDRFNASLGTYHDLLKIIKDKDFLDNEENEDILEDIVLTLTLFEDREMIEERLKTYAHLFDDKVMKQLKRRRYTGWGRLSRKLINGIRDKQSGKTILDFLKSDGFANRNFMQLIHDDSLTFKEDIQKAQVSGQGDSLHEHIANLAGSPAIKKGILQTVKVVDELVKVMGRHKPENIVIEMARENQTTQKGQKNSRERMKRIEEGIKELGSQILKEHPVENTQLQNEKLYLYYLQNGRDMYVDQELDINRLSDYDVDHIVPQSFLKDDSIDNKVLTRSDKARGKSDNVPSEEVVKKMKNYWRQLLNAKLITQRKFDNLTKAERGGLSELDKAGFIKRQLVETRQITKHVAQILDSRMNTKYDENDKLIREVKVITLKSKLVSDFRKDFQFYKVREINNYHHAHDAYLNAVVGTALIKKYPKLESEFVYGDYKVYDVRKMIAKSEQEIGKATAKYFFYSNIMNFFKTEITLANGEIRKRPLIETNGETGEIVWDKGRDFATVRKVLSMPQVNIVKKTEVQTGGFSKESILPKRNSDKLIARKKDWDPKKYGGFDSPTVAYSVLVVAKVEKGKSKKLKSVKELLGITIMERSSFEKNPIDFLEAKGYKEVKKDLIIKLPKYSLFELENGRKRMLASAGELQKGNELALPSKYVNFLYLASHYEKLKGSPEDNEQKQLFVEQHKHYLDEIIEQISEFSKRVILADANLDKVLSAYNKHRDKPIREQAENIIHLFTLTNLGAPAAFKYFDTTIDRKRYTSTKEVLDATLIHQSITGLYETRIDLSQLGGDGGGGSGGGPAPGGTLNIEDEYRLHETSKEPDVPLGSTWLSDFPQAWAETGGMGLAVRQAPLIIPLKATSTPVSIKQYPMSQEARLGIKPHIQRLLDQGILVPCQSPWNTPLLPVKKPGTNDYRPVQDLREVNKRVEDIHPTVPNPYNLLSGLPPSHQWYTVLDLKDAFFCLRLHPTSQPLFAFEWRDPEMGISGQLTWTRLPQGFKNSPTLFNEALHRDLADFRIQHPDLILLQYVDDLLLAATSEQDCQRGTRALLQTLGNLGYRASAKKAQICQKQVKYLGYLLKEGQRWLTEARKETVMGQPTPKTPRQLREFLGKAGFCRLFIPGFAEMAAPLYPLTKPGTLFNWGPDQQKAYQEIKQALLTAPALGLPDLTKPFELFVDEKQGYAKGVLTQKLGPWRRPVAYLSKKLDPVAAGWPPCLRMVAAIAVLTKDAGKLTMGQPLVILAPHAVEALVKQPPDRWLSNARMTHYQAMLLDTDRVQFGPVVALNPATLLPLPEKEAPHDCLEILAETHGTRPDLTDQPIPDADYTWYTDGSSFLQEGQRRAGAAVTTETEVIWARALPAGTSAQRAELIALTQALKMAEGKKLNVYTDSRYAFATAHVHGEIYRRRGWLTSEGREIKNKNEILALLKALFLPKRLSIIHCPGHQKGNSAEARGNRMADQAAREAAMKAVLETSTLLAGKRTADGSEFEKRTADGSEFESPKKKAKVE

SEQ ID NO: 1086 - protein, 2091 aa, synthetic construct
MPAAKRVKLDGGDKKYSIGLDIGTNSVGWAVITDEYKVPSKKFKVLGNTDRHSIKKNLIGALLFDSGETAEATRLKRTARRRYTRRKNRICYLQEIFSNEMAKVDDSFFHRLEESFLVEEDKKHERHPIFGNIVDEVAYHEKYPTIYHLRKKLVDSTDKADLRLIYLALAHMIKFRGHFLIEGDLNPDNSDVDKLFIQLVQTYNQLFEENPINASGVDAKAILSARLSKSRRLENLIAQLPGEKKNGLFGNLIALSLGLTPNFKSNFDLAEDAKLQLSKDTYDDDLDNLLAQIGDQYADLFLAAKNLSDAILLSDILRVNTEITKAPLSASMIKRYDEHHQDLTLLKALVRQQLPEKYKEIFFDQSKNGYAGYIDGGASQEEFYKFIKPILEKMDGTEELLVKLNREDLLRKQRTFDNGSIPHQIHLGELHAILRRQEDFYPFLKDNREKIEKILTFRIPYYVGPLARGNSRFAWMTRKSEETITPWNFEEVVDKGASAQSFIERMTNFDKNLPNEKVLPKHSLLYEYFTVYNELTKVKYVTEGMRKPAFLSGEQKKAIVDLLFKTNRKVTVKQLKEDYFKKIECFDSVEISGVEDRFNASLGTYHDLLKIIKDKDFLDNEENEDILEDIVLTLTLFEDREMIEERLKTYAHLFDDKVMKQLKRRRYTGWGRLSRKLINGIRDKQSGKTILDFLKSDGFANRNFMQLIHDDSLTFKEDIQKAQVSGQGDSLHEHIANLAGSPAIKKGILQTVKVVDELVKVMGRHKPENIVIEMARENQTTQKGQKNSRERMKRIEEGIKELGSQILKEHPVENTQLQNEKLYLYYLQNGRDMYVDQELDINRLSDYDVDHIVPQSFLKDDSIDNKVLTRSDKARGKSDNVPSEEVVKKMKNYWRQLLNAKLITQRKFDNLTKAERGGLSELDKAGFIKRQLVETRQITKHVAQILDSRMNTKYDENDKLIREVKVITLKSKLVSDFRKDFQFYKVREINNYHHAHDAYLNAVVGTALIKKYPKLESEFVYGDYKVYDVRKMIAKSEQEIGKATAKYFFYSNIMNFFKTEITLANGEIRKRPLIETNGETGEIVWDKGRDFATVRKVLSMPQVNIVKKTEVQTGGFSKESILPKRNSDKLIARKKDWDPKKYGGFDSPTVAYSVLVVAKVEKGKSKKLKSVKELLGITIMERSSFEKNPIDFLEAKGYKEVKKDLIIKLPKYSLFELENGRKRMLASAGELQKGNELALPSKYVNFLYLASHYEKLKGSPEDNEQKQLFVEQHKHYLDEIIEQISEFSKRVILADANLDKVLSAYNKHRDKPIREQAENIIHLFTLTNLGAPAAFKYFDTTIDRKRYTSTKEVLDATLIHQSITGLYETRIDLSQLGGDGGGSSPAPGGTLNIEDEYRLHETSKEPDVPLGSTWLSDFPQAWAETGGMGLAVRQAPLIIPLKATSTPVSIKQYPMSQEARLGIKPHIQRLLDQGILVPCQSPWNTPLLPVKKPGTNDYRPVQDLREVNKRVEDIHPTVPNPYNLLSGLPPSHQWYTVLDLKDAFFCLRLHPTSQPLFAFEWRDPEMGISGQLTWTRLPQGFKNSPTLFNEALHRDLADFRIQHPDLILLQYVDDLLLAATSEQDCQRGTRALLQTLGNLGYRASAKKAQICQKQVKYLGYLLKEGQRWLTEARKETVMGQPTPKTPRQLREFLGKAGFCRLFIPGFAEMAAPLYPLTKPGTLFNWGPDQQKAYQEIKQALLTAPALGLPDLTKPFELFVDEKQGYAKGVLTQKLGPWRRPVAYLSKKLDPVAAGWPPCLRMVAAIAVLTKDAGKLTMGQPLVILAPHAVEALVKQPPDRWLSNARMTHYQAMLLDTDRVQFGPVVALNPATLLPLPEKEAPHDCLEILAETHGTRPDLTDQPIPDADYTWYTDGSSFLQEGQRRAGAAVTTETEVIWARALPAGTSAQRAELIALTQALKMAEGKKLNVYTDSRYAFATAHVHGEIYRRRGWLTSEGREIKNKNEILALLKALFLPKRLSIIHCPGHQKGNSAEARGNRMADQAAREAAMKAVLETSTLLAGKRTADGSEFEKRTADGSEFESPKKKAKVE

SEQ ID NO: 1087 - protein, 2094 aa, synthetic construct
MPAAKRVKLDGGDKKYSIGLDIGTNSVGWAVITDEYKVPSKKFKVLGNTDRHSIKKNLIGALLFDSGETAEATRLKRTARRRYTRRKNRICYLQEIFSNEMAKVDDSFFHRLEESFLVEEDKKHERHPIFGNIVDEVAYHEKYPTIYHLRKKLVDSTDKADLRLIYLALAHMIKFRGHFLIEGDLNPDNSDVDKLFIQLVQTYNQLFEENPINASGVDAKAILSARLSKSRRLENLIAQLPGEKKNGLFGNLIALSLGLTPNFKSNFDLAEDAKLQLSKDTYDDDLDNLLAQIGDQYADLFLAAKNLSDAILLSDILRVNTEITKAPLSASMIKRYDEHHQDLTLLKALVRQQLPEKYKEIFFDQSKNGYAGYIDGGASQEEFYKFIKPILEKMDGTEELLVKLNREDLLRKQRTFDNGSIPHQIHLGELHAILRRQEDFYPFLKDNREKIEKILTFRIPYYVGPLARGNSRFAWMTRKSEETITPWNFEEVVDKGASAQSFIERMTNFDKNLPNEKVLPKHSLLYEYFTVYNELTKVKYVTEGMRKPAFLSGEQKKAIVDLLFKTNRKVTVKQLKEDYFKKIECFDSVEISGVEDRFNASLGTYHDLLKIIKDKDFLDNEENEDILEDIVLTLTLFEDREMIEERLKTYAHLFDDKVMKQLKRRRYTGWGRLSRKLINGIRDKQSGKTILDFLKSDGFANRNFMQLIHDDSLTFKEDIQKAQVSGQGDSLHEHIANLAGSPAIKKGILQTVKVVDELVKVMGRHKPENIVIEMARENQTTQKGQKNSRERMKRIEEGIKELGSQILKEHPVENTQLQNEKLYLYYLQNGRDMYVDQELDINRLSDYDVDHIVPQSFLKDDSIDNKVLTRSDKARGKSDNVPSEEVVKKMKNYWRQLLNAKLITQRKFDNLTKAERGGLSELDKAGFIKRQLVETRQITKHVAQILDSRMNTKYDENDKLIREVKVITLKSKLVSDFRKDFQFYKVREINNYHHAHDAYLNAVVGTALIKKYPKLESEFVYGDYKVYDVRKMIAKSEQEIGKATAKYFFYSNIMNFFKTEITLANGEIRKRPLIETNGETGEIVWDKGRDFATVRKVLSMPQVNIVKKTEVQTGGFSKESILPKRNSDKLIARKKDWDPKKYGGFDSPTVAYSVLVVAKVEKGKSKKLKSVKELLGITIMERSSFEKNPIDFLEAKGYKEVKKDLIIKLPKYSLFELENGRKRMLASAGELQKGNELALPSKYVNFLYLASHYEKLKGSPEDNEQKQLFVEQHKHYLDEIIEQISEFSKRVILADANLDKVLSAYNKHRDKPIREQAENIIHLFTLTNLGAPAAFKYFDTTIDRKRYTSTKEVLDATLIHQSITGLYETRIDLSQLGGDGGGGGGSSGGSGGTLNIEDEYRLHETSKEPDVPLGSTWLSDFPQAWAETGGMGLAVRQAPLIIPLKATSTPVSIKQYPMSQEARLGIKPHIQRLLDQGILVPCQSPWNTPLLPVKKPGTNDYRPVQDLREVNKRVEDIHPTVPNPYNLLSGLPPSHQWYTVLDLKDAFFCLRLHPTSQPLFAFEWRDPEMGISGQLTWTRLPQGFKNSPTLFNEALHRDLADFRIQHPDLILLQYVDDLLLAATSEQDCQRGTRALLQTLGNLGYRASAKKAQICQKQVKYLGYLLKEGQRWLTEARKETVMGQPTPKTPRQLREFLGKAGFCRLFIPGFAEMAAPLYPLTKPGTLFNWGPDQQKAYQEIKQALLTAPALGLPDLTKPFELFVDEKQGYAKGVLTQKLGPWRRPVAYLSKKLDPVAAGWPPCLRMVAAIAVLTKDAGKLTMGQPLVILAPHAVEALVKQPPDRWLSNARMTHYQAMLLDTDRVQFGPVVALNPATLLPLPEKEAPHDCLEILAETHGTRPDLTDQPIPDADYTWYTDGSSFLQEGQRRAGAAVTTETEVIWARALPAGTSAQRAELIALTQALKMAEGKKLNVYTDSRYAFATAHVHGEIYRRRGWLTSEGREIKNKNEILALLKALFLPKRLSIIHCPGHQKGNSAEARGNRMADQAAREAAMKAVLETSTLLAGKRTADGSEFEKRTADGSEFESPKKKAKVE

SEQ ID NO: 1088 - protein, 2096 aa, synthetic construct
MPAAKRVKLDGGDKKYSIGLDIGTNSVGWAVITDEYKVPSKKFKVLGNTDRHSIKKNLIGALLFDSGETAEATRLKRTARRRYTRRKNRICYLQEIFSNEMAKVDDSFFHRLEESFLVEEDKKHERHPIFGNIVDEVAYHEKYPTIYHLRKKLVDSTDKADLRLIYLALAHMIKFRGHFLIEGDLNPDNSDVDKLFIQLVQTYNQLFEENPINASGVDAKAILSARLSKSRRLENLIAQLPGEKKNGLFGNLIALSLGLTPNFKSNFDLAEDAKLQLSKDTYDDDLDNLLAQIGDQYADLFLAAKNLSDAILLSDILRVNTEITKAPLSASMIKRYDEHHQDLTLLKALVRQQLPEKYKEIFFDQSKNGYAGYIDGGASQEEFYKFIKPILEKMDGTEELLVKLNREDLLRKQRTFDNGSIPHQIHLGELHAILRRQEDFYPFLKDNREKIEKILTFRIPYYVGPLARGNSRFAWMTRKSEETITPWNFEEVVDKGASAQSFIERMTNFDKNLPNEKVLPKHSLLYEYFTVYNELTKVKYVTEGMRKPAFLSGEQKKAIVDLLFKTNRKVTVKQLKEDYFKKIECFDSVEISGVEDRFNASLGTYHDLLKIIKDKDFLDNEENEDILEDIVLTLTLFEDREMIEERLKTYAHLFDDKVMKQLKRRRYTGWGRLSRKLINGIRDKQSGKTILDFLKSDGFANRNFMQLIHDDSLTFKEDIQKAQVSGQGDSLHEHIANLAGSPAIKKGILQTVKVVDELVKVMGRHKPENIVIEMARENQTTQKGQKNSRERMKRIEEGIKELGSQILKEHPVENTQLQNEKLYLYYLQNGRDMYVDQELDINRLSDYDVDHIVPQSFLKDDSIDNKVLTRSDKARGKSDNVPSEEVVKKMKNYWRQLLNAKLITQRKFDNLTKAERGGLSELDKAGFIKRQLVETRQITKHVAQILDSRMNTKYDENDKLIREVKVITLKSKLVSDFRKDFQFYKVREINNYHHAHDAYLNAVVGTALIKKYPKLESEFVYGDYKVYDVRKMIAKSEQEIGKATAKYFFYSNIMNFFKTEITLANGEIRKRPLIETNGETGEIVWDKGRDFATVRKVLSMPQVNIVKKTEVQTGGFSKESILPKRNSDKLIARKKDWDPKKYGGFDSPTVAYSVLVVAKVEKGKSKKLKSVKELLGITIMERSSFEKNPIDFLEAKGYKEVKKDLIIKLPKYSLFELENGRKRMLASAGELQKGNELALPSKYVNFLYLASHYEKLKGSPEDNEQKQLFVEQHKHYLDEIIEQISEFSKRVILADANLDKVLSAYNKHRDKPIREQAENIIHLFTLTNLGAPAAFKYFDTTIDRKRYTSTKEVLDATLIHQSITGLYETRIDLSQLGGDGGGGGEAAAKGSSGGTLNIEDEYRLHETSKEPDVPLGSTWLSDFPQAWAETGGMGLAVRQAPLIIPLKATSTPVSIKQYPMSQEARLGIKPHIQRLLDQGILVPCQSPWNTPLLPVKKPGTNDYRPVQDLREVNKRVEDIHPTVPNPYNLLSGLPPSHQWYTVLDLKDAFFCLRLHPTSQPLFAFEWRDPEMGISGQLTWTRLPQGFKNSPTLFNEALHRDLADFRIQHPDLILLQYVDDLLLAATSEQDCQRGTRALLQTLGNLGYRASAKKAQICQKQVKYLGYLLKEGQRWLTEARKETVMGQPTPKTPRQLREFLGKAGFCRLFIPGFAEMAAPLYPLTKPGTLFNWGPDQQKAYQEIKQALLTAPALGLPDLTKPFELFVDEKQGYAKGVLTQKLGPWRRPVAYLSKKLDPVAAGWPPCLRMVAAIAVLTKDAGKLTMGQPLVILAPHAVEALVKQPPDRWLSNARMTHYQAMLLDTDRVQFGPVVALNPATLLPLPEKEAPHDCLEILAETHGTRPDLTDQPIPDADYTWYTDGSSFLQEGQRRAGAAVTTETEVIWARALPAGTSAQRAELIALTQALKMAEGKKLNVYTDSRYAFATAHVHGEIYRRRGWLTSEGREIKNKNEILALLKALFLPKRLSIIHCPGHQKGNSAEARGNRMADQAAREAAMKAVLETSTLLAGKRTADGSEFEKRTADGSEFESPKKKAKVE

SEQ ID NO: 1089 - protein, 2094 aa, synthetic construct
MPAAKRVKLDGGDKKYSIGLDIGTNSVGWAVITDEYKVPSKKFKVLGNTDRHSIKKNLIGALLFDSGETAEATRLKRTARRRYTRRKNRICYLQEIFSNEMAKVDDSFFHRLEESFLVEEDKKHERHPIFGNIVDEVAYHEKYPTIYHLRKKLVDSTDKADLRLIYLALAHMIKFRGHFLIEGDLNPDNSDVDKLFIQLVQTYNQLFEENPINASGVDAKAILSARLSKSRRLENLIAQLPGEKKNGLFGNLIALSLGLTPNFKSNFDLAEDAKLQLSKDTYDDDLDNLLAQIGDQYADLFLAAKNLSDAILLSDILRVNTEITKAPLSASMIKRYDEHHQDLTLLKALVRQQLPEKYKEIFFDQSKNGYAGYIDGGASQEEFYKFIKPILEKMDGTEELLVKLNREDLLRKQRTFDNGSIPHQIHLGELHAILRRQEDFYPFLKDNREKIEKILTFRIPYYVGPLARGNSRFAWMTRKSEETITPWNFEEVVDKGASAQSFIERMTNFDKNLPNEKVLPKHSLLYEYFTVYNELTKVKYVTEGMRKPAFLSGEQKKAIVDLLFKTNRKVTVKQLKEDYFKKIECFDSVEISGVEDRFNASLGTYHDLLKIIKDKDFLDNEENEDILEDIVLTLTLFEDREMIEERLKTYAHLFDDKVMKQLKRRRYTGWGRLSRKLINGIRDKQSGKTILDFLKSDGFANRNFMQLIHDDSLTFKEDIQKAQVSGQGDSLHEHIANLAGSPAIKKGILQTVKVVDELVKVMGRHKPENIVIEMARENQTTQKGQKNSRERMKRIEEGIKELGSQILKEHPVENTQLQNEKLYLYYLQNGRDMYVDQELDINRLSDYDVDHIVPQSFLKDDSIDNKVLTRSDKARGKSDNVPSEEVVKKMKNYWRQLLNAKLITQRKFDNLTKAERGGLSELDKAGFIKRQLVETRQITKHVAQILDSRMNTKYDENDKLIREVKVITLKSKLVSDFRKDFQFYKVREINNYHHAHDAYLNAVVGTALIKKYPKLESEFVYGDYKVYDVRKMIAKSEQEIGKATAKYFFYSNIMNFFKTEITLANGEIRKRPLIETNGETGEIVWDKGRDFATVRKVLSMPQVNIVKKTEVQTGGFSKESILPKRNSDKLIARKKDWDPKKYGGFDSPTVAYSVLVVAKVEKGKSKKLKSVKELLGITIMERSSFEKNPIDFLEAKGYKEVKKDLIIKLPKYSLFELENGRKRMLASAGELQKGNELALPSKYVNFLYLASHYEKLKGSPEDNEQKQLFVEQHKHYLDEIIEQISEFSKRVILADANLDKVLSAYNKHRDKPIREQAENIIHLFTLTNLGAPAAFKYFDTTIDRKRYTSTKEVLDATLIHQSITGLYETRIDLSQLGGDGGGSSGSSGSSGGTLNIEDEYRLHETSKEPDVPLGSTWLSDFPQAWAETGGMGLAVRQAPLIIPLKATSTPVSIKQYPMSQEARLGIKPHIQRLLDQGILVPCQSPWNTPLLPVKKPGTNDYRPVQDLREVNKRVEDIHPTVPNPYNLLSGLPPSHQWYTVLDLKDAFFCLRLHPTSQPLFAFEWRDPEMGISGQLTWTRLPQGFKNSPTLFNEALHRDLADFRIQHPDLILLQYVDDLLLAATSEQDCQRGTRALLQTLGNLGYRASAKKAQICQKQVKYLGYLLKEGQRWLTEARKETVMGQPTPKTPRQLREFLGKAGFCRLFIPGFAEMAAPLYPLTKPGTLFNWGPDQQKAYQEIKQALLTAPALGLPDLTKPFELFVDEKQGYAKGVLTQKLGPWRRPVAYLSKKLDPVAAGWPPCLRMVAAIAVLTKDAGKLTMGQPLVILAPHAVEALVKQPPDRWLSNARMTHYQAMLLDTDRVQFGPVVALNPATLLPLPEKEAPHDCLEILAETHGTRPDLTDQPIPDADYTWYTDGSSFLQEGQRRAGAAVTTETEVIWARALPAGTSAQRAELIALTQALKMAEGKKLNVYTDSRYAFATAHVHGEIYRRRGWLTSEGREIKNKNEILALLKALFLPKRLSIIHCPGHQKGNSAEARGNRMADQAAREAAMKAVLETSTLLAGKRTADGSEFEKRTADGSEFESPKKKAKVE

SEQ ID NO: 1090 - protein, 2096 aa, synthetic construct
MPAAKRVKLDGGDKKYSIGLDIGTNSVGWAVITDEYKVPSKKFKVLGNTDRHSIKKNLIGALLFDSGETAEATRLKRTARRRYTRRKNRICYLQEIFSNEMAKVDDSFFHRLEESFLVEEDKKHERHPIFGNIVDEVAYHEKYPTIYHLRKKLVDSTDKADLRLIYLALAHMIKFRGHFLIEGDLNPDNSDVDKLFIQLVQTYNQLFEENPINASGVDAKAILSARLSKSRRLENLIAQLPGEKKNGLFGNLIALSLGLTPNFKSNFDLAEDAKLQLSKDTYDDDLDNLLAQIGDQYADLFLAAKNLSDAILLSDILRVNTEITKAPLSASMIKRYDEHHQDLTLLKALVRQQLPEKYKEIFFDQSKNGYAGYIDGGASQEEFYKFIKPILEKMDGTEELLVKLNREDLLRKQRTFDNGSIPHQIHLGELHAILRRQEDFYPFLKDNREKIEKILTFRIPYYVGPLARGNSRFAWMTRKSEETITPWNFEEVVDKGASAQSFIERMTNFDKNLPNEKVLPKHSLLYEYFTVYNELTKVKYVTEGMRKPAFLSGEQKKAIVDLLFKTNRKVTVKQLKEDYFKKIECFDSVEISGVEDRFNASLGTYHDLLKIIKDKDFLDNEENEDILEDIVLTLTLFEDREMIEERLKTYAHLFDDKVMKQLKRRRYTGWGRLSRKLINGIRDKQSGKTILDFLKSDGFANRNFMQLIHDDSLTFKEDIQKAQVSGQGDSLHEHIANLAGSPAIKKGILQTVKVVDELVKVMGRHKPENIVIEMARENQTTQKGQKNSRERMKRIEEGIKELGSQILKEHPVENTQLQNEKLYLYYLQNGRDMYVDQELDINRLSDYDVDHIVPQSFLKDDSIDNKVLTRSDKARGKSDNVPSEEVVKKMKNYWRQLLNAKLITQRKFDNLTKAERGGLSELDKAGFIKRQLVETRQITKHVAQILDSRMNTKYDENDKLIREVKVITLKSKLVSDFRKDFQFYKVREINNYHHAHDAYLNAVVGTALIKKYPKLESEFVYGDYKVYDVRKMIAKSEQEIGKATAKYFFYSNIMNFFKTEITLANGEIRKRPLIETNGETGEIVWDKGRDFATVRKVLSMPQVNIVKKTEVQTGGFSKESILPKRNSDKLIARKKDWDPKKYGGFDSPTVAYSVLVVAKVEKGKSKKLKSVKELLGITIMERSSFEKNPIDFLEAKGYKEVKKDLIIKLPKYSLFELENGRKRMLASAGELQKGNELALPSKYVNFLYLASHYEKLKGSPEDNEQKQLFVEQHKHYLDEIIEQISEFSKRVILADANLDKVLSAYNKHRDKPIREQAENIIHLFTLTNLGAPAAFKYFDTTIDRKRYTSTKEVLDATLIHQSITGLYETRIDLSQLGGDGGGGSPAPEAAAKGGTLNIEDEYRLHETSKEPDVPLGSTWLSDFPQAWAETGGMGLAVRQAPLIIPLKATSTPVSIKQYPMSQEARLGIKPHIQRLLDQGILVPCQSPWNTPLLPVKKPGTNDYRPVQDLREVNKRVEDIHPTVPNPYNLLSGLPPSHQWYTVLDLKDAFFCLRLHPTSQPLFAFEWRDPEMGISGQLTWTRLPQGFKNSPTLFNEALHRDLADFRIQHPDLILLQYVDDLLLAATSEQDCQRGTRALLQTLGNLGYRASAKKAQICQKQVKYLGYLLKEGQRWLTEARKETVMGQPTPKTPRQLREFLGKAGFCRLFIPGFAEMAAPLYPLTKPGTLFNWGPDQQKAYQEIKQALLTAPALGLPDLTKPFELFVDEKQGYAKGVLTQKLGPWRRPVAYLSKKLDPVAAGWPPCLRMVAAIAVLTKDAGKLTMGQPLVILAPHAVEALVKQPPDRWLSNARMTHYQAMLLDTDRVQFGPVVALNPATLLPLPEKEAPHDCLEILAETHGTRPDLTDQPIPDADYTWYTDGSSFLQEGQRRAGAAVTTETEVIWARALPAGTSAQRAELIALTQALKMAEGKKLNVYTDSRYAFATAHVHGEIYRRRGWLTSEGREIKNKNEILALLKALFLPKRLSIIHCPGHQKGNSAEARGNRMADQAAREAAMKAVLETSTLLAGKRTADGSEFEKRTADGSEFESPKKKAKVE

SEQ ID NO: 1091 - protein, 2096 aa, synthetic construct
MPAAKRVKLDGGDKKYSIGLDIGTNSVGWAVITDEYKVPSKKFKVLGNTDRHSIKKNLIGALLFDSGETAEATRLKRTARRRYTRRKNRICYLQEIFSNEMAKVDDSFFHRLEESFLVEEDKKHERHPIFGNIVDEVAYHEKYPTIYHLRKKLVDSTDKADLRLIYLALAHMIKFRGHFLIEGDLNPDNSDVDKLFIQLVQTYNQLFEENPINASGVDAKAILSARLSKSRRLENLIAQLPGEKKNGLFGNLIALSLGLTPNFKSNFDLAEDAKLQLSKDTYDDDLDNLLAQIGDQYADLFLAAKNLSDAILLSDILRVNTEITKAPLSASMIKRYDEHHQDLTLLKALVRQQLPEKYKEIFFDQSKNGYAGYIDGGASQEEFYKFIKPILEKMDGTEELLVKLNREDLLRKQRTFDNGSIPHQIHLGELHAILRRQEDFYPFLKDNREKIEKILTFRIPYYVGPLARGNSRFAWMTRKSEETITPWNFEEVVDKGASAQSFIERMTNFDKNLPNEKVLPKHSLLYEYFTVYNELTKVKYVTEGMRKPAFLSGEQKKAIVDLLFKTNRKVTVKQLKEDYFKKIECFDSVEISGVEDRFNASLGTYHDLLKIIKDKDFLDNEENEDILEDIVLTLTLFEDREMIEERLKTYAHLFDDKVMKQLKRRRYTGWGRLSRKLINGIRDKQSGKTILDFLKSDGFANRNFMQLIHDDSLTFKEDIQKAQVSGQGDSLHEHIANLAGSPAIKKGILQTVKVVDELVKVMGRHKPENIVIEMARENQTTQKGQKNSRERMKRIEEGIKELGSQILKEHPVENTQLQNEKLYLYYLQNGRDMYVDQELDINRLSDYDVDHIVPQSFLKDDSIDNKVLTRSDKARGKSDNVPSEEVVKKMKNYWRQLLNAKLITQRKFDNLTKAERGGLSELDKAGFIKRQLVETRQITKHVAQILDSRMNTKYDENDKLIREVKVITLKSKLVSDFRKDFQFYKVREINNYHHAHDAYLNAVVGTALIKKYPKLESEFVYGDYKVYDVRKMIAKSEQEIGKATAKYFFYSNIMNFFKTEITLANGEIRKRPLIETNGETGEIVWDKGRDFATVRKVLSMPQVNIVKKTEVQTGGFSKESILPKRNSDKLIARKKDWDPKKYGGFDSPTVAYSVLVVAKVEKGKSKKLKSVKELLGITIMERSSFEKNPIDFLEAKGYKEVKKDLIIKLPKYSLFELENGRKRMLASAGELQKGNELALPSKYVNFLYLASHYEKLKGSPEDNEQKQLFVEQHKHYLDEIIEQISEFSKRVILADANLDKVLSAYNKHRDKPIREQAENIIHLFTLTNLGAPAAFKYFDTTIDRKRYTSTKEVLDATLIHQSITGLYETRIDLSQLGGDGGEAAAKGGGGGSGGTLNIEDEYRLHETSKEPDVPLGSTWLSDFPQAWAETGGMGLAVRQAPLIIPLKATSTPVSIKQYPMSQEARLGIKPHIQRLLDQGILVPCQSPWNTPLLPVKKPGTNDYRPVQDLREVNKRVEDIHPTVPNPYNLLSGLPPSHQWYTVLDLKDAFFCLRLHPTSQPLFAFEWRDPEMGISGQLTWTRLPQGFKNSPTLFNEALHRDLADFRIQHPDLILLQYVDDLLLAATSEQDCQRGTRALLQTLGNLGYRASAKKAQICQKQVKYLGYLLKEGQRWLTEARKETVMGQPTPKTPRQLREFLGKAGFCRLFIPGFAEMAAPLYPLTKPGTLFNWGPDQQKAYQEIKQALLTAPALGLPDLTKPFELFVDEKQGYAKGVLTQKLGPWRRPVAYLSKKLDPVAAGWPPCLRMVAAIAVLTKDAGKLTMGQPLVILAPHAVEALVKQPPDRWLSNARMTHYQAMLLDTDRVQFGPVVALNPATLLPLPEKEAPHDCLEILAETHGTRPDLTDQPIPDADYTWYTDGSSFLQEGQRRAGAAVTTETEVIWARALPAGTSAQRAELIALTQALKMAEGKKLNVYTDSRYAFATAHVHGEIYRRRGWLTSEGREIKNKNEILALLKALFLPKRLSIIHCPGHQKGNSAEARGNRMADQAAREAAMKAVLETSTLLAGKRTADGSEFEKRTADGSEFESPKKKAKVE

SEQ ID NO: 1092 - protein, 2109 aa, synthetic construct
MPAAKRVKLDGGDKKYSIGLDIGTNSVGWAVITDEYKVPSKKFKVLGNTDRHSIKKNLIGALLFDSGETAEATRLKRTARRRYTRRKNRICYLQEIFSNEMAKVDDSFFHRLEESFLVEEDKKHERHPIFGNIVDEVAYHEKYPTIYHLRKKLVDSTDKADLRLIYLALAHMIKFRGHFLIEGDLNPDNSDVDKLFIQLVQTYNQLFEENPINASGVDAKAILSARLSKSRRLENLIAQLPGEKKNGLFGNLIALSLGLTPNFKSNFDLAEDAKLQLSKDTYDDDLDNLLAQIGDQYADLFLAAKNLSDAILLSDILRVNTEITKAPLSASMIKRYDEHHQDLTLLKALVRQQLPEKYKEIFFDQSKNGYAGYIDGGASQEEFYKFIKPILEKMDGTEELLVKLNREDLLRKQRTFDNGSIPHQIHLGELHAILRRQEDFYPFLKDNREKIEKILTFRIPYYVGPLARGNSRFAWMTRKSEETITPWNFEEVVDKGASAQSFIERMTNFDKNLPNEKVLPKHSLLYEYFTVYNELTKVKYVTEGMRKPAFLSGEQKKAIVDLLFKTNRKVTVKQLKEDYFKKIECFDSVEISGVEDRFNASLGTYHDLLKIIKDKDFLDNEENEDILEDIVLTLTLFEDREMIEERLKTYAHLFDDKVMKQLKRRRYTGWGRLSRKLINGIRDKQSGKTILDFLKSDGFANRNFMQLIHDDSLTFKEDIQKAQVSGQGDSLHEHIANLAGSPAIKKGILQTVKVVDELVKVMGRHKPENIVIEMARENQTTQKGQKNSRERMKRIEEGIKELGSQILKEHPVENTQLQNEKLYLYYLQNGRDMYVDQELDINRLSDYDVDHIVPQSFLKDDSIDNKVLTRSDKARGKSDNVPSEEVVKKMKNYWRQLLNAKLITQRKFDNLTKAERGGLSELDKAGFIKRQLVETRQITKHVAQILDSRMNTKYDENDKLIREVKVITLKSKLVSDFRKDFQFYKVREINNYHHAHDAYLNAVVGTALIKKYPKLESEFVYGDYKVYDVRKMIAKSEQEIGKATAKYFFYSNIMNFFKTEITLANGEIRKRPLIETNGETGEIVWDKGRDFATVRKVLSMPQVNIVKKTEVQTGGFSKESILPKRNSDKLIARKKDWDPKKYGGFDSPTVAYSVLVVAKVEKGKSKKLKSVKELLGITIMERSSFEKNPIDFLEAKGYKEVKKDLIIKLPKYSLFELENGRKRMLASAGELQKGNELALPSKYVNFLYLASHYEKLKGSPEDNEQKQLFVEQHKHYLDEIIEQISEFSKRVILADANLDKVLSAYNKHRDKPIREQAENIIHLFTLTNLGAPAAFKYFDTTIDRKRYTSTKEVLDATLIHQSITGLYETRIDLSQLGGDGGSGGSSGGSSGSETPGTSESATPESSGGSSGGSSGGVPWILKKPLELTIKLDLEEQQGTLLNNSILSKKGKEELKQLFEKYSALWQSWENQVGHRRIRPHKIATGTVKPTPQKQYHINPKAKPDIQIVINDLLKQGVLIQKESTMNTPVYPVPKPNGRWRMVLDYRAVNKVTPLIAVQNQHSYGILGSLFKGRYKTTIDLSNGFWAHPIVPEDYWITAFTWQGKQYCWTVLPQGFLNSPGLFNGDVVDLLQGIPNVEVYVDDVYISHDSEKEHLEYLDILFNRLKEAGYIISLKKSNIANSIVDFLGFQITNEGRGLTDTFKEKLENITAPTTLKQLQSILGLLNFARNFIPDFTELIAPLYALIPKSPKNYVPWQIEHSTTLETLITKLNGAEYLQGRKGDKTLIMKVNASYTTGYIRYYNEGEKKPISYVSIVFSKTELKFTELEKLLTTVHKGLLKALDLSMGQNIHVYSPIVSMQNIQKTPQTAKKALASRWLSWLSYLEDPRIRFFYDPQMPALKDLPAVDTGKDNKKHPSNFQHIFYTDGSAITSPTKEGHLNAGMGIVYFINKDGNLQKQQEWSISLGNHTAQFAEIAAFEFALKKCLPLGGNILVVTDSNYVAKAYNEELDVWASNGFVNNRKKPLKHISKWKSVADLKRLRPDVVVTHEPGHQKLDSSPHAYGNNLADQLATQASFKVHAGKRTADGSEFEKRTADGSEFESPKKKAKVE

SEQ ID NO: 1093 - protein, 2122 aa, synthetic construct
MPAAKRVKLDGGDKKYSIGLDIGTNSVGWAVITDEYKVPSKKFKVLGNTDRHSIKKNLIGALLFDSGETAEATRLKRTARRRYTRRKNRICYLQEIFSNEMAKVDDSFFHRLEESFLVEEDKKHERHPIFGNIVDEVAYHEKYPTIYHLRKKLVDSTDKADLRLIYLALAHMIKFRGHFLIEGDLNPDNSDVDKLFIQLVQTYNQLFEENPINASGVDAKAILSARLSKSRRLENLIAQLPGEKKNGLFGNLIALSLGLTPNFKSNFDLAEDAKLQLSKDTYDDDLDNLLAQIGDQYADLFLAAKNLSDAILLSDILRVNTEITKAPLSASMIKRYDEHHQDLTLLKALVRQQLPEKYKEIFFDQSKNGYAGYIDGGASQEEFYKFIKPILEKMDGTEELLVKLNREDLLRKQRTFDNGSIPHQIHLGELHAILRRQEDFYPFLKDNREKIEKILTFRIPYYVGPLARGNSRFAWMTRKSEETITPWNFEEVVDKGASAQSFIERMTNFDKNLPNEKVLPKHSLLYEYFTVYNELTKVKYVTEGMRKPAFLSGEQKKAIVDLLFKTNRKVTVKQLKEDYFKKIECFDSVEISGVEDRFNASLGTYHDLLKIIKDKDFLDNEENEDILEDIVLTLTLFEDREMIEERLKTYAHLFDDKVMKQLKRRRYTGWGRLSRKLINGIRDKQSGKTILDFLKSDGFANRNFMQLIHDDSLTFKEDIQKAQVSGQGDSLHEHIANLAGSPAIKKGILQTVKVVDELVKVMGRHKPENIVIEMARENQTTQKGQKNSRERMKRIEEGIKELGSQILKEHPVENTQLQNEKLYLYYLQNGRDMYVDQELDINRLSDYDVDHIVPQSFLKDDSIDNKVLTRSDKARGKSDNVPSEEVVKKMKNYWRQLLNAKLITQRKFDNLTKAERGGLSELDKAGFIKRQLVETRQITKHVAQILDSRMNTKYDENDKLIREVKVITLKSKLVSDFRKDFQFYKVREINNYHHAHDAYLNAVVGTALIKKYPKLESEFVYGDYKVYDVRKMIAKSEQEIGKATAKYFFYSNIMNFFKTEITLANGEIRKRPLIETNGETGEIVWDKGRDFATVRKVLSMPQVNIVKKTEVQTGGFSKESILPKRNSDKLIARKKDWDPKKYGGFDSPTVAYSVLVVAKVEKGKSKKLKSVKELLGITIMERSSFEKNPIDFLEAKGYKEVKKDLIIKLPKYSLFELENGRKRMLASAGELQKGNELALPSKYVNFLYLASHYEKLKGSPEDNEQKQLFVEQHKHYLDEIIEQISEFSKRVILADANLDKVLSAYNKHRDKPIREQAENIIHLFTLTNLGAPAAFKYFDTTIDRKRYTSTKEVLDATLIHQSITGLYETRIDLSQLGGDGGAEAAAKEAAAKEAAAKEAAAKALEAEAAAKEAAAKEAAAKEAAAKAGGVPWILKKPLELTIKLDLEEQQGTLLNNSILSKKGKEELKQLFEKYSALWQSWENQVGHRRIRPHKIATGTVKPTPQKQYHINPKAKPDIQIVINDLLKQGVLIQKESTMNTPVYPVPKPNGRWRMVLDYRAVNKVTPLIAVQNQHSYGILGSLFKGRYKTTIDLSNGFWAHPIVPEDYWITAFTWQGKQYCWTVLPQGFLNSPGLFNGDVVDLLQGIPNVEVYVDDVYISHDSEKEHLEYLDILFNRLKEAGYIISLKKSNIANSIVDFLGFQITNEGRGLTDTFKEKLENITAPTTLKQLQSILGLLNFARNFIPDFTELIAPLYALIPKSPKNYVPWQIEHSTTLETLITKLNGAEYLQGRKGDKTLIMKVNASYTTGYIRYYNEGEKKPISYVSIVFSKTELKFTELEKLLTTVHKGLLKALDLSMGQNIHVYSPIVSMQNIQKTPQTAKKALASRWLSWLSYLEDPRIRFFYDPQMPALKDLPAVDTGKDNKKHPSNFQHIFYTDGSAITSPTKEGHLNAGMGIVYFINKDGNLQKQQEWSISLGNHTAQFAEIAAFEFALKKCLPLGGNILVVTDSNYVAKAYNEELDVWASNGFVNNRKKPLKHISKWKSVADLKRLRPDVVVTHEPGHQKLDSSPHAYGNNLADQLATQASFKVHAGKRTADGSEFEKRTADGSEFESPKKKAKVE

SEQ ID NO: 1094 - protein, 2106 aa, synthetic construct
MPAAKRVKLDGGDKKYSIGLDIGTNSVGWAVITDEYKVPSKKFKVLGNTDRHSIKKNLIGALLFDSGETAEATRLKRTARRRYTRRKNRICYLQEIFSNEMAKVDDSFFHRLEESFLVEEDKKHERHPIFGNIVDEVAYHEKYPTIYHLRKKLVDSTDKADLRLIYLALAHMIKFRGHFLIEGDLNPDNSDVDKLFIQLVQTYNQLFEENPINASGVDAKAILSARLSKSRRLENLIAQLPGEKKNGLFGNLIALSLGLTPNFKSNFDLAEDAKLQLSKDTYDDDLDNLLAQIGDQYADLFLAAKNLSDAILLSDILRVNTEITKAPLSASMIKRYDEHHQDLTLLKALVRQQLPEKYKEIFFDQSKNGYAGYIDGGASQEEFYKFIKPILEKMDGTEELLVKLNREDLLRKQRTFDNGSIPHQIHLGELHAILRRQEDFYPFLKDNREKIEKILTFRIPYYVGPLARGNSRFAWMTRKSEETITPWNFEEVVDKGASAQSFIERMTNFDKNLPNEKVLPKHSLLYEYFTVYNELTKVKYVTEGMRKPAFLSGEQKKAIVDLLFKTNRKVTVKQLKEDYFKKIECFDSVEISGVEDRFNASLGTYHDLLKIIKDKDFLDNEENEDILEDIVLTLTLFEDREMIEERLKTYAHLFDDKVMKQLKRRRYTGWGRLSRKLINGIRDKQSGKTILDFLKSDGFANRNFMQLIHDDSLTFKEDIQKAQVSGQGDSLHEHIANLAGSPAIKKGILQTVKVVDELVKVMGRHKPENIVIEMARENQTTQKGQKNSRERMKRIEEGIKELGSQILKEHPVENTQLQNEKLYLYYLQNGRDMYVDQELDINRLSDYDVDHIVPQSFLKDDSIDNKVLTRSDKARGKSDNVPSEEVVKKMKNYWRQLLNAKLITQRKFDNLTKAERGGLSELDKAGFIKRQLVETRQITKHVAQILDSRMNTKYDENDKLIREVKVITLKSKLVSDFRKDFQFYKVREINNYHHAHDAYLNAVVGTALIKKYPKLESEFVYGDYKVYDVRKMIAKSEQEIGKATAKYFFYSNIMNFFKTEITLANGEIRKRPLIETNGETGEIVWDKGRDFATVRKVLSMPQVNIVKKTEVQTGGFSKESILPKRNSDKLIARKKDWDPKKYGGFDSPTVAYSVLVVAKVEKGKSKKLKSVKELLGITIMERSSFEKNPIDFLEAKGYKEVKKDLIIKLPKYSLFELENGRKRMLASAGELQKGNELALPSKYVNFLYLASHYEKLKGSPEDNEQKQLFVEQHKHYLDEIIEQISEFSKRVILADANLDKVLSAYNKHRDKPIREQAENIIHLFTLTNLGAPAAFKYFDTTIDRKRYTSTKEVLDATLIHQSITGLYETRIDLSQLGGDGGEAAAKEAAAKEAAAKEAAAKEAAAKEAAAKGGVPWILKKPLELTIKLDLEEQQGTLLNNSILSKKGKEELKQLFEKYSALWQSWENQVGHRRIRPHKIATGTVKPTPQKQYHINPKAKPDIQIVINDLLKQGVLIQKESTMNTPVYPVPKPNGRWRMVLDYRAVNKVTPLIAVQNQHSYGILGSLFKGRYKTTIDLSNGFWAHPIVPEDYWITAFTWQGKQYCWTVLPQGFLNSPGLFNGDVVDLLQGIPNVEVYVDDVYISHDSEKEHLEYLDILFNRLKEAGYIISLKKSNIANSIVDFLGFQITNEGRGLTDTFKEKLENITAPTTLKQLQSILGLLNFARNFIPDFTELIAPLYALIPKSPKNYVPWQIEHSTTLETLITKLNGAEYLQGRKGDKTLIMKVNASYTTGYIRYYNEGEKKPISYVSIVFSKTELKFTELEKLLTTVHKGLLKALDLSMGQNIHVYSPIVSMQNIQKTPQTAKKALASRWLSWLSYLEDPRIRFFYDPQMPALKDLPAVDTGKDNKKHPSNFQHIFYTDGSAITSPTKEGHLNAGMGIVYFINKDGNLQKQQEWSISLGNHTAQFAEIAAFEFALKKCLPLGGNILVVTDSNYVAKAYNEELDVWASNGFVNNRKKPLKHISKWKSVADLKRLRPDVVVTHEPGHQKLDSSPHAYGNNLADQLATQASFKVHAGKRTADGSEFEKRTADGSEFESPKKKAKVE

SEQ ID NO: 1095 - protein, 2094 aa, synthetic construct
MPAAKRVKLDGGDKKYSIGLDIGTNSVGWAVITDEYKVPSKKFKVLGNTDRHSIKKNLIGALLFDSGETAEATRLKRTARRRYTRRKNRICYLQEIFSNEMAKVDDSFFHRLEESFLVEEDKKHERHPIFGNIVDEVAYHEKYPTIYHLRKKLVDSTDKADLRLIYLALAHMIKFRGHFLIEGDLNPDNSDVDKLFIQLVQTYNQLFEENPINASGVDAKAILSARLSKSRRLENLIAQLPGEKKNGLFGNLIALSLGLTPNFKSNFDLAEDAKLQLSKDTYDDDLDNLLAQIGDQYADLFLAAKNLSDAILLSDILRVNTEITKAPLSASMIKRYDEHHQDLTLLKALVRQQLPEKYKEIFFDQSKNGYAGYIDGGASQEEFYKFIKPILEKMDGTEELLVKLNREDLLRKQRTFDNGSIPHQIHLGELHAILRRQEDFYPFLKDNREKIEKILTFRIPYYVGPLARGNSRFAWMTRKSEETITPWNFEEVVDKGASAQSFIERMTNFDKNLPNEKVLPKHSLLYEYFTVYNELTKVKYVTEGMRKPAFLSGEQKKAIVDLLFKTNRKVTVKQLKEDYFKKIECFDSVEISGVEDRFNASLGTYHDLLKIIKDKDFLDNEENEDILEDIVLTLTLFEDREMIEERLKTYAHLFDDKVMKQLKRRRYTGWGRLSRKLINGIRDKQSGKTILDFLKSDGFANRNFMQLIHDDSLTFKEDIQKAQVSGQGDSLHEHIANLAGSPAIKKGILQTVKVVDELVKVMGRHKPENIVIEMARENQTTQKGQKNSRERMKRIEEGIKELGSQILKEHPVENTQLQNEKLYLYYLQNGRDMYVDQELDINRLSDYDVDHIVPQSFLKDDSIDNKVLTRSDKARGKSDNVPSEEVVKKMKNYWRQLLNAKLITQRKFDNLTKAERGGLSELDKAGFIKRQLVETRQITKHVAQILDSRMNTKYDENDKLIREVKVITLKSKLVSDFRKDFQFYKVREINNYHHAHDAYLNAVVGTALIKKYPKLESEFVYGDYKVYDVRKMIAKSEQEIGKATAKYFFYSNIMNFFKTEITLANGEIRKRPLIETNGETGEIVWDKGRDFATVRKVLSMPQVNIVKKTEVQTGGFSKESILPKRNSDKLIARKKDWDPKKYGGFDSPTVAYSVLVVAKVEKGKSKKLKSVKELLGITIMERSSFEKNPIDFLEAKGYKEVKKDLIIKLPKYSLFELENGRKRMLASAGELQKGNELALPSKYVNFLYLASHYEKLKGSPEDNEQKQLFVEQHKHYLDEIIEQISEFSKRVILADANLDKVLSAYNKHRDKPIREQAENIIHLFTLTNLGAPAAFKYFDTTIDRKRYTSTKEVLDATLIHQSITGLYETRIDLSQLGGDGGGSSGSSGSSGSSGSSGSSGGVPWILKKPLELTIKLDLEEQQGTLLNNSILSKKGKEELKQLFEKYSALWQSWENQVGHRRIRPHKIATGTVKPTPQKQYHINPKAKPDIQIVINDLLKQGVLIQKESTMNTPVYPVPKPNGRWRMVLDYRAVNKVTPLIAVQNQHSYGILGSLFKGRYKTTIDLSNGFWAHPIVPEDYWITAFTWQGKQYCWTVLPQGFLNSPGLFNGDVVDLLQGIPNVEVYVDDVYISHDSEKEHLEYLDILFNRLKEAGYIISLKKSNIANSIVDFLGFQITNEGRGLTDTFKEKLENITAPTTLKQLQSILGLLNFARNFIPDFTELIAPLYALIPKSPKNYVPWQIEHSTTLETLITKLNGAEYLQGRKGDKTLIMKVNASYTTGYIRYYNEGEKKPISYVSIVFSKTELKFTELEKLLTTVHKGLLKALDLSMGQNIHVYSPIVSMQNIQKTPQTAKKALASRWLSWLSYLEDPRIRFFYDPQMPALKDLPAVDTGKDNKKHPSNFQHIFYTDGSAITSPTKEGHLNAGMGIVYFINKDGNLQKQQEWSISLGNHTAQFAEIAAFEFALKKCLPLGGNILVVTDSNYVAKAYNEELDVWASNGFVNNRKKPLKHISKWKSVADLKRLRPDVVVTHEPGHQKLDSSPHAYGNNLADQLATQASFKVHAGKRTADGSEFEKRTADGSEFESPKKKAKVE

SEQ ID NO: 1096 - protein, 2087 aa, synthetic construct
MPAAKRVKLDGGDKKYSIGLDIGTNSVGWAVITDEYKVPSKKFKVLGNTDRHSIKKNLIGALLFDSGETAEATRLKRTARRRYTRRKNRICYLQEIFSNEMAKVDDSFFHRLEESFLVEEDKKHERHPIFGNIVDEVAYHEKYPTIYHLRKKLVDSTDKADLRLIYLALAHMIKFRGHFLIEGDLNPDNSDVDKLFIQLVQTYNQLFEENPINASGVDAKAILSARLSKSRRLENLIAQLPGEKKNGLFGNLIALSLGLTPNFKSNFDLAEDAKLQLSKDTYDDDLDNLLAQIGDQYADLFLAAKNLSDAILLSDILRVNTEITKAPLSASMIKRYDEHHQDLTLLKALVRQQLPEKYKEIFFDQSKNGYAGYIDGGASQEEFYKFIKPILEKMDGTEELLVKLNREDLLRKQRTFDNGSIPHQIHLGELHAILRRQEDFYPFLKDNREKIEKILTFRIPYYVGPLARGNSRFAWMTRKSEETITPWNFEEVVDKGASAQSFIERMTNFDKNLPNEKVLPKHSLLYEYFTVYNELTKVKYVTEGMRKPAFLSGEQKKAIVDLLFKTNRKVTVKQLKEDYFKKIECFDSVEISGVEDRFNASLGTYHDLLKIIKDKDFLDNEENEDILEDIVLTLTLFEDREMIEERLKTYAHLFDDKVMKQLKRRRYTGWGRLSRKLINGIRDKQSGKTILDFLKSDGFANRNFMQLIHDDSLTFKEDIQKAQVSGQGDSLHEHIANLAGSPAIKKGILQTVKVVDELVKVMGRHKPENIVIEMARENQTTQKGQKNSRERMKRIEEGIKELGSQILKEHPVENTQLQNEKLYLYYLQNGRDMYVDQELDINRLSDYDVDHIVPQSFLKDDSIDNKVLTRSDKARGKSDNVPSEEVVKKMKNYWRQLLNAKLITQRKFDNLTKAERGGLSELDKAGFIKRQLVETRQITKHVAQILDSRMNTKYDENDKLIREVKVITLKSKLVSDFRKDFQFYKVREINNYHHAHDAYLNAVVGTALIKKYPKLESEFVYGDYKVYDVRKMIAKSEQEIGKATAKYFFYSNIMNFFKTEITLANGEIRKRPLIETNGETGEIVWDKGRDFATVRKVLSMPQVNIVKKTEVQTGGFSKESILPKRNSDKLIARKKDWDPKKYGGFDSPTVAYSVLVVAKVEKGKSKKLKSVKELLGITIMERSSFEKNPIDFLEAKGYKEVKKDLIIKLPKYSLFELENGRKRMLASAGELQKGNELALPSKYVNFLYLASHYEKLKGSPEDNEQKQLFVEQHKHYLDEIIEQISEFSKRVILADANLDKVLSAYNKHRDKPIREQAENIIHLFTLTNLGAPAAFKYFDTTIDRKRYTSTKEVLDATLIHQSITGLYETRIDLSQLGGDGGPAPGGGEAAAKGGVPWILKKPLELTIKLDLEEQQGTLLNNSILSKKGKEELKQLFEKYSALWQSWENQVGHRRIRPHKIATGTVKPTPQKQYHINPKAKPDIQIVINDLLKQGVLIQKESTMNTPVYPVPKPNGRWRMVLDYRAVNKVTPLIAVQNQHSYGILGSLFKGRYKTTIDLSNGFWAHPIVPEDYWITAFTWQGKQYCWTVLPQGFLNSPGLFNGDVVDLLQGIPNVEVYVDDVYISHDSEKEHLEYLDILFNRLKEAGYIISLKKSNIANSIVDFLGFQITNEGRGLTDTFKEKLENITAPTTLKQLQSILGLLNFARNFIPDFTELIAPLYALIPKSPKNYVPWQIEHSTTLETLITKLNGAEYLQGRKGDKTLIMKVNASYTTGYIRYYNEGEKKPISYVSIVFSKTELKFTELEKLLTTVHKGLLKALDLSMGQNIHVYSPIVSMQNIQKTPQTAKKALASRWLSWLSYLEDPRIRFFYDPQMPALKDLPAVDTGKDNKKHPSNFQHIFYTDGSAITSPTKEGHLNAGMGIVYFINKDGNLQKQQEWSISLGNHTAQFAEIAAFEFALKKCLPLGGNILVVTDSNYVAKAYNEELDVWASNGFVNNRKKPLKHISKWKSVADLKRLRPDVVVTHEPGHQKLDSSPHAYGNNLADQLATQASFKVHAGKRTADGSEFEKRTADGSEFESPKKKAKVE

SEQ ID NO: 1097 - protein, 2087 aa, synthetic construct
MPAAKRVKLDGGDKKYSIGLDIGTNSVGWAVITDEYKVPSKKFKVLGNTDRHSIKKNLIGALLFDSGETAEATRLKRTARRRYTRRKNRICYLQEIFSNEMAKVDDSFFHRLEESFLVEEDKKHERHPIFGNIVDEVAYHEKYPTIYHLRKKLVDSTDKADLRLIYLALAHMIKFRGHFLIEGDLNPDNSDVDKLFIQLVQTYNQLFEENPINASGVDAKAILSARLSKSRRLENLIAQLPGEKKNGLFGNLIALSLGLTPNFKSNFDLAEDAKLQLSKDTYDDDLDNLLAQIGDQYADLFLAAKNLSDAILLSDILRVNTEITKAPLSASMIKRYDEHHQDLTLLKALVRQQLPEKYKEIFFDQSKNGYAGYIDGGASQEEFYKFIKPILEKMDGTEELLVKLNREDLLRKQRTFDNGSIPHQIHLGELHAILRRQEDFYPFLKDNREKIEKILTFRIPYYVGPLARGNSRFAWMTRKSEETITPWNFEEVVDKGASAQSFIERMTNFDKNLPNEKVLPKHSLLYEYFTVYNELTKVKYVTEGMRKPAFLSGEQKKAIVDLLFKTNRKVTVKQLKEDYFKKIECFDSVEISGVEDRFNASLGTYHDLLKIIKDKDFLDNEENEDILEDIVLTLTLFEDREMIEERLKTYAHLFDDKVMKQLKRRRYTGWGRLSRKLINGIRDKQSGKTILDFLKSDGFANRNFMQLIHDDSLTFKEDIQKAQVSGQGDSLHEHIANLAGSPAIKKGILQTVKVVDELVKVMGRHKPENIVIEMARENQTTQKGQKNSRERMKRIEEGIKELGSQILKEHPVENTQLQNEKLYLYYLQNGRDMYVDQELDINRLSDYDVDHIVPQSFLKDDSIDNKVLTRSDKARGKSDNVPSEEVVKKMKNYWRQLLNAKLITQRKFDNLTKAERGGLSELDKAGFIKRQLVETRQITKHVAQILDSRMNTKYDENDKLIREVKVITLKSKLVSDFRKDFQFYKVREINNYHHAHDAYLNAVVGTALIKKYPKLESEFVYGDYKVYDVRKMIAKSEQEIGKATAKYFFYSNIMNFFKTEITLANGEIRKRPLIETNGETGEIVWDKGRDFATVRKVLSMPQVNIVKKTEVQTGGFSKESILPKRNSDKLIARKKDWDPKKYGGFDSPTVAYSVLVVAKVEKGKSKKLKSVKELLGITIMERSSFEKNPIDFLEAKGYKEVKKDLIIKLPKYSLFELENGRKRMLASAGELQKGNELALPSKYVNFLYLASHYEKLKGSPEDNEQKQLFVEQHKHYLDEIIEQISEFSKRVILADANLDKVLSAYNKHRDKPIREQAENIIHLFTLTNLGAPAAFKYFDTTIDRKRYTSTKEVLDATLIHQSITGLYETRIDLSQLGGDGGGGSEAAAKPAPGGVPWILKKPLELTIKLDLEEQQGTLLNNSILSKKGKEELKQLFEKYSALWQSWENQVGHRRIRPHKIATGTVKPTPQKQYHINPKAKPDIQIVINDLLKQGVLIQKESTMNTPVYPVPKPNGRWRMVLDYRAVNKVTPLIAVQNQHSYGILGSLFKGRYKTTIDLSNGFWAHPIVPEDYWITAFTWQGKQYCWTVLPQGFLNSPGLFNGDVVDLLQGIPNVEVYVDDVYISHDSEKEHLEYLDILFNRLKEAGYIISLKKSNIANSIVDFLGFQITNEGRGLTDTFKEKLENITAPTTLKQLQSILGLLNFARNFIPDFTELIAPLYALIPKSPKNYVPWQIEHSTTLETLITKLNGAEYLQGRKGDKTLIMKVNASYTTGYIRYYNEGEKKPISYVSIVFSKTELKFTELEKLLTTVHKGLLKALDLSMGQNIHVYSPIVSMQNIQKTPQTAKKALASRWLSWLSYLEDPRIRFFYDPQMPALKDLPAVDTGKDNKKHPSNFQHIFYTDGSAITSPTKEGHLNAGMGIVYFINKDGNLQKQQEWSISLGNHTAQFAEIAAFEFALKKCLPLGGNILVVTDSNYVAKAYNEELDVWASNGFVNNRKKPLKHISKWKSVADLKRLRPDVVVTHEPGHQKLDSSPHAYGNNLADQLATQASFKVHAGKRTADGSEFEKRTADGSEFESPKKKAKVE

SEQ ID NO: 1098 - protein, 2085 aa, synthetic construct
MPAAKRVKLDGGDKKYSIGLDIGTNSVGWAVITDEYKVPSKKFKVLGNTDRHSIKKNLIGALLFDSGETAEATRLKRTARRRYTRRKNRICYLQEIFSNEMAKVDDSFFHRLEESFLVEEDKKHERHPIFGNIVDEVAYHEKYPTIYHLRKKLVDSTDKADLRLIYLALAHMIKFRGHFLIEGDLNPDNSDVDKLFIQLVQTYNQLFEENPINASGVDAKAILSARLSKSRRLENLIAQLPGEKKNGLFGNLIALSLGLTPNFKSNFDLAEDAKLQLSKDTYDDDLDNLLAQIGDQYADLFLAAKNLSDAILLSDILRVNTEITKAPLSASMIKRYDEHHQDLTLLKALVRQQLPEKYKEIFFDQSKNGYAGYIDGGASQEEFYKFIKPILEKMDGTEELLVKLNREDLLRKQRTFDNGSIPHQIHLGELHAILRRQEDFYPFLKDNREKIEKILTFRIPYYVGPLARGNSRFAWMTRKSEETITPWNFEEVVDKGASAQSFIERMTNFDKNLPNEKVLPKHSLLYEYFTVYNELTKVKYVTEGMRKPAFLSGEQKKAIVDLLFKTNRKVTVKQLKEDYFKKIECFDSVEISGVEDRFNASLGTYHDLLKIIKDKDFLDNEENEDILEDIVLTLTLFEDREMIEERLKTYAHLFDDKVMKQLKRRRYTGWGRLSRKLINGIRDKQSGKTILDFLKSDGFANRNFMQLIHDDSLTFKEDIQKAQVSGQGDSLHEHIANLAGSPAIKKGILQTVKVVDELVKVMGRHKPENIVIEMARENQTTQKGQKNSRERMKRIEEGIKELGSQILKEHPVENTQLQNEKLYLYYLQNGRDMYVDQELDINRLSDYDVDHIVPQSFLKDDSIDNKVLTRSDKARGKSDNVPSEEVVKKMKNYWRQLLNAKLITQRKFDNLTKAERGGLSELDKAGFIKRQLVETRQITKHVAQILDSRMNTKYDENDKLIREVKVITLKSKLVSDFRKDFQFYKVREINNYHHAHDAYLNAVVGTALIKKYPKLESEFVYGDYKVYDVRKMIAKSEQEIGKATAKYFFYSNIMNFFKTEITLANGEIRKRPLIETNGETGEIVWDKGRDFATVRKVLSMPQVNIVKKTEVQTGGFSKESILPKRNSDKLIARKKDWDPKKYGGFDSPTVAYSVLVVAKVEKGKSKKLKSVKELLGITIMERSSFEKNPIDFLEAKGYKEVKKDLIIKLPKYSLFELENGRKRMLASAGELQKGNELALPSKYVNFLYLASHYEKLKGSPEDNEQKQLFVEQHKHYLDEIIEQISEFSKRVILADANLDKVLSAYNKHRDKPIREQAENIIHLFTLTNLGAPAAFKYFDTTIDRKRYTSTKEVLDATLIHQSITGLYETRIDLSQLGGDGGPAPGGSGGGGGVPWILKKPLELTIKLDLEEQQGTLLNNSILSKKGKEELKQLFEKYSALWQSWENQVGHRRIRPHKIATGTVKPTPQKQYHINPKAKPDIQIVINDLLKQGVLIQKESTMNTPVYPVPKPNGRWRMVLDYRAVNKVTPLIAVQNQHSYGILGSLFKGRYKTTIDLSNGFWAHPIVPEDYWITAFTWQGKQYCWTVLPQGFLNSPGLFNGDVVDLLQGIPNVEVYVDDVYISHDSEKEHLEYLDILFNRLKEAGYIISLKKSNIANSIVDFLGFQITNEGRGLTDTFKEKLENITAPTTLKQLQSILGLLNFARNFIPDFTELIAPLYALIPKSPKNYVPWQIEHSTTLETLITKLNGAEYLQGRKGDKTLIMKVNASYTTGYIRYYNEGEKKPISYVSIVFSKTELKFTELEKLLTTVHKGLLKALDLSMGQNIHVYSPIVSMQNIQKTPQTAKKALASRWLSWLSYLEDPRIRFFYDPQMPALKDLPAVDTGKDNKKHPSNFQHIFYTDGSAITSPTKEGHLNAGMGIVYFINKDGNLQKQQEWSISLGNHTAQFAEIAAFEFALKKCLPLGGNILVVTDSNYVAKAYNEELDVWASNGFVNNRKKPLKHISKWKSVADLKRLRPDVVVTHEPGHQKLDSSPHAYGNNLADQLATQASFKVHAGKRTADGSEFEKRTADGSEFESPKKKAKVE

SEQ ID NO: 1099 - protein, 2087 aa, synthetic construct
MPAAKRVKLDGGDKKYSIGLDIGTNSVGWAVITDEYKVPSKKFKVLGNTDRHSIKKNLIGALLFDSGETAEATRLKRTARRRYTRRKNRICYLQEIFSNEMAKVDDSFFHRLEESFLVEEDKKHERHPIFGNIVDEVAYHEKYPTIYHLRKKLVDSTDKADLRLIYLALAHMIKFRGHFLIEGDLNPDNSDVDKLFIQLVQTYNQLFEENPINASGVDAKAILSARLSKSRRLENLIAQLPGEKKNGLFGNLIALSLGLTPNFKSNFDLAEDAKLQLSKDTYDDDLDNLLAQIGDQYADLFLAAKNLSDAILLSDILRVNTEITKAPLSASMIKRYDEHHQDLTLLKALVRQQLPEKYKEIFFDQSKNGYAGYIDGGASQEEFYKFIKPILEKMDGTEELLVKLNREDLLRKQRTFDNGSIPHQIHLGELHAILRRQEDFYPFLKDNREKIEKILTFRIPYYVGPLARGNSRFAWMTRKSEETITPWNFEEVVDKGASAQSFIERMTNFDKNLPNEKVLPKHSLLYEYFTVYNELTKVKYVTEGMRKPAFLSGEQKKAIVDLLFKTNRKVTVKQLKEDYFKKIECFDSVEISGVEDRFNASLGTYHDLLKIIKDKDFLDNEENEDILEDIVLTLTLFEDREMIEERLKTYAHLFDDKVMKQLKRRRYTGWGRLSRKLINGIRDKQSGKTILDFLKSDGFANRNFMQLIHDDSLTFKEDIQKAQVSGQGDSLHEHIANLAGSPAIKKGILQTVKVVDELVKVMGRHKPENIVIEMARENQTTQKGQKNSRERMKRIEEGIKELGSQILKEHPVENTQLQNEKLYLYYLQNGRDMYVDQELDINRLSDYDVDHIVPQSFLKDDSIDNKVLTRSDKARGKSDNVPSEEVVKKMKNYWRQLLNAKLITQRKFDNLTKAERGGLSELDKAGFIKRQLVETRQITKHVAQILDSRMNTKYDENDKLIREVKVITLKSKLVSDFRKDFQFYKVREINNYHHAHDAYLNAVVGTALIKKYPKLESEFVYGDYKVYDVRKMIAKSEQEIGKATAKYFFYSNIMNFFKTEITLANGEIRKRPLIETNGETGEIVWDKGRDFATVRKVLSMPQVNIVKKTEVQTGGFSKESILPKRNSDKLIARKKDWDPKKYGGFDSPTVAYSVLVVAKVEKGKSKKLKSVKELLGITIMERSSFEKNPIDFLEAKGYKEVKKDLIIKLPKYSLFELENGRKRMLASAGELQKGNELALPSKYVNFLYLASHYEKLKGSPEDNEQKQLFVEQHKHYLDEIIEQISEFSKRVILADANLDKVLSAYNKHRDKPIREQAENIIHLFTLTNLGAPAAFKYFDTTIDRKRYTSTKEVLDATLIHQSITGLYETRIDLSQLGGDGGGGSPAPEAAAKGGVPWILKKPLELTIKLDLEEQQGTLLNNSILSKKGKEELKQLFEKYSALWQSWENQVGHRRIRPHKIATGTVKPTPQKQYHINPKAKPDIQIVINDLLKQGVLIQKESTMNTPVYPVPKPNGRWRMVLDYRAVNKVTPLIAVQNQHSYGILGSLFKGRYKTTIDLSNGFWAHPIVPEDYWITAFTWQGKQYCWTVLPQGFLNSPGLFNGDVVDLLQGIPNVEVYVDDVYISHDSEKEHLEYLDILFNRLKEAGYIISLKKSNIANSIVDFLGFQITNEGRGLTDTFKEKLENITAPTTLKQLQSILGLLNFARNFIPDFTELIAPLYALIPKSPKNYVPWQIEHSTTLETLITKLNGAEYLQGRKGDKTLIMKVNASYTTGYIRYYNEGEKKPISYVSIVFSKTELKFTELEKLLTTVHKGLLKALDLSMGQNIHVYSPIVSMQNIQKTPQTAKKALASRWLSWLSYLEDPRIRFFYDPQMPALKDLPAVDTGKDNKKHPSNFQHIFYTDGSAITSPTKEGHLNAGMGIVYFINKDGNLQKQQEWSISLGNHTAQFAEIAAFEFALKKCLPLGGNILVVTDSNYVAKAYNEELDVWASNGFVNNRKKPLKHISKWKSVADLKRLRPDVVVTHEPGHQKLDSSPHAYGNNLADQLATQASFKVHAGKRTADGSEFEKRTADGSEFESPKKKAKVE

SEQ ID NO: 1100 - protein, 2087 aa, synthetic construct
MPAAKRVKLDGGDKKYSIGLDIGTNSVGWAVITDEYKVPSKKFKVLGNTDRHSIKKNLIGALLFDSGETAEATRLKRTARRRYTRRKNRICYLQEIFSNEMAKVDDSFFHRLEESFLVEEDKKHERHPIFGNIVDEVAYHEKYPTIYHLRKKLVDSTDKADLRLIYLALAHMIKFRGHFLIEGDLNPDNSDVDKLFIQLVQTYNQLFEENPINASGVDAKAILSARLSKSRRLENLIAQLPGEKKNGLFGNLIALSLGLTPNFKSNFDLAEDAKLQLSKDTYDDDLDNLLAQIGDQYADLFLAAKNLSDAILLSDILRVNTEITKAPLSASMIKRYDEHHQDLTLLKALVRQQLPEKYKEIFFDQSKNGYAGYIDGGASQEEFYKFIKPILEKMDGTEELLVKLNREDLLRKQRTFDNGSIPHQIHLGELHAILRRQEDFYPFLKDNREKIEKILTFRIPYYVGPLARGNSRFAWMTRKSEETITPWNFEEVVDKGASAQSFIERMTNFDKNLPNEKVLPKHSLLYEYFTVYNELTKVKYVTEGMRKPAFLSGEQKKAIVDLLFKTNRKVTVKQLKEDYFKKIECFDSVEISGVEDRFNASLGTYHDLLKIIKDKDFLDNEENEDILEDIVLTLTLFEDREMIEERLKTYAHLFDDKVMKQLKRRRYTGWGRLSRKLINGIRDKQSGKTILDFLKSDGFANRNFMQLIHDDSLTFKEDIQKAQVSGQGDSLHEHIANLAGSPAIKKGILQTVKVVDELVKVMGRHKPENIVIEMARENQTTQKGQKNSRERMKRIEEGIKELGSQILKEHPVENTQLQNEKLYLYYLQNGRDMYVDQELDINRLSDYDVDHIVPQSFLKDDSIDNKVLTRSDKARGKSDNVPSEEVVKKMKNYWRQLLNAKLITQRKFDNLTKAERGGLSELDKAGFIKRQLVETRQITKHVAQILDSRMNTKYDENDKLIREVKVITLKSKLVSDFRKDFQFYKVREINNYHHAHDAYLNAVVGTALIKKYPKLESEFVYGDYKVYDVRKMIAKSEQEIGKATAKYFFYSNIMNFFKTEITLANGEIRKRPLIETNGETGEIVWDKGRDFATVRKVLSMPQVNIVKKTEVQTGGFSKESILPKRNSDKLIARKKDWDPKKYGGFDSPTVAYSVLVVAKVEKGKSKKLKSVKELLGITIMERSSFEKNPIDFLEAKGYKEVKKDLIIKLPKYSLFELENGRKRMLASAGELQKGNELALPSKYVNFLYLASHYEKLKGSPEDNEQKQLFVEQHKHYLDEIIEQISEFSKRVILADANLDKVLSAYNKHRDKPIREQAENIIHLFTLTNLGAPAAFKYFDTTIDRKRYTSTKEVLDATLIHQSITGLYETRIDLSQLGGDGGGSSEAAAKGGGGGVPWILKKPLELTIKLDLEEQQGTLLNNSILSKKGKEELKQLFEKYSALWQSWENQVGHRRIRPHKIATGTVKPTPQKQYHINPKAKPDIQIVINDLLKQGVLIQKESTMNTPVYPVPKPNGRWRMVLDYRAVNKVTPLIAVQNQHSYGILGSLFKGRYKTTIDLSNGFWAHPIVPEDYWITAFTWQGKQYCWTVLPQGFLNSPGLFNGDVVDLLQGIPNVEVYVDDVYISHDSEKEHLEYLDILFNRLKEAGYIISLKKSNIANSIVDFLGFQITNEGRGLTDTFKEKLENITAPTTLKQLQSILGLLNFARNFIPDFTELIAPLYALIPKSPKNYVPWQIEHSTTLETLITKLNGAEYLQGRKGDKTLIMKVNASYTTGYIRYYNEGEKKPISYVSIVFSKTELKFTELEKLLTTVHKGLLKALDLSMGQNIHVYSPIVSMQNIQKTPQTAKKALASRWLSWLSYLEDPRIRFFYDPQMPALKDLPAVDTGKDNKKHPSNFQHIFYTDGSAITSPTKEGHLNAGMGIVYFINKDGNLQKQQEWSISLGNHTAQFAEIAAFEFALKKCLPLGGNILVVTDSNYVAKAYNEELDVWASNGFVNNRKKPLKHISKWKSVADLKRLRPDVVVTHEPGHQKLDSSPHAYGNNLADQLATQASFKVHAGKRTADGSEFEKRTADGSEFESPKKKAKVE

SEQ ID NO: 1101 - protein, 2091 aa, synthetic construct
MPAAKRVKLDGGDKKYSIGLDIGTNSVGWAVITDEYKVPSKKFKVLGNTDRHSIKKNLIGALLFDSGETAEATRLKRTARRRYTRRKNRICYLQEIFSNEMAKVDDSFFHRLEESFLVEEDKKHERHPIFGNIVDEVAYHEKYPTIYHLRKKLVDSTDKADLRLIYLALAHMIKFRGHFLIEGDLNPDNSDVDKLFIQLVQTYNQLFEENPINASGVDAKAILSARLSKSRRLENLIAQLPGEKKNGLFGNLIALSLGLTPNFKSNFDLAEDAKLQLSKDTYDDDLDNLLAQIGDQYADLFLAAKNLSDAILLSDILRVNTEITKAPLSASMIKRYDEHHQDLTLLKALVRQQLPEKYKEIFFDQSKNGYAGYIDGGASQEEFYKFIKPILEKMDGTEELLVKLNREDLLRKQRTFDNGSIPHQIHLGELHAILRRQEDFYPFLKDNREKIEKILTFRIPYYVGPLARGNSRFAWMTRKSEETITPWNFEEVVDKGASAQSFIERMTNFDKNLPNEKVLPKHSLLYEYFTVYNELTKVKYVTEGMRKPAFLSGEQKKAIVDLLFKTNRKVTVKQLKEDYFKKIECFDSVEISGVEDRFNASLGTYHDLLKIIKDKDFLDNEENEDILEDIVLTLTLFEDREMIEERLKTYAHLFDDKVMKQLKRRRYTGWGRLSRKLINGIRDKQSGKTILDFLKSDGFANRNFMQLIHDDSLTFKEDIQKAQVSGQGDSLHEHIANLAGSPAIKKGILQTVKVVDELVKVMGRHKPENIVIEMARENQTTQKGQKNSRERMKRIEEGIKELGSQILKEHPVENTQLQNEKLYLYYLQNGRDMYVDQELDINRLSDYDVDHIVPQSFLKDDSIDNKVLTRSDKARGKSDNVPSEEVVKKMKNYWRQLLNAKLITQRKFDNLTKAERGGLSELDKAGFIKRQLVETRQITKHVAQILDSRMNTKYDENDKLIREVKVITLKSKLVSDFRKDFQFYKVREINNYHHAHDAYLNAVVGTALIKKYPKLESEFVYGDYKVYDVRKMIAKSEQEIGKATAKYFFYSNIMNFFKTEITLANGEIRKRPLIETNGETGEIVWDKGRDFATVRKVLSMPQVNIVKKTEVQTGGFSKESILPKRNSDKLIARKKDWDPKKYGGFDSPTVAYSVLVVAKVEKGKSKKLKSVKELLGITIMERSSFEKNPIDFLEAKGYKEVKKDLIIKLPKYSLFELENGRKRMLASAGELQKGNELALPSKYVNFLYLASHYEKLKGSPEDNEQKQLFVEQHKHYLDEIIEQISEFSKRVILADANLDKVLSAYNKHRDKPIREQAENIIHLFTLTNLGAPAAFKYFDTTIDRKRYTSTKEVLDATLIHQSITGLYETRIDLSQLGGDGGGSSGSSGSSGSSGSSGGVPWILKKPLELTIKLDLEEQQGTLLNNSILSKKGKEELKQLFEKYSALWQSWENQVGHRRIRPHKIATGTVKPTPQKQYHINPKAKPDIQIVINDLLKQGVLIQKESTMNTPVYPVPKPNGRWRMVLDYRAVNKVTPLIAVQNQHSYGILGSLFKGRYKTTIDLSNGFWAHPIVPEDYWITAFTWQGKQYCWTVLPQGFLNSPGLFNGDVVDLLQGIPNVEVYVDDVYISHDSEKEHLEYLDILFNRLKEAGYIISLKKSNIANSIVDFLGFQITNEGRGLTDTFKEKLENITAPTTLKQLQSILGLLNFARNFIPDFTELIAPLYALIPKSPKNYVPWQIEHSTTLETLITKLNGAEYLQGRKGDKTLIMKVNASYTTGYIRYYNEGEKKPISYVSIVFSKTELKFTELEKLLTTVHKGLLKALDLSMGQNIHVYSPIVSMQNIQKTPQTAKKALASRWLSWLSYLEDPRIRFFYDPQMPALKDLPAVDTGKDNKKHPSNFQHIFYTDGSAITSPTKEGHLNAGMGIVYFINKDGNLQKQQEWSISLGNHTAQFAEIAAFEFALKKCLPLGGNILVVTDSNYVAKAYNEELDVWASNGFVNNRKKPLKHISKWKSVADLKRLRPDVVVTHEPGHQKLDSSPHAYGNNLADQLATQASFKVHAGKRTADGSEFEKRTADGSEFESPKKKAKVE

SEQ ID NO: 1102 - protein, 2081 aa, synthetic construct
MPAAKRVKLDGGDKKYSIGLDIGTNSVGWAVITDEYKVPSKKFKVLGNTDRHSIKKNLIGALLFDSGETAEATRLKRTARRRYTRRKNRICYLQEIFSNEMAKVDDSFFHRLEESFLVEEDKKHERHPIFGNIVDEVAYHEKYPTIYHLRKKLVDSTDKADLRLIYLALAHMIKFRGHFLIEGDLNPDNSDVDKLFIQLVQTYNQLFEENPINASGVDAKAILSARLSKSRRLENLIAQLPGEKKNGLFGNLIALSLGLTPNFKSNFDLAEDAKLQLSKDTYDDDLDNLLAQIGDQYADLFLAAKNLSDAILLSDILRVNTEITKAPLSASMIKRYDEHHQDLTLLKALVRQQLPEKYKEIFFDQSKNGYAGYIDGGASQEEFYKFIKPILEKMDGTEELLVKLNREDLLRKQRTFDNGSIPHQIHLGELHAILRRQEDFYPFLKDNREKIEKILTFRIPYYVGPLARGNSRFAWMTRKSEETITPWNFEEVVDKGASAQSFIERMTNFDKNLPNEKVLPKHSLLYEYFTVYNELTKVKYVTEGMRKPAFLSGEQKKAIVDLLFKTNRKVTVKQLKEDYFKKIECFDSVEISGVEDRFNASLGTYHDLLKIIKDKDFLDNEENEDILEDIVLTLTLFEDREMIEERLKTYAHLFDDKVMKQLKRRRYTGWGRLSRKLINGIRDKQSGKTILDFLKSDGFANRNFMQLIHDDSLTFKEDIQKAQVSGQGDSLHEHIANLAGSPAIKKGILQTVKVVDELVKVMGRHKPENIVIEMARENQTTQKGQKNSRERMKRIEEGIKELGSQILKEHPVENTQLQNEKLYLYYLQNGRDMYVDQELDINRLSDYDVDHIVPQSFLKDDSIDNKVLTRSDKARGKSDNVPSEEVVKKMKNYWRQLLNAKLITQRKFDNLTKAERGGLSELDKAGFIKRQLVETRQITKHVAQILDSRMNTKYDENDKLIREVKVITLKSKLVSDFRKDFQFYKVREINNYHHAHDAYLNAVVGTALIKKYPKLESEFVYGDYKVYDVRKMIAKSEQEIGKATAKYFFYSNIMNFFKTEITLANGEIRKRPLIETNGETGEIVWDKGRDFATVRKVLSMPQVNIVKKTEVQTGGFSKESILPKRNSDKLIARKKDWDPKKYGGFDSPTVAYSVLVVAKVEKGKSKKLKSVKELLGITIMERSSFEKNPIDFLEAKGYKEVKKDLIIKLPKYSLFELENGRKRMLASAGELQKGNELALPSKYVNFLYLASHYEKLKGSPEDNEQKQLFVEQHKHYLDEIIEQISEFSKRVILADANLDKVLSAYNKHRDKPIREQAENIIHLFTLTNLGAPAAFKYFDTTIDRKRYTSTKEVLDATLIHQSITGLYETRIDLSQLGGDGGPAPAPGGVPWILKKPLELTIKLDLEEQQGTLLNNSILSKKGKEELKQLFEKYSALWQSWENQVGHRRIRPHKIATGTVKPTPQKQYHINPKAKPDIQIVINDLLKQGVLIQKESTMNTPVYPVPKPNGRWRMVLDYRAVNKVTPLIAVQNQHSYGILGSLFKGRYKTTIDLSNGFWAHPIVPEDYWITAFTWQGKQYCWTVLPQGFLNSPGLFNGDVVDLLQGIPNVEVYVDDVYISHDSEKEHLEYLDILFNRLKEAGYIISLKKSNIANSIVDFLGFQITNEGRGLTDTFKEKLENITAPTTLKQLQSILGLLNFARNFIPDFTELIAPLYALIPKSPKNYVPWQIEHSTTLETLITKLNGAEYLQGRKGDKTLIMKVNASYTTGYIRYYNEGEKKPISYVSIVFSKTELKFTELEKLLTTVHKGLLKALDLSMGQNIHVYSPIVSMQNIQKTPQTAKKALASRWLSWLSYLEDPRIRFFYDPQMPALKDLPAVDTGKDNKKHPSNFQHIFYTDGSAITSPTKEGHLNAGMGIVYFINKDGNLQKQQEWSISLGNHTAQFAEIAAFEFALKKCLPLGGNILVVTDSNYVAKAYNEELDVWASNGFVNNRKKPLKHISKWKSVADLKRLRPDVVVTHEPGHQKLDSSPHAYGNNLADQLATQASFKVHAGKRTADGSEFEKRTADGSEFESPKKKAKVE

SEQ ID NO: 1103 - protein, 2085 aa, synthetic construct
MPAAKRVKLDGGDKKYSIGLDIGTNSVGWAVITDEYKVPSKKFKVLGNTDRHSIKKNLIGALLFDSGETAEATRLKRTARRRYTRRKNRICYLQEIFSNEMAKVDDSFFHRLEESFLVEEDKKHERHPIFGNIVDEVAYHEKYPTIYHLRKKLVDSTDKADLRLIYLALAHMIKFRGHFLIEGDLNPDNSDVDKLFIQLVQTYNQLFEENPINASGVDAKAILSARLSKSRRLENLIAQLPGEKKNGLFGNLIALSLGLTPNFKSNFDLAEDAKLQLSKDTYDDDLDNLLAQIGDQYADLFLAAKNLSDAILLSDILRVNTEITKAPLSASMIKRYDEHHQDLTLLKALVRQQLPEKYKEIFFDQSKNGYAGYIDGGASQEEFYKFIKPILEKMDGTEELLVKLNREDLLRKQRTFDNGSIPHQIHLGELHAILRRQEDFYPFLKDNREKIEKILTFRIPYYVGPLARGNSRFAWMTRKSEETITPWNFEEVVDKGASAQSFIERMTNFDKNLPNEKVLPKHSLLYEYFTVYNELTKVKYVTEGMRKPAFLSGEQKKAIVDLLFKTNRKVTVKQLKEDYFKKIECFDSVEISGVEDRFNASLGTYHDLLKIIKDKDFLDNEENEDILEDIVLTLTLFEDREMIEERLKTYAHLFDDKVMKQLKRRRYTGWGRLSRKLINGIRDKQSGKTILDFLKSDGFANRNFMQLIHDDSLTFKEDIQKAQVSGQGDSLHEHIANLAGSPAIKKGILQTVKVVDELVKVMGRHKPENIVIEMARENQTTQKGQKNSRERMKRIEEGIKELGSQILKEHPVENTQLQNEKLYLYYLQNGRDMYVDQELDINRLSDYDVDHIVPQSFLKDDSIDNKVLTRSDKARGKSDNVPSEEVVKKMKNYWRQLLNAKLITQRKFDNLTKAERGGLSELDKAGFIKRQLVETRQITKHVAQILDSRMNTKYDENDKLIREVKVITLKSKLVSDFRKDFQFYKVREINNYHHAHDAYLNAVVGTALIKKYPKLESEFVYGDYKVYDVRKMIAKSEQEIGKATAKYFFYSNIMNFFKTEITLANGEIRKRPLIETNGETGEIVWDKGRDFATVRKVLSMPQVNIVKKTEVQTGGFSKESILPKRNSDKLIARKKDWDPKKYGGFDSPTVAYSVLVVAKVEKGKSKKLKSVKELLGITIMERSSFEKNPIDFLEAKGYKEVKKDLIIKLPKYSLFELENGRKRMLASAGELQKGNELALPSKYVNFLYLASHYEKLKGSPEDNEQKQLFVEQHKHYLDEIIEQISEFSKRVILADANLDKVLSAYNKHRDKPIREQAENIIHLFTLTNLGAPAAFKYFDTTIDRKRYTSTKEVLDATLIHQSITGLYETRIDLSQLGGDGGGSSGSSGSSGGVPWILKKPLELTIKLDLEEQQGTLLNNSILSKKGKEELKQLFEKYSALWQSWENQVGHRRIRPHKIATGTVKPTPQKQYHINPKAKPDIQIVINDLLKQGVLIQKESTMNTPVYPVPKPNGRWRMVLDYRAVNKVTPLIAVQNQHSYGILGSLFKGRYKTTIDLSNGFWAHPIVPEDYWITAFTWQGKQYCWTVLPQGFLNSPGLFNGDVVDLLQGIPNVEVYVDDVYISHDSEKEHLEYLDILFNRLKEAGYIISLKKSNIANSIVDFLGFQITNEGRGLTDTFKEKLENITAPTTLKQLQSILGLLNFARNFIPDFTELIAPLYALIPKSPKNYVPWQIEHSTTLETLITKLNGAEYLQGRKGDKTLIMKVNASYTTGYIRYYNEGEKKPISYVSIVFSKTELKFTELEKLLTTVHKGLLKALDLSMGQNIHVYSPIVSMQNIQKTPQTAKKALASRWLSWLSYLEDPRIRFFYDPQMPALKDLPAVDTGKDNKKHPSNFQHIFYTDGSAITSPTKEGHLNAGMGIVYFINKDGNLQKQQEWSISLGNHTAQFAEIAAFEFALKKCLPLGGNILVVTDSNYVAKAYNEELDVWASNGFVNNRKKPLKHISKWKSVADLKRLRPDVVVTHEPGHQKLDSSPHAYGNNLADQLATQASFKVHAGKRTADGSEFEKRTADGSEFESPKKKAKVE

SEQ ID NO: 1104 - protein, 2087 aa, synthetic construct
MPAAKRVKLDGGDKKYSIGLDIGTNSVGWAVITDEYKVPSKKFKVLGNTDRHSIKKNLIGALLFDSGETAEATRLKRTARRRYTRRKNRICYLQEIFSNEMAKVDDSFFHRLEESFLVEEDKKHERHPIFGNIVDEVAYHEKYPTIYHLRKKLVDSTDKADLRLIYLALAHMIKFRGHFLIEGDLNPDNSDVDKLFIQLVQTYNQLFEENPINASGVDAKAILSARLSKSRRLENLIAQLPGEKKNGLFGNLIALSLGLTPNFKSNFDLAEDAKLQLSKDTYDDDLDNLLAQIGDQYADLFLAAKNLSDAILLSDILRVNTEITKAPLSASMIKRYDEHHQDLTLLKALVRQQLPEKYKEIFFDQSKNGYAGYIDGGASQEEFYKFIKPILEKMDGTEELLVKLNREDLLRKQRTFDNGSIPHQIHLGELHAILRRQEDFYPFLKDNREKIEKILTFRIPYYVGPLARGNSRFAWMTRKSEETITPWNFEEVVDKGASAQSFIERMTNFDKNLPNEKVLPKHSLLYEYFTVYNELTKVKYVTEGMRKPAFLSGEQKKAIVDLLFKTNRKVTVKQLKEDYFKKIECFDSVEISGVEDRFNASLGTYHDLLKIIKDKDFLDNEENEDILEDIVLTLTLFEDREMIEERLKTYAHLFDDKVMKQLKRRRYTGWGRLSRKLINGIRDKQSGKTILDFLKSDGFANRNFMQLIHDDSLTFKEDIQKAQVSGQGDSLHEHIANLAGSPAIKKGILQTVKVVDELVKVMGRHKPENIVIEMARENQTTQKGQKNSRERMKRIEEGIKELGSQILKEHPVENTQLQNEKLYLYYLQNGRDMYVDQELDINRLSDYDVDHIVPQSFLKDDSIDNKVLTRSDKARGKSDNVPSEEVVKKMKNYWRQLLNAKLITQRKFDNLTKAERGGLSELDKAGFIKRQLVETRQITKHVAQILDSRMNTKYDENDKLIREVKVITLKSKLVSDFRKDFQFYKVREINNYHHAHDAYLNAVVGTALIKKYPKLESEFVYGDYKVYDVRKMIAKSEQEIGKATAKYFFYSNIMNFFKTEITLANGEIRKRPLIETNGETGEIVWDKGRDFATVRKVLSMPQVNIVKKTEVQTGGFSKESILPKRNSDKLIARKKDWDPKKYGGFDSPTVAYSVLVVAKVEKGKSKKLKSVKELLGITIMERSSFEKNPIDFLEAKGYKEVKKDLIIKLPKYSLFELENGRKRMLASAGELQKGNELALPSKYVNFLYLASHYEKLKGSPEDNEQKQLFVEQHKHYLDEIIEQISEFSKRVILADANLDKVLSAYNKHRDKPIREQAENIIHLFTLTNLGAPAAFKYFDTTIDRKRYTSTKEVLDATLIHQSITGLYETRIDLSQLGGDGGPAPGSSEAAAKGGVPWILKKPLELTIKLDLEEQQGTLLNNSILSKKGKEELKQLFEKYSALWQSWENQVGHRRIRPHKIATGTVKPTPQKQYHINPKAKPDIQIVINDLLKQGVLIQKESTMNTPVYPVPKPNGRWRMVLDYRAVNKVTPLIAVQNQHSYGILGSLFKGRYKTTIDLSNGFWAHPIVPEDYWITAFTWQGKQYCWTVLPQGFLNSPGLFNGDVVDLLQGIPNVEVYVDDVYISHDSEKEHLEYLDILFNRLKEAGYIISLKKSNIANSIVDFLGFQITNEGRGLTDTFKEKLENITAPTTLKQLQSILGLLNFARNFIPDFTELIAPLYALIPKSPKNYVPWQIEHSTTLETLITKLNGAEYLQGRKGDKTLIMKVNASYTTGYIRYYNEGEKKPISYVSIVFSKTELKFTELEKLLTTVHKGLLKALDLSMGQNIHVYSPIVSMQNIQKTPQTAKKALASRWLSWLSYLEDPRIRFFYDPQMPALKDLPAVDTGKDNKKHPSNFQHIFYTDGSAITSPTKEGHLNAGMGIVYFINKDGNLQKQQEWSISLGNHTAQFAEIAAFEFALKKCLPLGGNILVVTDSNYVAKAYNEELDVWASNGFVNNRKKPLKHISKWKSVADLKRLRPDVVVTHEPGHQKLDSSPHAYGNNLADQLATQASFKVHAGKRTADGSEFEKRTADGSEFESPKKKAKVE

SEQ ID NO: 1105 - protein, 2087 aa, synthetic construct
MPAAKRVKLDGGDKKYSIGLDIGTNSVGWAVITDEYKVPSKKFKVLGNTDRHSIKKNLIGALLFDSGETAEATRLKRTARRRYTRRKNRICYLQEIFSNEMAKVDDSFFHRLEESFLVEEDKKHERHPIFGNIVDEVAYHEKYPTIYHLRKKLVDSTDKADLRLIYLALAHMIKFRGHFLIEGDLNPDNSDVDKLFIQLVQTYNQLFEENPINASGVDAKAILSARLSKSRRLENLIAQLPGEKKNGLFGNLIALSLGLTPNFKSNFDLAEDAKLQLSKDTYDDDLDNLLAQIGDQYADLFLAAKNLSDAILLSDILRVNTEITKAPLSASMIKRYDEHHQDLTLLKALVRQQLPEKYKEIFFDQSKNGYAGYIDGGASQEEFYKFIKPILEKMDGTEELLVKLNREDLLRKQRTFDNGSIPHQIHLGELHAILRRQEDFYPFLKDNREKIEKILTFRIPYYVGPLARGNSRFAWMTRKSEETITPWNFEEVVDKGASAQSFIERMTNFDKNLPNEKVLPKHSLLYEYFTVYNELTKVKYVTEGMRKPAFLSGEQKKAIVDLLFKTNRKVTVKQLKEDYFKKIECFDSVEISGVEDRFNASLGTYHDLLKIIKDKDFLDNEENEDILEDIVLTLTLFEDREMIEERLKTYAHLFDDKVMKQLKRRRYTGWGRLSRKLINGIRDKQSGKTILDFLKSDGFANRNFMQLIHDDSLTFKEDIQKAQVSGQGDSLHEHIANLAGSPAIKKGILQTVKVVDELVKVMGRHKPENIVIEMARENQTTQKGQKNSRERMKRIEEGIKELGSQILKEHPVENTQLQNEKLYLYYLQNGRDMYVDQELDINRLSDYDVDHIVPQSFLKDDSIDNKVLTRSDKARGKSDNVPSEEVVKKMKNYWRQLLNAKLITQRKFDNLTKAERGGLSELDKAGFIKRQLVETRQITKHVAQILDSRMNTKYDENDKLIREVKVITLKSKLVSDFRKDFQFYKVREINNYHHAHDAYLNAVVGTALIKKYPKLESEFVYGDYKVYDVRKMIAKSEQEIGKATAKYFFYSNIMNFFKTEITLANGEIRKRPLIETNGETGEIVWDKGRDFATVRKVLSMPQVNIVKKTEVQTGGFSKESILPKRNSDKLIARKKDWDPKKYGGFDSPTVAYSVLVVAKVEKGKSKKLKSVKELLGITIMERSSFEKNPIDFLEAKGYKEVKKDLIIKLPKYSLFELENGRKRMLASAGELQKGNELALPSKYVNFLYLASHYEKLKGSPEDNEQKQLFVEQHKHYLDEIIEQISEFSKRVILADANLDKVLSAYNKHRDKPIREQAENIIHLFTLTNLGAPAAFKYFDTTIDRKRYTSTKEVLDATLIHQSITGLYETRIDLSQLGGDGGEAAAKPAPGGGGGVPWILKKPLELTIKLDLEEQQGTLLNNSILSKKGKEELKQLFEKYSALWQSWENQVGHRRIRPHKIATGTVKPTPQKQYHINPKAKPDIQIVINDLLKQGVLIQKESTMNTPVYPVPKPNGRWRMVLDYRAVNKVTPLIAVQNQHSYGILGSLFKGRYKTTIDLSNGFWAHPIVPEDYWITAFTWQGKQYCWTVLPQGFLNSPGLFNGDVVDLLQGIPNVEVYVDDVYISHDSEKEHLEYLDILFNRLKEAGYIISLKKSNIANSIVDFLGFQITNEGRGLTDTFKEKLENITAPTTLKQLQSILGLLNFARNFIPDFTELIAPLYALIPKSPKNYVPWQIEHSTTLETLITKLNGAEYLQGRKGDKTLIMKVNASYTTGYIRYYNEGEKKPISYVSIVFSKTELKFTELEKLLTTVHKGLLKALDLSMGQNIHVYSPIVSMQNIQKTPQTAKKALASRWLSWLSYLEDPRIRFFYDPQMPALKDLPAVDTGKDNKKHPSNFQHIFYTDGSAITSPTKEGHLNAGMGIVYFINKDGNLQKQQEWSISLGNHTAQFAEIAAFEFALKKCLPLGGNILVVTDSNYVAKAYNEELDVWASNGFVNNRKKPLKHISKWKSVADLKRLRPDVVVTHEPGHQKLDSSPHAYGNNLADQLATQASFKVHAGKRTADGSEFEKRTADGSEFESPKKKAKVE

SEQ ID NO: 1106 - protein, 2087 aa, synthetic construct
MPAAKRVKLDGGDKKYSIGLDIGTNSVGWAVITDEYKVPSKKFKVLGNTDRHSIKKNLIGALLFDSGETAEATRLKRTARRRYTRRKNRICYLQEIFSNEMAKVDDSFFHRLEESFLVEEDKKHERHPIFGNIVDEVAYHEKYPTIYHLRKKLVDSTDKADLRLIYLALAHMIKFRGHFLIEGDLNPDNSDVDKLFIQLVQTYNQLFEENPINASGVDAKAILSARLSKSRRLENLIAQLPGEKKNGLFGNLIALSLGLTPNFKSNFDLAEDAKLQLSKDTYDDDLDNLLAQIGDQYADLFLAAKNLSDAILLSDILRVNTEITKAPLSASMIKRYDEHHQDLTLLKALVRQQLPEKYKEIFFDQSKNGYAGYIDGGASQEEFYKFIKPILEKMDGTEELLVKLNREDLLRKQRTFDNGSIPHQIHLGELHAILRRQEDFYPFLKDNREKIEKILTFRIPYYVGPLARGNSRFAWMTRKSEETITPWNFEEVVDKGASAQSFIERMTNFDKNLPNEKVLPKHSLLYEYFTVYNELTKVKYVTEGMRKPAFLSGEQKKAIVDLLFKTNRKVTVKQLKEDYFKKIECFDSVEISGVEDRFNASLGTYHDLLKIIKDKDFLDNEENEDILEDIVLTLTLFEDREMIEERLKTYAHLFDDKVMKQLKRRRYTGWGRLSRKLINGIRDKQSGKTILDFLKSDGFANRNFMQLIHDDSLTFKEDIQKAQVSGQGDSLHEHIANLAGSPAIKKGILQTVKVVDELVKVMGRHKPENIVIEMARENQTTQKGQKNSRERMKRIEEGIKELGSQILKEHPVENTQLQNEKLYLYYLQNGRDMYVDQELDINRLSDYDVDHIVPQSFLKDDSIDNKVLTRSDKARGKSDNVPSEEVVKKMKNYWRQLLNAKLITQRKFDNLTKAERGGLSELDKAGFIKRQLVETRQITKHVAQILDSRMNTKYDENDKLIREVKVITLKSKLVSDFRKDFQFYKVREINNYHHAHDAYLNAVVGTALIKKYPKLESEFVYGDYKVYDVRKMIAKSEQEIGKATAKYFFYSNIMNFFKTEITLANGEIRKRPLIETNGETGEIVWDKGRDFATVRKVLSMPQVNIVKKTEVQTGGFSKESILPKRNSDKLIARKKDWDPKKYGGFDSPTVAYSVLVVAKVEKGKSKKLKSVKELLGITIMERSSFEKNPIDFLEAKGYKEVKKDLIIKLPKYSLFELENGRKRMLASAGELQKGNELALPSKYVNFLYLASHYEKLKGSPEDNEQKQLFVEQHKHYLDEIIEQISEFSKRVILADANLDKVLSAYNKHRDKPIREQAENIIHLFTLTNLGAPAAFKYFDTTIDRKRYTSTKEVLDATLIHQSITGLYETRIDLSQLGGDGGGGSGGGEAAAKGGVPWILKKPLELTIKLDLEEQQGTLLNNSILSKKGKEELKQLFEKYSALWQSWENQVGHRRIRPHKIATGTVKPTPQKQYHINPKAKPDIQIVINDLLKQGVLIQKESTMNTPVYPVPKPNGRWRMVLDYRAVNKVTPLIAVQNQHSYGILGSLFKGRYKTTIDLSNGFWAHPIVPEDYWITAFTWQGKQYCWTVLPQGFLNSPGLFNGDVVDLLQGIPNVEVYVDDVYISHDSEKEHLEYLDILFNRLKEAGYIISLKKSNIANSIVDFLGFQITNEGRGLTDTFKEKLENITAPTTLKQLQSILGLLNFARNFIPDFTELIAPLYALIPKSPKNYVPWQIEHSTTLETLITKLNGAEYLQGRKGDKTLIMKVNASYTTGYIRYYNEGEKKPISYVSIVFSKTELKFTELEKLLTTVHKGLLKALDLSMGQNIHVYSPIVSMQNIQKTPQTAKKALASRWLSWLSYLEDPRIRFFYDPQMPALKDLPAVDTGKDNKKHPSNFQHIFYTDGSAITSPTKEGHLNAGMGIVYFINKDGNLQKQQEWSISLGNHTAQFAEIAAFEFALKKCLPLGGNILVVTDSNYVAKAYNEELDVWASNGFVNNRKKPLKHISKWKSVADLKRLRPDVVVTHEPGHQKLDSSPHAYGNNLADQLATQASFKVHAGKRTADGSEFEKRTADGSEFESPKKKAKVE

SEQ ID NO: 1107 - protein, 2082 aa, synthetic construct
MPAAKRVKLDGGDKKYSIGLDIGTNSVGWAVITDEYKVPSKKFKVLGNTDRHSIKKNLIGALLFDSGETAEATRLKRTARRRYTRRKNRICYLQEIFSNEMAKVDDSFFHRLEESFLVEEDKKHERHPIFGNIVDEVAYHEKYPTIYHLRKKLVDSTDKADLRLIYLALAHMIKFRGHFLIEGDLNPDNSDVDKLFIQLVQTYNQLFEENPINASGVDAKAILSARLSKSRRLENLIAQLPGEKKNGLFGNLIALSLGLTPNFKSNFDLAEDAKLQLSKDTYDDDLDNLLAQIGDQYADLFLAAKNLSDAILLSDILRVNTEITKAPLSASMIKRYDEHHQDLTLLKALVRQQLPEKYKEIFFDQSKNGYAGYIDGGASQEEFYKFIKPILEKMDGTEELLVKLNREDLLRKQRTFDNGSIPHQIHLGELHAILRRQEDFYPFLKDNREKIEKILTFRIPYYVGPLARGNSRFAWMTRKSEETITPWNFEEVVDKGASAQSFIERMTNFDKNLPNEKVLPKHSLLYEYFTVYNELTKVKYVTEGMRKPAFLSGEQKKAIVDLLFKTNRKVTVKQLKEDYFKKIECFDSVEISGVEDRFNASLGTYHDLLKIIKDKDFLDNEENEDILEDIVLTLTLFEDREMIEERLKTYAHLFDDKVMKQLKRRRYTGWGRLSRKLINGIRDKQSGKTILDFLKSDGFANRNFMQLIHDDSLTFKEDIQKAQVSGQGDSLHEHIANLAGSPAIKKGILQTVKVVDELVKVMGRHKPENIVIEMARENQTTQKGQKNSRERMKRIEEGIKELGSQILKEHPVENTQLQNEKLYLYYLQNGRDMYVDQELDINRLSDYDVDHIVPQSFLKDDSIDNKVLTRSDKARGKSDNVPSEEVVKKMKNYWRQLLNAKLITQRKFDNLTKAERGGLSELDKAGFIKRQLVETRQITKHVAQILDSRMNTKYDENDKLIREVKVITLKSKLVSDFRKDFQFYKVREINNYHHAHDAYLNAVVGTALIKKYPKLESEFVYGDYKVYDVRKMIAKSEQEIGKATAKYFFYSNIMNFFKTEITLANGEIRKRPLIETNGETGEIVWDKGRDFATVRKVLSMPQVNIVKKTEVQTGGFSKESILPKRNSDKLIARKKDWDPKKYGGFDSPTVAYSVLVVAKVEKGKSKKLKSVKELLGITIMERSSFEKNPIDFLEAKGYKEVKKDLIIKLPKYSLFELENGRKRMLASAGELQKGNELALPSKYVNFLYLASHYEKLKGSPEDNEQKQLFVEQHKHYLDEIIEQISEFSKRVILADANLDKVLSAYNKHRDKPIREQAENIIHLFTLTNLGAPAAFKYFDTTIDRKRYTSTKEVLDATLIHQSITGLYETRIDLSQLGGDGGPAPGGSGGVPWILKKPLELTIKLDLEEQQGTLLNNSILSKKGKEELKQLFEKYSALWQSWENQVGHRRIRPHKIATGTVKPTPQKQYHINPKAKPDIQIVINDLLKQGVLIQKESTMNTPVYPVPKPNGRWRMVLDYRAVNKVTPLIAVQNQHSYGILGSLFKGRYKTTIDLSNGFWAHPIVPEDYWITAFTWQGKQYCWTVLPQGFLNSPGLFNGDVVDLLQGIPNVEVYVDDVYISHDSEKEHLEYLDILFNRLKEAGYIISLKKSNIANSIVDFLGFQITNEGRGLTDTFKEKLENITAPTTLKQLQSILGLLNFARNFIPDFTELIAPLYALIPKSPKNYVPWQIEHSTTLETLITKLNGAEYLQGRKGDKTLIMKVNASYTTGYIRYYNEGEKKPISYVSIVFSKTELKFTELEKLLTTVHKGLLKALDLSMGQNIHVYSPIVSMQNIQKTPQTAKKALASRWLSWLSYLEDPRIRFFYDPQMPALKDLPAVDTGKDNKKHPSNFQHIFYTDGSAITSPTKEGHLNAGMGIVYFINKDGNLQKQQEWSISLGNHTAQFAEIAAFEFALKKCLPLGGNILVVTDSNYVAKAYNEELDVWASNGFVNNRKKPLKHISKWKSVADLKRLRPDVVVTHEPGHQKLDSSPHAYGNNLADQLATQASFKVHAGKRTADGSEFEKRTADGSEFESPKKKAKVE

SEQ ID NO: 1108 - protein, 2084 aa, synthetic construct
MPAAKRVKLDGGDKKYSIGLDIGTNSVGWAVITDEYKVPSKKFKVLGNTDRHSIKKNLIGALLFDSGETAEATRLKRTARRRYTRRKNRICYLQEIFSNEMAKVDDSFFHRLEESFLVEEDKKHERHPIFGNIVDEVAYHEKYPTIYHLRKKLVDSTDKADLRLIYLALAHMIKFRGHFLIEGDLNPDNSDVDKLFIQLVQTYNQLFEENPINASGVDAKAILSARLSKSRRLENLIAQLPGEKKNGLFGNLIALSLGLTPNFKSNFDLAEDAKLQLSKDTYDDDLDNLLAQIGDQYADLFLAAKNLSDAILLSDILRVNTEITKAPLSASMIKRYDEHHQDLTLLKALVRQQLPEKYKEIFFDQSKNGYAGYIDGGASQEEFYKFIKPILEKMDGTEELLVKLNREDLLRKQRTFDNGSIPHQIHLGELHAILRRQEDFYPFLKDNREKIEKILTFRIPYYVGPLARGNSRFAWMTRKSEETITPWNFEEVVDKGASAQSFIERMTNFDKNLPNEKVLPKHSLLYEYFTVYNELTKVKYVTEGMRKPAFLSGEQKKAIVDLLFKTNRKVTVKQLKEDYFKKIECFDSVEISGVEDRFNASLGTYHDLLKIIKDKDFLDNEENEDILEDIVLTLTLFEDREMIEERLKTYAHLFDDKVMKQLKRRRYTGWGRLSRKLINGIRDKQSGKTILDFLKSDGFANRNFMQLIHDDSLTFKEDIQKAQVSGQGDSLHEHIANLAGSPAIKKGILQTVKVVDELVKVMGRHKPENIVIEMARENQTTQKGQKNSRERMKRIEEGIKELGSQILKEHPVENTQLQNEKLYLYYLQNGRDMYVDQELDINRLSDYDVDHIVPQSFLKDDSIDNKVLTRSDKARGKSDNVPSEEVVKKMKNYWRQLLNAKLITQRKFDNLTKAERGGLSELDKAGFIKRQLVETRQITKHVAQILDSRMNTKYDENDKLIREVKVITLKSKLVSDFRKDFQFYKVREINNYHHAHDAYLNAVVGTALIKKYPKLESEFVYGDYKVYDVRKMIAKSEQEIGKATAKYFFYSNIMNFFKTEITLANGEIRKRPLIETNGETGEIVWDKGRDFATVRKVLSMPQVNIVKKTEVQTGGFSKESILPKRNSDKLIARKKDWDPKKYGGFDSPTVAYSVLVVAKVEKGKSKKLKSVKELLGITIMERSSFEKNPIDFLEAKGYKEVKKDLIIKLPKYSLFELENGRKRMLASAGELQKGNELALPSKYVNFLYLASHYEKLKGSPEDNEQKQLFVEQHKHYLDEIIEQISEFSKRVILADANLDKVLSAYNKHRDKPIREQAENIIHLFTLTNLGAPAAFKYFDTTIDRKRYTSTKEVLDATLIHQSITGLYETRIDLSQLGGDGGGGGEAAAKGGVPWILKKPLELTIKLDLEEQQGTLLNNSILSKKGKEELKQLFEKYSALWQSWENQVGHRRIRPHKIATGTVKPTPQKQYHINPKAKPDIQIVINDLLKQGVLIQKESTMNTPVYPVPKPNGRWRMVLDYRAVNKVTPLIAVQNQHSYGILGSLFKGRYKTTIDLSNGFWAHPIVPEDYWITAFTWQGKQYCWTVLPQGFLNSPGLFNGDVVDLLQGIPNVEVYVDDVYISHDSEKEHLEYLDILFNRLKEAGYIISLKKSNIANSIVDFLGFQITNEGRGLTDTFKEKLENITAPTTLKQLQSILGLLNFARNFIPDFTELIAPLYALIPKSPKNYVPWQIEHSTTLETLITKLNGAEYLQGRKGDKTLIMKVNASYTTGYIRYYNEGEKKPISYVSIVFSKTELKFTELEKLLTTVHKGLLKALDLSMGQNIHVYSPIVSMQNIQKTPQTAKKALASRWLSWLSYLEDPRIRFFYDPQMPALKDLPAVDTGKDNKKHPSNFQHIFYTDGSAITSPTKEGHLNAGMGIVYFINKDGNLQKQQEWSISLGNHTAQFAEIAAFEFALKKCLPLGGNILVVTDSNYVAKAYNEELDVWASNGFVNNRKKPLKHISKWKSVADLKRLRPDVVVTHEPGHQKLDSSPHAYGNNLADQLATQASFKVHAGKRTADGSEFEKRTADGSEFESPKKKAKVE

SEQ ID NO: 1109 - protein, 2085 aa, synthetic construct
MPAAKRVKLDGGDKKYSIGLDIGTNSVGWAVITDEYKVPSKKFKVLGNTDRHSIKKNLIGALLFDSGETAEATRLKRTARRRYTRRKNRICYLQEIFSNEMAKVDDSFFHRLEESFLVEEDKKHERHPIFGNIVDEVAYHEKYPTIYHLRKKLVDSTDKADLRLIYLALAHMIKFRGHFLIEGDLNPDNSDVDKLFIQLVQTYNQLFEENPINASGVDAKAILSARLSKSRRLENLIAQLPGEKKNGLFGNLIALSLGLTPNFKSNFDLAEDAKLQLSKDTYDDDLDNLLAQIGDQYADLFLAAKNLSDAILLSDILRVNTEITKAPLSASMIKRYDEHHQDLTLLKALVRQQLPEKYKEIFFDQSKNGYAGYIDGGASQEEFYKFIKPILEKMDGTEELLVKLNREDLLRKQRTFDNGSIPHQIHLGELHAILRRQEDFYPFLKDNREKIEKILTFRIPYYVGPLARGNSRFAWMTRKSEETITPWNFEEVVDKGASAQSFIERMTNFDKNLPNEKVLPKHSLLYEYFTVYNELTKVKYVTEGMRKPAFLSGEQKKAIVDLLFKTNRKVTVKQLKEDYFKKIECFDSVEISGVEDRFNASLGTYHDLLKIIKDKDFLDNEENEDILEDIVLTLTLFEDREMIEERLKTYAHLFDDKVMKQLKRRRYTGWGRLSRKLINGIRDKQSGKTILDFLKSDGFANRNFMQLIHDDSLTFKEDIQKAQVSGQGDSLHEHIANLAGSPAIKKGILQTVKVVDELVKVMGRHKPENIVIEMARENQTTQKGQKNSRERMKRIEEGIKELGSQILKEHPVENTQLQNEKLYLYYLQNGRDMYVDQELDINRLSDYDVDHIVPQSFLKDDSIDNKVLTRSDKARGKSDNVPSEEVVKKMKNYWRQLLNAKLITQRKFDNLTKAERGGLSELDKAGFIKRQLVETRQITKHVAQILDSRMNTKYDENDKLIREVKVITLKSKLVSDFRKDFQFYKVREINNYHHAHDAYLNAVVGTALIKKYPKLESEFVYGDYKVYDVRKMIAKSEQEIGKATAKYFFYSNIMNFFKTEITLANGEIRKRPLIETNGETGEIVWDKGRDFATVRKVLSMPQVNIVKKTEVQTGGFSKESILPKRNSDKLIARKKDWDPKKYGGFDSPTVAYSVLVVAKVEKGKSKKLKSVKELLGITIMERSSFEKNPIDFLEAKGYKEVKKDLIIKLPKYSLFELENGRKRMLASAGELQKGNELALPSKYVNFLYLASHYEKLKGSPEDNEQKQLFVEQHKHYLDEIIEQISEFSKRVILADANLDKVLSAYNKHRDKPIREQAENIIHLFTLTNLGAPAAFKYFDTTIDRKRYTSTKEVLDATLIHQSITGLYETRIDLSQLGGDGGGGGGSSPAPGGVPWILKKPLELTIKLDLEEQQGTLLNNSILSKKGKEELKQLFEKYSALWQSWENQVGHRRIRPHKIATGTVKPTPQKQYHINPKAKPDIQIVINDLLKQGVLIQKESTMNTPVYPVPKPNGRWRMVLDYRAVNKVTPLIAVQNQHSYGILGSLFKGRYKTTIDLSNGFWAHPIVPEDYWITAFTWQGKQYCWTVLPQGFLNSPGLFNGDVVDLLQGIPNVEVYVDDVYISHDSEKEHLEYLDILFNRLKEAGYIISLKKSNIANSIVDFLGFQITNEGRGLTDTFKEKLENITAPTTLKQLQSILGLLNFARNFIPDFTELIAPLYALIPKSPKNYVPWQIEHSTTLETLITKLNGAEYLQGRKGDKTLIMKVNASYTTGYIRYYNEGEKKPISYVSIVFSKTELKFTELEKLLTTVHKGLLKALDLSMGQNIHVYSPIVSMQNIQKTPQTAKKALASRWLSWLSYLEDPRIRFFYDPQMPALKDLPAVDTGKDNKKHPSNFQHIFYTDGSAITSPTKEGHLNAGMGIVYFINKDGNLQKQQEWSISLGNHTAQFAEIAAFEFALKKCLPLGGNILVVTDSNYVAKAYNEELDVWASNGFVNNRKKPLKHISKWKSVADLKRLRPDVVVTHEPGHQKLDSSPHAYGNNLADQLATQASFKVHAGKRTADGSEFEKRTADGSEFESPKKKAKVE

SEQ ID NO: 1110 - protein, 2085 aa, synthetic construct
MPAAKRVKLDGGDKKYSIGLDIGTNSVGWAVITDEYKVPSKKFKVLGNTDRHSIKKNLIGALLFDSGETAEATRLKRTARRRYTRRKNRICYLQEIFSNEMAKVDDSFFHRLEESFLVEEDKKHERHPIFGNIVDEVAYHEKYPTIYHLRKKLVDSTDKADLRLIYLALAHMIKFRGHFLIEGDLNPDNSDVDKLFIQLVQTYNQLFEENPINASGVDAKAILSARLSKSRRLENLIAQLPGEKKNGLFGNLIALSLGLTPNFKSNFDLAEDAKLQLSKDTYDDDLDNLLAQIGDQYADLFLAAKNLSDAILLSDILRVNTEITKAPLSASMIKRYDEHHQDLTLLKALVRQQLPEKYKEIFFDQSKNGYAGYIDGGASQEEFYKFIKPILEKMDGTEELLVKLNREDLLRKQRTFDNGSIPHQIHLGELHAILRRQEDFYPFLKDNREKIEKILTFRIPYYVGPLARGNSRFAWMTRKSEETITPWNFEEVVDKGASAQSFIERMTNFDKNLPNEKVLPKHSLLYEYFTVYNELTKVKYVTEGMRKPAFLSGEQKKAIVDLLFKTNRKVTVKQLKEDYFKKIECFDSVEISGVEDRFNASLGTYHDLLKIIKDKDFLDNEENEDILEDIVLTLTLFEDREMIEERLKTYAHLFDDKVMKQLKRRRYTGWGRLSRKLINGIRDKQSGKTILDFLKSDGFANRNFMQLIHDDSLTFKEDIQKAQVSGQGDSLHEHIANLAGSPAIKKGILQTVKVVDELVKVMGRHKPENIVIEMARENQTTQKGQKNSRERMKRIEEGIKELGSQILKEHPVENTQLQNEKLYLYYLQNGRDMYVDQELDINRLSDYDVDHIVPQSFLKDDSIDNKVLTRSDKARGKSDNVPSEEVVKKMKNYWRQLLNAKLITQRKFDNLTKAERGGLSELDKAGFIKRQLVETRQITKHVAQILDSRMNTKYDENDKLIREVKVITLKSKLVSDFRKDFQFYKVREINNYHHAHDAYLNAVVGTALIKKYPKLESEFVYGDYKVYDVRKMIAKSEQEIGKATAKYFFYSNIMNFFKTEITLANGEIRKRPLIETNGETGEIVWDKGRDFATVRKVLSMPQVNIVKKTEVQTGGFSKESILPKRNSDKLIARKKDWDPKKYGGFDSPTVAYSVLVVAKVEKGKSKKLKSVKELLGITIMERSSFEKNPIDFLEAKGYKEVKKDLIIKLPKYSLFELENGRKRMLASAGELQKGNELALPSKYVNFLYLASHYEKLKGSPEDNEQKQLFVEQHKHYLDEIIEQISEFSKRVILADANLDKVLSAYNKHRDKPIREQAENIIHLFTLTNLGAPAAFKYFDTTIDRKRYTSTKEVLDATLIHQSITGLYETRIDLSQLGGDGGPAPGGSGSSGGVPWILKKPLELTIKLDLEEQQGTLLNNSILSKKGKEELKQLFEKYSALWQSWENQVGHRRIRPHKIATGTVKPTPQKQYHINPKAKPDIQIVINDLLKQGVLIQKESTMNTPVYPVPKPNGRWRMVLDYRAVNKVTPLIAVQNQHSYGILGSLFKGRYKTTIDLSNGFWAHPIVPEDYWITAFTWQGKQYCWTVLPQGFLNSPGLFNGDVVDLLQGIPNVEVYVDDVYISHDSEKEHLEYLDILFNRLKEAGYIISLKKSNIANSIVDFLGFQITNEGRGLTDTFKEKLENITAPTTLKQLQSILGKLNFARNFIPDFTELIAPLYALIPKSPKNYVPWQIEHSTTLETLITKLNGAEYLQGRKGDKTLIMKVNASYTTGYIRYYNEGEKKPISYVSIVFSKTELKFTELEKLLTTVHKGLLKALDLSMGQNIHVYSPIVSMQNIQKTPQTAKKALASRWLSWLSYLEDPRIRFFYDPQMPALKDLPAVDTGKDNKKHPSNFQHIFYTDGSAITSPTKEGHLNAGMGIVYFINKDGNLQKQQEWSISLGNHTAQFAEIAAFEFALKKCLPLGGNILVVTDSNYVAKAYNEELDVWASNGFVNNRKKPLKHISKWKSVADLKRLRPDVVVTHEPGHQKLDSSPHAYGNNLADQLATQASFKVHAGKRTADGSEFEKRTADGSEFESPKKKAKVE

SEQ ID NO: 1111 - protein, 2087 aa, synthetic construct
MPAAKRVKLDGGDKKYSIGLDIGTNSVGWAVITDEYKVPSKKFKVLGNTDRHSIKKNLIGALLFDSGETAEATRLKRTARRRYTRRKNRICYLQEIFSNEMAKVDDSFFHRLEESFLVEEDKKHERHPIFGNIVDEVAYHEKYPTIYHLRKKLVDSTDKADLRLIYLALAHMIKFRGHFLIEGDLNPDNSDVDKLFIQLVQTYNQLFEENPINASGVDAKAILSARLSKSRRLENLIAQLPGEKKNGLFGNLIALSLGLTPNFKSNFDLAEDAKLQLSKDTYDDDLDNLLAQIGDQYADLFLAAKNLSDAILLSDILRVNTEITKAPLSASMIKRYDEHHQDLTLLKALVRQQLPEKYKEIFFDQSKNGYAGYIDGGASQEEFYKFIKPILEKMDGTEELLVKLNREDLLRKQRTFDNGSIPHQIHLGELHAILRRQEDFYPFLKDNREKIEKILTFRIPYYVGPLARGNSRFAWMTRKSEETITPWNFEEVVDKGASAQSFIERMTNFDKNLPNEKVLPKHSLLYEYFTVYNELTKVKYVTEGMRKPAFLSGEQKKAIVDLLFKTNRKVTVKQLKEDYFKKIECFDSVEISGVEDRFNASLGTYHDLLKIIKDKDFLDNEENEDILEDIVLTLTLFEDREMIEERLKTYAHLFDDKVMKQLKRRRYTGWGRLSRKLINGIRDKQSGKTILDFLKSDGFANRNFMQLIHDDSLTFKEDIQKAQVSGQGDSLHEHIANLAGSPAIKKGILQTVKVVDELVKVMGRHKPENIVIEMARENQTTQKGQKNSRERMKRIEEGIKELGSQILKEHPVENTQLQNEKLYLYYLQNGRDMYVDQELDINRLSDYDVDHIVPQSFLKDDSIDNKVLTRSDKARGKSDNVPSEEVVKKMKNYWRQLLNAKLITQRKFDNLTKAERGGLSELDKAGFIKRQLVETRQITKHVAQILDSRMNTKYDENDKLIREVKVITLKSKLVSDFRKDFQFYKVREINNYHHAHDAYLNAVVGTALIKKYPKLESEFVYGDYKVYDVRKMIAKSEQEIGKATAKYFFYSNIMNFFKTEITLANGEIRKRPLIETNGETGEIVWDKGRDFATVRKVLSMPQVNIVKKTEVQTGGFSKESILPKRNSDKLIARKKDWDPKKYGGFDSPTVAYSVLVVAKVEKGKSKKLKSVKELLGITIMERSSFEKNPIDFLEAKGYKEVKKDLIIKLPKYSLFELENGRKRMLASAGELQKGNELALPSKYVNFLYLASHYEKLKGSPEDNEQKQLFVEQHKHYLDEIIEQISEFSKRVILADANLDKVLSAYNKHRDKPIREQAENIIHLFTLTNLGAPAAFKYFDTTIDRKRYTSTKEVLDATLIHQSITGLYETRIDLSQLGGDGGGSSEAAAKGGGGGVPWILKKPLELTIKLDLEEQQGTLLNNSILSKKGKEELKQLFEKYSALWQSWENQVGHRRIRPHKIATGTVKPTPQKQYHINPKAKPDIQIVINDLLKQGVLIQKESTMNTPVYPVPKPNGRWRMVLDYRAVNKVTPLIAVQNQHSYGILGSLFKGRYKTTIDLSNGFWAHPIVPEDYWITAFTWQGKQYCWTVLPQGFLNSPGLFNGDVVDLLQGIPNVEVYVDDVYISHDSEKEHLEYLDILFNRLKEAGYIISLKKSNIANSIVDFLGFQITNEGRGLTDTFKEKLENITAPTTLKQLQSILGKLNFARNFIPDFTELIAPLYALIPKSPKNYVPWQIEHSTTLETLITKLNGAEYLQGRKGDKTLIMKVNASYTTGYIRYYNEGEKKPISYVSIVFSKTELKFTELEKLLTTVHKGLLKALDLSMGQNIHVYSPIVSMQNIQKTPQTAKKALASRWLSWLSYLEDPRIRFFYDPQMPALKDLPAVDTGKDNKKHPSNFQHIFYTDGSAITSPTKEGHLNAGMGIVYFINKDGNLQKQQEWSISLGNHTAQFAEIAAFEFALKKCLPLGGNILVVTDSNYVAKAYNEELDVWASNGFVNNRKKPLKHISKWKSVADLKRLRPDVVVTHEPGHQKLDSSPHAYGNNLADQLATQASFKVHAGKRTADGSEFEKRTADGSEFESPKKKAKVE

SEQ ID NO: 1112 - protein, 2091 aa, synthetic construct
MPAAKRVKLDGGDKKYSIGLDIGTNSVGWAVITDEYKVPSKKFKVLGNTDRHSIKKNLIGALLFDSGETAEATRLKRTARRRYTRRKNRICYLQEIFSNEMAKVDDSFFHRLEESFLVEEDKKHERHPIFGNIVDEVAYHEKYPTIYHLRKKLVDSTDKADLRLIYLALAHMIKFRGHFLIEGDLNPDNSDVDKLFIQLVQTYNQLFEENPINASGVDAKAILSARLSKSRRLENLIAQLPGEKKNGLFGNLIALSLGLTPNFKSNFDLAEDAKLQLSKDTYDDDLDNLLAQIGDQYADLFLAAKNLSDAILLSDILRVNTEITKAPLSASMIKRYDEHHQDLTLLKALVRQQLPEKYKEIFFDQSKNGYAGYIDGGASQEEFYKFIKPILEKMDGTEELLVKLNREDLLRKQRTFDNGSIPHQIHLGELHAILRRQEDFYPFLKDNREKIEKILTFRIPYYVGPLARGNSRFAWMTRKSEETITPWNFEEVVDKGASAQSFIERMTNFDKNLPNEKVLPKHSLLYEYFTVYNELTKVKYVTEGMRKPAFLSGEQKKAIVDLLFKTNRKVTVKQLKEDYFKKIECFDSVEISGVEDRFNASLGTYHDLLKIIKDKDFLDNEENEDILEDIVLTLTLFEDREMIEERLKTYAHLFDDKVMKQLKRRRYTGWGRLSRKLINGIRDKQSGKTILDFLKSDGFANRNFMQLIHDDSLTFKEDIQKAQVSGQGDSLHEHIANLAGSPAIKKGILQTVKVVDELVKVMGRHKPENIVIEMARENQTTQKGQKNSRERMKRIEEGIKELGSQILKEHPVENTQLQNEKLYLYYLQNGRDMYVDQELDINRLSDYDVDHIVPQSFLKDDSIDNKVLTRSDKARGKSDNVPSEEVVKKMKNYWRQLLNAKLITQRKFDNLTKAERGGLSELDKAGFIKRQLVETRQITKHVAQILDSRMNTKYDENDKLIREVKVITLKSKLVSDFRKDFQFYKVREINNYHHAHDAYLNAVVGTALIKKYPKLESEFVYGDYKVYDVRKMIAKSEQEIGKATAKYFFYSNIMNFFKTEITLANGEIRKRPLIETNGETGEIVWDKGRDFATVRKVLSMPQVNIVKKTEVQTGGFSKESILPKRNSDKLIARKKDWDPKKYGGFDSPTVAYSVLVVAKVEKGKSKKLKSVKELLGITIMERSSFEKNPIDFLEAKGYKEVKKDLIIKLPKYSLFELENGRKRMLASAGELQKGNELALPSKYVNFLYLASHYEKLKGSPEDNEQKQLFVEQHKHYLDEIIEQISEFSKRVILADANLDKVLSAYNKHRDKPIREQAENIIHLFTLTNLGAPAAFKYFDTTIDRKRYTSTKEVLDATLIHQSITGLYETRIDLSQLGGDGGGSSGSSGSSGSSGSSGGVPWILKKPLELTIKLDLEEQQGTLLNNSILSKKGKEELKQLFEKYSALWQSWENQVGHRRIRPHKIATGTVKPTPQKQYHINPKAKPDIQIVINDLLKQGVLIQKESTMNTPVYPVPKPNGRWRMVLDYRAVNKVTPLIAVQNQHSYGILGSLFKGRYKTTIDLSNGFWAHPIVPEDYWITAFTWQGKQYCWTVLPQGFLNSPGLFNGDVVDLLQGIPNVEVYVDDVYISHDSEKEHLEYLDILFNRLKEAGYIISLKKSNIANSIVDFLGFQITNEGRGLTDTFKEKLENITAPTTLKQLQSILGKLNFARNFIPDFTELIAPLYALIPKSPKNYVPWQIEHSTTLETLITKLNGAEYLQGRKGDKTLIMKVNASYTTGYIRYYNEGEKKPISYVSIVFSKTELKFTELEKLLTTVHKGLLKALDLSMGQNIHVYSPIVSMQNIQKTPQTAKKALASRWLSWLSYLEDPRIRFFYDPQMPALKDLPAVDTGKDNKKHPSNFQHIFYTDGSAITSPTKEGHLNAGMGIVYFINKDGNLQKQQEWSISLGNHTAQFAEIAAFEFALKKCLPLGGNILVVTDSNYVAKAYNEELDVWASNGFVNNRKKPLKHISKWKSVADLKRLRPDVVVTHEPGHQKLDSSPHAYGNNLADQLATQASFKVHAGKRTADGSEFEKRTADGSEFESPKKKAKVE

SEQ ID NO: 1113 - protein, 2087 aa, synthetic construct
MPAAKRVKLDGGDKKYSIGLDIGTNSVGWAVITDEYKVPSKKFKVLGNTDRHSIKKNLIGALLFDSGETAEATRLKRTARRRYTRRKNRICYLQEIFSNEMAKVDDSFFHRLEESFLVEEDKKHERHPIFGNIVDEVAYHEKYPTIYHLRKKLVDSTDKADLRLIYLALAHMIKFRGHFLIEGDLNPDNSDVDKLFIQLVQTYNQLFEENPINASGVDAKAILSARLSKSRRLENLIAQLPGEKKNGLFGNLIALSLGLTPNFKSNFDLAEDAKLQLSKDTYDDDLDNLLAQIGDQYADLFLAAKNLSDAILLSDILRVNTEITKAPLSASMIKRYDEHHQDLTLLKALVRQQLPEKYKEIFFDQSKNGYAGYIDGGASQEEFYKFIKPILEKMDGTEELLVKLNREDLLRKQRTFDNGSIPHQIHLGELHAILRRQEDFYPFLKDNREKIEKILTFRIPYYVGPLARGNSRFAWMTRKSEETITPWNFEEVVDKGASAQSFIERMTNFDKNLPNEKVLPKHSLLYEYFTVYNELTKVKYVTEGMRKPAFLSGEQKKAIVDLLFKTNRKVTVKQLKEDYFKKIECFDSVEISGVEDRFNASLGTYHDLLKIIKDKDFLDNEENEDILEDIVLTLTLFEDREMIEERLKTYAHLFDDKVMKQLKRRRYTGWGRLSRKLINGIRDKQSGKTILDFLKSDGFANRNFMQLIHDDSLTFKEDIQKAQVSGQGDSLHEHIANLAGSPAIKKGILQTVKVVDELVKVMGRHKPENIVIEMARENQTTQKGQKNSRERMKRIEEGIKELGSQILKEHPVENTQLQNEKLYLYYLQNGRDMYVDQELDINRLSDYDVDHIVPQSFLKDDSIDNKVLTRSDKARGKSDNVPSEEVVKKMKNYWRQLLNAKLITQRKFDNLTKAERGGLSELDKAGFIKRQLVETRQITKHVAQILDSRMNTKYDENDKLIREVKVITLKSKLVSDFRKDFQFYKVREINNYHHAHDAYLNAVVGTALIKKYPKLESEFVYGDYKVYDVRKMIAKSEQEIGKATAKYFFYSNIMNFFKTEITLANGEIRKRPLIETNGETGEIVWDKGRDFATVRKVLSMPQVNIVKKTEVQTGGFSKESILPKRNSDKLIARKKDWDPKKYGGFDSPTVAYSVLVVAKVEKGKSKKLKSVKELLGITIMERSSFEKNPIDFLEAKGYKEVKKDLIIKLPKYSLFELENGRKRMLASAGELQKGNELALPSKYVNFLYLASHYEKLKGSPEDNEQKQLFVEQHKHYLDEIIEQISEFSKRVILADANLDKVLSAYNKHRDKPIREQAENIIHLFTLTNLGAPAAFKYFDTTIDRKRYTSTKEVLDATLIHQSITGLYETRIDLSQLGGDGGGGSEAAAKGGGGGVPWILKKPLELTIKLDLEEQQGTLLNNSILSKKGKEELKQLFEKYSALWQSWENQVGHRRIRPHKIATGTVKPTPQKQYHINPKAKPDIQIVINDLLKQGVLIQKESTMNTPVYPVPKPNGRWRMVLDYRAVNKVTPLIAVQNQHSYGILGSLFKGRYKTTIDLSNGFWAHPIVPEDYWITAFTWQGKQYCWTVLPQGFLNSPGLFNGDVVDLLQGIPNVEVYVDDVYISHDSEKEHLEYLDILFNRLKEAGYIISLKKSNIANSIVDFLGFQITNEGRGLTDTFKEKLENITAPTTLKQLQSILGKLNFARNFIPDFTELIAPLYALIPKSPKNYVPWQIEHSTTLETLITKLNGAEYLQGRKGDKTLIMKVNASYTTGYIRYYNEGEKKPISYVSIVFSKTELKFTELEKLLTTVHKGLLKALDLSMGQNIHVYSPIVSMQNIQKTPQTAKKALASRWLSWLSYLEDPRIRFFYDPQMPALKDLPAVDTGKDNKKHPSNFQHIFYTDGSAITSPTKEGHLNAGMGIVYFINKDGNLQKQQEWSISLGNHTAQFAEIAAFEFALKKCLPLGGNILVVTDSNYVAKAYNEELDVWASNGFVNNRKKPLKHISKWKSVADLKRLRPDVVVTHEPGHQKLDSSPHAYGNNLADQLATQASFKVHAGKRTADGSEFEKRTADGSEFESPKKKAKVE

SEQ ID NO: 1114 - protein, 2087 aa, synthetic construct
MPAAKRVKLDGGDKKYSIGLDIGTNSVGWAVITDEYKVPSKKFKVLGNTDRHSIKKNLIGALLFDSGETAEATRLKRTARRRYTRRKNRICYLQEIFSNEMAKVDDSFFHRLEESFLVEEDKKHERHPIFGNIVDEVAYHEKYPTIYHLRKKLVDSTDKADLRLIYLALAHMIKFRGHFLIEGDLNPDNSDVDKLFIQLVQTYNQLFEENPINASGVDAKAILSARLSKSRRLENLIAQLPGEKKNGLFGNLIALSLGLTPNFKSNFDLAEDAKLQLSKDTYDDDLDNLLAQIGDQYADLFLAAKNLSDAILLSDILRVNTEITKAPLSASMIKRYDEHHQDLTLLKALVRQQLPEKYKEIFFDQSKNGYAGYIDGGASQEEFYKFIKPILEKMDGTEELLVKLNREDLLRKQRTFDNGSIPHQIHLGELHAILRRQEDFYPFLKDNREKIEKILTFRIPYYVGPLARGNSRFAWMTRKSEETITPWNFEEVVDKGASAQSFIERMTNFDKNLPNEKVLPKHSLLYEYFTVYNELTKVKYVTEGMRKPAFLSGEQKKAIVDLLFKTNRKVTVKQLKEDYFKKIECFDSVEISGVEDRFNASLGTYHDLLKIIKDKDFLDNEENEDILEDIVLTLTLFEDREMIEERLKTYAHLFDDKVMKQLKRRRYTGWGRLSRKLINGIRDKQSGKTILDFLKSDGFANRNFMQLIHDDSLTFKEDIQKAQVSGQGDSLHEHIANLAGSPAIKKGILQTVKVVDELVKVMGRHKPENIVIEMARENQTTQKGQKNSRERMKRIEEGIKELGSQILKEHPVENTQLQNEKLYLYYLQNGRDMYVDQELDINRLSDYDVDHIVPQSFLKDDSIDNKVLTRSDKARGKSDNVPSEEVVKKMKNYWRQLLNAKLITQRKFDNLTKAERGGLSELDKAGFIKRQLVETRQITKHVAQILDSRMNTKYDENDKLIREVKVITLKSKLVSDFRKDFQFYKVREINNYHHAHDAYLNAVVGTALIKKYPKLESEFVYGDYKVYDVRKMIAKSEQEIGKATAKYFFYSNIMNFFKTEITLANGEIRKRPLIETNGETGEIVWDKGRDFATVRKVLSMPQVNIVKKTEVQTGGFSKESILPKRNSDKLIARKKDWDPKKYGGFDSPTVAYSVLVVAKVEKGKSKKLKSVKELLGITIMERSSFEKNPIDFLEAKGYKEVKKDLIIKLPKYSLFELENGRKRMLASAGELQKGNELALPSKYVNFLYLASHYEKLKGSPEDNEQKQLFVEQHKHYLDEIIEQISEFSKRVILADANLDKVLSAYNKHRDKPIREQAENIIHLFTLTNLGAPAAFKYFDTTIDRKRYTSTKEVLDATLIHQSITGLYETRIDLSQLGGDGGGGGEAAAKGGSGGVPWILKKPLELTIKLDLEEQQGTLLNNSILSKKGKEELKQLFEKYSALWQSWENQVGHRRIRPHKIATGTVKPTPQKQYHINPKAKPDIQIVINDLLKQGVLIQKESTMNTPVYPVPKPNGRWRMVLDYRAVNKVTPLIAVQNQHSYGILGSLFKGRYKTTIDLSNGFWAHPIVPEDYWITAFTWQGKQYCWTVLPQGFLNSPGLFNGDVVDLLQGIPNVEVYVDDVYISHDSEKEHLEYLDILFNRLKEAGYIISLKKSNIANSIVDFLGFQITNEGRGLTDTFKEKLENITAPTTLKQLQSILGKLNFARNFIPDFTELIAPLYALIPKSPKNYVPWQIEHSTTLETLITKLNGAEYLQGRKGDKTLIMKVNASYTTGYIRYYNEGEKKPISYVSIVFSKTELKFTELEKLLTTVHKGLLKALDLSMGQNIHVYSPIVSMQNIQKTPQTAKKALASRWLSWLSYLEDPRIRFFYDPQMPALKDLPAVDTGKDNKKHPSNFQHIFYTDGSAITSPTKEGHLNAGMGIVYFINKDGNLQKQQEWSISLGNHTAQFAEIAAFEFALKKCLPLGGNILVVTDSNYVAKAYNEELDVWASNGFVNNRKKPLKHISKWKSVADLKRLRPDVVVTHEPGHQKLDSSPHAYGNNLADQLATQASFKVHAGKRTADGSEFEKRTADGSEFESPKKKAKVE

SEQ ID NO: 1115 - protein, 2208 aa, synthetic construct
MPAAKRVKLDGGDKKYSIGLDIGTNSVGWAVITDEYKVPSKKFKVLGNTDRHSIKKNLIGALLFDSGETAEATRLKRTARRRYTRRKNRICYLQEIFSNEMAKVDDSFFHRLEESFLVEEDKKHERHPIFGNIVDEVAYHEKYPTIYHLRKKLVDSTDKADLRLIYLALAHMIKFRGHFLIEGDLNPDNSDVDKLFIQLVQTYNQLFEENPINASGVDAKAILSARLSKSRRLENLIAQLPGEKKNGLFGNLIALSLGLTPNFKSNFDLAEDAKLQLSKDTYDDDLDNLLAQIGDQYADLFLAAKNLSDAILLSDILRVNTEITKAPLSASMIKRYDEHHQDLTLLKALVRQQLPEKYKEIFFDQSKNGYAGYIDGGASQEEFYKFIKPILEKMDGTEELLVKLNREDLLRKQRTFDNGSIPHQIHLGELHAILRRQEDFYPFLKDNREKIEKILTFRIPYYVGPLARGNSRFAWMTRKSEETITPWNFEEVVDKGASAQSFIERMTNFDKNLPNEKVLPKHSLLYEYFTVYNELTKVKYVTEGMRKPAFLSGEQKKAIVDLLFKTNRKVTVKQLKEDYFKKIECFDSVEISGVEDRFNASLGTYHDLLKIIKDKDFLDNEENEDILEDIVLTLTLFEDREMIEERLKTYAHLFDDKVMKQLKRRRYTGWGRLSRKLINGIRDKQSGKTILDFLKSDGFANRNFMQLIHDDSLTFKEDIQKAQVSGQGDSLHEHIANLAGSPAIKKGILQTVKVVDELVKVMGRHKPENIVIEMARENQTTQKGQKNSRERMKRIEEGIKELGSQILKEHPVENTQLQNEKLYLYYLQNGRDMYVDQELDINRLSDYDVDHIVPQSFLKDDSIDNKVLTRSDKARGKSDNVPSEEVVKKMKNYWRQLLNAKLITQRKFDNLTKAERGGLSELDKAGFIKRQLVETRQITKHVAQILDSRMNTKYDENDKLIREVKVITLKSKLVSDFRKDFQFYKVREINNYHHAHDAYLNAVVGTALIKKYPKLESEFVYGDYKVYDVRKMIAKSEQEIGKATAKYFFYSNIMNFFKTEITLANGEIRKRPLIETNGETGEIVWDKGRDFATVRKVLSMPQVNIVKKTEVQTGGFSKESILPKRNSDKLIARKKDWDPKKYGGFDSPTVAYSVLVVAKVEKGKSKKLKSVKELLGITIMERSSFEKNPIDFLEAKGYKEVKKDLIIKLPKYSLFELENGRKRMLASAGELQKGNELALPSKYVNFLYLASHYEKLKGSPEDNEQKQLFVEQHKHYLDEIIEQISEFSKRVILADANLDKVLSAYNKHRDKPIREQAENIIHLFTLTNLGAPAAFKYFDTTIDRKRYTSTKEVLDATLIHQSITGLYETRIDLSQLGGDGGAEAAAKEAAAKEAAAKEAAAKALEAEAAAKEAAAKEAAAKEAAAKAGGMDLLKPLTVERKGVKIKGYWNSQADITCVPKDLLQGEEPVRQQNVTTIHGTQEGDVYYVNLKIDGRRINTEVIGTTLDYAIITPGDVPWILKKPLELTIKLDLEEQQGTLLNNSILSKKGKEELKQLFEKYSALWQSWENQVGHRRIRPHKIATGTVKPTPQKQYHINPKAKPDIQIVINDLLKQGVLIQKESTMNTPVYPVPKPNGRWRMVLDYRAVNKVTPLIAVQNQHSYGILGSLFKGRYKTTIDLSNGFWAHPIVPEDYWITAFTWQGKQYCWTVLPQGFLNSPGLFNGDVVDLLQGIPNVEVYVDDVYISHDSEKEHLEYLDILFNRLKEAGYIISLKKSNIANSIVDFLGFQITNEGRGLTDTFKEKLENITAPTTLKQLQSILGLLNFARNFIPDFTELIAPLYALIPKSPKNYVPWQIEHSTTLETLITKLNGAEYLQGRKGDKTLIMKVNASYTTGYIRYYNEGEKKPISYVSIVFSKTELKFTELEKLLTTVHKGLLKALDLSMGQNIHVYSPIVSMQNIQKTPQTAKKALASRWLSWLSYLEDPRIRFFYDPQMPALKDLPAVDTGKDNKKHPSNFQHIFYTDGSAITSPTKEGHLNAGMGIVYFINKDGNLQKQQEWSISLGNHTAQFAEIAAFEFALKKCLPLGGNILVVTDSNYVAKAYNEELDVWASNGFVNNRKKPLKHISKWKSVADLKRLRPDVVVTHEPGHQKLDSSPHAYGNNLADQLATQASFKVHAGKRTADGSEFEKRTADGSEFESPKKKAKVE

SEQ ID NO: 1116 - protein, 2182 aa, synthetic construct
MPAAKRVKLDGGDKKYSIGLDIGTNSVGWAVITDEYKVPSKKFKVLGNTDRHSIKKNLIGALLFDSGETAEATRLKRTARRRYTRRKNRICYLQEIFSNEMAKVDDSFFHRLEESFLVEEDKKHERHPIFGNIVDEVAYHEKYPTIYHLRKKLVDSTDKADLRLIYLALAHMIKFRGHFLIEGDLNPDNSDVDKLFIQLVQTYNQLFEENPINASGVDAKAILSARLSKSRRLENLIAQLPGEKKNGLFGNLIALSLGLTPNFKSNFDLAEDAKLQLSKDTYDDDLDNLLAQIGDQYADLFLAAKNLSDAILLSDILRVNTEITKAPLSASMIKRYDEHHQDLTLLKALVRQQLPEKYKEIFFDQSKNGYAGYIDGGASQEEFYKFIKPILEKMDGTEELLVKLNREDLLRKQRTFDNGSIPHQIHLGELHAILRRQEDFYPFLKDNREKIEKILTFRIPYYVGPLARGNSRFAWMTRKSEETITPWNFEEVVDKGASAQSFIERMTNFDKNLPNEKVLPKHSLLYEYFTVYNELTKVKYVTEGMRKPAFLSGEQKKAIVDLLFKTNRKVTVKQLKEDYFKKIECFDSVEISGVEDRFNASLGTYHDLLKIIKDKDFLDNEENEDILEDIVLTLTLFEDREMIEERLKTYAHLFDDKVMKQLKRRRYTGWGRLSRKLINGIRDKQSGKTILDFLKSDGFANRNFMQLIHDDSLTFKEDIQKAQVSGQGDSLHEHIANLAGSPAIKKGILQTVKVVDELVKVMGRHKPENIVIEMARENQTTQKGQKNSRERMKRIEEGIKELGSQILKEHPVENTQLQNEKLYLYYLQNGRDMYVDQELDINRLSDYDVDHIVPQSFLKDDSIDNKVLTRSDKARGKSDNVPSEEVVKKMKNYWRQLLNAKLITQRKFDNLTKAERGGLSELDKAGFIKRQLVETRQITKHVAQILDSRMNTKYDENDKLIREVKVITLKSKLVSDFRKDFQFYKVREINNYHHAHDAYLNAVVGTALIKKYPKLESEFVYGDYKVYDVRKMIAKSEQEIGKATAKYFFYSNIMNFFKTEITLANGEIRKRPLIETNGETGEIVWDKGRDFATVRKVLSMPQVNIVKKTEVQTGGFSKESILPKRNSDKLIARKKDWDPKKYGGFDSPTVAYSVLVVAKVEKGKSKKLKSVKELLGITIMERSSFEKNPIDFLEAKGYKEVKKDLIIKLPKYSLFELENGRKRMLASAGELQKGNELALPSKYVNFLYLASHYEKLKGSPEDNEQKQLFVEQHKHYLDEIIEQISEFSKRVILADANLDKVLSAYNKHRDKPIREQAENIIHLFTLTNLGAPAAFKYFDTTIDRKRYTSTKEVLDATLIHQSITGLYETRIDLSQLGGDGGEAAAKEAAAKEAAAKEAAAKGGMDLLKPLTVERKGVKIKGYWNSQADITCVPKDLLQGEEPVRQQNVTTIHGTQEGDVYYVNLKIDGRRINTEVIGTTLDYAIITPGDVPWILKKPLELTIKLDLEEQQGTLLNNSILSKKGKEELKQLFEKYSALWQSWENQVGHRRIRPHKIATGTVKPTPQKQYHINPKAKPDIQIVINDLLKQGVLIQKESTMNTPVYPVPKPNGRWRMVLDYRAVNKVTPLIAVQNQHSYGILGSLFKGRYKTTIDLSNGFWAHPIVPEDYWITAFTWQGKQYCWTVLPQGFLNSPGLFNGDVVDLLQGIPNVEVYVDDVYISHDSEKEHLEYLDILFNRLKEAGYIISLKKSNIANSIVDFLGFQITNEGRGLTDTFKEKLENITAPTTLKQLQSILGLLNFARNFIPDFTELIAPLYALIPKSPKNYVPWQIEHSTTLETLITKLNGAEYLQGRKGDKTLIMKVNASYTTGYIRYYNEGEKKPISYVSIVFSKTELKFTELEKLLTTVHKGLLKALDLSMGQNIHVYSPIVSMQNIQKTPQTAKKALASRWLSWLSYLEDPRIRFFYDPQMPALKDLPAVDTGKDNKKHPSNFQHIFYTDGSAITSPTKEGHLNAGMGIVYFINKDGNLQKQQEWSISLGNHTAQFAEIAAFEFALKKCLPLGGNILVVTDSNYVAKAYNEELDVWASNGFVNNRKKPLKHISKWKSVADLKRLRPDVVVTHEPGHQKLDSSPHAYGNNLADQLATQASFKVHAGKRTADGSEFEKRTADGSEFESPKKKAKVE

SEQ ID NO: 1117 - protein, 2171 aa, synthetic construct
MPAAKRVKLDGGDKKYSIGLDIGTNSVGWAVITDEYKVPSKKFKVLGNTDRHSIKKNLIGALLFDSGETAEATRLKRTARRRYTRRKNRICYLQEIFSNEMAKVDDSFFHRLEESFLVEEDKKHERHPIFGNIVDEVAYHEKYPTIYHLRKKLVDSTDKADLRLIYLALAHMIKFRGHFLIEGDLNPDNSDVDKLFIQLVQTYNQLFEENPINASGVDAKAILSARLSKSRRLENLIAQLPGEKKNGLFGNLIALSLGLTPNFKSNFDLAEDAKLQLSKDTYDDDLDNLLAQIGDQYADLFLAAKNLSDAILLSDILRVNTEITKAPLSASMIKRYDEHHQDLTLLKALVRQQLPEKYKEIFFDQSKNGYAGYIDGGASQEEFYKFIKPILEKMDGTEELLVKLNREDLLRKQRTFDNGSIPHQIHLGELHAILRRQEDFYPFLKDNREKIEKILTFRIPYYVGPLARGNSRFAWMTRKSEETITPWNFEEVVDKGASAQSFIERMTNFDKNLPNEKVLPKHSLLYEYFTVYNELTKVKYVTEGMRKPAFLSGEQKKAIVDLLFKTNRKVTVKQLKEDYFKKIECFDSVEISGVEDRFNASLGTYHDLLKIIKDKDFLDNEENEDILEDIVLTLTLFEDREMIEERLKTYAHLFDDKVMKQLKRRRYTGWGRLSRKLINGIRDKQSGKTILDFLKSDGFANRNFMQLIHDDSLTFKEDIQKAQVSGQGDSLHEHIANLAGSPAIKKGILQTVKVVDELVKVMGRHKPENIVIEMARENQTTQKGQKNSRERMKRIEEGIKELGSQILKEHPVENTQLQNEKLYLYYLQNGRDMYVDQELDINRLSDYDVDHIVPQSFLKDDSIDNKVLTRSDKARGKSDNVPSEEVVKKMKNYWRQLLNAKLITQRKFDNLTKAERGGLSELDKAGFIKRQLVETRQITKHVAQILDSRMNTKYDENDKLIREVKVITLKSKLVSDFRKDFQFYKVREINNYHHAHDAYLNAVVGTALIKKYPKLESEFVYGDYKVYDVRKMIAKSEQEIGKATAKYFFYSNIMNFFKTEITLANGEIRKRPLIETNGETGEIVWDKGRDFATVRKVLSMPQVNIVKKTEVQTGGFSKESILPKRNSDKLIARKKDWDPKKYGGFDSPTVAYSVLVVAKVEKGKSKKLKSVKELLGITIMERSSFEKNPIDFLEAKGYKEVKKDLIIKLPKYSLFELENGRKRMLASAGELQKGNELALPSKYVNFLYLASHYEKLKGSPEDNEQKQLFVEQHKHYLDEIIEQISEFSKRVILADANLDKVLSAYNKHRDKPIREQAENIIHLFTLTNLGAPAAFKYFDTTIDRKRYTSTKEVLDATLIHQSITGLYETRIDLSQLGGDGGGSSPAPGGGGGMDLLKPLTVERKGVKIKGYWNSQADITCVPKDLLQGEEPVRQQNVTTIHGTQEGDVYYVNLKIDGRRINTEVIGTTLDYAIITPGDVPWILKKPLELTIKLDLEEQQGTLLNNSILSKKGKEELKQLFEKYSALWQSWENQVGHRRIRPHKIATGTVKPTPQKQYHINPKAKPDIQIVINDLLKQGVLIQKESTMNTPVYPVPKPNGRWRMVLDYRAVNKVTPLIAVQNQHSYGILGSLFKGRYKTTIDLSNGFWAHPIVPEDYWITAFTWQGKQYCWTVLPQGFLNSPGLFNGDVVDLLQGIPNVEVYVDDVYISHDSEKEHLEYLDILFNRLKEAGYIISLKKSNIANSIVDFLGFQITNEGRGLTDTFKEKLENITAPTTLKQLQSILGLLNFARNFIPDFTELIAPLYALIPKSPKNYVPWQIEHSTTLETLITKLNGAEYLQGRKGDKTLIMKVNASYTTGYIRYYNEGEKKPISYVSIVFSKTELKFTELEKLLTTVHKGLLKALDLSMGQNIHVYSPIVSMQNIQKTPQTAKKALASRWLSWLSYLEDPRIRFFYDPQMPALKDLPAVDTGKDNKKHPSNFQHIFYTDGSAITSPTKEGHLNAGMGIVYFINKDGNLQKQQEWSISLGNHTAQFAEIAAFEFALKKCLPLGGNILVVTDSNYVAKAYNEELDVWASNGFVNNRKKPLKHISKWKSVADLKRLRPDVVVTHEPGHQKLDSSPHAYGNNLADQLATQASFKVHAGKRTADGSEFEKRTADGSEFESPKKKAKVE

SEQ ID NO: 1118 - protein, 2173 aa, synthetic construct
MPAAKRVKLDGGDKKYSIGLDIGTNSVGWAVITDEYKVPSKKFKVLGNTDRHSIKKNLIGALLFDSGETAEATRLKRTARRRYTRRKNRICYLQEIFSNEMAKVDDSFFHRLEESFLVEEDKKHERHPIFGNIVDEVAYHEKYPTIYHLRKKLVDSTDKADLRLIYLALAHMIKFRGHFLIEGDLNPDNSDVDKLFIQLVQTYNQLFEENPINASGVDAKAILSARLSKSRRLENLIAQLPGEKKNGLFGNLIALSLGLTPNFKSNFDLAEDAKLQLSKDTYDDDLDNLLAQIGDQYADLFLAAKNLSDAILLSDILRVNTEITKAPLSASMIKRYDEHHQDLTLLKALVRQQLPEKYKEIFFDQSKNGYAGYIDGGASQEEFYKFIKPILEKMDGTEELLVKLNREDLLRKQRTFDNGSIPHQIHLGELHAILRRQEDFYPFLKDNREKIEKILTFRIPYYVGPLARGNSRFAWMTRKSEETITPWNFEEVVDKGASAQSFIERMTNFDKNLPNEKVLPKHSLLYEYFTVYNELTKVKYVTEGMRKPAFLSGEQKKAIVDLLFKTNRKVTVKQLKEDYFKKIECFDSVEISGVEDRFNASLGTYHDLLKIIKDKDFLDNEENEDILEDIVLTLTLFEDREMIEERLKTYAHLFDDKVMKQLKRRRYTGWGRLSRKLINGIRDKQSGKTILDFLKSDGFANRNFMQLIHDDSLTFKEDIQKAQVSGQGDSLHEHIANLAGSPAIKKGILQTVKVVDELVKVMGRHKPENIVIEMARENQTTQKGQKNSRERMKRIEEGIKELGSQILKEHPVENTQLQNEKLYLYYLQNGRDMYVDQELDINRLSDYDVDHIVPQSFLKDDSIDNKVLTRSDKARGKSDNVPSEEVVKKMKNYWRQLLNAKLITQRKFDNLTKAERGGLSELDKAGFIKRQLVETRQITKHVAQILDSRMNTKYDENDKLIREVKVITLKSKLVSDFRKDFQFYKVREINNYHHAHDAYLNAVVGTALIKKYPKLESEFVYGDYKVYDVRKMIAKSEQEIGKATAKYFFYSNIMNFFKTEITLANGEIRKRPLIETNGETGEIVWDKGRDFATVRKVLSMPQVNIVKKTEVQTGGFSKESILPKRNSDKLIARKKDWDPKKYGGFDSPTVAYSVLVVAKVEKGKSKKLKSVKELLGITIMERSSFEKNPIDFLEAKGYKEVKKDLIIKLPKYSLFELENGRKRMLASAGELQKGNELALPSKYVNFLYLASHYEKLKGSPEDNEQKQLFVEQHKHYLDEIIEQISEFSKRVILADANLDKVLSAYNKHRDKPIREQAENIIHLFTLTNLGAPAAFKYFDTTIDRKRYTSTKEVLDATLIHQSITGLYETRIDLSQLGGDGGPAPEAAAKGGGGGMDLLKPLTVERKGVKIKGYWNSQADITCVPKDLLQGEEPVRQQNVTTIHGTQEGDVYYVNLKIDGRRINTEVIGTTLDYAIITPGDVPWILKKPLELTIKLDLEEQQGTLLNNSILSKKGKEELKQLFEKYSALWQSWENQVGHRRIRPHKIATGTVKPTPQKQYHINPKAKPDIQIVINDLLKQGVLIQKESTMNTPVYPVPKPNGRWRMVLDYRAVNKVTPLIAVQNQHSYGILGSLFKGRYKTTIDLSNGFWAHPIVPEDYWITAFTWQGKQYCWTVLPQGFLNSPGLFNGDVVDLLQGIPNVEVYVDDVYISHDSEKEHLEYLDILFNRLKEAGYIISLKKSNIANSIVDFLGFQITNEGRGLTDTFKEKLENITAPTTLKQLQSILGLLNFARNFIPDFTELIAPLYALIPKSPKNYVPWQIEHSTTLETLITKLNGAEYLQGRKGDKTLIMKVNASYTTGYIRYYNEGEKKPISYVSIVFSKTELKFTELEKLLTTVHKGLLKALDLSMGQNIHVYSPIVSMQNIQKTPQTAKKALASRWLSWLSYLEDPRIRFFYDPQMPALKDLPAVDTGKDNKKHPSNFQHIFYTDGSAITSPTKEGHLNAGMGIVYFINKDGNLQKQQEWSISLGNHTAQFAEIAAFEFALKKCLPLGGNILVVTDSNYVAKAYNEELDVWASNGFVNNRKKPLKHISKWKSVADLKRLRPDVVVTHEPGHQKLDSSPHAYGNNLADQLATQASFKVHAGKRTADGSEFEKRTADGSEFESPKKKAKVE

SEQ ID NO: 1119 - protein, 2182 aa, synthetic construct
MPAAKRVKLDGGDKKYSIGLDIGTNSVGWAVITDEYKVPSKKFKVLGNTDRHSIKKNLIGALLFDSGETAEATRLKRTARRRYTRRKNRICYLQEIFSNEMAKVDDSFFHRLEESFLVEEDKKHERHPIFGNIVDEVAYHEKYPTIYHLRKKLVDSTDKADLRLIYLALAHMIKFRGHFLIEGDLNPDNSDVDKLFIQLVQTYNQLFEENPINASGVDAKAILSARLSKSRRLENLIAQLPGEKKNGLFGNLIALSLGLTPNFKSNFDLAEDAKLQLSKDTYDDDLDNLLAQIGDQYADLFLAAKNLSDAILLSDILRVNTEITKAPLSASMIKRYDEHHQDLTLLKALVRQQLPEKYKEIFFDQSKNGYAGYIDGGASQEEFYKFIKPILEKMDGTEELLVKLNREDLLRKQRTFDNGSIPHQIHLGELHAILRRQEDFYPFLKDNREKIEKILTFRIPYYVGPLARGNSRFAWMTRKSEETITPWNFEEVVDKGASAQSFIERMTNFDKNLPNEKVLPKHSLLYEYFTVYNELTKVKYVTEGMRKPAFLSGEQKKAIVDLLFKTNRKVTVKQLKEDYFKKIECFDSVEISGVEDRFNASLGTYHDLLKIIKDKDFLDNEENEDILEDIVLTLTLFEDREMIEERLKTYAHLFDDKVMKQLKRRRYTGWGRLSRKLINGIRDKQSGKTILDFLKSDGFANRNFMQLIHDDSLTFKEDIQKAQVSGQGDSLHEHIANLAGSPAIKKGILQTVKVVDELVKVMGRHKPENIVIEMARENQTTQKGQKNSRERMKRIEEGIKELGSQILKEHPVENTQLQNEKLYLYYLQNGRDMYVDQELDINRLSDYDVDHIVPQSFLKDDSIDNKVLTRSDKARGKSDNVPSEEVVKKMKNYWRQLLNAKLITQRKFDNLTKAERGGLSELDKAGFIKRQLVETRQITKHVAQILDSRMNTKYDENDKLIREVKVITLKSKLVSDFRKDFQFYKVREINNYHHAHDAYLNAVVGTALIKKYPKLESEFVYGDYKVYDVRKMIAKSEQEIGKATAKYFFYSNIMNFFKTEITLANGEIRKRPLIETNGETGEIVWDKGRDFATVRKVLSMPQVNIVKKTEVQTGGFSKESILPKRNSDKLIARKKDWDPKKYGGFDSPTVAYSVLVVAKVEKGKSKKLKSVKELLGITIMERSSFEKNPIDFLEAKGYKEVKKDLIIKLPKYSLFELENGRKRMLASAGELQKGNELALPSKYVNFLYLASHYEKLKGSPEDNEQKQLFVEQHKHYLDEIIEQISEFSKRVILADANLDKVLSAYNKHRDKPIREQAENIIHLFTLTNLGAPAAFKYFDTTIDRKRYTSTKEVLDATLIHQSITGLYETRIDLSQLGGDGGGGGGSGGGGSGGGGSGGGGSGGMDLLKPLTVERKGVKIKGYWNSQADITCVPKDLLQGEEPVRQQNVTTIHGTQEGDVYYVNLKIDGRRINTEVIGTTLDYAIITPGDVPWILKKPLELTIKLDLEEQQGTLLNNSILSKKGKEELKQLFEKYSALWQSWENQVGHRRIRPHKIATGTVKPTPQKQYHINPKAKPDIQIVINDLLKQGVLIQKESTMNTPVYPVPKPNGRWRMVLDYRAVNKVTPLIAVQNQHSYGILGSLFKGRYKTTIDLSNGFWAHPIVPEDYWITAFTWQGKQYCWTVLPQGFLNSPGLFNGDVVDLLQGIPNVEVYVDDVYISHDSEKEHLEYLDILFNRLKEAGYIISLKKSNIANSIVDFLGFQITNEGRGLTDTFKEKLENITAPTTLKQLQSILGLLNFARNFIPDFTELIAPLYALIPKSPKNYVPWQIEHSTTLETLITKLNGAEYLQGRKGDKTLIMKVNASYTTGYIRYYNEGEKKPISYVSIVFSKTELKFTELEKLLTTVHKGLLKALDLSMGQNIHVYSPIVSMQNIQKTPQTAKKALASRWLSWLSYLEDPRIRFFYDPQMPALKDLPAVDTGKDNKKHPSNFQHIFYTDGSAITSPTKEGHLNAGMGIVYFINKDGNLQKQQEWSISLGNHTAQFAEIAAFEFALKKCLPLGGNILVVTDSNYVAKAYNEELDVWASNGFVNNRKKPLKHISKWKSVADLKRLRPDVVVTHEPGHQKLDSSPHAYGNNLADQLATQASFKVHAGKRTADGSEFEKRTADGSEFESPKKKAKVE

SEQ ID NO: 1120 - protein, 2171 aa, synthetic construct
MPAAKRVKLDGGDKKYSIGLDIGTNSVGWAVITDEYKVPSKKFKVLGNTDRHSIKKNLIGALLFDSGETAEATRLKRTARRRYTRRKNRICYLQEIFSNEMAKVDDSFFHRLEESFLVEEDKKHERHPIFGNIVDEVAYHEKYPTIYHLRKKLVDSTDKADLRLIYLALAHMIKFRGHFLIEGDLNPDNSDVDKLFIQLVQTYNQLFEENPINASGVDAKAILSARLSKSRRLENLIAQLPGEKKNGLFGNLIALSLGLTPNFKSNFDLAEDAKLQLSKDTYDDDLDNLLAQIGDQYADLFLAAKNLSDAILLSDILRVNTEITKAPLSASMIKRYDEHHQDLTLLKALVRQQLPEKYKEIFFDQSKNGYAGYIDGGASQEEFYKFIKPILEKMDGTEELLVKLNREDLLRKQRTFDNGSIPHQIHLGELHAILRRQEDFYPFLKDNREKIEKILTFRIPYYVGPLARGNSRFAWMTRKSEETITPWNFEEVVDKGASAQSFIERMTNFDKNLPNEKVLPKHSLLYEYFTVYNELTKVKYVTEGMRKPAFLSGEQKKAIVDLLFKTNRKVTVKQLKEDYFKKIECFDSVEISGVEDRFNASLGTYHDLLKIIKDKDFLDNEENEDILEDIVLTLTLFEDREMIEERLKTYAHLFDDKVMKQLKRRRYTGWGRLSRKLINGIRDKQSGKTILDFLKSDGFANRNFMQLIHDDSLTFKEDIQKAQVSGQGDSLHEHIANLAGSPAIKKGILQTVKVVDELVKVMGRHKPENIVIEMARENQTTQKGQKNSRERMKRIEEGIKELGSQILKEHPVENTQLQNEKLYLYYLQNGRDMYVDQELDINRLSDYDVDHIVPQSFLKDDSIDNKVLTRSDKARGKSDNVPSEEVVKKMKNYWRQLLNAKLITQRKFDNLTKAERGGLSELDKAGFIKRQLVETRQITKHVAQILDSRMNTKYDENDKLIREVKVITLKSKLVSDFRKDFQFYKVREINNYHHAHDAYLNAVVGTALIKKYPKLESEFVYGDYKVYDVRKMIAKSEQEIGKATAKYFFYSNIMNFFKTEITLANGEIRKRPLIETNGETGEIVWDKGRDFATVRKVLSMPQVNIVKKTEVQTGGFSKESILPKRNSDKLIARKKDWDPKKYGGFDSPTVAYSVLVVAKVEKGKSKKLKSVKELLGITIMERSSFEKNPIDFLEAKGYKEVKKDLIIKLPKYSLFELENGRKRMLASAGELQKGNELALPSKYVNFLYLASHYEKLKGSPEDNEQKQLFVEQHKHYLDEIIEQISEFSKRVILADANLDKVLSAYNKHRDKPIREQAENIIHLFTLTNLGAPAAFKYFDTTIDRKRYTSTKEVLDATLIHQSITGLYETRIDLSQLGGDGGPAPGGSGSSGGMDLLKPLTVERKGVKIKGYWNSQADITCVPKDLLQGEEPVRQQNVTTIHGTQEGDVYYVNLKIDGRRINTEVIGTTLDYAIITPGDVPWILKKPLELTIKLDLEEQQGTLLNNSILSKKGKEELKQLFEKYSALWQSWENQVGHRRIRPHKIATGTVKPTPQKQYHINPKAKPDIQIVINDLLKQGVLIQKESTMNTPVYPVPKPNGRWRMVLDYRAVNKVTPLIAVQNQHSYGILGSLFKGRYKTTIDLSNGFWAHPIVPEDYWITAFTWQGKQYCWTVLPQGFLNSPGLFNGDVVDLLQGIPNVEVYVDDVYISHDSEKEHLEYLDILFNRLKEAGYIISLKKSNIANSIVDFLGFQITNEGRGLTDTFKEKLENITAPTTLKQLQSILGLLNFARNFIPDFTELIAPLYALIPKSPKNYVPWQIEHSTTLETLITKLNGAEYLQGRKGDKTLIMKVNASYTTGYIRYYNEGEKKPISYVSIVFSKTELKFTELEKLLTTVHKGLLKALDLSMGQNIHVYSPIVSMQNIQKTPQTAKKALASRWLSWLSYLEDPRIRFFYDPQMPALKDLPAVDTGKDNKKHPSNFQHIFYTDGSAITSPTKEGHLNAGMGIVYFINKDGNLQKQQEWSISLGNHTAQFAEIAAFEFALKKCLPLGGNILVVTDSNYVAKAYNEELDVWASNGFVNNRKKPLKHISKWKSVADLKRLRPDVVVTHEPGHQKLDSSPHAYGNNLADQLATQASFKVHAGKRTADGSEFEKRTADGSEFESPKKKAKVE

SEQ ID NO: 1121 - protein, 2173 aa, synthetic construct
MPAAKRVKLDGGDKKYSIGLDIGTNSVGWAVITDEYKVPSKKFKVLGNTDRHSIKKNLIGALLFDSGETAEATRLKRTARRRYTRRKNRICYLQEIFSNEMAKVDDSFFHRLEESFLVEEDKKHERHPIFGNIVDEVAYHEKYPTIYHLRKKLVDSTDKADLRLIYLALAHMIKFRGHFLIEGDLNPDNSDVDKLFIQLVQTYNQLFEENPINASGVDAKAILSARLSKSRRLENLIAQLPGEKKNGLFGNLIALSLGLTPNFKSNFDLAEDAKLQLSKDTYDDDLDNLLAQIGDQYADLFLAAKNLSDAILLSDILRVNTEITKAPLSASMIKRYDEHHQDLTLLKALVRQQLPEKYKEIFFDQSKNGYAGYIDGGASQEEFYKFIKPILEKMDGTEELLVKLNREDLLRKQRTFDNGSIPHQIHLGELHAILRRQEDFYPFLKDNREKIEKILTFRIPYYVGPLARGNSRFAWMTRKSEETITPWNFEEVVDKGASAQSFIERMTNFDKNLPNEKVLPKHSLLYEYFTVYNELTKVKYVTEGMRKPAFLSGEQKKAIVDLLFKTNRKVTVKQLKEDYFKKIECFDSVEISGVEDRFNASLGTYHDLLKIIKDKDFLDNEENEDILEDIVLTLTLFEDREMIEERLKTYAHLFDDKVMKQLKRRRYTGWGRLSRKLINGIRDKQSGKTILDFLKSDGFANRNFMQLIHDDSLTFKEDIQKAQVSGQGDSLHEHIANLAGSPAIKKGILQTVKVVDELVKVMGRHKPENIVIEMARENQTTQKGQKNSRERMKRIEEGIKELGSQILKEHPVENTQLQNEKLYLYYLQNGRDMYVDQELDINRLSDYDVDHIVPQSFLKDDSIDNKVLTRSDKARGKSDNVPSEEVVKKMKNYWRQLLNAKLITQRKFDNLTKAERGGLSELDKAGFIKRQLVETRQITKHVAQILDSRMNTKYDENDKLIREVKVITLKSKLVSDFRKDFQFYKVREINNYHHAHDAYLNAVVGTALIKKYPKLESEFVYGDYKVYDVRKMIAKSEQEIGKATAKYFFYSNIMNFFKTEITLANGEIRKRPLIETNGETGEIVWDKGRDFATVRKVLSMPQVNIVKKTEVQTGGFSKESILPKRNSDKLIARKKDWDPKKYGGFDSPTVAYSVLVVAKVEKGKSKKLKSVKELLGITIMERSSFEKNPIDFLEAKGYKEVKKDLIIKLPKYSLFELENGRKRMLASAGELQKGNELALPSKYVNFLYLASHYEKLKGSPEDNEQKQLFVEQHKHYLDEIIEQISEFSKRVILADANLDKVLSAYNKHRDKPIREQAENIIHLFTLTNLGAPAAFKYFDTTIDRKRYTSTKEVLDATLIHQSITGLYETRIDLSQLGGDGGEAAAKPAPGSSGGMDLLKPLTVERKGVKIKGYWNSQADITCVPKDLLQGEEPVRQQNVTTIHGTQEGDVYYVNLKIDGRRINTEVIGTTLDYAIITPGDVPWILKKPLELTIKLDLEEQQGTLLNNSILSKKGKEELKQLFEKYSALWQSWENQVGHRRIRPHKIATGTVKPTPQKQYHINPKAKPDIQIVINDLLKQGVLIQKESTMNTPVYPVPKPNGRWRMVLDYRAVNKVTPLIAVQNQHSYGILGSLFKGRYKTTIDLSNGFWAHPIVPEDYWITAFTWQGKQYCWTVLPQGFLNSPGLFNGDVVDLLQGIPNVEVYVDDVYISHDSEKEHLEYLDILFNRLKEAGYIISLKKSNIANSIVDFLGFQITNEGRGLTDTFKEKLENITAPTTLKQLQSILGLLNFARNFIPDFTELIAPLYALIPKSPKNYVPWQIEHSTTLETLITKLNGAEYLQGRKGDKTLIMKVNASYTTGYIRYYNEGEKKPISYVSIVFSKTELKFTELEKLLTTVHKGLLKALDLSMGQNIHVYSPIVSMQNIQKTPQTAKKALASRWLSWLSYLEDPRIRFFYDPQMPALKDLPAVDTGKDNKKHPSNFQHIFYTDGSAITSPTKEGHLNAGMGIVYFINKDGNLQKQQEWSISLGNHTAQFAEIAAFEFALKKCLPLGGNILVVTDSNYVAKAYNEELDVWASNGFVNNRKKPLKHISKWKSVADLKRLRPDVVVTHEPGHQKLDSSPHAYGNNLADQLATQASFKVHAGKRTADGSEFEKRTADGSEFESPKKKAKVE

SEQ ID NO: 1122 - protein, 2172 aa, synthetic construct
MPAAKRVKLDGGDKKYSIGLDIGTNSVGWAVITDEYKVPSKKFKVLGNTDRHSIKKNLIGALLFDSGETAEATRLKRTARRRYTRRKNRICYLQEIFSNEMAKVDDSFFHRLEESFLVEEDKKHERHPIFGNIVDEVAYHEKYPTIYHLRKKLVDSTDKADLRLIYLALAHMIKFRGHFLIEGDLNPDNSDVDKLFIQLVQTYNQLFEENPINASGVDAKAILSARLSKSRRLENLIAQLPGEKKNGLFGNLIALSLGLTPNFKSNFDLAEDAKLQLSKDTYDDDLDNLLAQIGDQYADLFLAAKNLSDAILLSDILRVNTEITKAPLSASMIKRYDEHHQDLTLLKALVRQQLPEKYKEIFFDQSKNGYAGYIDGGASQEEFYKFIKPILEKMDGTEELLVKLNREDLLRKQRTFDNGSIPHQIHLGELHAILRRQEDFYPFLKDNREKIEKILTFRIPYYVGPLARGNSRFAWMTRKSEETITPWNFEEVVDKGASAQSFIERMTNFDKNLPNEKVLPKHSLLYEYFTVYNELTKVKYVTEGMRKPAFLSGEQKKAIVDLLFKTNRKVTVKQLKEDYFKKIECFDSVEISGVEDRFNASLGTYHDLLKIIKDKDFLDNEENEDILEDIVLTLTLFEDREMIEERLKTYAHLFDDKVMKQLKRRRYTGWGRLSRKLINGIRDKQSGKTILDFLKSDGFANRNFMQLIHDDSLTFKEDIQKAQVSGQGDSLHEHIANLAGSPAIKKGILQTVKVVDELVKVMGRHKPENIVIEMARENQTTQKGQKNSRERMKRIEEGIKELGSQILKEHPVENTQLQNEKLYLYYLQNGRDMYVDQELDINRLSDYDVDHIVPQSFLKDDSIDNKVLTRSDKARGKSDNVPSEEVVKKMKNYWRQLLNAKLITQRKFDNLTKAERGGLSELDKAGFIKRQLVETRQITKHVAQILDSRMNTKYDENDKLIREVKVITLKSKLVSDFRKDFQFYKVREINNYHHAHDAYLNAVVGTALIKKYPKLESEFVYGDYKVYDVRKMIAKSEQEIGKATAKYFFYSNIMNFFKTEITLANGEIRKRPLIETNGETGEIVWDKGRDFATVRKVLSMPQVNIVKKTEVQTGGFSKESILPKRNSDKLIARKKDWDPKKYGGFDSPTVAYSVLVVAKVEKGKSKKLKSVKELLGITIMERSSFEKNPIDFLEAKGYKEVKKDLIIKLPKYSLFELENGRKRMLASAGELQKGNELALPSKYVNFLYLASHYEKLKGSPEDNEQKQLFVEQHKHYLDEIIEQISEFSKRVILADANLDKVLSAYNKHRDKPIREQAENIIHLFTLTNLGAPAAFKYFDTTIDRKRYTSTKEVLDATLIHQSITGLYETRIDLSQLGGDGGGGGGSGGGGSGGMDLLKPLTVERKGVKIKGYWNSQADITCVPKDLLQGEEPVRQQNVTTIHGTQEGDVYYVNLKIDGRRINTEVIGTTLDYAIITPGDVPWILKKPLELTIKLDLEEQQGTLLNNSILSKKGKEELKQLFEKYSALWQSWENQVGHRRIRPHKIATGTVKPTPQKQYHINPKAKPDIQIVINDLLKQGVLIQKESTMNTPVYPVPKPNGRWRMVLDYRAVNKVTPLIAVQNQHSYGILGSLFKGRYKTTIDLSNGFWAHPIVPEDYWITAFTWQGKQYCWTVLPQGFLNSPGLFNGDVVDLLQGIPNVEVYVDDVYISHDSEKEHLEYLDILFNRLKEAGYIISLKKSNIANSIVDFLGFQITNEGRGLTDTFKEKLENITAPTTLKQLQSILGLLNFARNFIPDFTELIAPLYALIPKSPKNYVPWQIEHSTTLETLITKLNGAEYLQGRKGDKTLIMKVNASYTTGYIRYYNEGEKKPISYVSIVFSKTELKFTELEKLLTTVHKGLLKALDLSMGQNIHVYSPIVSMQNIQKTPQTAKKALASRWLSWLSYLEDPRIRFFYDPQMPALKDLPAVDTGKDNKKHPSNFQHIFYTDGSAITSPTKEGHLNAGMGIVYFINKDGNLQKQQEWSISLGNHTAQFAEIAAFEFALKKCLPLGGNILVVTDSNYVAKAYNEELDVWASNGFVNNRKKPLKHISKWKSVADLKRLRPDVVVTHEPGHQKLDSSPHAYGNNLADQLATQASFKVHAGKRTADGSEFEKRTADGSEFESPKKKAKVE

SEQ ID NO: 1123 - protein, 2173 aa, synthetic construct
MPAAKRVKLDGGDKKYSIGLDIGTNSVGWAVITDEYKVPSKKFKVLGNTDRHSIKKNLIGALLFDSGETAEATRLKRTARRRYTRRKNRICYLQEIFSNEMAKVDDSFFHRLEESFLVEEDKKHERHPIFGNIVDEVAYHEKYPTIYHLRKKLVDSTDKADLRLIYLALAHMIKFRGHFLIEGDLNPDNSDVDKLFIQLVQTYNQLFEENPINASGVDAKAILSARLSKSRRLENLIAQLPGEKKNGLFGNLIALSLGLTPNFKSNFDLAEDAKLQLSKDTYDDDLDNLLAQIGDQYADLFLAAKNLSDAILLSDILRVNTEITKAPLSASMIKRYDEHHQDLTLLKALVRQQLPEKYKEIFFDQSKNGYAGYIDGGASQEEFYKFIKPILEKMDGTEELLVKLNREDLLRKQRTFDNGSIPHQIHLGELHAILRRQEDFYPFLKDNREKIEKILTFRIPYYVGPLARGNSRFAWMTRKSEETITPWNFEEVVDKGASAQSFIERMTNFDKNLPNEKVLPKHSLLYEYFTVYNELTKVKYVTEGMRKPAFLSGEQKKAIVDLLFKTNRKVTVKQLKEDYFKKIECFDSVEISGVEDRFNASLGTYHDLLKIIKDKDFLDNEENEDILEDIVLTLTLFEDREMIEERLKTYAHLFDDKVMKQLKRRRYTGWGRLSRKLINGIRDKQSGKTILDFLKSDGFANRNFMQLIHDDSLTFKEDIQKAQVSGQGDSLHEHIANLAGSPAIKKGILQTVKVVDELVKVMGRHKPENIVIEMARENQTTQKGQKNSRERMKRIEEGIKELGSQILKEHPVENTQLQNEKLYLYYLQNGRDMYVDQELDINRLSDYDVDHIVPQSFLKDDSIDNKVLTRSDKARGKSDNVPSEEVVKKMKNYWRQLLNAKLITQRKFDNLTKAERGGLSELDKAGFIKRQLVETRQITKHVAQILDSRMNTKYDENDKLIREVKVITLKSKLVSDFRKDFQFYKVREINNYHHAHDAYLNAVVGTALIKKYPKLESEFVYGDYKVYDVRKMIAKSEQEIGKATAKYFFYSNIMNFFKTEITLANGEIRKRPLIETNGETGEIVWDKGRDFATVRKVLSMPQVNIVKKTEVQTGGFSKESILPKRNSDKLIARKKDWDPKKYGGFDSPTVAYSVLVVAKVEKGKSKKLKSVKELLGITIMERSSFEKNPIDFLEAKGYKEVKKDLIIKLPKYSLFELENGRKRMLASAGELQKGNELALPSKYVNFLYLASHYEKLKGSPEDNEQKQLFVEQHKHYLDEIIEQISEFSKRVILADANLDKVLSAYNKHRDKPIREQAENIIHLFTLTNLGAPAAFKYFDTTIDRKRYTSTKEVLDATLIHQSITGLYETRIDLSQLGGDGGGGSEAAAKPAPGGMDLLKPLTVERKGVKIKGYWNSQADITCVPKDLLQGEEPVRQQNVTTIHGTQEGDVYYVNLKIDGRRINTEVIGTTLDYAIITPGDVPWILKKPLELTIKLDLEEQQGTLLNNSILSKKGKEELKQLFEKYSALWQSWENQVGHRRIRPHKIATGTVKPTPQKQYHINPKAKPDIQIVINDLLKQGVLIQKESTMNTPVYPVPKPNGRWRMVLDYRAVNKVTPLIAVQNQHSYGILGSLFKGRYKTTIDLSNGFWAHPIVPEDYWITAFTWQGKQYCWTVLPQGFLNSPGLFNGDVVDLLQGIPNVEVYVDDVYISHDSEKEHLEYLDILFNRLKEAGYIISLKKSNIANSIVDFLGFQITNEGRGLTDTFKEKLENITAPTTLKQLQSILGLLNFARNFIPDFTELIAPLYALIPKSPKNYVPWQIEHSTTLETLITKLNGAEYLQGRKGDKTLIMKVNASYTTGYIRYYNEGEKKPISYVSIVFSKTELKFTELEKLLTTVHKGLLKALDLSMGQNIHVYSPIVSMQNIQKTPQTAKKALASRWLSWLSYLEDPRIRFFYDPQMPALKDLPAVDTGKDNKKHPSNFQHIFYTDGSAITSPTKEGHLNAGMGIVYFINKDGNLQKQQEWSISLGNHTAQFAEIAAFEFALKKCLPLGGNILVVTDSNYVAKAYNEELDVWASNGFVNNRKKPLKHISKWKSVADLKRLRPDVVVTHEPGHQKLDSSPHAYGNNLADQLATQASFKVHAGKRTADGSEFEKRTADGSEFESPKKKAKVE

SEQ ID NO: 1124 - protein, 2171 aa, synthetic construct
MPAAKRVKLDGGDKKYSIGLDIGTNSVGWAVITDEYKVPSKKFKVLGNTDRHSIKKNLIGALLFDSGETAEATRLKRTARRRYTRRKNRICYLQEIFSNEMAKVDDSFFHRLEESFLVEEDKKHERHPIFGNIVDEVAYHEKYPTIYHLRKKLVDSTDKADLRLIYLALAHMIKFRGHFLIEGDLNPDNSDVDKLFIQLVQTYNQLFEENPINASGVDAKAILSARLSKSRRLENLIAQLPGEKKNGLFGNLIALSLGLTPNFKSNFDLAEDAKLQLSKDTYDDDLDNLLAQIGDQYADLFLAAKNLSDAILLSDILRVNTEITKAPLSASMIKRYDEHHQDLTLLKALVRQQLPEKYKEIFFDQSKNGYAGYIDGGASQEEFYKFIKPILEKMDGTEELLVKLNREDLLRKQRTFDNGSIPHQIHLGELHAILRRQEDFYPFLKDNREKIEKILTFRIPYYVGPLARGNSRFAWMTRKSEETITPWNFEEVVDKGASAQSFIERMTNFDKNLPNEKVLPKHSLLYEYFTVYNELTKVKYVTEGMRKPAFLSGEQKKAIVDLLFKTNRKVTVKQLKEDYFKKIECFDSVEISGVEDRFNASLGTYHDLLKIIKDKDFLDNEENEDILEDIVLTLTLFEDREMIEERLKTYAHLFDDKVMKQLKRRRYTGWGRLSRKLINGIRDKQSGKTILDFLKSDGFANRNFMQLIHDDSLTFKEDIQKAQVSGQGDSLHEHIANLAGSPAIKKGILQTVKVVDELVKVMGRHKPENIVIEMARENQTTQKGQKNSRERMKRIEEGIKELGSQILKEHPVENTQLQNEKLYLYYLQNGRDMYVDQELDINRLSDYDVDHIVPQSFLKDDSIDNKVLTRSDKARGKSDNVPSEEVVKKMKNYWRQLLNAKLITQRKFDNLTKAERGGLSELDKAGFIKRQLVETRQITKHVAQILDSRMNTKYDENDKLIREVKVITLKSKLVSDFRKDFQFYKVREINNYHHAHDAYLNAVVGTALIKKYPKLESEFVYGDYKVYDVRKMIAKSEQEIGKATAKYFFYSNIMNFFKTEITLANGEIRKRPLIETNGETGEIVWDKGRDFATVRKVLSMPQVNIVKKTEVQTGGFSKESILPKRNSDKLIARKKDWDPKKYGGFDSPTVAYSVLVVAKVEKGKSKKLKSVKELLGITIMERSSFEKNPIDFLEAKGYKEVKKDLIIKLPKYSLFELENGRKRMLASAGELQKGNELALPSKYVNFLYLASHYEKLKGSPEDNEQKQLFVEQHKHYLDEIIEQISEFSKRVILADANLDKVLSAYNKHRDKPIREQAENIIHLFTLTNLGAPAAFKYFDTTIDRKRYTSTKEVLDATLIHQSITGLYETRIDLSQLGGDGGGGGGSSPAPGGMDLLKPLTVERKGVKIKGYWNSQADITCVPKDLLQGEEPVRQQNVTTIHGTQEGDVYYVNLKIDGRRINTEVIGTTLDYAIITPGDVPWILKKPLELTIKLDLEEQQGTLLNNSILSKKGKEELKQLFEKYSALWQSWENQVGHRRIRPHKIATGTVKPTPQKQYHINPKAKPDIQIVINDLLKQGVLIQKESTMNTPVYPVPKPNGRWRMVLDYRAVNKVTPLIAVQNQHSYGILGSLFKGRYKTTIDLSNGFWAHPIVPEDYWITAFTWQGKQYCWTVLPQGFLNSPGLFNGDVVDLLQGIPNVEVYVDDVYISHDSEKEHLEYLDILFNRLKEAGYIISLKKSNIANSIVDFLGFQITNEGRGLTDTFKEKLENITAPTTLKQLQSILGLLNFARNFIPDFTELIAPLYALIPKSPKNYVPWQIEHSTTLETLITKLNGAEYLQGRKGDKTLIMKVNASYTTGYIRYYNEGEKKPISYVSIVFSKTELKFTELEKLLTTVHKGLLKALDLSMGQNIHVYSPIVSMQNIQKTPQTAKKALASRWLSWLSYLEDPRIRFFYDPQMPALKDLPAVDTGKDNKKHPSNFQHIFYTDGSAITSPTKEGHLNAGMGIVYFINKDGNLQKQQEWSISLGNHTAQFAEIAAFEFALKKCLPLGGNILVVTDSNYVAKAYNEELDVWASNGFVNNRKKPLKHISKWKSVADLKRLRPDVVVTHEPGHQKLDSSPHAYGNNLADQLATQASFKVHAGKRTADGSEFEKRTADGSEFESPKKKAKVE

SEQ ID NO: 1125 - protein, 2177 aa, synthetic construct
MPAAKRVKLDGGDKKYSIGLDIGTNSVGWAVITDEYKVPSKKFKVLGNTDRHSIKKNLIGALLFDSGETAEATRLKRTARRRYTRRKNRICYLQEIFSNEMAKVDDSFFHRLEESFLVEEDKKHERHPIFGNIVDEVAYHEKYPTIYHLRKKLVDSTDKADLRLIYLALAHMIKFRGHFLIEGDLNPDNSDVDKLFIQLVQTYNQLFEENPINASGVDAKAILSARLSKSRRLENLIAQLPGEKKNGLFGNLIALSLGLTPNFKSNFDLAEDAKLQLSKDTYDDDLDNLLAQIGDQYADLFLAAKNLSDAILLSDILRVNTEITKAPLSASMIKRYDEHHQDLTLLKALVRQQLPEKYKEIFFDQSKNGYAGYIDGGASQEEFYKFIKPILEKMDGTEELLVKLNREDLLRKQRTFDNGSIPHQIHLGELHAILRRQEDFYPFLKDNREKIEKILTFRIPYYVGPLARGNSRFAWMTRKSEETITPWNFEEVVDKGASAQSFIERMTNFDKNLPNEKVLPKHSLLYEYFTVYNELTKVKYVTEGMRKPAFLSGEQKKAIVDLLFKTNRKVTVKQLKEDYFKKIECFDSVEISGVEDRFNASLGTYHDLLKIIKDKDFLDNEENEDILEDIVLTLTLFEDREMIEERLKTYAHLFDDKVMKQLKRRRYTGWGRLSRKLINGIRDKQSGKTILDFLKSDGFANRNFMQLIHDDSLTFKEDIQKAQVSGQGDSLHEHIANLAGSPAIKKGILQTVKVVDELVKVMGRHKPENIVIEMARENQTTQKGQKNSRERMKRIEEGIKELGSQILKEHPVENTQLQNEKLYLYYLQNGRDMYVDQELDINRLSDYDVDHIVPQSFLKDDSIDNKVLTRSDKARGKSDNVPSEEVVKKMKNYWRQLLNAKLITQRKFDNLTKAERGGLSELDKAGFIKRQLVETRQITKHVAQILDSRMNTKYDENDKLIREVKVITLKSKLVSDFRKDFQFYKVREINNYHHAHDAYLNAVVGTALIKKYPKLESEFVYGDYKVYDVRKMIAKSEQEIGKATAKYFFYSNIMNFFKTEITLANGEIRKRPLIETNGETGEIVWDKGRDFATVRKVLSMPQVNIVKKTEVQTGGFSKESILPKRNSDKLIARKKDWDPKKYGGFDSPTVAYSVLVVAKVEKGKSKKLKSVKELLGITIMERSSFEKNPIDFLEAKGYKEVKKDLIIKLPKYSLFELENGRKRMLASAGELQKGNELALPSKYVNFLYLASHYEKLKGSPEDNEQKQLFVEQHKHYLDEIIEQISEFSKRVILADANLDKVLSAYNKHRDKPIREQAENIIHLFTLTNLGAPAAFKYFDTTIDRKRYTSTKEVLDATLIHQSITGLYETRIDLSQLGGDGGGGGGSGGGGSGGGGSGGMDLLKPLTVERKGVKIKGYWNSQADITCVPKDLLQGEEPVRQQNVTTIHGTQEGDVYYVNLKIDGRRINTEVIGTTLDYAIITPGDVPWILKKPLELTIKLDLEEQQGTLLNNSILSKKGKEELKQLFEKYSALWQSWENQVGHRRIRPHKIATGTVKPTPQKQYHINPKAKPDIQIVINDLLKQGVLIQKESTMNTPVYPVPKPNGRWRMVLDYRAVNKVTPLIAVQNQHSYGILGSLFKGRYKTTIDLSNGFWAHPIVPEDYWITAFTWQGKQYCWTVLPQGFLNSPGLFNGDVVDLLQGIPNVEVYVDDVYISHDSEKEHLEYLDILFNRLKEAGYIISLKKSNIANSIVDFLGFQITNEGRGLTDTFKEKLENITAPTTLKQLQSILGLLNFARNFIPDFTELIAPLYALIPKSPKNYVPWQIEHSTTLETLITKLNGAEYLQGRKGDKTLIMKVNASYTTGYIRYYNEGEKKPISYVSIVFSKTELKFTELEKLLTTVHKGLLKALDLSMGQNIHVYSPIVSMQNIQKTPQTAKKALASRWLSWLSYLEDPRIRFFYDPQMPALKDLPAVDTGKDNKKHPSNFQHIFYTDGSAITSPTKEGHLNAGMGIVYFINKDGNLQKQQEWSISLGNHTAQFAEIAAFEFALKKCLPLGGNILVVTDSNYVAKAYNEELDVWASNGFVNNRKKPLKHISKWKSVADLKRLRPDVVVTHEPGHQKLDSSPHAYGNNLADQLATQASFKVHAGKRTADGSEFEKRTADGSEFESPKKKAKVE

SEQ ID NO: 1126 - protein, 2177 aa, synthetic construct
MPAAKRVKLDGGDKKYSIGLDIGTNSVGWAVITDEYKVPSKKFKVLGNTDRHSIKKNLIGALLFDSGETAEATRLKRTARRRYTRRKNRICYLQEIFSNEMAKVDDSFFHRLEESFLVEEDKKHERHPIFGNIVDEVAYHEKYPTIYHLRKKLVDSTDKADLRLIYLALAHMIKFRGHFLIEGDLNPDNSDVDKLFIQLVQTYNQLFEENPINASGVDAKAILSARLSKSRRLENLIAQLPGEKKNGLFGNLIALSLGLTPNFKSNFDLAEDAKLQLSKDTYDDDLDNLLAQIGDQYADLFLAAKNLSDAILLSDILRVNTEITKAPLSASMIKRYDEHHQDLTLLKALVRQQLPEKYKEIFFDQSKNGYAGYIDGGASQEEFYKFIKPILEKMDGTEELLVKLNREDLLRKQRTFDNGSIPHQIHLGELHAILRRQEDFYPFLKDNREKIEKILTFRIPYYVGPLARGNSRFAWMTRKSEETITPWNFEEVVDKGASAQSFIERMTNFDKNLPNEKVLPKHSLLYEYFTVYNELTKVKYVTEGMRKPAFLSGEQKKAIVDLLFKTNRKVTVKQLKEDYFKKIECFDSVEISGVEDRFNASLGTYHDLLKIIKDKDFLDNEENEDILEDIVLTLTLFEDREMIEERLKTYAHLFDDKVMKQLKRRRYTGWGRLSRKLINGIRDKQSGKTILDFLKSDGFANRNFMQLIHDDSLTFKEDIQKAQVSGQGDSLHEHIANLAGSPAIKKGILQTVKVVDELVKVMGRHKPENIVIEMARENQTTQKGQKNSRERMKRIEEGIKELGSQILKEHPVENTQLQNEKLYLYYLQNGRDMYVDQELDINRLSDYDVDHIVPQSFLKDDSIDNKVLTRSDKARGKSDNVPSEEVVKKMKNYWRQLLNAKLITQRKFDNLTKAERGGLSELDKAGFIKRQLVETRQITKHVAQILDSRMNTKYDENDKLIREVKVITLKSKLVSDFRKDFQFYKVREINNYHHAHDAYLNAVVGTALIKKYPKLESEFVYGDYKVYDVRKMIAKSEQEIGKATAKYFFYSNIMNFFKTEITLANGEIRKRPLIETNGETGEIVWDKGRDFATVRKVLSMPQVNIVKKTEVQTGGFSKESILPKRNSDKLIARKKDWDPKKYGGFDSPTVAYSVLVVAKVEKGKSKKLKSVKELLGITIMERSSFEKNPIDFLEAKGYKEVKKDLIIKLPKYSLFELENGRKRMLASAGELQKGNELALPSKYVNFLYLASHYEKLKGSPEDNEQKQLFVEQHKHYLDEIIEQISEFSKRVILADANLDKVLSAYNKHRDKPIREQAENIIHLFTLTNLGAPAAFKYFDTTIDRKRYTSTKEVLDATLIHQSITGLYETRIDLSQLGGDGGEAAAKEAAAKEAAAKGGMDLLKPLTVERKGVKIKGYWNSQADITCVPKDLLQGEEPVRQQNVTTIHGTQEGDVYYVNLKIDGRRINTEVIGTTLDYAIITPGDVPWILKKPLELTIKLDLEEQQGTLLNNSILSKKGKEELKQLFEKYSALWQSWENQVGHRRIRPHKIATGTVKPTPQKQYHINPKAKPDIQIVINDLLKQGVLIQKESTMNTPVYPVPKPNGRWRMVLDYRAVNKVTPLIAVQNQHSYGILGSLFKGRYKTTIDLSNGFWAHPIVPEDYWITAFTWQGKQYCWTVLPQGFLNSPGLFNGDVVDLLQGIPNVEVYVDDVYISHDSEKEHLEYLDILFNRLKEAGYIISLKKSNIANSIVDFLGFQITNEGRGLTDTFKEKLENITAPTTLKQLQSILGLLNFARNFIPDFTELIAPLYALIPKSPKNYVPWQIEHSTTLETLITKLNGAEYLQGRKGDKTLIMKVNASYTTGYIRYYNEGEKKPISYVSIVFSKTELKFTELEKLLTTVHKGLLKALDLSMGQNIHVYSPIVSMQNIQKTPQTAKKALASRWLSWLSYLEDPRIRFFYDPQMPALKDLPAVDTGKDNKKHPSNFQHIFYTDGSAITSPTKEGHLNAGMGIVYFINKDGNLQKQQEWSISLGNHTAQFAEIAAFEFALKKCLPLGGNILVVTDSNYVAKAYNEELDVWASNGFVNNRKKPLKHISKWKSVADLKRLRPDVVVTHEPGHQKLDSSPHAYGNNLADQLATQASFKVHAGKRTADGSEFEKRTADGSEFESPKKKAKVE

SEQ ID NO: 1127 - protein, 2173 aa, synthetic construct
MPAAKRVKLDGGDKKYSIGLDIGTNSVGWAVITDEYKVPSKKFKVLGNTDRHSIKKNLIGALLFDSGETAEATRLKRTARRRYTRRKNRICYLQEIFSNEMAKVDDSFFHRLEESFLVEEDKKHERHPIFGNIVDEVAYHEKYPTIYHLRKKLVDSTDKADLRLIYLALAHMIKFRGHFLIEGDLNPDNSDVDKLFIQLVQTYNQLFEENPINASGVDAKAILSARLSKSRRLENLIAQLPGEKKNGLFGNLIALSLGLTPNFKSNFDLAEDAKLQLSKDTYDDDLDNLLAQIGDQYADLFLAAKNLSDAILLSDILRVNTEITKAPLSASMIKRYDEHHQDLTLLKALVRQQLPEKYKEIFFDQSKNGYAGYIDGGASQEEFYKFIKPILEKMDGTEELLVKLNREDLLRKQRTFDNGSIPHQIHLGELHAILRRQEDFYPFLKDNREKIEKILTFRIPYYVGPLARGNSRFAWMTRKSEETITPWNFEEVVDKGASAQSFIERMTNFDKNLPNEKVLPKHSLLYEYFTVYNELTKVKYVTEGMRKPAFLSGEQKKAIVDLLFKTNRKVTVKQLKEDYFKKIECFDSVEISGVEDRFNASLGTYHDLLKIIKDKDFLDNEENEDILEDIVLTLTLFEDREMIEERLKTYAHLFDDKVMKQLKRRRYTGWGRLSRKLINGIRDKQSGKTILDFLKSDGFANRNFMQLIHDDSLTFKEDIQKAQVSGQGDSLHEHIANLAGSPAIKKGILQTVKVVDELVKVMGRHKPENIVIEMARENQTTQKGQKNSRERMKRIEEGIKELGSQILKEHPVENTQLQNEKLYLYYLQNGRDMYVDQELDINRLSDYDVDHIVPQSFLKDDSIDNKVLTRSDKARGKSDNVPSEEVVKKMKNYWRQLLNAKLITQRKFDNLTKAERGGLSELDKAGFIKRQLVETRQITKHVAQILDSRMNTKYDENDKLIREVKVITLKSKLVSDFRKDFQFYKVREINNYHHAHDAYLNAVVGTALIKKYPKLESEFVYGDYKVYDVRKMIAKSEQEIGKATAKYFFYSNIMNFFKTEITLANGEIRKRPLIETNGETGEIVWDKGRDFATVRKVLSMPQVNIVKKTEVQTGGFSKESILPKRNSDKLIARKKDWDPKKYGGFDSPTVAYSVLVVAKVEKGKSKKLKSVKELLGITIMERSSFEKNPIDFLEAKGYKEVKKDLIIKLPKYSLFELENGRKRMLASAGELQKGNELALPSKYVNFLYLASHYEKLKGSPEDNEQKQLFVEQHKHYLDEIIEQISEFSKRVILADANLDKVLSAYNKHRDKPIREQAENIIHLFTLTNLGAPAAFKYFDTTIDRKRYTSTKEVLDATLIHQSITGLYETRIDLSQLGGDGGEAAAKGSSGGSGGMDLLKPLTVERKGVKIKGYWNSQADITCVPKDLLQGEEPVRQQNVTTIHGTQEGDVYYVNLKIDGRRINTEVIGTTLDYAIITPGDVPWILKKPLELTIKLDLEEQQGTLLNNSILSKKGKEELKQLFEKYSALWQSWENQVGHRRIRPHKIATGTVKPTPQKQYHINPKAKPDIQIVINDLLKQGVLIQKESTMNTPVYPVPKPNGRWRMVLDYRAVNKVTPLIAVQNQHSYGILGSLFKGRYKTTIDLSNGFWAHPIVPEDYWITAFTWQGKQYCWTVLPQGFLNSPGLFNGDVVDLLQGIPNVEVYVDDVYISHDSEKEHLEYLDILFNRLKEAGYIISLKKSNIANSIVDFLGFQITNEGRGLTDTFKEKLENITAPTTLKQLQSILGLLNFARNFIPDFTELIAPLYALIPKSPKNYVPWQIEHSTTLETLITKLNGAEYLQGRKGDKTLIMKVNASYTTGYIRYYNEGEKKPISYVSIVFSKTELKFTELEKLLTTVHKGLLKALDLSMGQNIHVYSPIVSMQNIQKTPQTAKKALASRWLSWLSYLEDPRIRFFYDPQMPALKDLPAVDTGKDNKKHPSNFQHIFYTDGSAITSPTKEGHLNAGMGIVYFINKDGNLQKQQEWSISLGNHTAQFAEIAAFEFALKKCLPLGGNILVVTDSNYVAKAYNEELDVWASNGFVNNRKKPLKHISKWKSVADLKRLRPDVVVTHEPGHQKLDSSPHAYGNNLADQLATQASFKVHAGKRTADGSEFEKRTADGSEFESPKKKAKVE

SEQ ID NO: 1128 - protein, 2171 aa, synthetic construct
MPAAKRVKLDGGDKKYSIGLDIGTNSVGWAVITDEYKVPSKKFKVLGNTDRHSIKKNLIGALLFDSGETAEATRLKRTARRRYTRRKNRICYLQEIFSNEMAKVDDSFFHRLEESFLVEEDKKHERHPIFGNIVDEVAYHEKYPTIYHLRKKLVDSTDKADLRLIYLALAHMIKFRGHFLIEGDLNPDNSDVDKLFIQLVQTYNQLFEENPINASGVDAKAILSARLSKSRRLENLIAQLPGEKKNGLFGNLIALSLGLTPNFKSNFDLAEDAKLQLSKDTYDDDLDNLLAQIGDQYADLFLAAKNLSDAILLSDILRVNTEITKAPLSASMIKRYDEHHQDLTLLKALVRQQLPEKYKEIFFDQSKNGYAGYIDGGASQEEFYKFIKPILEKMDGTEELLVKLNREDLLRKQRTFDNGSIPHQIHLGELHAILRRQEDFYPFLKDNREKIEKILTFRIPYYVGPLARGNSRFAWMTRKSEETITPWNFEEVVDKGASAQSFIERMTNFDKNLPNEKVLPKHSLLYEYFTVYNELTKVKYVTEGMRKPAFLSGEQKKAIVDLLFKTNRKVTVKQLKEDYFKKIECFDSVEISGVEDRFNASLGTYHDLLKIIKDKDFLDNEENEDILEDIVLTLTLFEDREMIEERLKTYAHLFDDKVMKQLKRRRYTGWGRLSRKLINGIRDKQSGKTILDFLKSDGFANRNFMQLIHDDSLTFKEDIQKAQVSGQGDSLHEHIANLAGSPAIKKGILQTVKVVDELVKVMGRHKPENIVIEMARENQTTQKGQKNSRERMKRIEEGIKELGSQILKEHPVENTQLQNEKLYLYYLQNGRDMYVDQELDINRLSDYDVDHIVPQSFLKDDSIDNKVLTRSDKARGKSDNVPSEEVVKKMKNYWRQLLNAKLITQRKFDNLTKAERGGLSELDKAGFIKRQLVETRQITKHVAQILDSRMNTKYDENDKLIREVKVITLKSKLVSDFRKDFQFYKVREINNYHHAHDAYLNAVVGTALIKKYPKLESEFVYGDYKVYDVRKMIAKSEQEIGKATAKYFFYSNIMNFFKTEITLANGEIRKRPLIETNGETGEIVWDKGRDFATVRKVLSMPQVNIVKKTEVQTGGFSKESILPKRNSDKLIARKKDWDPKKYGGFDSPTVAYSVLVVAKVEKGKSKKLKSVKELLGITIMERSSFEKNPIDFLEAKGYKEVKKDLIIKLPKYSLFELENGRKRMLASAGELQKGNELALPSKYVNFLYLASHYEKLKGSPEDNEQKQLFVEQHKHYLDEIIEQISEFSKRVILADANLDKVLSAYNKHRDKPIREQAENIIHLFTLTNLGAPAAFKYFDTTIDRKRYTSTKEVLDATLIHQSITGLYETRIDLSQLGGDGGGGSGGGPAPGGMDLLKPLTVERKGVKIKGYWNSQADITCVPKDLLQGEEPVRQQNVTTIHGTQEGDVYYVNLKIDGRRINTEVIGTTLDYAIITPGDVPWILKKPLELTIKLDLEEQQGTLLNNSILSKKGKEELKQLFEKYSALWQSWENQVGHRRIRPHKIATGTVKPTPQKQYHINPKAKPDIQIVINDLLKQGVLIQKESTMNTPVYPVPKPNGRWRMVLDYRAVNKVTPLIAVQNQHSYGILGSLFKGRYKTTIDLSNGFWAHPIVPEDYWITAFTWQGKQYCWTVLPQGFLNSPGLFNGDVVDLLQGIPNVEVYVDDVYISHDSEKEHLEYLDILFNRLKEAGYIISLKKSNIANSIVDFLGFQITNEGRGLTDTFKEKLENITAPTTLKQLQSILGLLNFARNFIPDFTELIAPLYALIPKSPKNYVPWQIEHSTTLETLITKLNGAEYLQGRKGDKTLIMKVNASYTTGYIRYYNEGEKKPISYVSIVFSKTELKFTELEKLLTTVHKGLLKALDLSMGQNIHVYSPIVSMQNIQKTPQTAKKALASRWLSWLSYLEDPRIRFFYDPQMPALKDLPAVDTGKDNKKHPSNFQHIFYTDGSAITSPTKEGHLNAGMGIVYFINKDGNLQKQQEWSISLGNHTAQFAEIAAFEFALKKCLPLGGNILVVTDSNYVAKAYNEELDVWASNGFVNNRKKPLKHISKWKSVADLKRLRPDVVVTHEPGHQKLDSSPHAYGNNLADQLATQASFKVHAGKRTADGSEFEKRTADGSEFESPKKKAKVE

SEQ ID NO: 1129 - protein, 2208 aa, synthetic construct
MPAAKRVKLDGGDKKYSIGLDIGTNSVGWAVITDEYKVPSKKFKVLGNTDRHSIKKNLIGALLFDSGETAEATRLKRTARRRYTRRKNRICYLQEIFSNEMAKVDDSFFHRLEESFLVEEDKKHERHPIFGNIVDEVAYHEKYPTIYHLRKKLVDSTDKADLRLIYLALAHMIKFRGHFLIEGDLNPDNSDVDKLFIQLVQTYNQLFEENPINASGVDAKAILSARLSKSRRLENLIAQLPGEKKNGLFGNLIALSLGLTPNFKSNFDLAEDAKLQLSKDTYDDDLDNLLAQIGDQYADLFLAAKNLSDAILLSDILRVNTEITKAPLSASMIKRYDEHHQDLTLLKALVRQQLPEKYKEIFFDQSKNGYAGYIDGGASQEEFYKFIKPILEKMDGTEELLVKLNREDLLRKQRTFDNGSIPHQIHLGELHAILRRQEDFYPFLKDNREKIEKILTFRIPYYVGPLARGNSRFAWMTRKSEETITPWNFEEVVDKGASAQSFIERMTNFDKNLPNEKVLPKHSLLYEYFTVYNELTKVKYVTEGMRKPAFLSGEQKKAIVDLLFKTNRKVTVKQLKEDYFKKIECFDSVEISGVEDRFNASLGTYHDLLKIIKDKDFLDNEENEDILEDIVLTLTLFEDREMIEERLKTYAHLFDDKVMKQLKRRRYTGWGRLSRKLINGIRDKQSGKTILDFLKSDGFANRNFMQLIHDDSLTFKEDIQKAQVSGQGDSLHEHIANLAGSPAIKKGILQTVKVVDELVKVMGRHKPENIVIEMARENQTTQKGQKNSRERMKRIEEGIKELGSQILKEHPVENTQLQNEKLYLYYLQNGRDMYVDQELDINRLSDYDVDHIVPQSFLKDDSIDNKVLTRSDKARGKSDNVPSEEVVKKMKNYWRQLLNAKLITQRKFDNLTKAERGGLSELDKAGFIKRQLVETRQITKHVAQILDSRMNTKYDENDKLIREVKVITLKSKLVSDFRKDFQFYKVREINNYHHAHDAYLNAVVGTALIKKYPKLESEFVYGDYKVYDVRKMIAKSEQEIGKATAKYFFYSNIMNFFKTEITLANGEIRKRPLIETNGETGEIVWDKGRDFATVRKVLSMPQVNIVKKTEVQTGGFSKESILPKRNSDKLIARKKDWDPKKYGGFDSPTVAYSVLVVAKVEKGKSKKLKSVKELLGITIMERSSFEKNPIDFLEAKGYKEVKKDLIIKLPKYSLFELENGRKRMLASAGELQKGNELALPSKYVNFLYLASHYEKLKGSPEDNEQKQLFVEQHKHYLDEIIEQISEFSKRVILADANLDKVLSAYNKHRDKPIREQAENIIHLFTLTNLGAPAAFKYFDTTIDRKRYTSTKEVLDATLIHQSITGLYETRIDLSQLGGDGGAEAAAKEAAAKEAAAKEAAAKALEAEAAAKEAAAKEAAAKEAAAKAGGMDLLKPLTVERKGVKIKGYWNSQADITCVPKDLLQGEEPVRQQNVTTIHGTQEGDVYYVNLKIDGRRINTEVIGTTLDYAIITPGDVPWILKKPLELTIKLDLEEQQGTLLNNSILSKKGKEELKQLFEKYSALWQSWENQVGHRRIRPHKIATGTVKPTPQKQYHINPKAKPDIQIVINDLLKQGVLIQKESTMNTPVYPVPKPNGRWRMVLDYRAVNKVTPLIAVQNQHSYGILGSLFKGRYKTTIDLSNGFWAHPIVPEDYWITAFTWQGKQYCWTVLPQGFLNSPGLFNGDVVDLLQGIPNVEVYVDDVYISHDSEKEHLEYLDILFNRLKEAGYIISLKKSNIANSIVDFLGFQITNEGRGLTDTFKEKLENITAPTTLKQLQSILGKLNFARNFIPDFTELIAPLYALIPKSPKNYVPWQIEHSTTLETLITKLNGAEYLQGRKGDKTLIMKVNASYTTGYIRYYNEGEKKPISYVSIVFSKTELKFTELEKLLTTVHKGLLKALDLSMGQNIHVYSPIVSMQNIQKTPQTAKKALASRWLSWLSYLEDPRIRFFYDPQMPALKDLPAVDTGKDNKKHPSNFQHIFYTDGSAITSPTKEGHLNAGMGIVYFINKDGNLQKQQEWSISLGNHTAQFAEIAAFEFALKKCLPLGGNILVVTDSNYVAKAYNEELDVWASNGFVNNRKKPLKHISKWKSVADLKRLRPDVVVTHEPGHQKLDSSPHAYGNNLADQLATQASFKVHAGKRTADGSEFEKRTADGSEFESPKKKAKVE

SEQ ID NO: 1130 - protein, 2171 aa, synthetic construct
MPAAKRVKLDGGDKKYSIGLDIGTNSVGWAVITDEYKVPSKKFKVLGNTDRHSIKKNLIGALLFDSGETAEATRLKRTARRRYTRRKNRICYLQEIFSNEMAKVDDSFFHRLEESFLVEEDKKHERHPIFGNIVDEVAYHEKYPTIYHLRKKLVDSTDKADLRLIYLALAHMIKFRGHFLIEGDLNPDNSDVDKLFIQLVQTYNQLFEENPINASGVDAKAILSARLSKSRRLENLIAQLPGEKKNGLFGNLIALSLGLTPNFKSNFDLAEDAKLQLSKDTYDDDLDNLLAQIGDQYADLFLAAKNLSDAILLSDILRVNTEITKAPLSASMIKRYDEHHQDLTLLKALVRQQLPEKYKEIFFDQSKNGYAGYIDGGASQEEFYKFIKPILEKMDGTEELLVKLNREDLLRKQRTFDNGSIPHQIHLGELHAILRRQEDFYPFLKDNREKIEKILTFRIPYYVGPLARGNSRFAWMTRKSEETITPWNFEEVVDKGASAQSFIERMTNFDKNLPNEKVLPKHSLLYEYFTVYNELTKVKYVTEGMRKPAFLSGEQKKAIVDLLFKTNRKVTVKQLKEDYFKKIECFDSVEISGVEDRFNASLGTYHDLLKIIKDKDFLDNEENEDILEDIVLTLTLFEDREMIEERLKTYAHLFDDKVMKQLKRRRYTGWGRLSRKLINGIRDKQSGKTILDFLKSDGFANRNFMQLIHDDSLTFKEDIQKAQVSGQGDSLHEHIANLAGSPAIKKGILQTVKVVDELVKVMGRHKPENIVIEMARENQTTQKGQKNSRERMKRIEEGIKELGSQILKEHPVENTQLQNEKLYLYYLQNGRDMYVDQELDINRLSDYDVDHIVPQSFLKDDSIDNKVLTRSDKARGKSDNVPSEEVVKKMKNYWRQLLNAKLITQRKFDNLTKAERGGLSELDKAGFIKRQLVETRQITKHVAQILDSRMNTKYDENDKLIREVKVITLKSKLVSDFRKDFQFYKVREINNYHHAHDAYLNAVVGTALIKKYPKLESEFVYGDYKVYDVRKMIAKSEQEIGKATAKYFFYSNIMNFFKTEITLANGEIRKRPLIETNGETGEIVWDKGRDFATVRKVLSMPQVNIVKKTEVQTGGFSKESILPKRNSDKLIARKKDWDPKKYGGFDSPTVAYSVLVVAKVEKGKSKKLKSVKELLGITIMERSSFEKNPIDFLEAKGYKEVKKDLIIKLPKYSLFELENGRKRMLASAGELQKGNELALPSKYVNFLYLASHYEKLKGSPEDNEQKQLFVEQHKHYLDEIIEQISEFSKRVILADANLDKVLSAYNKHRDKPIREQAENIIHLFTLTNLGAPAAFKYFDTTIDRKRYTSTKEVLDATLIHQSITGLYETRIDLSQLGGDGGGSSPAPGGSGGMDLLKPLTVERKGVKIKGYWNSQADITCVPKDLLQGEEPVRQQNVTTIHGTQEGDVYYVNLKIDGRRINTEVIGTTLDYAIITPGDVPWILKKPLELTIKLDLEEQQGTLLNNSILSKKGKEELKQLFEKYSALWQSWENQVGHRRIRPHKIATGTVKPTPQKQYHINPKAKPDIQIVINDLLKQGVLIQKESTMNTPVYPVPKPNGRWRMVLDYRAVNKVTPLIAVQNQHSYGILGSLFKGRYKTTIDLSNGFWAHPIVPEDYWITAFTWQGKQYCWTVLPQGFLNSPGLFNGDVVDLLQGIPNVEVYVDDVYISHDSEKEHLEYLDILFNRLKEAGYIISLKKSNIANSIVDFLGFQITNEGRGLTDTFKEKLENITAPTTLKQLQSILGKLNFARNFIPDFTELIAPLYALIPKSPKNYVPWQIEHSTTLETLITKLNGAEYLQGRKGDKTLIMKVNASYTTGYIRYYNEGEKKPISYVSIVFSKTELKFTELEKLLTTVHKGLLKALDLSMGQNIHVYSPIVSMQNIQKTPQTAKKALASRWLSWLSYLEDPRIRFFYDPQMPALKDLPAVDTGKDNKKHPSNFQHIFYTDGSAITSPTKEGHLNAGMGIVYFINKDGNLQKQQEWSISLGNHTAQFAEIAAFEFALKKCLPLGGNILVVTDSNYVAKAYNEELDVWASNGFVNNRKKPLKHISKWKSVADLKRLRPDVVVTHEPGHQKLDSSPHAYGNNLADQLATQASFKVHAGKRTADGSEFEKRTADGSEFESPKKKAKVE

SEQ ID NO: 1131 - protein, 2182 aa, synthetic construct
MPAAKRVKLDGGDKKYSIGLDIGTNSVGWAVITDEYKVPSKKFKVLGNTDRHSIKKNLIGALLFDSGETAEATRLKRTARRRYTRRKNRICYLQEIFSNEMAKVDDSFFHRLEESFLVEEDKKHERHPIFGNIVDEVAYHEKYPTIYHLRKKLVDSTDKADLRLIYLALAHMIKFRGHFLIEGDLNPDNSDVDKLFIQLVQTYNQLFEENPINASGVDAKAILSARLSKSRRLENLIAQLPGEKKNGLFGNLIALSLGLTPNFKSNFDLAEDAKLQLSKDTYDDDLDNLLAQIGDQYADLFLAAKNLSDAILLSDILRVNTEITKAPLSASMIKRYDEHHQDLTLLKALVRQQLPEKYKEIFFDQSKNGYAGYIDGGASQEEFYKFIKPILEKMDGTEELLVKLNREDLLRKQRTFDNGSIPHQIHLGELHAILRRQEDFYPFLKDNREKIEKILTFRIPYYVGPLARGNSRFAWMTRKSEETITPWNFEEVVDKGASAQSFIERMTNFDKNLPNEKVLPKHSLLYEYFTVYNELTKVKYVTEGMRKPAFLSGEQKKAIVDLLFKTNRKVTVKQLKEDYFKKIECFDSVEISGVEDRFNASLGTYHDLLKIIKDKDFLDNEENEDILEDIVLTLTLFEDREMIEERLKTYAHLFDDKVMKQLKRRRYTGWGRLSRKLINGIRDKQSGKTILDFLKSDGFANRNFMQLIHDDSLTFKEDIQKAQVSGQGDSLHEHIANLAGSPAIKKGILQTVKVVDELVKVMGRHKPENIVIEMARENQTTQKGQKNSRERMKRIEEGIKELGSQILKEHPVENTQLQNEKLYLYYLQNGRDMYVDQELDINRLSDYDVDHIVPQSFLKDDSIDNKVLTRSDKARGKSDNVPSEEVVKKMKNYWRQLLNAKLITQRKFDNLTKAERGGLSELDKAGFIKRQLVETRQITKHVAQILDSRMNTKYDENDKLIREVKVITLKSKLVSDFRKDFQFYKVREINNYHHAHDAYLNAVVGTALIKKYPKLESEFVYGDYKVYDVRKMIAKSEQEIGKATAKYFFYSNIMNFFKTEITLANGEIRKRPLIETNGETGEIVWDKGRDFATVRKVLSMPQVNIVKKTEVQTGGFSKESILPKRNSDKLIARKKDWDPKKYGGFDSPTVAYSVLVVAKVEKGKSKKLKSVKELLGITIMERSSFEKNPIDFLEAKGYKEVKKDLIIKLPKYSLFELENGRKRMLASAGELQKGNELALPSKYVNFLYLASHYEKLKGSPEDNEQKQLFVEQHKHYLDEIIEQISEFSKRVILADANLDKVLSAYNKHRDKPIREQAENIIHLFTLTNLGAPAAFKYFDTTIDRKRYTSTKEVLDATLIHQSITGLYETRIDLSQLGGDGGGGGGSGGGGSGGGGSGGGGSGGMDLLKPLTVERKGVKIKGYWNSQADITCVPKDLLQGEEPVRQQNVTTIHGTQEGDVYYVNLKIDGRRINTEVIGTTLDYAIITPGDVPWILKKPLELTIKLDLEEQQGTLLNNSILSKKGKEELKQLFEKYSALWQSWENQVGHRRIRPHKIATGTVKPTPQKQYHINPKAKPDIQIVINDLLKQGVLIQKESTMNTPVYPVPKPNGRWRMVLDYRAVNKVTPLIAVQNQHSYGILGSLFKGRYKTTIDLSNGFWAHPIVPEDYWITAFTWQGKQYCWTVLPQGFLNSPGLFNGDVVDLLQGIPNVEVYVDDVYISHDSEKEHLEYLDILFNRLKEAGYIISLKKSNIANSIVDFLGFQITNEGRGLTDTFKEKLENITAPTTLKQLQSILGKLNFARNFIPDFTELIAPLYALIPKSPKNYVPWQIEHSTTLETLITKLNGAEYLQGRKGDKTLIMKVNASYTTGYIRYYNEGEKKPISYVSIVFSKTELKFTELEKLLTTVHKGLLKALDLSMGQNIHVYSPIVSMQNIQKTPQTAKKALASRWLSWLSYLEDPRIRFFYDPQMPALKDLPAVDTGKDNKKHPSNFQHIFYTDGSAITSPTKEGHLNAGMGIVYFINKDGNLQKQQEWSISLGNHTAQFAEIAAFEFALKKCLPLGGNILVVTDSNYVAKAYNEELDVWASNGFVNNRKKPLKHISKWKSVADLKRLRPDVVVTHEPGHQKLDSSPHAYGNNLADQLATQASFKVHAGKRTADGSEFEKRTADGSEFESPKKKAKVE

SEQ ID NO: 1132 - protein, 2167 aa, synthetic construct
MPAAKRVKLDGGDKKYSIGLDIGTNSVGWAVITDEYKVPSKKFKVLGNTDRHSIKKNLIGALLFDSGETAEATRLKRTARRRYTRRKNRICYLQEIFSNEMAKVDDSFFHRLEESFLVEEDKKHERHPIFGNIVDEVAYHEKYPTIYHLRKKLVDSTDKADLRLIYLALAHMIKFRGHFLIEGDLNPDNSDVDKLFIQLVQTYNQLFEENPINASGVDAKAILSARLSKSRRLENLIAQLPGEKKNGLFGNLIALSLGLTPNFKSNFDLAEDAKLQLSKDTYDDDLDNLLAQIGDQYADLFLAAKNLSDAILLSDILRVNTEITKAPLSASMIKRYDEHHQDLTLLKALVRQQLPEKYKEIFFDQSKNGYAGYIDGGASQEEFYKFIKPILEKMDGTEELLVKLNREDLLRKQRTFDNGSIPHQIHLGELHAILRRQEDFYPFLKDNREKIEKILTFRIPYYVGPLARGNSRFAWMTRKSEETITPWNFEEVVDKGASAQSFIERMTNFDKNLPNEKVLPKHSLLYEYFTVYNELTKVKYVTEGMRKPAFLSGEQKKAIVDLLFKTNRKVTVKQLKEDYFKKIECFDSVEISGVEDRFNASLGTYHDLLKIIKDKDFLDNEENEDILEDIVLTLTLFEDREMIEERLKTYAHLFDDKVMKQLKRRRYTGWGRLSRKLINGIRDKQSGKTILDFLKSDGFANRNFMQLIHDDSLTFKEDIQKAQVSGQGDSLHEHIANLAGSPAIKKGILQTVKVVDELVKVMGRHKPENIVIEMARENQTTQKGQKNSRERMKRIEEGIKELGSQILKEHPVENTQLQNEKLYLYYLQNGRDMYVDQELDINRLSDYDVDHIVPQSFLKDDSIDNKVLTRSDKARGKSDNVPSEEVVKKMKNYWRQLLNAKLITQRKFDNLTKAERGGLSELDKAGFIKRQLVETRQITKHVAQILDSRMNTKYDENDKLIREVKVITLKSKLVSDFRKDFQFYKVREINNYHHAHDAYLNAVVGTALIKKYPKLESEFVYGDYKVYDVRKMIAKSEQEIGKATAKYFFYSNIMNFFKTEITLANGEIRKRPLIETNGETGEIVWDKGRDFATVRKVLSMPQVNIVKKTEVQTGGFSKESILPKRNSDKLIARKKDWDPKKYGGFDSPTVAYSVLVVAKVEKGKSKKLKSVKELLGITIMERSSFEKNPIDFLEAKGYKEVKKDLIIKLPKYSLFELENGRKRMLASAGELQKGNELALPSKYVNFLYLASHYEKLKGSPEDNEQKQLFVEQHKHYLDEIIEQISEFSKRVILADANLDKVLSAYNKHRDKPIREQAENIIHLFTLTNLGAPAAFKYFDTTIDRKRYTSTKEVLDATLIHQSITGLYETRIDLSQLGGDGGEAAAKGGMDLLKPLTVERKGVKIKGYWNSQADITCVPKDLLQGEEPVRQQNVTTIHGTQEGDVYYVNLKIDGRRINTEVIGTTLDYAIITPGDVPWILKKPLELTIKLDLEEQQGTLLNNSILSKKGKEELKQLFEKYSALWQSWENQVGHRRIRPHKIATGTVKPTPQKQYHINPKAKPDIQIVINDLLKQGVLIQKESTMNTPVYPVPKPNGRWRMVLDYRAVNKVTPLIAVQNQHSYGILGSLFKGRYKTTIDLSNGFWAHPIVPEDYWITAFTWQGKQYCWTVLPQGFLNSPGLFNGDVVDLLQGIPNVEVYVDDVYISHDSEKEHLEYLDILFNRLKEAGYIISLKKSNIANSIVDFLGFQITNEGRGLTDTFKEKLENITAPTTLKQLQSILGKLNFARNFIPDFTELIAPLYALIPKSPKNYVPWQIEHSTTLETLITKLNGAEYLQGRKGDKTLIMKVNASYTTGYIRYYNEGEKKPISYVSIVFSKTELKFTELEKLLTTVHKGLLKALDLSMGQNIHVYSPIVSMQNIQKTPQTAKKALASRWLSWLSYLEDPRIRFFYDPQMPALKDLPAVDTGKDNKKHPSNFQHIFYTDGSAITSPTKEGHLNAGMGIVYFINKDGNLQKQQEWSISLGNHTAQFAEIAAFEFALKKCLPLGGNILVVTDSNYVAKAYNEELDVWASNGFVNNRKKPLKHISKWKSVADLKRLRPDVVVTHEPGHQKLDSSPHAYGNNLADQLATQASFKVHAGKRTADGSEFEKRTADGSEFESPKKKAKVE

SEQ ID NO: 1133 - protein, 2174 aa, synthetic construct
MPAAKRVKLDGGDKKYSIGLDIGTNSVGWAVITDEYKVPSKKFKVLGNTDRHSIKKNLIGALLFDSGETAEATRLKRTARRRYTRRKNRICYLQEIFSNEMAKVDDSFFHRLEESFLVEEDKKHERHPIFGNIVDEVAYHEKYPTIYHLRKKLVDSTDKADLRLIYLALAHMIKFRGHFLIEGDLNPDNSDVDKLFIQLVQTYNQLFEENPINASGVDAKAILSARLSKSRRLENLIAQLPGEKKNGLFGNLIALSLGLTPNFKSNFDLAEDAKLQLSKDTYDDDLDNLLAQIGDQYADLFLAAKNLSDAILLSDILRVNTEITKAPLSASMIKRYDEHHQDLTLLKALVRQQLPEKYKEIFFDQSKNGYAGYIDGGASQEEFYKFIKPILEKMDGTEELLVKLNREDLLRKQRTFDNGSIPHQIHLGELHAILRRQEDFYPFLKDNREKIEKILTFRIPYYVGPLARGNSRFAWMTRKSEETITPWNFEEVVDKGASAQSFIERMTNFDKNLPNEKVLPKHSLLYEYFTVYNELTKVKYVTEGMRKPAFLSGEQKKAIVDLLFKTNRKVTVKQLKEDYFKKIECFDSVEISGVEDRFNASLGTYHDLLKIIKDKDFLDNEENEDILEDIVLTLTLFEDREMIEERLKTYAHLFDDKVMKQLKRRRYTGWGRLSRKLINGIRDKQSGKTILDFLKSDGFANRNFMQLIHDDSLTFKEDIQKAQVSGQGDSLHEHIANLAGSPAIKKGILQTVKVVDELVKVMGRHKPENIVIEMARENQTTQKGQKNSRERMKRIEEGIKELGSQILKEHPVENTQLQNEKLYLYYLQNGRDMYVDQELDINRLSDYDVDHIVPQSFLKDDSIDNKVLTRSDKARGKSDNVPSEEVVKKMKNYWRQLLNAKLITQRKFDNLTKAERGGLSELDKAGFIKRQLVETRQITKHVAQILDSRMNTKYDENDKLIREVKVITLKSKLVSDFRKDFQFYKVREINNYHHAHDAYLNAVVGTALIKKYPKLESEFVYGDYKVYDVRKMIAKSEQEIGKATAKYFFYSNIMNFFKTEITLANGEIRKRPLIETNGETGEIVWDKGRDFATVRKVLSMPQVNIVKKTEVQTGGFSKESILPKRNSDKLIARKKDWDPKKYGGFDSPTVAYSVLVVAKVEKGKSKKLKSVKELLGITIMERSSFEKNPIDFLEAKGYKEVKKDLIIKLPKYSLFELENGRKRMLASAGELQKGNELALPSKYVNFLYLASHYEKLKGSPEDNEQKQLFVEQHKHYLDEIIEQISEFSKRVILADANLDKVLSAYNKHRDKPIREQAENIIHLFTLTNLGAPAAFKYFDTTIDRKRYTSTKEVLDATLIHQSITGLYETRIDLSQLGGDGGGSAGSAAGSGEFGGMDLLKPLTVERKGVKIKGYWNSQADITCVPKDLLQGEEPVRQQNVTTIHGTQEGDVYYVNLKIDGRRINTEVIGTTLDYAIITPGDVPWILKKPLELTIKLDLEEQQGTLLNNSILSKKGKEELKQLFEKYSALWQSWENQVGHRRIRPHKIATGTVKPTPQKQYHINPKAKPDIQIVINDLLKQGVLIQKESTMNTPVYPVPKPNGRWRMVLDYRAVNKVTPLIAVQNQHSYGILGSLFKGRYKTTIDLSNGFWAHPIVPEDYWITAFTWQGKQYCWTVLPQGFLNSPGLFNGDVVDLLQGIPNVEVYVDDVYISHDSEKEHLEYLDILFNRLKEAGYIISLKKSNIANSIVDFLGFQITNEGRGLTDTFKEKLENITAPTTLKQLQSILGKLNFARNFIPDFTELIAPLYALIPKSPKNYVPWQIEHSTTLETLITKLNGAEYLQGRKGDKTLIMKVNASYTTGYIRYYNEGEKKPISYVSIVFSKTELKFTELEKLLTTVHKGLLKALDLSMGQNIHVYSPIVSMQNIQKTPQTAKKALASRWLSWLSYLEDPRIRFFYDPQMPALKDLPAVDTGKDNKKHPSNFQHIFYTDGSAITSPTKEGHLNAGMGIVYFINKDGNLQKQQEWSISLGNHTAQFAEIAAFEFALKKCLPLGGNILVVTDSNYVAKAYNEELDVWASNGFVNNRKKPLKHISKWKSVADLKRLRPDVVVTHEPGHQKLDSSPHAYGNNLADQLATQASFKVHAGKRTADGSEFEKRTADGSEFESPKKKAKVE

SEQ ID NO: 1134 - protein, 2109 aa, synthetic construct
MPAAKRVKLDGGDKKYSIGLDIGTNSVGWAVITDEYKVPSKKFKVLGNTDRHSIKKNLIGALLFDSGETAEATRLKRTARRRYTRRKNRICYLQEIFSNEMAKVDDSFFHRLEESFLVEEDKKHERHPIFGNIVDEVAYHEKYPTIYHLRKKLVDSTDKADLRLIYLALAHMIKFRGHFLIEGDLNPDNSDVDKLFIQLVQTYNQLFEENPINASGVDAKAILSARLSKSRRLENLIAQLPGEKKNGLFGNLIALSLGLTPNFKSNFDLAEDAKLQLSKDTYDDDLDNLLAQIGDQYADLFLAAKNLSDAILLSDILRVNTEITKAPLSASMIKRYDEHHQDLTLLKALVRQQLPEKYKEIFFDQSKNGYAGYIDGGASQEEFYKFIKPILEKMDGTEELLVKLNREDLLRKQRTFDNGSIPHQIHLGELHAILRRQEDFYPFLKDNREKIEKILTFRIPYYVGPLARGNSRFAWMTRKSEETITPWNFEEVVDKGASAQSFIERMTNFDKNLPNEKVLPKHSLLYEYFTVYNELTKVKYVTEGMRKPAFLSGEQKKAIVDLLFKTNRKVTVKQLKEDYFKKIECFDSVEISGVEDRFNASLGTYHDLLKIIKDKDFLDNEENEDILEDIVLTLTLFEDREMIEERLKTYAHLFDDKVMKQLKRRRYTGWGRLSRKLINGIRDKQSGKTILDFLKSDGFANRNFMQLIHDDSLTFKEDIQKAQVSGQGDSLHEHIANLAGSPAIKKGILQTVKVVDELVKVMGRHKPENIVIEMARENQTTQKGQKNSRERMKRIEEGIKELGSQILKEHPVENTQLQNEKLYLYYLQNGRDMYVDQELDINRLSDYDVDHIVPQSFLKDDSIDNKVLTRSDKARGKSDNVPSEEVVKKMKNYWRQLLNAKLITQRKFDNLTKAERGGLSELDKAGFIKRQLVETRQITKHVAQILDSRMNTKYDENDKLIREVKVITLKSKLVSDFRKDFQFYKVREINNYHHAHDAYLNAVVGTALIKKYPKLESEFVYGDYKVYDVRKMIAKSEQEIGKATAKYFFYSNIMNFFKTEITLANGEIRKRPLIETNGETGEIVWDKGRDFATVRKVLSMPQVNIVKKTEVQTGGFSKESILPKRNSDKLIARKKDWDPKKYGGFDSPTVAYSVLVVAKVEKGKSKKLKSVKELLGITIMERSSFEKNPIDFLEAKGYKEVKKDLIIKLPKYSLFELENGRKRMLASAGELQKGNELALPSKYVNFLYLASHYEKLKGSPEDNEQKQLFVEQHKHYLDEIIEQISEFSKRVILADANLDKVLSAYNKHRDKPIREQAENIIHLFTLTNLGAPAAFKYFDTTIDRKRYTSTKEVLDATLIHQSITGLYETRIDLSQLGGDGGEAAAKEAAAKEAAAKEAAAKEAAAKGGTLQLEEEYRLFEPESTQKQEMDIWLKNFPQAWAETGGMGTAHCQAPVLIQLKATATPISIRQYPMPHEAYQGIKPHIRRMLDQGILKPCQSPWNTPLLPVKKPGTEDYRPVQDLREVNKRVEDIHPTVPNPYNLLSTLPPSHPWYTVLDLKDAFFCLRLHSESQLLFAFEWRDPEIGLSGQLTWTRLPQGFKNSPTLFDEALHSDLADFRVRYPALVLLQYVDDLLLAAATRTECLEGTKALLETLGNKGYRASAKKAQICLQEVTYLGYSLKDGQRWLTKARKEAILSIPVPKNSRQVREFLGTAGYCRLWIPGFAELAAPLYPLTRPGTLFQWGTEQQLAFEDIKKALLSSPALGLPDITKPFELFIDENSGFAKGVLVQKLGPWKRPVAYLSKKLDTVASGWPPCLRMVAAIAILVKDAGKLTLGQPLTILTSHPVEALVRQPPNKWLSNARMTHYQAMLLDAERVHFGPTVSLNPATLLPLPSGGNHHDCLQILAETHGTRPDLTDQPLPDADLTWYTDGSSFIRNGEREAGAAVTTESEVIWAAPLPPGTSAQRAELIALTQALKMAEGKKLTVYTDSRYAFATTHVHGEIYRRRGLLTSEGKEIKNKNEILALLEALFLPKRLSIIHCPGHQKGDSPQAKGNRLADDTAKKAATETHSSLTVLPAGKRTADGSEFEKRTADGSEFESPKKKAKVE

SEQ ID NO: 1135 - protein, 2095 aa, synthetic construct
MPAAKRVKLDGGDKKYSIGLDIGTNSVGWAVITDEYKVPSKKFKVLGNTDRHSIKKNLIGALLFDSGETAEATRLKRTARRRYTRRKNRICYLQEIFSNEMAKVDDSFFHRLEESFLVEEDKKHERHPIFGNIVDEVAYHEKYPTIYHLRKKLVDSTDKADLRLIYLALAHMIKFRGHFLIEGDLNPDNSDVDKLFIQLVQTYNQLFEENPINASGVDAKAILSARLSKSRRLENLIAQLPGEKKNGLFGNLIALSLGLTPNFKSNFDLAEDAKLQLSKDTYDDDLDNLLAQIGDQYADLFLAAKNLSDAILLSDILRVNTEITKAPLSASMIKRYDEHHQDLTLLKALVRQQLPEKYKEIFFDQSKNGYAGYIDGGASQEEFYKFIKPILEKMDGTEELLVKLNREDLLRKQRTFDNGSIPHQIHLGELHAILRRQEDFYPFLKDNREKIEKILTFRIPYYVGPLARGNSRFAWMTRKSEETITPWNFEEVVDKGASAQSFIERMTNFDKNLPNEKVLPKHSLLYEYFTVYNELTKVKYVTEGMRKPAFLSGEQKKAIVDLLFKTNRKVTVKQLKEDYFKKIECFDSVEISGVEDRFNASLGTYHDLLKIIKDKDFLDNEENEDILEDIVLTLTLFEDREMIEERLKTYAHLFDDKVMKQLKRRRYTGWGRLSRKLINGIRDKQSGKTILDFLKSDGFANRNFMQLIHDDSLTFKEDIQKAQVSGQGDSLHEHIANLAGSPAIKKGILQTVKVVDELVKVMGRHKPENIVIEMARENQTTQKGQKNSRERMKRIEEGIKELGSQILKEHPVENTQLQNEKLYLYYLQNGRDMYVDQELDINRLSDYDVDHIVPQSFLKDDSIDNKVLTRSDKARGKSDNVPSEEVVKKMKNYWRQLLNAKLITQRKFDNLTKAERGGLSELDKAGFIKRQLVETRQITKHVAQILDSRMNTKYDENDKLIREVKVITLKSKLVSDFRKDFQFYKVREINNYHHAHDAYLNAVVGTALIKKYPKLESEFVYGDYKVYDVRKMIAKSEQEIGKATAKYFFYSNIMNFFKTEITLANGEIRKRPLIETNGETGEIVWDKGRDFATVRKVLSMPQVNIVKKTEVQTGGFSKESILPKRNSDKLIARKKDWDPKKYGGFDSPTVAYSVLVVAKVEKGKSKKLKSVKELLGITIMERSSFEKNPIDFLEAKGYKEVKKDLIIKLPKYSLFELENGRKRMLASAGELQKGNELALPSKYVNFLYLASHYEKLKGSPEDNEQKQLFVEQHKHYLDEIIEQISEFSKRVILADANLDKVLSAYNKHRDKPIREQAENIIHLFTLTNLGAPAAFKYFDTTIDRKRYTSTKEVLDATLIHQSITGLYETRIDLSQLGGDGGGGSEAAAKPAPGGTLQLEEEYRLFEPESTQKQEMDIWLKNFPQAWAETGGMGTAHCQAPVLIQLKATATPISIRQYPMPHEAYQGIKPHIRRMLDQGILKPCQSPWNTPLLPVKKPGTEDYRPVQDLREVNKRVEDIHPTVPNPYNLLSTLPPSHPWYTVLDLKDAFFCLRLHSESQLLFAFEWRDPEIGLSGQLTWTRLPQGFKNSPTLFDEALHSDLADFRVRYPALVLLQYVDDLLLAAATRTECLEGTKALLETLGNKGYRASAKKAQICLQEVTYLGYSLKDGQRWLTKARKEAILSIPVPKNSRQVREFLGTAGYCRLWIPGFAELAAPLYPLTRPGTLFQWGTEQQLAFEDIKKALLSSPALGLPDITKPFELFIDENSGFAKGVLVQKLGPWKRPVAYLSKKLDTVASGWPPCLRMVAAIAILVKDAGKLTLGQPLTILTSHPVEALVRQPPNKWLSNARMTHYQAMLLDAERVHFGPTVSLNPATLLPLPSGGNHHDCLQILAETHGTRPDLTDQPLPDADLTWYTDGSSFIRNGEREAGAAVTTESEVIWAAPLPPGTSAQRAELIALTQALKMAEGKKLTVYTDSRYAFATTHVHGEIYRRRGLLTSEGKEIKNKNEILALLEALFLPKRLSIIHCPGHQKGDSPQAKGNRLADDTAKKAATETHSSLTVLPAGKRTADGSEFEKRTADGSEFESPKKKAKVE

SEQ ID NO: 1136 - protein, 2093 aa, synthetic construct
MPAAKRVKLDGGDKKYSIGLDIGTNSVGWAVITDEYKVPSKKFKVLGNTDRHSIKKNLIGALLFDSGETAEATRLKRTARRRYTRRKNRICYLQEIFSNEMAKVDDSFFHRLEESFLVEEDKKHERHPIFGNIVDEVAYHEKYPTIYHLRKKLVDSTDKADLRLIYLALAHMIKFRGHFLIEGDLNPDNSDVDKLFIQLVQTYNQLFEENPINASGVDAKAILSARLSKSRRLENLIAQLPGEKKNGLFGNLIALSLGLTPNFKSNFDLAEDAKLQLSKDTYDDDLDNLLAQIGDQYADLFLAAKNLSDAILLSDILRVNTEITKAPLSASMIKRYDEHHQDLTLLKALVRQQLPEKYKEIFFDQSKNGYAGYIDGGASQEEFYKFIKPILEKMDGTEELLVKLNREDLLRKQRTFDNGSIPHQIHLGELHAILRRQEDFYPFLKDNREKIEKILTFRIPYYVGPLARGNSRFAWMTRKSEETITPWNFEEVVDKGASAQSFIERMTNFDKNLPNEKVLPKHSLLYEYFTVYNELTKVKYVTEGMRKPAFLSGEQKKAIVDLLFKTNRKVTVKQLKEDYFKKIECFDSVEISGVEDRFNASLGTYHDLLKIIKDKDFLDNEENEDILEDIVLTLTLFEDREMIEERLKTYAHLFDDKVMKQLKRRRYTGWGRLSRKLINGIRDKQSGKTILDFLKSDGFANRNFMQLIHDDSLTFKEDIQKAQVSGQGDSLHEHIANLAGSPAIKKGILQTVKVVDELVKVMGRHKPENIVIEMARENQTTQKGQKNSRERMKRIEEGIKELGSQILKEHPVENTQLQNEKLYLYYLQNGRDMYVDQELDINRLSDYDVDHIVPQSFLKDDSIDNKVLTRSDKARGKSDNVPSEEVVKKMKNYWRQLLNAKLITQRKFDNLTKAERGGLSELDKAGFIKRQLVETRQITKHVAQILDSRMNTKYDENDKLIREVKVITLKSKLVSDFRKDFQFYKVREINNYHHAHDAYLNAVVGTALIKKYPKLESEFVYGDYKVYDVRKMIAKSEQEIGKATAKYFFYSNIMNFFKTEITLANGEIRKRPLIETNGETGEIVWDKGRDFATVRKVLSMPQVNIVKKTEVQTGGFSKESILPKRNSDKLIARKKDWDPKKYGGFDSPTVAYSVLVVAKVEKGKSKKLKSVKELLGITIMERSSFEKNPIDFLEAKGYKEVKKDLIIKLPKYSLFELENGRKRMLASAGELQKGNELALPSKYVNFLYLASHYEKLKGSPEDNEQKQLFVEQHKHYLDEIIEQISEFSKRVILADANLDKVLSAYNKHRDKPIREQAENIIHLFTLTNLGAPAAFKYFDTTIDRKRYTSTKEVLDATLIHQSITGLYETRIDLSQLGGDGGPAPGSSGGGGGTLQLEEEYRLFEPESTQKQEMDIWLKNFPQAWAETGGMGTAHCQAPVLIQLKATATPISIRQYPMPHEAYQGIKPHIRRMLDQGILKPCQSPWNTPLLPVKKPGTEDYRPVQDLREVNKRVEDIHPTVPNPYNLLSTLPPSHPWYTVLDLKDAFFCLRLHSESQLLFAFEWRDPEIGLSGQLTWTRLPQGFKNSPTLFDEALHSDLADFRVRYPALVLLQYVDDLLLAAATRTECLEGTKALLETLGNKGYRASAKKAQICLQEVTYLGYSLKDGQRWLTKARKEAILSIPVPKNSRQVREFLGTAGYCRLWIPGFAELAAPLYPLTRPGTLFQWGTEQQLAFEDIKKALLSSPALGLPDITKPFELFIDENSGFAKGVLVQKLGPWKRPVAYLSKKLDTVASGWPPCLRMVAAIAILVKDAGKLTLGQPLTILTSHPVEALVRQPPNKWLSNARMTHYQAMLLDAERVHFGPTVSLNPATLLPLPSGGNHHDCLQILAETHGTRPDLTDQPLPDADLTWYTDGSSFIRNGEREAGAAVTTESEVIWAAPLPPGTSAQRAELIALTQALKMAEGKKLTVYTDSRYAFATTHVHGEIYRRRGLLTSEGKEIKNKNEILALLEALFLPKRLSIIHCPGHQKGDSPQAKGNRLADDTAKKAATETHSSLTVLPAGKRTADGSEFEKRTADGSEFESPKKKAKVE

SEQ ID NO: 1137 - protein, 2107 aa, synthetic construct
MPAAKRVKLDGGDKKYSIGLDIGTNSVGWAVITDEYKVPSKKFKVLGNTDRHSIKKNLIGALLFDSGETAEATRLKRTARRRYTRRKNRICYLQEIFSNEMAKVDDSFFHRLEESFLVEEDKKHERHPIFGNIVDEVAYHEKYPTIYHLRKKLVDSTDKADLRLIYLALAHMIKFRGHFLIEGDLNPDNSDVDKLFIQLVQTYNQLFEENPINASGVDAKAILSARLSKSRRLENLIAQLPGEKKNGLFGNLIALSLGLTPNFKSNFDLAEDAKLQLSKDTYDDDLDNLLAQIGDQYADLFLAAKNLSDAILLSDILRVNTEITKAPLSASMIKRYDEHHQDLTLLKALVRQQLPEKYKEIFFDQSKNGYAGYIDGGASQEEFYKFIKPILEKMDGTEELLVKLNREDLLRKQRTFDNGSIPHQIHLGELHAILRRQEDFYPFLKDNREKIEKILTFRIPYYVGPLARGNSRFAWMTRKSEETITPWNFEEVVDKGASAQSFIERMTNFDKNLPNEKVLPKHSLLYEYFTVYNELTKVKYVTEGMRKPAFLSGEQKKAIVDLLFKTNRKVTVKQLKEDYFKKIECFDSVEISGVEDRFNASLGTYHDLLKIIKDKDFLDNEENEDILEDIVLTLTLFEDREMIEERLKTYAHLFDDKVMKQLKRRRYTGWGRLSRKLINGIRDKQSGKTILDFLKSDGFANRNFMQLIHDDSLTFKEDIQKAQVSGQGDSLHEHIANLAGSPAIKKGILQTVKVVDELVKVMGRHKPENIVIEMARENQTTQKGQKNSRERMKRIEEGIKELGSQILKEHPVENTQLQNEKLYLYYLQNGRDMYVDQELDINRLSDYDVDHIVPQSFLKDDSIDNKVLTRSDKARGKSDNVPSEEVVKKMKNYWRQLLNAKLITQRKFDNLTKAERGGLSELDKAGFIKRQLVETRQITKHVAQILDSRMNTKYDENDKLIREVKVITLKSKLVSDFRKDFQFYKVREINNYHHAHDAYLNAVVGTALIKKYPKLESEFVYGDYKVYDVRKMIAKSEQEIGKATAKYFFYSNIMNFFKTEITLANGEIRKRPLIETNGETGEIVWDKGRDFATVRKVLSMPQVNIVKKTEVQTGGFSKESILPKRNSDKLIARKKDWDPKKYGGFDSPTVAYSVLVVAKVEKGKSKKLKSVKELLGITIMERSSFEKNPIDFLEAKGYKEVKKDLIIKLPKYSLFELENGRKRMLASAGELQKGNELALPSKYVNFLYLASHYEKLKGSPEDNEQKQLFVEQHKHYLDEIIEQISEFSKRVILADANLDKVLSAYNKHRDKPIREQAENIIHLFTLTNLGAPAAFKYFDTTIDRKRYTSTKEVLDATLIHQSITGLYETRIDLSQLGGDGGEAAAKEAAAKEAAAKEAAAKGGTAPLEEEYRLFLEAPIQNVTLLEQWKREIPKVWAEINPPGLASTQAPIHVQLLSTALPVRVRQYPITLEAKRSLRETIRKFRAAGILRPVHSPWNTPLLPVRKSGTSEYRMVQDLREVNKRVETIHPTVPNPYTLLSLLPPDRIWYSVLDLKDAFFCIPLAPESQLIFAFEWADAEEGESGQLTWTRLPQGFKNSPTLFNEALNRDLQGFRLDHPSVSLLQYVDDLLIAADTQAACLSATRDLLMTLAELGYRVSGKKAQLCQEEVTYLGFKIHKGSRSLSNSRTQAILQIPVPKTKRQVREFLGTIGYCRLWIPGFAELAQPLYAATRPGNDPLVWGEKEEEAFQSLKLALTQPPALALPSLDKPFQLFVEETSGAAKGVLTQALGPWKRPVAYLSKRLDPVAAGWPRCLRAIAAAALLTREASKLTFGQDIEITSSHNLESLLRSPPDKWLTNARITQYQVLLLDPPRVRFKQTAALNPATLLPETDDTLPIHHCLDTLDSLTSTRPDLTDQPLAQAEATLFTDGSSYIRDGKRYAGAAVVTLDSVIWAEPLPIGTSAQKAELIALTKALEWSKDKSVNIYTDSRYAFATLHVHGMIYRERGWLTAGGKAIKNAPEILALLTAVWLPKRVAVMHCKGHQKDDAPTSTGNRRADEVAREVAIRPLSTQATISAGKRTADGSEFEKRTADGSEFESPKKKAKVE

SEQ ID NO: 1138 - protein, 2100 aa, synthetic construct
MPAAKRVKLDGGDKKYSIGLDIGTNSVGWAVITDEYKVPSKKFKVLGNTDRHSIKKNLIGALLFDSGETAEATRLKRTARRRYTRRKNRICYLQEIFSNEMAKVDDSFFHRLEESFLVEEDKKHERHPIFGNIVDEVAYHEKYPTIYHLRKKLVDSTDKADLRLIYLALAHMIKFRGHFLIEGDLNPDNSDVDKLFIQLVQTYNQLFEENPINASGVDAKAILSARLSKSRRLENLIAQLPGEKKNGLFGNLIALSLGLTPNFKSNFDLAEDAKLQLSKDTYDDDLDNLLAQIGDQYADLFLAAKNLSDAILLSDILRVNTEITKAPLSASMIKRYDEHHQDLTLLKALVRQQLPEKYKEIFFDQSKNGYAGYIDGGASQEEFYKFIKPILEKMDGTEELLVKLNREDLLRKQRTFDNGSIPHQIHLGELHAILRRQEDFYPFLKDNREKIEKILTFRIPYYVGPLARGNSRFAWMTRKSEETITPWNFEEVVDKGASAQSFIERMTNFDKNLPNEKVLPKHSLLYEYFTVYNELTKVKYVTEGMRKPAFLSGEQKKAIVDLLFKTNRKVTVKQLKEDYFKKIECFDSVEISGVEDRFNASLGTYHDLLKIIKDKDFLDNEENEDILEDIVLTLTLFEDREMIEERLKTYAHLFDDKVMKQLKRRRYTGWGRLSRKLINGIRDKQSGKTILDFLKSDGFANRNFMQLIHDDSLTFKEDIQKAQVSGQGDSLHEHIANLAGSPAIKKGILQTVKVVDELVKVMGRHKPENIVIEMARENQTTQKGQKNSRERMKRIEEGIKELGSQILKEHPVENTQLQNEKLYLYYLQNGRDMYVDQELDINRLSDYDVDHIVPQSFLKDDSIDNKVLTRSDKARGKSDNVPSEEVVKKMKNYWRQLLNAKLITQRKFDNLTKAERGGLSELDKAGFIKRQLVETRQITKHVAQILDSRMNTKYDENDKLIREVKVITLKSKLVSDFRKDFQFYKVREINNYHHAHDAYLNAVVGTALIKKYPKLESEFVYGDYKVYDVRKMIAKSEQEIGKATAKYFFYSNIMNFFKTEITLANGEIRKRPLIETNGETGEIVWDKGRDFATVRKVLSMPQVNIVKKTEVQTGGFSKESILPKRNSDKLIARKKDWDPKKYGGFDSPTVAYSVLVVAKVEKGKSKKLKSVKELLGITIMERSSFEKNPIDFLEAKGYKEVKKDLIIKLPKYSLFELENGRKRMLASAGELQKGNELALPSKYVNFLYLASHYEKLKGSPEDNEQKQLFVEQHKHYLDEIIEQISEFSKRVILADANLDKVLSAYNKHRDKPIREQAENIIHLFTLTNLGAPAAFKYFDTTIDRKRYTSTKEVLDATLIHQSITGLYETRIDLSQLGGDGGPAPAPAPAPAPAPGGTAPLEEEYRLFLEAPIQNVTLLEQWKREIPKVWAEINPPGLASTQAPIHVQLLSTALPVRVRQYPITLEAKRSLRETIRKFRAAGILRPVHSPWNTPLLPVRKSGTSEYRMVQDLREVNKRVETIHPTVPNPYTLLSLLPPDRIWYSVLDLKDAFFCIPLAPESQLIFAFEWADAEEGESGQLTWTRLPQGFKNSPTLFNEALNRDLQGFRLDHPSVSLLQYVDDLLIAADTQAACLSATRDLLMTLAELGYRVSGKKAQLCQEEVTYLGFKIHKGSRSLSNSRTQAILQIPVPKTKRQVREFLGTIGYCRLWIPGFAELAQPLYAATRPGNDPLVWGEKEEEAFQSLKLALTQPPALALPSLDKPFQLFVEETSGAAKGVLTQALGPWKRPVAYLSKRLDPVAAGWPRCLRAIAAAALLTREASKLTFGQDIEITSSHNLESLLRSPPDKWLTNARITQYQVLLLDPPRVRFKQTAALNPATLLPETDDTLPIHHCLDTLDSLTSTRPDLTDQPLAQAEATLFTDGSSYIRDGKRYAGAAVVTLDSVIWAEPLPIGTSAQKAELIALTKALEWSKDKSVNIYTDSRYAFATLHVHGMIYRERGWLTAGGKAIKNAPEILALLTAVWLPKRVAVMHCKGHQKDDAPTSTGNRRADEVAREVAIRPLSTQATISAGKRTADGSEFEKRTADGSEFESPKKKAKVE

SEQ ID NO: 1139 - protein, 2098 aa, synthetic construct
MPAAKRVKLDGGDKKYSIGLDIGTNSVGWAVITDEYKVPSKKFKVLGNTDRHSIKKNLIGALLFDSGETAEATRLKRTARRRYTRRKNRICYLQEIFSNEMAKVDDSFFHRLEESFLVEEDKKHERHPIFGNIVDEVAYHEKYPTIYHLRKKLVDSTDKADLRLIYLALAHMIKFRGHFLIEGDLNPDNSDVDKLFIQLVQTYNQLFEENPINASGVDAKAILSARLSKSRRLENLIAQLPGEKKNGLFGNLIALSLGLTPNFKSNFDLAEDAKLQLSKDTYDDDLDNLLAQIGDQYADLFLAAKNLSDAILLSDILRVNTEITKAPLSASMIKRYDEHHQDLTLLKALVRQQLPEKYKEIFFDQSKNGYAGYIDGGASQEEFYKFIKPILEKMDGTEELLVKLNREDLLRKQRTFDNGSIPHQIHLGELHAILRRQEDFYPFLKDNREKIEKILTFRIPYYVGPLARGNSRFAWMTRKSEETITPWNFEEVVDKGASAQSFIERMTNFDKNLPNEKVLPKHSLLYEYFTVYNELTKVKYVTEGMRKPAFLSGEQKKAIVDLLFKTNRKVTVKQLKEDYFKKIECFDSVEISGVEDRFNASLGTYHDLLKIIKDKDFLDNEENEDILEDIVLTLTLFEDREMIEERLKTYAHLFDDKVMKQLKRRRYTGWGRLSRKLINGIRDKQSGKTILDFLKSDGFANRNFMQLIHDDSLTFKEDIQKAQVSGQGDSLHEHIANLAGSPAIKKGILQTVKVVDELVKVMGRHKPENIVIEMARENQTTQKGQKNSRERMKRIEEGIKELGSQILKEHPVENTQLQNEKLYLYYLQNGRDMYVDQELDINRLSDYDVDHIVPQSFLKDDSIDNKVLTRSDKARGKSDNVPSEEVVKKMKNYWRQLLNAKLITQRKFDNLTKAERGGLSELDKAGFIKRQLVETRQITKHVAQILDSRMNTKYDENDKLIREVKVITLKSKLVSDFRKDFQFYKVREINNYHHAHDAYLNAVVGTALIKKYPKLESEFVYGDYKVYDVRKMIAKSEQEIGKATAKYFFYSNIMNFFKTEITLANGEIRKRPLIETNGETGEIVWDKGRDFATVRKVLSMPQVNIVKKTEVQTGGFSKESILPKRNSDKLIARKKDWDPKKYGGFDSPTVAYSVLVVAKVEKGKSKKLKSVKELLGITIMERSSFEKNPIDFLEAKGYKEVKKDLIIKLPKYSLFELENGRKRMLASAGELQKGNELALPSKYVNFLYLASHYEKLKGSPEDNEQKQLFVEQHKHYLDEIIEQISEFSKRVILADANLDKVLSAYNKHRDKPIREQAENIIHLFTLTNLGAPAAFKYFDTTIDRKRYTSTKEVLDATLIHQSITGLYETRIDLSQLGGDGGEAAAKGGSPAPGGTAPLEEEYRLFLEAPIQNVTLLEQWKREIPKVWAEINPPGLASTQAPIHVQLLSTALPVRVRQYPITLEAKRSLRETIRKFRAAGILRPVHSPWNTPLLPVRKSGTSEYRMVQDLREVNKRVETIHPTVPNPYTLLSLLPPDRIWYSVLDLKDAFFCIPLAPESQLIFAFEWADAEEGESGQLTWTRLPQGFKNSPTLFNEALNRDLQGFRLDHPSVSLLQYVDDLLIAADTQAACLSATRDLLMTLAELGYRVSGKKAQLCQEEVTYLGFKIHKGSRSLSNSRTQAILQIPVPKTKRQVREFLGTIGYCRLWIPGFAELAQPLYAATRPGNDPLVWGEKEEEAFQSLKLALTQPPALALPSLDKPFQLFVEETSGAAKGVLTQALGPWKRPVAYLSKRLDPVAAGWPRCLRAIAAAALLTREASKLTFGQDIEITSSHNLESLLRSPPDKWLTNARITQYQVLLLDPPRVRFKQTAALNPATLLPETDDTLPIHHCLDTLDSLTSTRPDLTDQPLAQAEATLFTDGSSYIRDGKRYAGAAVVTLDSVIWAEPLPIGTSAQKAELIALTKALEWSKDKSVNIYTDSRYAFATLHVHGMIYRERGWLTAGGKAIKNAPEILALLTAVWLPKRVAVMHCKGHQKDDAPTSTGNRRADEVAREVAIRPLSTQATISAGKRTADGSEFEKRTADGSEFESPKKKAKVE

SEQ ID NO: 1140 - protein, 2096 aa, synthetic construct
MPAAKRVKLDGGDKKYSIGLDIGTNSVGWAVITDEYKVPSKKFKVLGNTDRHSIKKNLIGALLFDSGETAEATRLKRTARRRYTRRKNRICYLQEIFSNEMAKVDDSFFHRLEESFLVEEDKKHERHPIFGNIVDEVAYHEKYPTIYHLRKKLVDSTDKADLRLIYLALAHMIKFRGHFLIEGDLNPDNSDVDKLFIQLVQTYNQLFEENPINASGVDAKAILSARLSKSRRLENLIAQLPGEKKNGLFGNLIALSLGLTPNFKSNFDLAEDAKLQLSKDTYDDDLDNLLAQIGDQYADLFLAAKNLSDAILLSDILRVNTEITKAPLSASMIKRYDEHHQDLTLLKALVRQQLPEKYKEIFFDQSKNGYAGYIDGGASQEEFYKFIKPILEKMDGTEELLVKLNREDLLRKQRTFDNGSIPHQIHLGELHAILRRQEDFYPFLKDNREKIEKILTFRIPYYVGPLARGNSRFAWMTRKSEETITPWNFEEVVDKGASAQSFIERMTNFDKNLPNEKVLPKHSLLYEYFTVYNELTKVKYVTEGMRKPAFLSGEQKKAIVDLLFKTNRKVTVKQLKEDYFKKIECFDSVEISGVEDRFNASLGTYHDLLKIIKDKDFLDNEENEDILEDIVLTLTLFEDREMIEERLKTYAHLFDDKVMKQLKRRRYTGWGRLSRKLINGIRDKQSGKTILDFLKSDGFANRNFMQLIHDDSLTFKEDIQKAQVSGQGDSLHEHIANLAGSPAIKKGILQTVKVVDELVKVMGRHKPENIVIEMARENQTTQKGQKNSRERMKRIEEGIKELGSQILKEHPVENTQLQNEKLYLYYLQNGRDMYVDQELDINRLSDYDVDHIVPQSFLKDDSIDNKVLTRSDKARGKSDNVPSEEVVKKMKNYWRQLLNAKLITQRKFDNLTKAERGGLSELDKAGFIKRQLVETRQITKHVAQILDSRMNTKYDENDKLIREVKVITLKSKLVSDFRKDFQFYKVREINNYHHAHDAYLNAVVGTALIKKYPKLESEFVYGDYKVYDVRKMIAKSEQEIGKATAKYFFYSNIMNFFKTEITLANGEIRKRPLIETNGETGEIVWDKGRDFATVRKVLSMPQVNIVKKTEVQTGGFSKESILPKRNSDKLIARKKDWDPKKYGGFDSPTVAYSVLVVAKVEKGKSKKLKSVKELLGITIMERSSFEKNPIDFLEAKGYKEVKKDLIIKLPKYSLFELENGRKRMLASAGELQKGNELALPSKYVNFLYLASHYEKLKGSPEDNEQKQLFVEQHKHYLDEIIEQISEFSKRVILADANLDKVLSAYNKHRDKPIREQAENIIHLFTLTNLGAPAAFKYFDTTIDRKRYTSTKEVLDATLIHQSITGLYETRIDLSQLGGDGGGGGPAPGSSGGTAPLEEEYRLFLEAPIQNVTLLEQWKREIPKVWAEINPPGLASTQAPIHVQLLSTALPVRVRQYPITLEAKRSLRETIRKFRAAGILRPVHSPWNTPLLPVRKSGTSEYRMVQDLREVNKRVETIHPTVPNPYTLLSLLPPDRIWYSVLDLKDAFFCIPLAPESQLIFAFEWADAEEGESGQLTWTRLPQGFKNSPTLFNEALNRDLQGFRLDHPSVSLLQYVDDLLIAADTQAACLSATRDLLMTLAELGYRVSGKKAQLCQEEVTYLGFKIHKGSRSLSNSRTQAILQIPVPKTKRQVREFLGTIGYCRLWIPGFAELAQPLYAATRPGNDPLVWGEKEEEAFQSLKLALTQPPALALPSLDKPFQLFVEETSGAAKGVLTQALGPWKRPVAYLSKRLDPVAAGWPRCLRAIAAAALLTREASKLTFGQDIEITSSHNLESLLRSPPDKWLTNARITQYQVLLLDPPRVRFKQTAALNPATLLPETDDTLPIHHCLDTLDSLTSTRPDLTDQPLAQAEATLFTDGSSYIRDGKRYAGAAVVTLDSVIWAEPLPIGTSAQKAELIALTKALEWSKDKSVNIYTDSRYAFATLHVHGMIYRERGWLTAGGKAIKNAPEILALLTAVWLPKRVAVMHCKGHQKDDAPTSTGNRRADEVAREVAIRPLSTQATISAGKRTADGSEFEKRTADGSEFESPKKKAKVE

SEQ ID NO: 1141 - protein, 2095 aa, synthetic construct
MPAAKRVKLDGGDKKYSIGLDIGTNSVGWAVITDEYKVPSKKFKVLGNTDRHSIKKNLIGALLFDSGETAEATRLKRTARRRYTRRKNRICYLQEIFSNEMAKVDDSFFHRLEESFLVEEDKKHERHPIFGNIVDEVAYHEKYPTIYHLRKKLVDSTDKADLRLIYLALAHMIKFRGHFLIEGDLNPDNSDVDKLFIQLVQTYNQLFEENPINASGVDAKAILSARLSKSRRLENLIAQLPGEKKNGLFGNLIALSLGLTPNFKSNFDLAEDAKLQLSKDTYDDDLDNLLAQIGDQYADLFLAAKNLSDAILLSDILRVNTEITKAPLSASMIKRYDEHHQDLTLLKALVRQQLPEKYKEIFFDQSKNGYAGYIDGGASQEEFYKFIKPILEKMDGTEELLVKLNREDLLRKQRTFDNGSIPHQIHLGELHAILRRQEDFYPFLKDNREKIEKILTFRIPYYVGPLARGNSRFAWMTRKSEETITPWNFEEVVDKGASAQSFIERMTNFDKNLPNEKVLPKHSLLYEYFTVYNELTKVKYVTEGMRKPAFLSGEQKKAIVDLLFKTNRKVTVKQLKEDYFKKIECFDSVEISGVEDRFNASLGTYHDLLKIIKDKDFLDNEENEDILEDIVLTLTLFEDREMIEERLKTYAHLFDDKVMKQLKRRRYTGWGRLSRKLINGIRDKQSGKTILDFLKSDGFANRNFMQLIHDDSLTFKEDIQKAQVSGQGDSLHEHIANLAGSPAIKKGILQTVKVVDELVKVMGRHKPENIVIEMARENQTTQKGQKNSRERMKRIEEGIKELGSQILKEHPVENTQLQNEKLYLYYLQNGRDMYVDQELDINRLSDYDVDHIVPQSFLKDDSIDNKVLTRSDKARGKSDNVPSEEVVKKMKNYWRQLLNAKLITQRKFDNLTKAERGGLSELDKAGFIKRQLVETRQITKHVAQILDSRMNTKYDENDKLIREVKVITLKSKLVSDFRKDFQFYKVREINNYHHAHDAYLNAVVGTALIKKYPKLESEFVYGDYKVYDVRKMIAKSEQEIGKATAKYFFYSNIMNFFKTEITLANGEIRKRPLIETNGETGEIVWDKGRDFATVRKVLSMPQVNIVKKTEVQTGGFSKESILPKRNSDKLIARKKDWDPKKYGGFDSPTVAYSVLVVAKVEKGKSKKLKSVKELLGITIMERSSFEKNPIDFLEAKGYKEVKKDLIIKLPKYSLFELENGRKRMLASAGELQKGNELALPSKYVNFLYLASHYEKLKGSPEDNEQKQLFVEQHKHYLDEIIEQISEFSKRVILADANLDKVLSAYNKHRDKPIREQAENIIHLFTLTNLGAPAAFKYFDTTIDRKRYTSTKEVLDATLIHQSITGLYETRIDLSQLGGDGGEAAAKGGGGGTAPLEEEYRLFLEAPIQNVTLLEQWKREIPKVWAEINPPGLASTQAPIHVQLLSTALPVRVRQYPITLEAKRSLRETIRKFRAAGILRPVHSPWNTPLLPVRKSGTSEYRMVQDLREVNKRVETIHPTVPNPYTLLSLLPPDRIWYSVLDLKDAFFCIPLAPESQLIFAFEWADAEEGESGQLTWTRLPQGFKNSPTLFNEALNRDLQGFRLDHPSVSLLQYVDDLLIAADTQAACLSATRDLLMTLAELGYRVSGKKAQLCQEEVTYLGFKIHKGSRSLSNSRTQAILQIPVPKTKRQVREFLGTIGYCRLWIPGFAELAQPLYAATRPGNDPLVWGEKEEEAFQSLKLALTQPPALALPSLDKPFQLFVEETSGAAKGVLTQALGPWKRPVAYLSKRLDPVAAGWPRCLRAIAAAALLTREASKLTFGQDIEITSSHNLESLLRSPPDKWLTNARITQYQVLLLDPPRVRFKQTAALNPATLLPETDDTLPIHHCLDTLDSLTSTRPDLTDQPLAQAEATLFTDGSSYIRDGKRYAGAAVVTLDSVIWAEPLPIGTSAQKAELIALTKALEWSKDKSVNIYTDSRYAFATLHVHGMIYRERGWLTAGGKAIKNAPEILALLTAVWLPKRVAVMHCKGHQKDDAPTSTGNRRADEVAREVAIRPLSTQATISAGKRTADGSEFEKRTADGSEFESPKKKAKVE

SEQ ID NO: 1142 - protein, 2098 aa, synthetic construct
MPAAKRVKLDGGDKKYSIGLDIGTNSVGWAVITDEYKVPSKKFKVLGNTDRHSIKKNLIGALLFDSGETAEATRLKRTARRRYTRRKNRICYLQEIFSNEMAKVDDSFFHRLEESFLVEEDKKHERHPIFGNIVDEVAYHEKYPTIYHLRKKLVDSTDKADLRLIYLALAHMIKFRGHFLIEGDLNPDNSDVDKLFIQLVQTYNQLFEENPINASGVDAKAILSARLSKSRRLENLIAQLPGEKKNGLFGNLIALSLGLTPNFKSNFDLAEDAKLQLSKDTYDDDLDNLLAQIGDQYADLFLAAKNLSDAILLSDILRVNTEITKAPLSASMIKRYDEHHQDLTLLKALVRQQLPEKYKEIFFDQSKNGYAGYIDGGASQEEFYKFIKPILEKMDGTEELLVKLNREDLLRKQRTFDNGSIPHQIHLGELHAILRRQEDFYPFLKDNREKIEKILTFRIPYYVGPLARGNSRFAWMTRKSEETITPWNFEEVVDKGASAQSFIERMTNFDKNLPNEKVLPKHSLLYEYFTVYNELTKVKYVTEGMRKPAFLSGEQKKAIVDLLFKTNRKVTVKQLKEDYFKKIECFDSVEISGVEDRFNASLGTYHDLLKIIKDKDFLDNEENEDILEDIVLTLTLFEDREMIEERLKTYAHLFDDKVMKQLKRRRYTGWGRLSRKLINGIRDKQSGKTILDFLKSDGFANRNFMQLIHDDSLTFKEDIQKAQVSGQGDSLHEHIANLAGSPAIKKGILQTVKVVDELVKVMGRHKPENIVIEMARENQTTQKGQKNSRERMKRIEEGIKELGSQILKEHPVENTQLQNEKLYLYYLQNGRDMYVDQELDINRLSDYDVDHIVPQSFLKDDSIDNKVLTRSDKARGKSDNVPSEEVVKKMKNYWRQLLNAKLITQRKFDNLTKAERGGLSELDKAGFIKRQLVETRQITKHVAQILDSRMNTKYDENDKLIREVKVITLKSKLVSDFRKDFQFYKVREINNYHHAHDAYLNAVVGTALIKKYPKLESEFVYGDYKVYDVRKMIAKSEQEIGKATAKYFFYSNIMNFFKTEITLANGEIRKRPLIETNGETGEIVWDKGRDFATVRKVLSMPQVNIVKKTEVQTGGFSKESILPKRNSDKLIARKKDWDPKKYGGFDSPTVAYSVLVVAKVEKGKSKKLKSVKELLGITIMERSSFEKNPIDFLEAKGYKEVKKDLIIKLPKYSLFELENGRKRMLASAGELQKGNELALPSKYVNFLYLASHYEKLKGSPEDNEQKQLFVEQHKHYLDEIIEQISEFSKRVILADANLDKVLSAYNKHRDKPIREQAENIIHLFTLTNLGAPAAFKYFDTTIDRKRYTSTKEVLDATLIHQSITGLYETRIDLSQLGGDGGGGGEAAAKGSSGGTAPLEEEYRLFLEAPIQNVTLLEQWKREIPKVWAEINPPGLASTQAPIHVQLLSTALPVRVRQYPITLEAKRSLRETIRKFRAAGILRPVHSPWNTPLLPVRKSGTSEYRMVQDLREVNKRVETIHPTVPNPYTLLSLLPPDRIWYSVLDLKDAFFCIPLAPESQLIFAFEWADAEEGESGQLTWTRLPQGFKNSPTLFNEALNRDLQGFRLDHPSVSLLQYVDDLLIAADTQAACLSATRDLLMTLAELGYRVSGKKAQLCQEEVTYLGFKIHKGSRSLSNSRTQAILQIPVPKTKRQVREFLGTIGYCRLWIPGFAELAQPLYAATRPGNDPLVWGEKEEEAFQSLKLALTQPPALALPSLDKPFQLFVEETSGAAKGVLTQALGPWKRPVAYLSKRLDPVAAGWPRCLRAIAAAALLTREASKLTFGQDIEITSSHNLESLLRSPPDKWLTNARITQYQVLLLDPPRVRFKQTAALNPATLLPETDDTLPIHHCLDTLDSLTSTRPDLTDQPLAQAEATLFTDGSSYIRDGKRYAGAAVVTLDSVIWAEPLPIGTSAQKAELIALTKALEWSKDKSVNIYTDSRYAFATLHVHGMIYRERGWLTAGGKAIKNAPEILALLTAVWLPKRVAVMHCKGHQKDDAPTSTGNRRADEVAREVAIRPLSTQATISAGKRTADGSEFEKRTADGSEFESPKKKAKVE

SEQ ID NO: 1143 - protein, 2102 aa, synthetic construct
MPAAKRVKLDGGDKKYSIGLDIGTNSVGWAVITDEYKVPSKKFKVLGNTDRHSIKKNLIGALLFDSGETAEATRLKRTARRRYTRRKNRICYLQEIFSNEMAKVDDSFFHRLEESFLVEEDKKHERHPIFGNIVDEVAYHEKYPTIYHLRKKLVDSTDKADLRLIYLALAHMIKFRGHFLIEGDLNPDNSDVDKLFIQLVQTYNQLFEENPINASGVDAKAILSARLSKSRRLENLIAQLPGEKKNGLFGNLIALSLGLTPNFKSNFDLAEDAKLQLSKDTYDDDLDNLLAQIGDQYADLFLAAKNLSDAILLSDILRVNTEITKAPLSASMIKRYDEHHQDLTLLKALVRQQLPEKYKEIFFDQSKNGYAGYIDGGASQEEFYKFIKPILEKMDGTEELLVKLNREDLLRKQRTFDNGSIPHQIHLGELHAILRRQEDFYPFLKDNREKIEKILTFRIPYYVGPLARGNSRFAWMTRKSEETITPWNFEEVVDKGASAQSFIERMTNFDKNLPNEKVLPKHSLLYEYFTVYNELTKVKYVTEGMRKPAFLSGEQKKAIVDLLFKTNRKVTVKQLKEDYFKKIECFDSVEISGVEDRFNASLGTYHDLLKIIKDKDFLDNEENEDILEDIVLTLTLFEDREMIEERLKTYAHLFDDKVMKQLKRRRYTGWGRLSRKLINGIRDKQSGKTILDFLKSDGFANRNFMQLIHDDSLTFKEDIQKAQVSGQGDSLHEHIANLAGSPAIKKGILQTVKVVDELVKVMGRHKPENIVIEMARENQTTQKGQKNSRERMKRIEEGIKELGSQILKEHPVENTQLQNEKLYLYYLQNGRDMYVDQELDINRLSDYDVDHIVPQSFLKDDSIDNKVLTRSDKARGKSDNVPSEEVVKKMKNYWRQLLNAKLITQRKFDNLTKAERGGLSELDKAGFIKRQLVETRQITKHVAQILDSRMNTKYDENDKLIREVKVITLKSKLVSDFRKDFQFYKVREINNYHHAHDAYLNAVVGTALIKKYPKLESEFVYGDYKVYDVRKMIAKSEQEIGKATAKYFFYSNIMNFFKTEITLANGEIRKRPLIETNGETGEIVWDKGRDFATVRKVLSMPQVNIVKKTEVQTGGFSKESILPKRNSDKLIARKKDWDPKKYGGFDSPTVAYSVLVVAKVEKGKSKKLKSVKELLGITIMERSSFEKNPIDFLEAKGYKEVKKDLIIKLPKYSLFELENGRKRMLASAGELQKGNELALPSKYVNFLYLASHYEKLKGSPEDNEQKQLFVEQHKHYLDEIIEQISEFSKRVILADANLDKVLSAYNKHRDKPIREQAENIIHLFTLTNLGAPAAFKYFDTTIDRKRYTSTKEVLDATLIHQSITGLYETRIDLSQLGGDGGGSSGSSGSSGSSGSSGGTAPLEEEYRLFLEAPIQNVTLLEQWKREIPKVWAEINPPGLASTQAPIHVQLLSTALPVRVRQYPITLEAKRSLRETIRKFRAAGILRPVHSPWNTPLLPVRKSGTSEYRMVQDLREVNKRVETIHPTVPNPYTLLSLLPPDRIWYSVLDLKDAFFCIPLAPESQLIFAFEWADAEEGESGQLTWTRLPQGFKNSPTLFNEALNRDLQGFRLDHPSVSLLQYVDDLLIAADTQAACLSATRDLLMTLAELGYRVSGKKAQLCQEEVTYLGFKIHKGSRSLSNSRTQAILQIPVPKTKRQVREFLGTIGYCRLWIPGFAELAQPLYAATRPGNDPLVWGEKEEEAFQSLKLALTQPPALALPSLDKPFQLFVEETSGAAKGVLTQALGPWKRPVAYLSKRLDPVAAGWPRCLRAIAAAALLTREASKLTFGQDIEITSSHNLESLLRSPPDKWLTNARITQYQVLLLDPPRVRFKQTAALNPATLLPETDDTLPIHHCLDTLDSLTSTRPDLTDQPLAQAEATLFTDGSSYIRDGKRYAGAAVVTLDSVIWAEPLPIGTSAQKAELIALTKALEWSKDKSVNIYTDSRYAFATLHVHGMIYRERGWLTAGGKAIKNAPEILALLTAVWLPKRVAVMHCKGHQKDDAPTSTGNRRADEVAREVAIRPLSTQATISAGKRTADGSEFEKRTADGSEFESPKKKAKVE

SEQ ID NO: 1144 - protein, 2090 aa, synthetic construct
MPAAKRVKLDGGDKKYSIGLDIGTNSVGWAVITDEYKVPSKKFKVLGNTDRHSIKKNLIGALLFDSGETAEATRLKRTARRRYTRRKNRICYLQEIFSNEMAKVDDSFFHRLEESFLVEEDKKHERHPIFGNIVDEVAYHEKYPTIYHLRKKLVDSTDKADLRLIYLALAHMIKFRGHFLIEGDLNPDNSDVDKLFIQLVQTYNQLFEENPINASGVDAKAILSARLSKSRRLENLIAQLPGEKKNGLFGNLIALSLGLTPNFKSNFDLAEDAKLQLSKDTYDDDLDNLLAQIGDQYADLFLAAKNLSDAILLSDILRVNTEITKAPLSASMIKRYDEHHQDLTLLKALVRQQLPEKYKEIFFDQSKNGYAGYIDGGASQEEFYKFIKPILEKMDGTEELLVKLNREDLLRKQRTFDNGSIPHQIHLGELHAILRRQEDFYPFLKDNREKIEKILTFRIPYYVGPLARGNSRFAWMTRKSEETITPWNFEEVVDKGASAQSFIERMTNFDKNLPNEKVLPKHSLLYEYFTVYNELTKVKYVTEGMRKPAFLSGEQKKAIVDLLFKTNRKVTVKQLKEDYFKKIECFDSVEISGVEDRFNASLGTYHDLLKIIKDKDFLDNEENEDILEDIVLTLTLFEDREMIEERLKTYAHLFDDKVMKQLKRRRYTGWGRLSRKLINGIRDKQSGKTILDFLKSDGFANRNFMQLIHDDSLTFKEDIQKAQVSGQGDSLHEHIANLAGSPAIKKGILQTVKVVDELVKVMGRHKPENIVIEMARENQTTQKGQKNSRERMKRIEEGIKELGSQILKEHPVENTQLQNEKLYLYYLQNGRDMYVDQELDINRLSDYDVDHIVPQSFLKDDSIDNKVLTRSDKARGKSDNVPSEEVVKKMKNYWRQLLNAKLITQRKFDNLTKAERGGLSELDKAGFIKRQLVETRQITKHVAQILDSRMNTKYDENDKLIREVKVITLKSKLVSDFRKDFQFYKVREINNYHHAHDAYLNAVVGTALIKKYPKLESEFVYGDYKVYDVRKMIAKSEQEIGKATAKYFFYSNIMNFFKTEITLANGEIRKRPLIETNGETGEIVWDKGRDFATVRKVLSMPQVNIVKKTEVQTGGFSKESILPKRNSDKLIARKKDWDPKKYGGFDSPTVAYSVLVVAKVEKGKSKKLKSVKELLGITIMERSSFEKNPIDFLEAKGYKEVKKDLIIKLPKYSLFELENGRKRMLASAGELQKGNELALPSKYVNFLYLASHYEKLKGSPEDNEQKQLFVEQHKHYLDEIIEQISEFSKRVILADANLDKVLSAYNKHRDKPIREQAENIIHLFTLTNLGAPAAFKYFDTTIDRKRYTSTKEVLDATLIHQSITGLYETRIDLSQLGGDGGGGSGGTAPLEEEYRLFLEAPIQNVTLLEQWKREIPKVWAEINPPGLASTQAPIHVQLLSTALPVRVRQYPITLEAKRSLRETIRKFRAAGILRPVHSPWNTPLLPVRKSGTSEYRMVQDLREVNKRVETIHPTVPNPYTLLSLLPPDRIWYSVLDLKDAFFCIPLAPESQLIFAFEWADAEEGESGQLTWTRLPQGFKNSPTLFNEALNRDLQGFRLDHPSVSLLQYVDDLLIAADTQAACLSATRDLLMTLAELGYRVSGKKAQLCQEEVTYLGFKIHKGSRSLSNSRTQAILQIPVPKTKRQVREFLGTIGYCRLWIPGFAELAQPLYAATRPGNDPLVWGEKEEEAFQSLKLALTQPPALALPSLDKPFQLFVEETSGAAKGVLTQALGPWKRPVAYLSKRLDPVAAGWPRCLRAIAAAALLTREASKLTFGQDIEITSSHNLESLLRSPPDKWLTNARITQYQVLLLDPPRVRFKQTAALNPATLLPETDDTLPIHHCLDTLDSLTSTRPDLTDQPLAQAEATLFTDGSSYIRDGKRYAGAAVVTLDSVIWAEPLPIGTSAQKAELIALTKALEWSKDKSVNIYTDSRYAFATLHVHGMIYRERGWLTAGGKAIKNAPEILALLTAVWLPKRVAVMHCKGHQKDDAPTSTGNRRADEVAREVAIRPLSTQATISAGKRTADGSEFEKRTADGSEFESPKKKAKVE

SEQ ID NO: 1145 - protein, 2098 aa, synthetic construct
MPAAKRVKLDGGDKKYSIGLDIGTNSVGWAVITDEYKVPSKKFKVLGNTDRHSIKKNLIGALLFDSGETAEATRLKRTARRRYTRRKNRICYLQEIFSNEMAKVDDSFFHRLEESFLVEEDKKHERHPIFGNIVDEVAYHEKYPTIYHLRKKLVDSTDKADLRLIYLALAHMIKFRGHFLIEGDLNPDNSDVDKLFIQLVQTYNQLFEENPINASGVDAKAILSARLSKSRRLENLIAQLPGEKKNGLFGNLIALSLGLTPNFKSNFDLAEDAKLQLSKDTYDDDLDNLLAQIGDQYADLFLAAKNLSDAILLSDILRVNTEITKAPLSASMIKRYDEHHQDLTLLKALVRQQLPEKYKEIFFDQSKNGYAGYIDGGASQEEFYKFIKPILEKMDGTEELLVKLNREDLLRKQRTFDNGSIPHQIHLGELHAILRRQEDFYPFLKDNREKIEKILTFRIPYYVGPLARGNSRFAWMTRKSEETITPWNFEEVVDKGASAQSFIERMTNFDKNLPNEKVLPKHSLLYEYFTVYNELTKVKYVTEGMRKPAFLSGEQKKAIVDLLFKTNRKVTVKQLKEDYFKKIECFDSVEISGVEDRFNASLGTYHDLLKIIKDKDFLDNEENEDILEDIVLTLTLFEDREMIEERLKTYAHLFDDKVMKQLKRRRYTGWGRLSRKLINGIRDKQSGKTILDFLKSDGFANRNFMQLIHDDSLTFKEDIQKAQVSGQGDSLHEHIANLAGSPAIKKGILQTVKVVDELVKVMGRHKPENIVIEMARENQTTQKGQKNSRERMKRIEEGIKELGSQILKEHPVENTQLQNEKLYLYYLQNGRDMYVDQELDINRLSDYDVDHIVPQSFLKDDSIDNKVLTRSDKARGKSDNVPSEEVVKKMKNYWRQLLNAKLITQRKFDNLTKAERGGLSELDKAGFIKRQLVETRQITKHVAQILDSRMNTKYDENDKLIREVKVITLKSKLVSDFRKDFQFYKVREINNYHHAHDAYLNAVVGTALIKKYPKLESEFVYGDYKVYDVRKMIAKSEQEIGKATAKYFFYSNIMNFFKTEITLANGEIRKRPLIETNGETGEIVWDKGRDFATVRKVLSMPQVNIVKKTEVQTGGFSKESILPKRNSDKLIARKKDWDPKKYGGFDSPTVAYSVLVVAKVEKGKSKKLKSVKELLGITIMERSSFEKNPIDFLEAKGYKEVKKDLIIKLPKYSLFELENGRKRMLASAGELQKGNELALPSKYVNFLYLASHYEKLKGSPEDNEQKQLFVEQHKHYLDEIIEQISEFSKRVILADANLDKVLSAYNKHRDKPIREQAENIIHLFTLTNLGAPAAFKYFDTTIDRKRYTSTKEVLDATLIHQSITGLYETRIDLSQLGGDGGEAAAKPAPGSSGGTAPLEEEYRLFLEAPIQNVTLLEQWKREIPKVWAEINPPGLASTQAPIHVQLLSTALPVRVRQYPITLEAKRSLRETIRKFRAAGILRPVHSPWNTPLLPVRKSGTSEYRMVQDLREVNKRVETIHPTVPNPYTLLSLLPPDRIWYSVLDLKDAFFCIPLAPESQLIFAFEWADAEEGESGQLTWTRLPQGFKNSPTLFNEALNRDLQGFRLDHPSVSLLQYVDDLLIAADTQAACLSATRDLLMTLAELGYRVSGKKAQLCQEEVTYLGFKIHKGSRSLSNSRTQAILQIPVPKTKRQVREFLGTIGYCRLWIPGFAELAQPLYAATRPGNDPLVWGEKEEEAFQSLKLALTQPPALALPSLDKPFQLFVEETSGAAKGVLTQALGPWKRPVAYLSKRLDPVAAGWPRCLRAIAAAALLTREASKLTFGQDIEITSSHNLESLLRSPPDKWLTNARITQYQVLLLDPPRVRFKQTAALNPATLLPETDDTLPIHHCLDTLDSLTSTRPDLTDQPLAQAEATLFTDGSSYIRDGKRYAGAAVVTLDSVIWAEPLPIGTSAQKAELIALTKALEWSKDKSVNIYTDSRYAFATLHVHGMIYRERGWLTAGGKAIKNAPEILALLTAVWLPKRVAVMHCKGHQKDDAPTSTGNRRADEVAREVAIRPLSTQATISAGKRTADGSEFEKRTADGSEFESPKKKAKVE

SEQ ID NO: 1146 - protein, 2133 aa, synthetic construct
MPAAKRVKLDGGDKKYSIGLDIGTNSVGWAVITDEYKVPSKKFKVLGNTDRHSIKKNLIGALLFDSGETAEATRLKRTARRRYTRRKNRICYLQEIFSNEMAKVDDSFFHRLEESFLVEEDKKHERHPIFGNIVDEVAYHEKYPTIYHLRKKLVDSTDKADLRLIYLALAHMIKFRGHFLIEGDLNPDNSDVDKLFIQLVQTYNQLFEENPINASGVDAKAILSARLSKSRRLENLIAQLPGEKKNGLFGNLIALSLGLTPNFKSNFDLAEDAKLQLSKDTYDDDLDNLLAQIGDQYADLFLAAKNLSDAILLSDILRVNTEITKAPLSASMIKRYDEHHQDLTLLKALVRQQLPEKYKEIFFDQSKNGYAGYIDGGASQEEFYKFIKPILEKMDGTEELLVKLNREDLLRKQRTFDNGSIPHQIHLGELHAILRRQEDFYPFLKDNREKIEKILTFRIPYYVGPLARGNSRFAWMTRKSEETITPWNFEEVVDKGASAQSFIERMTNFDKNLPNEKVLPKHSLLYEYFTVYNELTKVKYVTEGMRKPAFLSGEQKKAIVDLLFKTNRKVTVKQLKEDYFKKIECFDSVEISGVEDRFNASLGTYHDLLKIIKDKDFLDNEENEDILEDIVLTLTLFEDREMIEERLKTYAHLFDDKVMKQLKRRRYTGWGRLSRKLINGIRDKQSGKTILDFLKSDGFANRNFMQLIHDDSLTFKEDIQKAQVSGQGDSLHEHIANLAGSPAIKKGILQTVKVVDELVKVMGRHKPENIVIEMARENQTTQKGQKNSRERMKRIEEGIKELGSQILKEHPVENTQLQNEKLYLYYLQNGRDMYVDQELDINRLSDYDVDHIVPQSFLKDDSIDNKVLTRSDKARGKSDNVPSEEVVKKMKNYWRQLLNAKLITQRKFDNLTKAERGGLSELDKAGFIKRQLVETRQITKHVAQILDSRMNTKYDENDKLIREVKVITLKSKLVSDFRKDFQFYKVREINNYHHAHDAYLNAVVGTALIKKYPKLESEFVYGDYKVYDVRKMIAKSEQEIGKATAKYFFYSNIMNFFKTEITLANGEIRKRPLIETNGETGEIVWDKGRDFATVRKVLSMPQVNIVKKTEVQTGGFSKESILPKRNSDKLIARKKDWDPKKYGGFDSPTVAYSVLVVAKVEKGKSKKLKSVKELLGITIMERSSFEKNPIDFLEAKGYKEVKKDLIIKLPKYSLFELENGRKRMLASAGELQKGNELALPSKYVNFLYLASHYEKLKGSPEDNEQKQLFVEQHKHYLDEIIEQISEFSKRVILADANLDKVLSAYNKHRDKPIREQAENIIHLFTLTNLGAPAAFKYFDTTIDRKRYTSTKEVLDATLIHQSITGLYETRIDLSQLGGDGGAEAAAKEAAAKEAAAKEAAAKALEAEAAAKEAAAKEAAAKEAAAKAGGTAPLEEEYRLFLEAPIQNVTLLEQWKREIPKVWAEINPPGLASTQAPIHVQLLSTALPVRVRQYPITLEAKRSLRETIRKFRAAGILRPVHSPWNTPLLPVRKSGTSEYRMVQDLREVNKRVETIHPTVPNPYTLLSLLPPDRIWYSVLDLKDAFFCIPLAPESQLIFAFEWADAEEGESGQLTWTRLPQGFKNSPTLFNEALNRDLQGFRLDHPSVSLLQYVDDLLIAADTQAACLSATRDLLMTLAELGYRVSGKKAQLCQEEVTYLGFKIHKGSRSLSNSRTQAILQIPVPKTKRQVREFLGTIGYCRLWIPGFAELAQPLYAATRPGNDPLVWGEKEEEAFQSLKLALTQPPALALPSLDKPFQLFVEETSGAAKGVLTQALGPWKRPVAYLSKRLDPVAAGWPRCLRAIAAAALLTREASKLTFGQDIEITSSHNLESLLRSPPDKWLTNARITQYQVLLLDPPRVRFKQTAALNPATLLPETDDTLPIHHCLDTLDSLTSTRPDLTDQPLAQAEATLFTDGSSYIRDGKRYAGAAVVTLDSVIWAEPLPIGTSAQKAELIALTKALEWSKDKSVNIYTDSRYAFATLHVHGMIYRERGWLTAGGKAIKNAPEILALLTAVWLPKRVAVMHCKGHQKDDAPTSTGNRRADEVAREVAIRPLSTQATISAGKRTADGSEFEKRTADGSEFESPKKKAKVE

SEQ ID NO: 1147 - protein, 2098 aa, synthetic construct
MPAAKRVKLDGGDKKYSIGLDIGTNSVGWAVITDEYKVPSKKFKVLGNTDRHSIKKNLIGALLFDSGETAEATRLKRTARRRYTRRKNRICYLQEIFSNEMAKVDDSFFHRLEESFLVEEDKKHERHPIFGNIVDEVAYHEKYPTIYHLRKKLVDSTDKADLRLIYLALAHMIKFRGHFLIEGDLNPDNSDVDKLFIQLVQTYNQLFEENPINASGVDAKAILSARLSKSRRLENLIAQLPGEKKNGLFGNLIALSLGLTPNFKSNFDLAEDAKLQLSKDTYDDDLDNLLAQIGDQYADLFLAAKNLSDAILLSDILRVNTEITKAPLSASMIKRYDEHHQDLTLLKALVRQQLPEKYKEIFFDQSKNGYAGYIDGGASQEEFYKFIKPILEKMDGTEELLVKLNREDLLRKQRTFDNGSIPHQIHLGELHAILRRQEDFYPFLKDNREKIEKILTFRIPYYVGPLARGNSRFAWMTRKSEETITPWNFEEVVDKGASAQSFIERMTNFDKNLPNEKVLPKHSLLYEYFTVYNELTKVKYVTEGMRKPAFLSGEQKKAIVDLLFKTNRKVTVKQLKEDYFKKIECFDSVEISGVEDRFNASLGTYHDLLKIIKDKDFLDNEENEDILEDIVLTLTLFEDREMIEERLKTYAHLFDDKVMKQLKRRRYTGWGRLSRKLINGIRDKQSGKTILDFLKSDGFANRNFMQLIHDDSLTFKEDIQKAQVSGQGDSLHEHIANLAGSPAIKKGILQTVKVVDELVKVMGRHKPENIVIEMARENQTTQKGQKNSRERMKRIEEGIKELGSQILKEHPVENTQLQNEKLYLYYLQNGRDMYVDQELDINRLSDYDVDHIVPQSFLKDDSIDNKVLTRSDKARGKSDNVPSEEVVKKMKNYWRQLLNAKLITQRKFDNLTKAERGGLSELDKAGFIKRQLVETRQITKHVAQILDSRMNTKYDENDKLIREVKVITLKSKLVSDFRKDFQFYKVREINNYHHAHDAYLNAVVGTALIKKYPKLESEFVYGDYKVYDVRKMIAKSEQEIGKATAKYFFYSNIMNFFKTEITLANGEIRKRPLIETNGETGEIVWDKGRDFATVRKVLSMPQVNIVKKTEVQTGGFSKESILPKRNSDKLIARKKDWDPKKYGGFDSPTVAYSVLVVAKVEKGKSKKLKSVKELLGITIMERSSFEKNPIDFLEAKGYKEVKKDLIIKLPKYSLFELENGRKRMLASAGELQKGNELALPSKYVNFLYLASHYEKLKGSPEDNEQKQLFVEQHKHYLDEIIEQISEFSKRVILADANLDKVLSAYNKHRDKPIREQAENIIHLFTLTNLGAPAAFKYFDTTIDRKRYTSTKEVLDATLIHQSITGLYETRIDLSQLGGDGGGGSEAAAKPAPGGTAPLEEEYRLFLEAPIQNVTLLEQWKREIPKVWAEINPPGLASTQAPIHVQLLSTALPVRVRQYPITLEAKRSLRETIRKFRAAGILRPVHSPWNTPLLPVRKSGTSEYRMVQDLREVNKRVETIHPTVPNPYTLLSLLPPDRIWYSVLDLKDAFFCIPLAPESQLIFAFEWADAEEGESGQLTWTRLPQGFKNSPTLFNEALNRDLQGFRLDHPSVSLLQYVDDLLIAADTQAACLSATRDLLMTLAELGYRVSGKKAQLCQEEVTYLGFKIHKGSRSLSNSRTQAILQIPVPKTKRQVREFLGTIGYCRLWIPGFAELAQPLYAATRPGNDPLVWGEKEEEAFQSLKLALTQPPALALPSLDKPFQLFVEETSGAAKGVLTQALGPWKRPVAYLSKRLDPVAAGWPRCLRAIAAAALLTREASKLTFGQDIEITSSHNLESLLRSPPDKWLTNARITQYQVLLLDPPRVRFKQTAALNPATLLPETDDTLPIHHCLDTLDSLTSTRPDLTDQPLAQAEATLFTDGSSYIRDGKRYAGAAVVTLDSVIWAEPLPIGTSAQKAELIALTKALEWSKDKSVNIYTDSRYAFATLHVHGMIYRERGWLTAGGKAIKNAPEILALLTAVWLPKRVAVMHCKGHQKDDAPTSTGNRRADEVAREVAIRPLSTQATISAGKRTADGSEFEKRTADGSEFESPKKKAKVE

SEQ ID NO: 1148 - protein, 2090 aa, synthetic construct
MPAAKRVKLDGGDKKYSIGLDIGTNSVGWAVITDEYKVPSKKFKVLGNTDRHSIKKNLIGALLFDSGETAEATRLKRTARRRYTRRKNRICYLQEIFSNEMAKVDDSFFHRLEESFLVEEDKKHERHPIFGNIVDEVAYHEKYPTIYHLRKKLVDSTDKADLRLIYLALAHMIKFRGHFLIEGDLNPDNSDVDKLFIQLVQTYNQLFEENPINASGVDAKAILSARLSKSRRLENLIAQLPGEKKNGLFGNLIALSLGLTPNFKSNFDLAEDAKLQLSKDTYDDDLDNLLAQIGDQYADLFLAAKNLSDAILLSDILRVNTEITKAPLSASMIKRYDEHHQDLTLLKALVRQQLPEKYKEIFFDQSKNGYAGYIDGGASQEEFYKFIKPILEKMDGTEELLVKLNREDLLRKQRTFDNGSIPHQIHLGELHAILRRQEDFYPFLKDNREKIEKILTFRIPYYVGPLARGNSRFAWMTRKSEETITPWNFEEVVDKGASAQSFIERMTNFDKNLPNEKVLPKHSLLYEYFTVYNELTKVKYVTEGMRKPAFLSGEQKKAIVDLLFKTNRKVTVKQLKEDYFKKIECFDSVEISGVEDRFNASLGTYHDLLKIIKDKDFLDNEENEDILEDIVLTLTLFEDREMIEERLKTYAHLFDDKVMKQLKRRRYTGWGRLSRKLINGIRDKQSGKTILDFLKSDGFANRNFMQLIHDDSLTFKEDIQKAQVSGQGDSLHEHIANLAGSPAIKKGILQTVKVVDELVKVMGRHKPENIVIEMARENQTTQKGQKNSRERMKRIEEGIKELGSQILKEHPVENTQLQNEKLYLYYLQNGRDMYVDQELDINRLSDYDVDHIVPQSFLKDDSIDNKVLTRSDKARGKSDNVPSEEVVKKMKNYWRQLLNAKLITQRKFDNLTKAERGGLSELDKAGFIKRQLVETRQITKHVAQILDSRMNTKYDENDKLIREVKVITLKSKLVSDFRKDFQFYKVREINNYHHAHDAYLNAVVGTALIKKYPKLESEFVYGDYKVYDVRKMIAKSEQEIGKATAKYFFYSNIMNFFKTEITLANGEIRKRPLIETNGETGEIVWDKGRDFATVRKVLSMPQVNIVKKTEVQTGGFSKESILPKRNSDKLIARKKDWDPKKYGGFDSPTVAYSVLVVAKVEKGKSKKLKSVKELLGITIMERSSFEKNPIDFLEAKGYKEVKKDLIIKLPKYSLFELENGRKRMLASAGELQKGNELALPSKYVNFLYLASHYEKLKGSPEDNEQKQLFVEQHKHYLDEIIEQISEFSKRVILADANLDKVLSAYNKHRDKPIREQAENIIHLFTLTNLGAPAAFKYFDTTIDRKRYTSTKEVLDATLIHQSITGLYETRIDLSQLGGDGGPAPGGTAPLEEEYRLFLEAPIQNVTLLEQWKREIPKVWAEINPPGLASTQAPIHVQLLSTALPVRVRQYPITLEAKRSLRETIRKFRAAGILRPVHSPWNTPLLPVRKSGTSEYRMVQDLREVNKRVETIHPTVPNPYTLLSLLPPDRIWYSVLDLKDAFFCIPLAPESQLIFAFEWADAEEGESGQLTWTRLPQGFKNSPTLFNEALNRDLQGFRLDHPSVSLLQYVDDLLIAADTQAACLSATRDLLMTLAELGYRVSGKKAQLCQEEVTYLGFKIHKGSRSLSNSRTQAILQIPVPKTKRQVREFLGTIGYCRLWIPGFAELAQPLYAATRPGNDPLVWGEKEEEAFQSLKLALTQPPALALPSLDKPFQLFVEETSGAAKGVLTQALGPWKRPVAYLSKRLDPVAAGWPRCLRAIAAAALLTREASKLTFGQDIEITSSHNLESLLRSPPDKWLTNARITQYQVLLLDPPRVRFKQTAALNPATLLPETDDTLPIHHCLDTLDSLTSTRPDLTDQPLAQAEATLFTDGSSYIRDGKRYAGAAVVTLDSVIWAEPLPIGTSAQKAELIALTKALEWSKDKSVNIYTDSRYAFATLHVHGMIYRERGWLTAGGKAIKNAPEILALLTAVWLPKRVAVMHCKGHQKDDAPTSTGNRRADEVAREVAIRPLSTQATISAGKRTADGSEFEKRTADGSEFESPKKKAKVE

SEQ ID NO: 1149 - protein, 2092 aa, synthetic construct
MPAAKRVKLDGGDKKYSIGLDIGTNSVGWAVITDEYKVPSKKFKVLGNTDRHSIKKNLIGALLFDSGETAEATRLKRTARRRYTRRKNRICYLQEIFSNEMAKVDDSFFHRLEESFLVEEDKKHERHPIFGNIVDEVAYHEKYPTIYHLRKKLVDSTDKADLRLIYLALAHMIKFRGHFLIEGDLNPDNSDVDKLFIQLVQTYNQLFEENPINASGVDAKAILSARLSKSRRLENLIAQLPGEKKNGLFGNLIALSLGLTPNFKSNFDLAEDAKLQLSKDTYDDDLDNLLAQIGDQYADLFLAAKNLSDAILLSDILRVNTEITKAPLSASMIKRYDEHHQDLTLLKALVRQQLPEKYKEIFFDQSKNGYAGYIDGGASQEEFYKFIKPILEKMDGTEELLVKLNREDLLRKQRTFDNGSIPHQIHLGELHAILRRQEDFYPFLKDNREKIEKILTFRIPYYVGPLARGNSRFAWMTRKSEETITPWNFEEVVDKGASAQSFIERMTNFDKNLPNEKVLPKHSLLYEYFTVYNELTKVKYVTEGMRKPAFLSGEQKKAIVDLLFKTNRKVTVKQLKEDYFKKIECFDSVEISGVEDRFNASLGTYHDLLKIIKDKDFLDNEENEDILEDIVLTLTLFEDREMIEERLKTYAHLFDDKVMKQLKRRRYTGWGRLSRKLINGIRDKQSGKTILDFLKSDGFANRNFMQLIHDDSLTFKEDIQKAQVSGQGDSLHEHIANLAGSPAIKKGILQTVKVVDELVKVMGRHKPENIVIEMARENQTTQKGQKNSRERMKRIEEGIKELGSQILKEHPVENTQLQNEKLYLYYLQNGRDMYVDQELDINRLSDYDVDHIVPQSFLKDDSIDNKVLTRSDKARGKSDNVPSEEVVKKMKNYWRQLLNAKLITQRKFDNLTKAERGGLSELDKAGFIKRQLVETRQITKHVAQILDSRMNTKYDENDKLIREVKVITLKSKLVSDFRKDFQFYKVREINNYHHAHDAYLNAVVGTALIKKYPKLESEFVYGDYKVYDVRKMIAKSEQEIGKATAKYFFYSNIMNFFKTEITLANGEIRKRPLIETNGETGEIVWDKGRDFATVRKVLSMPQVNIVKKTEVQTGGFSKESILPKRNSDKLIARKKDWDPKKYGGFDSPTVAYSVLVVAKVEKGKSKKLKSVKELLGITIMERSSFEKNPIDFLEAKGYKEVKKDLIIKLPKYSLFELENGRKRMLASAGELQKGNELALPSKYVNFLYLASHYEKLKGSPEDNEQKQLFVEQHKHYLDEIIEQISEFSKRVILADANLDKVLSAYNKHRDKPIREQAENIIHLFTLTNLGAPAAFKYFDTTIDRKRYTSTKEVLDATLIHQSITGLYETRIDLSQLGGDGGPAPAPGGTAPLEEEYRLFLEAPIQNVTLLEQWKREIPKVWAEINPPGLASTQAPIHVQLLSTALPVRVRQYPITLEAKRSLRETIRKFRAAGILRPVHSPWNTPLLPVRKSGTSEYRMVQDLREVNKRVETIHPTVPNPYTLLSLLPPDRIWYSVLDLKDAFFCIPLAPESQLIFAFEWADAEEGESGQLTWTRLPQGFKNSPTLFNEALNRDLQGFRLDHPSVSLLQYVDDLLIAADTQAACLSATRDLLMTLAELGYRVSGKKAQLCQEEVTYLGFKIHKGSRSLSNSRTQAILQIPVPKTKRQVREFLGTIGYCRLWIPGFAELAQPLYAATRPGNDPLVWGEKEEEAFQSLKLALTQPPALALPSLDKPFQLFVEETSGAAKGVLTQALGPWKRPVAYLSKRLDPVAAGWPRCLRAIAAAALLTREASKLTFGQDIEITSSHNLESLLRSPPDKWLTNARITQYQVLLLDPPRVRFKQTAALNPATLLPETDDTLPIHHCLDTLDSLTSTRPDLTDQPLAQAEATLFTDGSSYIRDGKRYAGAAVVTLDSVIWAEPLPIGTSAQKAELIALTKALEWSKDKSVNIYTDSRYAFATLHVHGMIYRERGWLTAGGKAIKNAPEILALLTAVWLPKRVAVMHCKGHQKDDAPTSTGNRRADEVAREVAIRPLSTQATISAGKRTADGSEFEKRTADGSEFESPKKKAKVE

SEQ ID NO: 1150 - protein, 2096 aa, synthetic construct
MPAAKRVKLDGGDKKYSIGLDIGTNSVGWAVITDEYKVPSKKFKVLGNTDRHSIKKNLIGALLFDSGETAEATRLKRTARRRYTRRKNRICYLQEIFSNEMAKVDDSFFHRLEESFLVEEDKKHERHPIFGNIVDEVAYHEKYPTIYHLRKKLVDSTDKADLRLIYLALAHMIKFRGHFLIEGDLNPDNSDVDKLFIQLVQTYNQLFEENPINASGVDAKAILSARLSKSRRLENLIAQLPGEKKNGLFGNLIALSLGLTPNFKSNFDLAEDAKLQLSKDTYDDDLDNLLAQIGDQYADLFLAAKNLSDAILLSDILRVNTEITKAPLSASMIKRYDEHHQDLTLLKALVRQQLPEKYKEIFFDQSKNGYAGYIDGGASQEEFYKFIKPILEKMDGTEELLVKLNREDLLRKQRTFDNGSIPHQIHLGELHAILRRQEDFYPFLKDNREKIEKILTFRIPYYVGPLARGNSRFAWMTRKSEETITPWNFEEVVDKGASAQSFIERMTNFDKNLPNEKVLPKHSLLYEYFTVYNELTKVKYVTEGMRKPAFLSGEQKKAIVDLLFKTNRKVTVKQLKEDYFKKIECFDSVEISGVEDRFNASLGTYHDLLKIIKDKDFLDNEENEDILEDIVLTLTLFEDREMIEERLKTYAHLFDDKVMKQLKRRRYTGWGRLSRKLINGIRDKQSGKTILDFLKSDGFANRNFMQLIHDDSLTFKEDIQKAQVSGQGDSLHEHIANLAGSPAIKKGILQTVKVVDELVKVMGRHKPENIVIEMARENQTTQKGQKNSRERMKRIEEGIKELGSQILKEHPVENTQLQNEKLYLYYLQNGRDMYVDQELDINRLSDYDVDHIVPQSFLKDDSIDNKVLTRSDKARGKSDNVPSEEVVKKMKNYWRQLLNAKLITQRKFDNLTKAERGGLSELDKAGFIKRQLVETRQITKHVAQILDSRMNTKYDENDKLIREVKVITLKSKLVSDFRKDFQFYKVREINNYHHAHDAYLNAVVGTALIKKYPKLESEFVYGDYKVYDVRKMIAKSEQEIGKATAKYFFYSNIMNFFKTEITLANGEIRKRPLIETNGETGEIVWDKGRDFATVRKVLSMPQVNIVKKTEVQTGGFSKESILPKRNSDKLIARKKDWDPKKYGGFDSPTVAYSVLVVAKVEKGKSKKLKSVKELLGITIMERSSFEKNPIDFLEAKGYKEVKKDLIIKLPKYSLFELENGRKRMLASAGELQKGNELALPSKYVNFLYLASHYEKLKGSPEDNEQKQLFVEQHKHYLDEIIEQISEFSKRVILADANLDKVLSAYNKHRDKPIREQAENIIHLFTLTNLGAPAAFKYFDTTIDRKRYTSTKEVLDATLIHQSITGLYETRIDLSQLGGDGGGGSPAPGGGGGTAPLEEEYRLFLEAPIQNVTLLEQWKREIPKVWAEINPPGLASTQAPIHVQLLSTALPVRVRQYPITLEAKRSLRETIRKFRAAGILRPVHSPWNTPLLPVRKSGTSEYRMVQDLREVNKRVETIHPTVPNPYTLLSLLPPDRIWYSVLDLKDAFFCIPLAPESQLIFAFEWADAEEGESGQLTWTRLPQGFKNSPTLFNEALNRDLQGFRLDHPSVSLLQYVDDLLIAADTQAACLSATRDLLMTLAELGYRVSGKKAQLCQEEVTYLGFKIHKGSRSLSNSRTQAILQIPVPKTKRQVREFLGTIGYCRLWIPGFAELAQPLYAATRPGNDPLVWGEKEEEAFQSLKLALTQPPALALPSLDKPFQLFVEETSGAAKGVLTQALGPWKRPVAYLSKRLDPVAAGWPRCLRAIAAAALLTREASKLTFGQDIEITSSHNLESLLRSPPDKWLTNARITQYQVLLLDPPRVRFKQTAALNPATLLPETDDTLPIHHCLDTLDSLTSTRPDLTDQPLAQAEATLFTDGSSYIRDGKRYAGAAVVTLDSVIWAEPLPIGTSAQKAELIALTKALEWSKDKSVNIYTDSRYAFATLHVHGMIYRERGWLTAGGKAIKNAPEILALLTAVWLPKRVAVMHCKGHQKDDAPTSTGNRRADEVAREVAIRPLSTQATISAGKRTADGSEFEKRTADGSEFESPKKKAKVE

SEQ ID NO: 1151 - protein, 2098 aa, synthetic construct
MPAAKRVKLDGGDKKYSIGLDIGTNSVGWAVITDEYKVPSKKFKVLGNTDRHSIKKNLIGALLFDSGETAEATRLKRTARRRYTRRKNRICYLQEIFSNEMAKVDDSFFHRLEESFLVEEDKKHERHPIFGNIVDEVAYHEKYPTIYHLRKKLVDSTDKADLRLIYLALAHMIKFRGHFLIEGDLNPDNSDVDKLFIQLVQTYNQLFEENPINASGVDAKAILSARLSKSRRLENLIAQLPGEKKNGLFGNLIALSLGLTPNFKSNFDLAEDAKLQLSKDTYDDDLDNLLAQIGDQYADLFLAAKNLSDAILLSDILRVNTEITKAPLSASMIKRYDEHHQDLTLLKALVRQQLPEKYKEIFFDQSKNGYAGYIDGGASQEEFYKFIKPILEKMDGTEELLVKLNREDLLRKQRTFDNGSIPHQIHLGELHAILRRQEDFYPFLKDNREKIEKILTFRIPYYVGPLARGNSRFAWMTRKSEETITPWNFEEVVDKGASAQSFIERMTNFDKNLPNEKVLPKHSLLYEYFTVYNELTKVKYVTEGMRKPAFLSGEQKKAIVDLLFKTNRKVTVKQLKEDYFKKIECFDSVEISGVEDRFNASLGTYHDLLKIIKDKDFLDNEENEDILEDIVLTLTLFEDREMIEERLKTYAHLFDDKVMKQLKRRRYTGWGRLSRKLINGIRDKQSGKTILDFLKSDGFANRNFMQLIHDDSLTFKEDIQKAQVSGQGDSLHEHIANLAGSPAIKKGILQTVKVVDELVKVMGRHKPENIVIEMARENQTTQKGQKNSRERMKRIEEGIKELGSQILKEHPVENTQLQNEKLYLYYLQNGRDMYVDQELDINRLSDYDVDHIVPQSFLKDDSIDNKVLTRSDKARGKSDNVPSEEVVKKMKNYWRQLLNAKLITQRKFDNLTKAERGGLSELDKAGFIKRQLVETRQITKHVAQILDSRMNTKYDENDKLIREVKVITLKSKLVSDFRKDFQFYKVREINNYHHAHDAYLNAVVGTALIKKYPKLESEFVYGDYKVYDVRKMIAKSEQEIGKATAKYFFYSNIMNFFKTEITLANGEIRKRPLIETNGETGEIVWDKGRDFATVRKVLSMPQVNIVKKTEVQTGGFSKESILPKRNSDKLIARKKDWDPKKYGGFDSPTVAYSVLVVAKVEKGKSKKLKSVKELLGITIMERSSFEKNPIDFLEAKGYKEVKKDLIIKLPKYSLFELENGRKRMLASAGELQKGNELALPSKYVNFLYLASHYEKLKGSPEDNEQKQLFVEQHKHYLDEIIEQISEFSKRVILADANLDKVLSAYNKHRDKPIREQAENIIHLFTLTNLGAPAAFKYFDTTIDRKRYTSTKEVLDATLIHQSITGLYETRIDLSQLGGDGGGSSGGGEAAAKGGTAPLEEEYRLFLEAPIQNVTLLEQWKREIPKVWAEINPPGLASTQAPIHVQLLSTALPVRVRQYPITLEAKRSLRETIRKFRAAGILRPVHSPWNTPLLPVRKSGTSEYRMVQDLREVNKRVETIHPTVPNPYTLLSLLPPDRIWYSVLDLKDAFFCIPLAPESQLIFAFEWADAEEGESGQLTWTRLPQGFKNSPTLFNEALNRDLQGFRLDHPSVSLLQYVDDLLIAADTQAACLSATRDLLMTLAELGYRVSGKKAQLCQEEVTYLGFKIHKGSRSLSNSRTQAILQIPVPKTKRQVREFLGTIGYCRLWIPGFAELAQPLYAATRPGNDPLVWGEKEEEAFQSLKLALTQPPALALPSLDKPFQLFVEETSGAAKGVLTQALGPWKRPVAYLSKRLDPVAAGWPRCLRAIAAAALLTREASKLTFGQDIEITSSHNLESLLRSPPDKWLTNARITQYQVLLLDPPRVRFKQTAALNPATLLPETDDTLPIHHCLDTLDSLTSTRPDLTDQPLAQAEATLFTDGSSYIRDGKRYAGAAVVTLDSVIWAEPLPIGTSAQKAELIALTKALEWSKDKSVNIYTDSRYAFATLHVHGMIYRERGWLTAGGKAIKNAPEILALLTAVWLPKRVAVMHCKGHQKDDAPTSTGNRRADEVAREVAIRPLSTQATISAGKRTADGSEFEKRTADGSEFESPKKKAKVE

SEQ ID NO: 1152 - protein, 2097 aa, synthetic construct
MPAAKRVKLDGGDKKYSIGLDIGTNSVGWAVITDEYKVPSKKFKVLGNTDRHSIKKNLIGALLFDSGETAEATRLKRTARRRYTRRKNRICYLQEIFSNEMAKVDDSFFHRLEESFLVEEDKKHERHPIFGNIVDEVAYHEKYPTIYHLRKKLVDSTDKADLRLIYLALAHMIKFRGHFLIEGDLNPDNSDVDKLFIQLVQTYNQLFEENPINASGVDAKAILSARLSKSRRLENLIAQLPGEKKNGLFGNLIALSLGLTPNFKSNFDLAEDAKLQLSKDTYDDDLDNLLAQIGDQYADLFLAAKNLSDAILLSDILRVNTEITKAPLSASMIKRYDEHHQDLTLLKALVRQQLPEKYKEIFFDQSKNGYAGYIDGGASQEEFYKFIKPILEKMDGTEELLVKLNREDLLRKQRTFDNGSIPHQIHLGELHAILRRQEDFYPFLKDNREKIEKILTFRIPYYVGPLARGNSRFAWMTRKSEETITPWNFEEVVDKGASAQSFIERMTNFDKNLPNEKVLPKHSLLYEYFTVYNELTKVKYVTEGMRKPAFLSGEQKKAIVDLLFKTNRKVTVKQLKEDYFKKIECFDSVEISGVEDRFNASLGTYHDLLKIIKDKDFLDNEENEDILEDIVLTLTLFEDREMIEERLKTYAHLFDDKVMKQLKRRRYTGWGRLSRKLINGIRDKQSGKTILDFLKSDGFANRNFMQLIHDDSLTFKEDIQKAQVSGQGDSLHEHIANLAGSPAIKKGILQTVKVVDELVKVMGRHKPENIVIEMARENQTTQKGQKNSRERMKRIEEGIKELGSQILKEHPVENTQLQNEKLYLYYLQNGRDMYVDQELDINRLSDYDVDHIVPQSFLKDDSIDNKVLTRSDKARGKSDNVPSEEVVKKMKNYWRQLLNAKLITQRKFDNLTKAERGGLSELDKAGFIKRQLVETRQITKHVAQILDSRMNTKYDENDKLIREVKVITLKSKLVSDFRKDFQFYKVREINNYHHAHDAYLNAVVGTALIKKYPKLESEFVYGDYKVYDVRKMIAKSEQEIGKATAKYFFYSNIMNFFKTEITLANGEIRKRPLIETNGETGEIVWDKGRDFATVRKVLSMPQVNIVKKTEVQTGGFSKESILPKRNSDKLIARKKDWDPKKYGGFDSPTVAYSVLVVAKVEKGKSKKLKSVKELLGITIMERSSFEKNPIDFLEAKGYKEVKKDLIIKLPKYSLFELENGRKRMLASAGELQKGNELALPSKYVNFLYLASHYEKLKGSPEDNEQKQLFVEQHKHYLDEIIEQISEFSKRVILADANLDKVLSAYNKHRDKPIREQAENIIHLFTLTNLGAPAAFKYFDTTIDRKRYTSTKEVLDATLIHQSITGLYETRIDLSQLGGDGGEAAAKEAAAKGGTAPLEEEYRLFLEAPIQNVTLLEQWKREIPKVWAEINPPGLASTQAPIHVQLLSTALPVRVRQYPITLEAKRSLRETIRKFRAAGILRPVHSPWNTPLLPVRKSGTSEYRMVQDLREVNKRVETIHPTVPNPYTLLSLLPPDRIWYSVLDLKDAFFCIPLAPESQLIFAFEWADAEEGESGQLTWTRLPQGFKNSPTLFNEALNRDLQGFRLDHPSVSLLQYVDDLLIAADTQAACLSATRDLLMTLAELGYRVSGKKAQLCQEEVTYLGFKIHKGSRSLSNSRTQAILQIPVPKTKRQVREFLGTIGYCRLWIPGFAELAQPLYAATRPGNDPLVWGEKEEEAFQSLKLALTQPPALALPSLDKPFQLFVEETSGAAKGVLTQALGPWKRPVAYLSKRLDPVAAGWPRCLRAIAAAALLTREASKLTFGQDIEITSSHNLESLLRSPPDKWLTNARITQYQVLLLDPPRVRFKQTAALNPATLLPETDDTLPIHHCLDTLDSLTSTRPDLTDQPLAQAEATLFTDGSSYIRDGKRYAGAAVVTLDSVIWAEPLPIGTSAQKAELIALTKALEWSKDKSVNIYTDSRYAFATLHVHGMIYRERGWLTAGGKAIKNAPEILALLTAVWLPKRVAVMHCKGHQKDDAPTSTGNRRADEVAREVAIRPLSTQATISAGKRTADGSEFEKRTADGSEFESPKKKAKVE

SEQ ID NO: 1153 - protein, 2096 aa, synthetic construct
MPAAKRVKLDGGDKKYSIGLDIGTNSVGWAVITDEYKVPSKKFKVLGNTDRHSIKKNLIGALLFDSGETAEATRLKRTARRRYTRRKNRICYLQEIFSNEMAKVDDSFFHRLEESFLVEEDKKHERHPIFGNIVDEVAYHEKYPTIYHLRKKLVDSTDKADLRLIYLALAHMIKFRGHFLIEGDLNPDNSDVDKLFIQLVQTYNQLFEENPINASGVDAKAILSARLSKSRRLENLIAQLPGEKKNGLFGNLIALSLGLTPNFKSNFDLAEDAKLQLSKDTYDDDLDNLLAQIGDQYADLFLAAKNLSDAILLSDILRVNTEITKAPLSASMIKRYDEHHQDLTLLKALVRQQLPEKYKEIFFDQSKNGYAGYIDGGASQEEFYKFIKPILEKMDGTEELLVKLNREDLLRKQRTFDNGSIPHQIHLGELHAILRRQEDFYPFLKDNREKIEKILTFRIPYYVGPLARGNSRFAWMTRKSEETITPWNFEEVVDKGASAQSFIERMTNFDKNLPNEKVLPKHSLLYEYFTVYNELTKVKYVTEGMRKPAFLSGEQKKAIVDLLFKTNRKVTVKQLKEDYFKKIECFDSVEISGVEDRFNASLGTYHDLLKIIKDKDFLDNEENEDILEDIVLTLTLFEDREMIEERLKTYAHLFDDKVMKQLKRRRYTGWGRLSRKLINGIRDKQSGKTILDFLKSDGFANRNFMQLIHDDSLTFKEDIQKAQVSGQGDSLHEHIANLAGSPAIKKGILQTVKVVDELVKVMGRHKPENIVIEMARENQTTQKGQKNSRERMKRIEEGIKELGSQILKEHPVENTQLQNEKLYLYYLQNGRDMYVDQELDINRLSDYDVDHIVPQSFLKDDSIDNKVLTRSDKARGKSDNVPSEEVVKKMKNYWRQLLNAKLITQRKFDNLTKAERGGLSELDKAGFIKRQLVETRQITKHVAQILDSRMNTKYDENDKLIREVKVITLKSKLVSDFRKDFQFYKVREINNYHHAHDAYLNAVVGTALIKKYPKLESEFVYGDYKVYDVRKMIAKSEQEIGKATAKYFFYSNIMNFFKTEITLANGEIRKRPLIETNGETGEIVWDKGRDFATVRKVLSMPQVNIVKKTEVQTGGFSKESILPKRNSDKLIARKKDWDPKKYGGFDSPTVAYSVLVVAKVEKGKSKKLKSVKELLGITIMERSSFEKNPIDFLEAKGYKEVKKDLIIKLPKYSLFELENGRKRMLASAGELQKGNELALPSKYVNFLYLASHYEKLKGSPEDNEQKQLFVEQHKHYLDEIIEQISEFSKRVILADANLDKVLSAYNKHRDKPIREQAENIIHLFTLTNLGAPAAFKYFDTTIDRKRYTSTKEVLDATLIHQSITGLYETRIDLSQLGGDGGGGSPAPGSSGGTAPLEEEYRLFLEAPIQNVTLLEQWKREIPKVWAEINPPGLASTQAPIHVQLLSTALPVRVRQYPITLEAKRSLRETIRKFRAAGILRPVHSPWNTPLLPVRKSGTSEYRMVQDLREVNKRVETIHPTVPNPYTLLSLLPPDRIWYSVLDLKDAFFCIPLAPESQLIFAFEWADAEEGESGQLTWTRLPQGFKNSPTLFNEALNRDLQGFRLDHPSVSLLQYVDDLLIAADTQAACLSATRDLLMTLAELGYRVSGKKAQLCQEEVTYLGFKIHKGSRSLSNSRTQAILQIPVPKTKRQVREFLGTIGYCRLWIPGFAELAQPLYAATRPGNDPLVWGEKEEEAFQSLKLALTQPPALALPSLDKPFQLFVEETSGAAKGVLTQALGPWKRPVAYLSKRLDPVAAGWPRCLRAIAAAALLTREASKLTFGQDIEITSSHNLESLLRSPPDKWLTNARITQYQVLLLDPPRVRFKQTAALNPATLLPETDDTLPIHHCLDTLDSLTSTRPDLTDQPLAQAEATLFTDGSSYIRDGKRYAGAAVVTLDSVIWAEPLPIGTSAQKAELIALTKALEWSKDKSVNIYTDSRYAFATLHVHGMIYRERGWLTAGGKAIKNAPEILALLTAVWLPKRVAVMHCKGHQKDDAPTSTGNRRADEVAREVAIRPLSTQATISAGKRTADGSEFEKRTADGSEFESPKKKAKVE

SEQ ID NO: 1154 - protein, 2098 aa, synthetic construct
MPAAKRVKLDGGDKKYSIGLDIGTNSVGWAVITDEYKVPSKKFKVLGNTDRHSIKKNLIGALLFDSGETAEATRLKRTARRRYTRRKNRICYLQEIFSNEMAKVDDSFFHRLEESFLVEEDKKHERHPIFGNIVDEVAYHEKYPTIYHLRKKLVDSTDKADLRLIYLALAHMIKFRGHFLIEGDLNPDNSDVDKLFIQLVQTYNQLFEENPINASGVDAKAILSARLSKSRRLENLIAQLPGEKKNGLFGNLIALSLGLTPNFKSNFDLAEDAKLQLSKDTYDDDLDNLLAQIGDQYADLFLAAKNLSDAILLSDILRVNTEITKAPLSASMIKRYDEHHQDLTLLKALVRQQLPEKYKEIFFDQSKNGYAGYIDGGASQEEFYKFIKPILEKMDGTEELLVKLNREDLLRKQRTFDNGSIPHQIHLGELHAILRRQEDFYPFLKDNREKIEKILTFRIPYYVGPLARGNSRFAWMTRKSEETITPWNFEEVVDKGASAQSFIERMTNFDKNLPNEKVLPKHSLLYEYFTVYNELTKVKYVTEGMRKPAFLSGEQKKAIVDLLFKTNRKVTVKQLKEDYFKKIECFDSVEISGVEDRFNASLGTYHDLLKIIKDKDFLDNEENEDILEDIVLTLTLFEDREMIEERLKTYAHLFDDKVMKQLKRRRYTGWGRLSRKLINGIRDKQSGKTILDFLKSDGFANRNFMQLIHDDSLTFKEDIQKAQVSGQGDSLHEHIANLAGSPAIKKGILQTVKVVDELVKVMGRHKPENIVIEMARENQTTQKGQKNSRERMKRIEEGIKELGSQILKEHPVENTQLQNEKLYLYYLQNGRDMYVDQELDINRLSDYDVDHIVPQSFLKDDSIDNKVLTRSDKARGKSDNVPSEEVVKKMKNYWRQLLNAKLITQRKFDNLTKAERGGLSELDKAGFIKRQLVETRQITKHVAQILDSRMNTKYDENDKLIREVKVITLKSKLVSDFRKDFQFYKVREINNYHHAHDAYLNAVVGTALIKKYPKLESEFVYGDYKVYDVRKMIAKSEQEIGKATAKYFFYSNIMNFFKTEITLANGEIRKRPLIETNGETGEIVWDKGRDFATVRKVLSMPQVNIVKKTEVQTGGFSKESILPKRNSDKLIARKKDWDPKKYGGFDSPTVAYSVLVVAKVEKGKSKKLKSVKELLGITIMERSSFEKNPIDFLEAKGYKEVKKDLIIKLPKYSLFELENGRKRMLASAGELQKGNELALPSKYVNFLYLASHYEKLKGSPEDNEQKQLFVEQHKHYLDEIIEQISEFSKRVILADANLDKVLSAYNKHRDKPIREQAENIIHLFTLTNLGAPAAFKYFDTTIDRKRYTSTKEVLDATLIHQSITGLYETRIDLSQLGGDGGGGGEAAAKGGSGGTAPLEEEYRLFLEAPIQNVTLLEQWKREIPKVWAEINPPGLASTQAPIHVQLLSTALPVRVRQYPITLEAKRSLRETIRKFRAAGILRPVHSPWNTPLLPVRKSGTSEYRMVQDLREVNKRVETIHPTVPNPYTLLSLLPPDRIWYSVLDLKDAFFCIPLAPESQLIFAFEWADAEEGESGQLTWTRLPQGFKNSPTLFNEALNRDLQGFRLDHPSVSLLQYVDDLLIAADTQAACLSATRDLLMTLAELGYRVSGKKAQLCQEEVTYLGFKIHKGSRSLSNSRTQAILQIPVPKTKRQVREFLGTIGYCRLWIPGFAELAQPLYAATRPGNDPLVWGEKEEEAFQSLKLALTQPPALALPSLDKPFQLFVEETSGAAKGVLTQALGPWKRPVAYLSKRLDPVAAGWPRCLRAIAAAALLTREASKLTFGQDIEITSSHNLESLLRSPPDKWLTNARITQYQVLLLDPPRVRFKQTAALNPATLLPETDDTLPIHHCLDTLDSLTSTRPDLTDQPLAQAEATLFTDGSSYIRDGKRYAGAAVVTLDSVIWAEPLPIGTSAQKAELIALTKALEWSKDKSVNIYTDSRYAFATLHVHGMIYRERGWLTAGGKAIKNAPEILALLTAVWLPKRVAVMHCKGHQKDDAPTSTGNRRADEVAREVAIRPLSTQATISAGKRTADGSEFEKRTADGSEFESPKKKAKVE

SEQ ID NO: 1155 - protein, 2098 aa, synthetic construct
MPAAKRVKLDGGDKKYSIGLDIGTNSVGWAVITDEYKVPSKKFKVLGNTDRHSIKKNLIGALLFDSGETAEATRLKRTARRRYTRRKNRICYLQEIFSNEMAKVDDSFFHRLEESFLVEEDKKHERHPIFGNIVDEVAYHEKYPTIYHLRKKLVDSTDKADLRLIYLALAHMIKFRGHFLIEGDLNPDNSDVDKLFIQLVQTYNQLFEENPINASGVDAKAILSARLSKSRRLENLIAQLPGEKKNGLFGNLIALSLGLTPNFKSNFDLAEDAKLQLSKDTYDDDLDNLLAQIGDQYADLFLAAKNLSDAILLSDILRVNTEITKAPLSASMIKRYDEHHQDLTLLKALVRQQLPEKYKEIFFDQSKNGYAGYIDGGASQEEFYKFIKPILEKMDGTEELLVKLNREDLLRKQRTFDNGSIPHQIHLGELHAILRRQEDFYPFLKDNREKIEKILTFRIPYYVGPLARGNSRFAWMTRKSEETITPWNFEEVVDKGASAQSFIERMTNFDKNLPNEKVLPKHSLLYEYFTVYNELTKVKYVTEGMRKPAFLSGEQKKAIVDLLFKTNRKVTVKQLKEDYFKKIECFDSVEISGVEDRFNASLGTYHDLLKIIKDKDFLDNEENEDILEDIVLTLTLFEDREMIEERLKTYAHLFDDKVMKQLKRRRYTGWGRLSRKLINGIRDKQSGKTILDFLKSDGFANRNFMQLIHDDSLTFKEDIQKAQVSGQGDSLHEHIANLAGSPAIKKGILQTVKVVDELVKVMGRHKPENIVIEMARENQTTQKGQKNSRERMKRIEEGIKELGSQILKEHPVENTQLQNEKLYLYYLQNGRDMYVDQELDINRLSDYDVDHIVPQSFLKDDSIDNKVLTRSDKARGKSDNVPSEEVVKKMKNYWRQLLNAKLITQRKFDNLTKAERGGLSELDKAGFIKRQLVETRQITKHVAQILDSRMNTKYDENDKLIREVKVITLKSKLVSDFRKDFQFYKVREINNYHHAHDAYLNAVVGTALIKKYPKLESEFVYGDYKVYDVRKMIAKSEQEIGKATAKYFFYSNIMNFFKTEITLANGEIRKRPLIETNGETGEIVWDKGRDFATVRKVLSMPQVNIVKKTEVQTGGFSKESILPKRNSDKLIARKKDWDPKKYGGFDSPTVAYSVLVVAKVEKGKSKKLKSVKELLGITIMERSSFEKNPIDFLEAKGYKEVKKDLIIKLPKYSLFELENGRKRMLASAGELQKGNELALPSKYVNFLYLASHYEKLKGSPEDNEQKQLFVEQHKHYLDEIIEQISEFSKRVILADANLDKVLSAYNKHRDKPIREQAENIIHLFTLTNLGAPAAFKYFDTTIDRKRYTSTKEVLDATLIHQSITGLYETRIDLSQLGGDGGGGGEAAAKPAPGGTAPLEEEYRLFLEAPIQNVTLLEQWKREIPKVWAEINPPGLASTQAPIHVQLLSTALPVRVRQYPITLEAKRSLRETIRKFRAAGILRPVHSPWNTPLLPVRKSGTSEYRMVQDLREVNKRVETIHPTVPNPYTLLSLLPPDRIWYSVLDLKDAFFCIPLAPESQLIFAFEWADAEEGESGQLTWTRLPQGFKNSPTLFNEALNRDLQGFRLDHPSVSLLQYVDDLLIAADTQAACLSATRDLLMTLAELGYRVSGKKAQLCQEEVTYLGFKIHKGSRSLSNSRTQAILQIPVPKTKRQVREFLGTIGYCRLWIPGFAELAQPLYAATRPGNDPLVWGEKEEEAFQSLKLALTQPPALALPSLDKPFQLFVEETSGAAKGVLTQALGPWKRPVAYLSKRLDPVAAGWPRCLRAIAAAALLTREASKLTFGQDIEITSSHNLESLLRSPPDKWLTNARITQYQVLLLDPPRVRFKQTAALNPATLLPETDDTLPIHHCLDTLDSLTSTRPDLTDQPLAQAEATLFTDGSSYIRDGKRYAGAAVVTLDSVIWAEPLPIGTSAQKAELIALTKALEWSKDKSVNIYTDSRYAFATLHVHGMIYRERGWLTAGGKAIKNAPEILALLTAVWLPKRVAVMHCKGHQKDDAPTSTGNRRADEVAREVAIRPLSTQATISAGKRTADGSEFEKRTADGSEFESPKKKAKVE

SEQ ID NO: 1156 - protein, 2098 aa, synthetic construct
MPAAKRVKLDGGDKKYSIGLDIGTNSVGWAVITDEYKVPSKKFKVLGNTDRHSIKKNLIGALLFDSGETAEATRLKRTARRRYTRRKNRICYLQEIFSNEMAKVDDSFFHRLEESFLVEEDKKHERHPIFGNIVDEVAYHEKYPTIYHLRKKLVDSTDKADLRLIYLALAHMIKFRGHFLIEGDLNPDNSDVDKLFIQLVQTYNQLFEENPINASGVDAKAILSARLSKSRRLENLIAQLPGEKKNGLFGNLIALSLGLTPNFKSNFDLAEDAKLQLSKDTYDDDLDNLLAQIGDQYADLFLAAKNLSDAILLSDILRVNTEITKAPLSASMIKRYDEHHQDLTLLKALVRQQLPEKYKEIFFDQSKNGYAGYIDGGASQEEFYKFIKPILEKMDGTEELLVKLNREDLLRKQRTFDNGSIPHQIHLGELHAILRRQEDFYPFLKDNREKIEKILTFRIPYYVGPLARGNSRFAWMTRKSEETITPWNFEEVVDKGASAQSFIERMTNFDKNLPNEKVLPKHSLLYEYFTVYNELTKVKYVTEGMRKPAFLSGEQKKAIVDLLFKTNRKVTVKQLKEDYFKKIECFDSVEISGVEDRFNASLGTYHDLLKIIKDKDFLDNEENEDILEDIVLTLTLFEDREMIEERLKTYAHLFDDKVMKQLKRRRYTGWGRLSRKLINGIRDKQSGKTILDFLKSDGFANRNFMQLIHDDSLTFKEDIQKAQVSGQGDSLHEHIANLAGSPAIKKGILQTVKVVDELVKVMGRHKPENIVIEMARENQTTQKGQKNSRERMKRIEEGIKELGSQILKEHPVENTQLQNEKLYLYYLQNGRDMYVDQELDINRLSDYDVDHIVPQSFLKDDSIDNKVLTRSDKARGKSDNVPSEEVVKKMKNYWRQLLNAKLITQRKFDNLTKAERGGLSELDKAGFIKRQLVETRQITKHVAQILDSRMNTKYDENDKLIREVKVITLKSKLVSDFRKDFQFYKVREINNYHHAHDAYLNAVVGTALIKKYPKLESEFVYGDYKVYDVRKMIAKSEQEIGKATAKYFFYSNIMNFFKTEITLANGEIRKRPLIETNGETGEIVWDKGRDFATVRKVLSMPQVNIVKKTEVQTGGFSKESILPKRNSDKLIARKKDWDPKKYGGFDSPTVAYSVLVVAKVEKGKSKKLKSVKELLGITIMERSSFEKNPIDFLEAKGYKEVKKDLIIKLPKYSLFELENGRKRMLASAGELQKGNELALPSKYVNFLYLASHYEKLKGSPEDNEQKQLFVEQHKHYLDEIIEQISEFSKRVILADANLDKVLSAYNKHRDKPIREQAENIIHLFTLTNLGAPAAFKYFDTTIDRKRYTSTKEVLDATLIHQSITGLYETRIDLSQLGGDGGEAAAKPAPGGSGGTAPLEEEYRLFLEAPIQNVTLLEQWKREIPKVWAEINPPGLASTQAPIHVQLLSTALPVRVRQYPITLEAKRSLRETIRKFRAAGILRPVHSPWNTPLLPVRKSGTSEYRMVQDLREVNKRVETIHPTVPNPYTLLSLLPPDRIWYSVLDLKDAFFCIPLAPESQLIFAFEWADAEEGESGQLTWTRLPQGFKNSPTLFNEALNRDLQGFRLDHPSVSLLQYVDDLLIAADTQAACLSATRDLLMTLAELGYRVSGKKAQLCQEEVTYLGFKIHKGSRSLSNSRTQAILQIPVPKTKRQVREFLGTIGYCRLWIPGFAELAQPLYAATRPGNDPLVWGEKEEEAFQSLKLALTQPPALALPSLDKPFQLFVEETSGAAKGVLTQALGPWKRPVAYLSKRLDPVAAGWPRCLRAIAAAALLTREASKLTFGQDIEITSSHNLESLLRSPPDKWLTNARITQYQVLLLDPPRVRFKQTAALNPATLLPETDDTLPIHHCLDTLDSLTSTRPDLTDQPLAQAEATLFTDGSSYIRDGKRYAGAAVVTLDSVIWAEPLPIGTSAQKAELIALTKALEWSKDKSVNIYTDSRYAFATLHVHGMIYRERGWLTAGGKAIKNAPEILALLTAVWLPKRVAVMHCKGHQKDDAPTSTGNRRADEVAREVAIRPLSTQATISAGKRTADGSEFEKRTADGSEFESPKKKAKVE

SEQ ID NO: 1157 - protein, 2098 aa, synthetic construct
MPAAKRVKLDGGDKKYSIGLDIGTNSVGWAVITDEYKVPSKKFKVLGNTDRHSIKKNLIGALLFDSGETAEATRLKRTARRRYTRRKNRICYLQEIFSNEMAKVDDSFFHRLEESFLVEEDKKHERHPIFGNIVDEVAYHEKYPTIYHLRKKLVDSTDKADLRLIYLALAHMIKFRGHFLIEGDLNPDNSDVDKLFIQLVQTYNQLFEENPINASGVDAKAILSARLSKSRRLENLIAQLPGEKKNGLFGNLIALSLGLTPNFKSNFDLAEDAKLQLSKDTYDDDLDNLLAQIGDQYADLFLAAKNLSDAILLSDILRVNTEITKAPLSASMIKRYDEHHQDLTLLKALVRQQLPEKYKEIFFDQSKNGYAGYIDGGASQEEFYKFIKPILEKMDGTEELLVKLNREDLLRKQRTFDNGSIPHQIHLGELHAILRRQEDFYPFLKDNREKIEKILTFRIPYYVGPLARGNSRFAWMTRKSEETITPWNFEEVVDKGASAQSFIERMTNFDKNLPNEKVLPKHSLLYEYFTVYNELTKVKYVTEGMRKPAFLSGEQKKAIVDLLFKTNRKVTVKQLKEDYFKKIECFDSVEISGVEDRFNASLGTYHDLLKIIKDKDFLDNEENEDILEDIVLTLTLFEDREMIEERLKTYAHLFDDKVMKQLKRRRYTGWGRLSRKLINGIRDKQSGKTILDFLKSDGFANRNFMQLIHDDSLTFKEDIQKAQVSGQGDSLHEHIANLAGSPAIKKGILQTVKVVDELVKVMGRHKPENIVIEMARENQTTQKGQKNSRERMKRIEEGIKELGSQILKEHPVENTQLQNEKLYLYYLQNGRDMYVDQELDINRLSDYDVDHIVPQSFLKDDSIDNKVLTRSDKARGKSDNVPSEEVVKKMKNYWRQLLNAKLITQRKFDNLTKAERGGLSELDKAGFIKRQLVETRQITKHVAQILDSRMNTKYDENDKLIREVKVITLKSKLVSDFRKDFQFYKVREINNYHHAHDAYLNAVVGTALIKKYPKLESEFVYGDYKVYDVRKMIAKSEQEIGKATAKYFFYSNIMNFFKTEITLANGEIRKRPLIETNGETGEIVWDKGRDFATVRKVLSMPQVNIVKKTEVQTGGFSKESILPKRNSDKLIARKKDWDPKKYGGFDSPTVAYSVLVVAKVEKGKSKKLKSVKELLGITIMERSSFEKNPIDFLEAKGYKEVKKDLIIKLPKYSLFELENGRKRMLASAGELQKGNELALPSKYVNFLYLASHYEKLKGSPEDNEQKQLFVEQHKHYLDEIIEQISEFSKRVILADANLDKVLSAYNKHRDKPIREQAENIIHLFTLTNLGAPAAFKYFDTTIDRKRYTSTKEVLDATLIHQSITGLYETRIDLSQLGGDGGEAAAKGGGGGSGGTAPLEEEYRLFLEAPIQNVTLLEQWKREIPKVWAEINPPGLASTQAPIHVQLLSTALPVRVRQYPITLEAKRSLRETIRKFRAAGILRPVHSPWNTPLLPVRKSGTSEYRMVQDLREVNKRVETIHPTVPNPYTLLSLLPPDRIWYSVLDLKDAFFCIPLAPESQLIFAFEWADAEEGESGQLTWTRLPQGFKNSPTLFNEALNRDLQGFRLDHPSVSLLQYVDDLLIAADTQAACLSATRDLLMTLAELGYRVSGKKAQLCQEEVTYLGFKIHKGSRSLSNSRTQAILQIPVPKTKRQVREFLGTIGYCRLWIPGFAELAQPLYAATRPGNDPLVWGEKEEEAFQSLKLALTQPPALALPSLDKPFQLFVEETSGAAKGVLTQALGPWKRPVAYLSKRLDPVAAGWPRCLRAIAAAALLTREASKLTFGQDIEITSSHNLESLLRSPPDKWLTNARITQYQVLLLDPPRVRFKQTAALNPATLLPETDDTLPIHHCLDTLDSLTSTRPDLTDQPLAQAEATLFTDGSSYIRDGKRYAGAAVVTLDSVIWAEPLPIGTSAQKAELIALTKALEWSKDKSVNIYTDSRYAFATLHVHGMIYRERGWLTAGGKAIKNAPEILALLTAVWLPKRVAVMHCKGHQKDDAPTSTGNRRADEVAREVAIRPLSTQATISAGKRTADGSEFEKRTADGSEFESPKKKAKVE

SEQ ID NO: 1158 - protein, 2102 aa, synthetic construct
MPAAKRVKLDGGDKKYSIGLDIGTNSVGWAVITDEYKVPSKKFKVLGNTDRHSIKKNLIGALLFDSGETAEATRLKRTARRRYTRRKNRICYLQEIFSNEMAKVDDSFFHRLEESFLVEEDKKHERHPIFGNIVDEVAYHEKYPTIYHLRKKLVDSTDKADLRLIYLALAHMIKFRGHFLIEGDLNPDNSDVDKLFIQLVQTYNQLFEENPINASGVDAKAILSARLSKSRRLENLIAQLPGEKKNGLFGNLIALSLGLTPNFKSNFDLAEDAKLQLSKDTYDDDLDNLLAQIGDQYADLFLAAKNLSDAILLSDILRVNTEITKAPLSASMIKRYDEHHQDLTLLKALVRQQLPEKYKEIFFDQSKNGYAGYIDGGASQEEFYKFIKPILEKMDGTEELLVKLNREDLLRKQRTFDNGSIPHQIHLGELHAILRRQEDFYPFLKDNREKIEKILTFRIPYYVGPLARGNSRFAWMTRKSEETITPWNFEEVVDKGASAQSFIERMTNFDKNLPNEKVLPKHSLLYEYFTVYNELTKVKYVTEGMRKPAFLSGEQKKAIVDLLFKTNRKVTVKQLKEDYFKKIECFDSVEISGVEDRFNASLGTYHDLLKIIKDKDFLDNEENEDILEDIVLTLTLFEDREMIEERLKTYAHLFDDKVMKQLKRRRYTGWGRLSRKLINGIRDKQSGKTILDFLKSDGFANRNFMQLIHDDSLTFKEDIQKAQVSGQGDSLHEHIANLAGSPAIKKGILQTVKVVDELVKVMGRHKPENIVIEMARENQTTQKGQKNSRERMKRIEEGIKELGSQILKEHPVENTQLQNEKLYLYYLQNGRDMYVDQELDINRLSDYDVDHIVPQSFLKDDSIDNKVLTRSDKARGKSDNVPSEEVVKKMKNYWRQLLNAKLITQRKFDNLTKAERGGLSELDKAGFIKRQLVETRQITKHVAQILDSRMNTKYDENDKLIREVKVITLKSKLVSDFRKDFQFYKVREINNYHHAHDAYLNAVVGTALIKKYPKLESEFVYGDYKVYDVRKMIAKSEQEIGKATAKYFFYSNIMNFFKTEITLANGEIRKRPLIETNGETGEIVWDKGRDFATVRKVLSMPQVNIVKKTEVQTGGFSKESILPKRNSDKLIARKKDWDPKKYGGFDSPTVAYSVLVVAKVEKGKSKKLKSVKELLGITIMERSSFEKNPIDFLEAKGYKEVKKDLIIKLPKYSLFELENGRKRMLASAGELQKGNELALPSKYVNFLYLASHYEKLKGSPEDNEQKQLFVEQHKHYLDEIIEQISEFSKRVILADANLDKVLSAYNKHRDKPIREQAENIIHLFTLTNLGAPAAFKYFDTTIDRKRYTSTKEVLDATLIHQSITGLYETRIDLSQLGGDGGGGGGSEAAAKGGGGSGGTAPLEEEYRLFLEAPIQNVTLLEQWKREIPKVWAEINPPGLASTQAPIHVQLLSTALPVRVRQYPITLEAKRSLRETIRKFRAAGILRPVHSPWNTPLLPVRKSGTSEYRMVQDLREVNKRVETIHPTVPNPYTLLSLLPPDRIWYSVLDLKDAFFCIPLAPESQLIFAFEWADAEEGESGQLTWTRLPQGFKNSPTLFNEALNRDLQGFRLDHPSVSLLQYVDDLLIAADTQAACLSATRDLLMTLAELGYRVSGKKAQLCQEEVTYLGFKIHKGSRSLSNSRTQAILQIPVPKTKRQVREFLGTIGYCRLWIPGFAELAQPLYAATRPGNDPLVWGEKEEEAFQSLKLALTQPPALALPSLDKPFQLFVEETSGAAKGVLTQALGPWKRPVAYLSKRLDPVAAGWPRCLRAIAAAALLTREASKLTFGQDIEITSSHNLESLLRSPPDKWLTNARITQYQVLLLDPPRVRFKQTAALNPATLLPETDDTLPIHHCLDTLDSLTSTRPDLTDQPLAQAEATLFTDGSSYIRDGKRYAGAAVVTLDSVIWAEPLPIGTSAQKAELIALTKALEWSKDKSVNIYTDSRYAFATLHVHGMIYRERGWLTAGGKAIKNAPEILALLTAVWLPKRVAVMHCKGHQKDDAPTSTGNRRADEVAREVAIRPLSTQATISAGKRTADGSEFEKRTADGSEFESPKKKAKVE

SEQ ID NO: 1159 - protein, 2096 aa, synthetic construct
MPAAKRVKLDGGDKKYSIGLDIGTNSVGWAVITDEYKVPSKKFKVLGNTDRHSIKKNLIGALLFDSGETAEATRLKRTARRRYTRRKNRICYLQEIFSNEMAKVDDSFFHRLEESFLVEEDKKHERHPIFGNIVDEVAYHEKYPTIYHLRKKLVDSTDKADLRLIYLALAHMIKFRGHFLIEGDLNPDNSDVDKLFIQLVQTYNQLFEENPINASGVDAKAILSARLSKSRRLENLIAQLPGEKKNGLFGNLIALSLGLTPNFKSNFDLAEDAKLQLSKDTYDDDLDNLLAQIGDQYADLFLAAKNLSDAILLSDILRVNTEITKAPLSASMIKRYDEHHQDLTLLKALVRQQLPEKYKEIFFDQSKNGYAGYIDGGASQEEFYKFIKPILEKMDGTEELLVKLNREDLLRKQRTFDNGSIPHQIHLGELHAILRRQEDFYPFLKDNREKIEKILTFRIPYYVGPLARGNSRFAWMTRKSEETITPWNFEEVVDKGASAQSFIERMTNFDKNLPNEKVLPKHSLLYEYFTVYNELTKVKYVTEGMRKPAFLSGEQKKAIVDLLFKTNRKVTVKQLKEDYFKKIECFDSVEISGVEDRFNASLGTYHDLLKIIKDKDFLDNEENEDILEDIVLTLTLFEDREMIEERLKTYAHLFDDKVMKQLKRRRYTGWGRLSRKLINGIRDKQSGKTILDFLKSDGFANRNFMQLIHDDSLTFKEDIQKAQVSGQGDSLHEHIANLAGSPAIKKGILQTVKVVDELVKVMGRHKPENIVIEMARENQTTQKGQKNSRERMKRIEEGIKELGSQILKEHPVENTQLQNEKLYLYYLQNGRDMYVDQELDINRLSDYDVDHIVPQSFLKDDSIDNKVLTRSDKARGKSDNVPSEEVVKKMKNYWRQLLNAKLITQRKFDNLTKAERGGLSELDKAGFIKRQLVETRQITKHVAQILDSRMNTKYDENDKLIREVKVITLKSKLVSDFRKDFQFYKVREINNYHHAHDAYLNAVVGTALIKKYPKLESEFVYGDYKVYDVRKMIAKSEQEIGKATAKYFFYSNIMNFFKTEITLANGEIRKRPLIETNGETGEIVWDKGRDFATVRKVLSMPQVNIVKKTEVQTGGFSKESILPKRNSDKLIARKKDWDPKKYGGFDSPTVAYSVLVVAKVEKGKSKKLKSVKELLGITIMERSSFEKNPIDFLEAKGYKEVKKDLIIKLPKYSLFELENGRKRMLASAGELQKGNELALPSKYVNFLYLASHYEKLKGSPEDNEQKQLFVEQHKHYLDEIIEQISEFSKRVILADANLDKVLSAYNKHRDKPIREQAENIIHLFTLTNLGAPAAFKYFDTTIDRKRYTSTKEVLDATLIHQSITGLYETRIDLSQLGGDGGPAPGGGGGSGGTAPLEEEYRLFLEAPIQNVTLLEQWKREIPKVWAEINPPGLASTQAPIHVQLLSTALPVRVRQYPITLEAKRSLRETIRKFRAAGILRPVHSPWNTPLLPVRKSGTSEYRMVQDLREVNKRVETIHPTVPNPYTLLSLLPPDRIWYSVLDLKDAFFCIPLAPESQLIFAFEWADAEEGESGQLTWTRLPQGFKNSPTLFNEALNRDLQGFRLDHPSVSLLQYVDDLLIAADTQAACLSATRDLLMTLAELGYRVSGKKAQLCQEEVTYLGFKIHKGSRSLSNSRTQAILQIPVPKTKRQVREFLGTIGYCRLWIPGFAELAQPLYAATRPGNDPLVWGEKEEEAFQSLKLALTQPPALALPSLDKPFQLFVEETSGAAKGVLTQALGPWKRPVAYLSKRLDPVAAGWPRCLRAIAAAALLTREASKLTFGQDIEITSSHNLESLLRSPPDKWLTNARITQYQVLLLDPPRVRFKQTAALNPATLLPETDDTLPIHHCLDTLDSLTSTRPDLTDQPLAQAEATLFTDGSSYIRDGKRYAGAAVVTLDSVIWAEPLPIGTSAQKAELIALTKALEWSKDKSVNIYTDSRYAFATLHVHGMIYRERGWLTAGGKAIKNAPEILALLTAVWLPKRVAVMHCKGHQKDDAPTSTGNRRADEVAREVAIRPLSTQATISAGKRTADGSEFEKRTADGSEFESPKKKAKVE

SEQ ID NO: 1160 - protein, 2098 aa, synthetic construct
MPAAKRVKLDGGDKKYSIGLDIGTNSVGWAVITDEYKVPSKKFKVLGNTDRHSIKKNLIGALLFDSGETAEATRLKRTARRRYTRRKNRICYLQEIFSNEMAKVDDSFFHRLEESFLVEEDKKHERHPIFGNIVDEVAYHEKYPTIYHLRKKLVDSTDKADLRLIYLALAHMIKFRGHFLIEGDLNPDNSDVDKLFIQLVQTYNQLFEENPINASGVDAKAILSARLSKSRRLENLIAQLPGEKKNGLFGNLIALSLGLTPNFKSNFDLAEDAKLQLSKDTYDDDLDNLLAQIGDQYADLFLAAKNLSDAILLSDILRVNTEITKAPLSASMIKRYDEHHQDLTLLKALVRQQLPEKYKEIFFDQSKNGYAGYIDGGASQEEFYKFIKPILEKMDGTEELLVKLNREDLLRKQRTFDNGSIPHQIHLGELHAILRRQEDFYPFLKDNREKIEKILTFRIPYYVGPLARGNSRFAWMTRKSEETITPWNFEEVVDKGASAQSFIERMTNFDKNLPNEKVLPKHSLLYEYFTVYNELTKVKYVTEGMRKPAFLSGEQKKAIVDLLFKTNRKVTVKQLKEDYFKKIECFDSVEISGVEDRFNASLGTYHDLLKIIKDKDFLDNEENEDILEDIVLTLTLFEDREMIEERLKTYAHLFDDKVMKQLKRRRYTGWGRLSRKLINGIRDKQSGKTILDFLKSDGFANRNFMQLIHDDSLTFKEDIQKAQVSGQGDSLHEHIANLAGSPAIKKGILQTVKVVDELVKVMGRHKPENIVIEMARENQTTQKGQKNSRERMKRIEEGIKELGSQILKEHPVENTQLQNEKLYLYYLQNGRDMYVDQELDINRLSDYDVDHIVPQSFLKDDSIDNKVLTRSDKARGKSDNVPSEEVVKKMKNYWRQLLNAKLITQRKFDNLTKAERGGLSELDKAGFIKRQLVETRQITKHVAQILDSRMNTKYDENDKLIREVKVITLKSKLVSDFRKDFQFYKVREINNYHHAHDAYLNAVVGTALIKKYPKLESEFVYGDYKVYDVRKMIAKSEQEIGKATAKYFFYSNIMNFFKTEITLANGEIRKRPLIETNGETGEIVWDKGRDFATVRKVLSMPQVNIVKKTEVQTGGFSKESILPKRNSDKLIARKKDWDPKKYGGFDSPTVAYSVLVVAKVEKGKSKKLKSVKELLGITIMERSSFEKNPIDFLEAKGYKEVKKDLIIKLPKYSLFELENGRKRMLASAGELQKGNELALPSKYVNFLYLASHYEKLKGSPEDNEQKQLFVEQHKHYLDEIIEQISEFSKRVILADANLDKVLSAYNKHRDKPIREQAENIIHLFTLTNLGAPAAFKYFDTTIDRKRYTSTKEVLDATLIHQSITGLYETRIDLSQLGGDGGGGSPAPEAAAKGGTAPLEEEYRLFLEAPIQNVTLLEQWKREIPKVWAEINPPGLASTQAPIHVQLLSTALPVRVRQYPITLEAKRSLRETIRKFRAAGILRPVHSPWNTPLLPVRKSGTSEYRMVQDLREVNKRVETIHPTVPNPYTLLSLLPPDRIWYSVLDLKDAFFCIPLAPESQLIFAFEWADAEEGESGQLTWTRLPQGFKNSPTLFNEALNRDLQGFRLDHPSVSLLQYVDDLLIAADTQAACLSATRDLLMTLAELGYRVSGKKAQLCQEEVTYLGFKIHKGSRSLSNSRTQAILQIPVPKTKRQVREFLGTIGYCRLWIPGFAELAQPLYAATRPGNDPLVWGEKEEEAFQSLKLALTQPPALALPSLDKPFQLFVEETSGAAKGVLTQALGPWKRPVAYLSKRLDPVAAGWPRCLRAIAAAALLTREASKLTFGQDIEITSSHNLESLLRSPPDKWLTNARITQYQVLLLDPPRVRFKQTAALNPATLLPETDDTLPIHHCLDTLDSLTSTRPDLTDQPLAQAEATLFTDGSSYIRDGKRYAGAAVVTLDSVIWAEPLPIGTSAQKAELIALTKALEWSKDKSVNIYTDSRYAFATLHVHGMIYRERGWLTAGGKAIKNAPEILALLTAVWLPKRVAVMHCKGHQKDDAPTSTGNRRADEVAREVAIRPLSTQATISAGKRTADGSEFEKRTADGSEFESPKKKAKVE

SEQ ID NO: 1161 - protein, 2098 aa, synthetic construct
MPAAKRVKLDGGDKKYSIGLDIGTNSVGWAVITDEYKVPSKKFKVLGNTDRHSIKKNLIGALLFDSGETAEATRLKRTARRRYTRRKNRICYLQEIFSNEMAKVDDSFFHRLEESFLVEEDKKHERHPIFGNIVDEVAYHEKYPTIYHLRKKLVDSTDKADLRLIYLALAHMIKFRGHFLIEGDLNPDNSDVDKLFIQLVQTYNQLFEENPINASGVDAKAILSARLSKSRRLENLIAQLPGEKKNGLFGNLIALSLGLTPNFKSNFDLAEDAKLQLSKDTYDDDLDNLLAQIGDQYADLFLAAKNLSDAILLSDILRVNTEITKAPLSASMIKRYDEHHQDLTLLKALVRQQLPEKYKEIFFDQSKNGYAGYIDGGASQEEFYKFIKPILEKMDGTEELLVKLNREDLLRKQRTFDNGSIPHQIHLGELHAILRRQEDFYPFLKDNREKIEKILTFRIPYYVGPLARGNSRFAWMTRKSEETITPWNFEEVVDKGASAQSFIERMTNFDKNLPNEKVLPKHSLLYEYFTVYNELTKVKYVTEGMRKPAFLSGEQKKAIVDLLFKTNRKVTVKQLKEDYFKKIECFDSVEISGVEDRFNASLGTYHDLLKIIKDKDFLDNEENEDILEDIVLTLTLFEDREMIEERLKTYAHLFDDKVMKQLKRRRYTGWGRLSRKLINGIRDKQSGKTILDFLKSDGFANRNFMQLIHDDSLTFKEDIQKAQVSGQGDSLHEHIANLAGSPAIKKGILQTVKVVDELVKVMGRHKPENIVIEMARENQTTQKGQKNSRERMKRIEEGIKELGSQILKEHPVENTQLQNEKLYLYYLQNGRDMYVDQELDINRLSDYDVDHIVPQSFLKDDSIDNKVLTRSDKARGKSDNVPSEEVVKKMKNYWRQLLNAKLITQRKFDNLTKAERGGLSELDKAGFIKRQLVETRQITKHVAQILDSRMNTKYDENDKLIREVKVITLKSKLVSDFRKDFQFYKVREINNYHHAHDAYLNAVVGTALIKKYPKLESEFVYGDYKVYDVRKMIAKSEQEIGKATAKYFFYSNIMNFFKTEITLANGEIRKRPLIETNGETGEIVWDKGRDFATVRKVLSMPQVNIVKKTEVQTGGFSKESILPKRNSDKLIARKKDWDPKKYGGFDSPTVAYSVLVVAKVEKGKSKKLKSVKELLGITIMERSSFEKNPIDFLEAKGYKEVKKDLIIKLPKYSLFELENGRKRMLASAGELQKGNELALPSKYVNFLYLASHYEKLKGSPEDNEQKQLFVEQHKHYLDEIIEQISEFSKRVILADANLDKVLSAYNKHRDKPIREQAENIIHLFTLTNLGAPAAFKYFDTTIDRKRYTSTKEVLDATLIHQSITGLYETRIDLSQLGGDGGPAPEAAAKGGSGGTAPLEEEYRLFLEAPIQNVTLLEQWKREIPKVWAEINPPGLASTQAPIHVQLLSTALPVRVRQYPITLEAKRSLRETIRKFRAAGILRPVHSPWNTPLLPVRKSGTSEYRMVQDLREVNKRVETIHPTVPNPYTLLSLLPPDRIWYSVLDLKDAFFCIPLAPESQLIFAFEWADAEEGESGQLTWTRLPQGFKNSPTLFNEALNRDLQGFRLDHPSVSLLQYVDDLLIAADTQAACLSATRDLLMTLAELGYRVSGKKAQLCQEEVTYLGFKIHKGSRSLSNSRTQAILQIPVPKTKRQVREFLGTIGYCRLWIPGFAELAQPLYAATRPGNDPLVWGEKEEEAFQSLKLALTQPPALALPSLDKPFQLFVEETSGAAKGVLTQALGPWKRPVAYLSKRLDPVAAGWPRCLRAIAAAALLTREASKLTFGQDIEITSSHNLESLLRSPPDKWLTNARITQYQVLLLDPPRVRFKQTAALNPATLLPETDDTLPIHHCLDTLDSLTSTRPDLTDQPLAQAEATLFTDGSSYIRDGKRYAGAAVVTLDSVIWAEPLPIGTSAQKAELIALTKALEWSKDKSVNIYTDSRYAFATLHVHGMIYRERGWLTAGGKAIKNAPEILALLTAVWLPKRVAVMHCKGHQKDDAPTSTGNRRADEVAREVAIRPLSTQATISAGKRTADGSEFEKRTADGSEFESPKKKAKVE

SEQ ID NO: 1162 - protein, 2098 aa, synthetic construct
MPAAKRVKLDGGDKKYSIGLDIGTNSVGWAVITDEYKVPSKKFKVLGNTDRHSIKKNLIGALLFDSGETAEATRLKRTARRRYTRRKNRICYLQEIFSNEMAKVDDSFFHRLEESFLVEEDKKHERHPIFGNIVDEVAYHEKYPTIYHLRKKLVDSTDKADLRLIYLALAHMIKFRGHFLIEGDLNPDNSDVDKLFIQLVQTYNQLFEENPINASGVDAKAILSARLSKSRRLENLIAQLPGEKKNGLFGNLIALSLGLTPNFKSNFDLAEDAKLQLSKDTYDDDLDNLLAQIGDQYADLFLAAKNLSDAILLSDILRVNTEITKAPLSASMIKRYDEHHQDLTLLKALVRQQLPEKYKEIFFDQSKNGYAGYIDGGASQEEFYKFIKPILEKMDGTEELLVKLNREDLLRKQRTFDNGSIPHQIHLGELHAILRRQEDFYPFLKDNREKIEKILTFRIPYYVGPLARGNSRFAWMTRKSEETITPWNFEEVVDKGASAQSFIERMTNFDKNLPNEKVLPKHSLLYEYFTVYNELTKVKYVTEGMRKPAFLSGEQKKAIVDLLFKTNRKVTVKQLKEDYFKKIECFDSVEISGVEDRFNASLGTYHDLLKIIKDKDFLDNEENEDILEDIVLTLTLFEDREMIEERLKTYAHLFDDKVMKQLKRRRYTGWGRLSRKLINGIRDKQSGKTILDFLKSDGFANRNFMQLIHDDSLTFKEDIQKAQVSGQGDSLHEHIANLAGSPAIKKGILQTVKVVDELVKVMGRHKPENIVIEMARENQTTQKGQKNSRERMKRIEEGIKELGSQILKEHPVENTQLQNEKLYLYYLQNGRDMYVDQELDINRLSDYDVDHIVPQSFLKDDSIDNKVLTRSDKARGKSDNVPSEEVVKKMKNYWRQLLNAKLITQRKFDNLTKAERGGLSELDKAGFIKRQLVETRQITKHVAQILDSRMNTKYDENDKLIREVKVITLKSKLVSDFRKDFQFYKVREINNYHHAHDAYLNAVVGTALIKKYPKLESEFVYGDYKVYDVRKMIAKSEQEIGKATAKYFFYSNIMNFFKTEITLANGEIRKRPLIETNGETGEIVWDKGRDFATVRKVLSMPQVNIVKKTEVQTGGFSKESILPKRNSDKLIARKKDWDPKKYGGFDSPTVAYSVLVVAKVEKGKSKKLKSVKELLGITIMERSSFEKNPIDFLEAKGYKEVKKDLIIKLPKYSLFELENGRKRMLASAGELQKGNELALPSKYVNFLYLASHYEKLKGSPEDNEQKQLFVEQHKHYLDEIIEQISEFSKRVILADANLDKVLSAYNKHRDKPIREQAENIIHLFTLTNLGAPAAFKYFDTTIDRKRYTSTKEVLDATLIHQSITGLYETRIDLSQLGGDGGGSSEAAAKGGGGGTAPLEEEYRLFLEAPIQNVTLLEQWKREIPKVWAEINPPGLASTQAPIHVQLLSTALPVRVRQYPITLEAKRSLRETIRKFRAAGILRPVHSPWNTPLLPVRKSGTSEYRMVQDLREVNKRVETIHPTVPNPYTLLSLLPPDRIWYSVLDLKDAFFCIPLAPESQLIFAFEWADAEEGESGQLTWTRLPQGFKNSPTLFNEALNRDLQGFRLDHPSVSLLQYVDDLLIAADTQAACLSATRDLLMTLAELGYRVSGKKAQLCQEEVTYLGFKIHKGSRSLSNSRTQAILQIPVPKTKRQVREFLGTIGYCRLWIPGFAELAQPLYAATRPGNDPLVWGEKEEEAFQSLKLALTQPPALALPSLDKPFQLFVEETSGAAKGVLTQALGPWKRPVAYLSKRLDPVAAGWPRCLRAIAAAALLTREASKLTFGQDIEITSSHNLESLLRSPPDKWLTNARITQYQVLLLDPPRVRFKQTAALNPATLLPETDDTLPIHHCLDTLDSLTSTRPDLTDQPLAQAEATLFTDGSSYIRDGKRYAGAAVVTLDSVIWAEPLPIGTSAQKAELIALTKALEWSKDKSVNIYTDSRYAFATLHVHGMIYRERGWLTAGGKAIKNAPEILALLTAVWLPKRVAVMHCKGHQKDDAPTSTGNRRADEVAREVAIRPLSTQATISAGKRTADGSEFEKRTADGSEFESPKKKAKVE

SEQ ID NO: 1163 - protein, 2096 aa, synthetic construct
MPAAKRVKLDGGDKKYSIGLDIGTNSVGWAVITDEYKVPSKKFKVLGNTDRHSIKKNLIGALLFDSGETAEATRLKRTARRRYTRRKNRICYLQEIFSNEMAKVDDSFFHRLEESFLVEEDKKHERHPIFGNIVDEVAYHEKYPTIYHLRKKLVDSTDKADLRLIYLALAHMIKFRGHFLIEGDLNPDNSDVDKLFIQLVQTYNQLFEENPINASGVDAKAILSARLSKSRRLENLIAQLPGEKKNGLFGNLIALSLGLTPNFKSNFDLAEDAKLQLSKDTYDDDLDNLLAQIGDQYADLFLAAKNLSDAILLSDILRVNTEITKAPLSASMIKRYDEHHQDLTLLKALVRQQLPEKYKEIFFDQSKNGYAGYIDGGASQEEFYKFIKPILEKMDGTEELLVKLNREDLLRKQRTFDNGSIPHQIHLGELHAILRRQEDFYPFLKDNREKIEKILTFRIPYYVGPLARGNSRFAWMTRKSEETITPWNFEEVVDKGASAQSFIERMTNFDKNLPNEKVLPKHSLLYEYFTVYNELTKVKYVTEGMRKPAFLSGEQKKAIVDLLFKTNRKVTVKQLKEDYFKKIECFDSVEISGVEDRFNASLGTYHDLLKIIKDKDFLDNEENEDILEDIVLTLTLFEDREMIEERLKTYAHLFDDKVMKQLKRRRYTGWGRLSRKLINGIRDKQSGKTILDFLKSDGFANRNFMQLIHDDSLTFKEDIQKAQVSGQGDSLHEHIANLAGSPAIKKGILQTVKVVDELVKVMGRHKPENIVIEMARENQTTQKGQKNSRERMKRIEEGIKELGSQILKEHPVENTQLQNEKLYLYYLQNGRDMYVDQELDINRLSDYDVDHIVPQSFLKDDSIDNKVLTRSDKARGKSDNVPSEEVVKKMKNYWRQLLNAKLITQRKFDNLTKAERGGLSELDKAGFIKRQLVETRQITKHVAQILDSRMNTKYDENDKLIREVKVITLKSKLVSDFRKDFQFYKVREINNYHHAHDAYLNAVVGTALIKKYPKLESEFVYGDYKVYDVRKMIAKSEQEIGKATAKYFFYSNIMNFFKTEITLANGEIRKRPLIETNGETGEIVWDKGRDFATVRKVLSMPQVNIVKKTEVQTGGFSKESILPKRNSDKLIARKKDWDPKKYGGFDSPTVAYSVLVVAKVEKGKSKKLKSVKELLGITIMERSSFEKNPIDFLEAKGYKEVKKDLIIKLPKYSLFELENGRKRMLASAGELQKGNELALPSKYVNFLYLASHYEKLKGSPEDNEQKQLFVEQHKHYLDEIIEQISEFSKRVILADANLDKVLSAYNKHRDKPIREQAENIIHLFTLTNLGAPAAFKYFDTTIDRKRYTSTKEVLDATLIHQSITGLYETRIDLSQLGGDGGGGGGGSPAPGGTAPLEEEYRLFLEAPIQNVTLLEQWKREIPKVWAEINPPGLASTQAPIHVQLLSTALPVRVRQYPITLEAKRSLRETIRKFRAAGILRPVHSPWNTPLLPVRKSGTSEYRMVQDLREVNKRVETIHPTVPNPYTLLSLLPPDRIWYSVLDLKDAFFCIPLAPESQLIFAFEWADAEEGESGQLTWTRLPQGFKNSPTLFNEALNRDLQGFRLDHPSVSLLQYVDDLLIAADTQAACLSATRDLLMTLAELGYRVSGKKAQLCQEEVTYLGFKIHKGSRSLSNSRTQAILQIPVPKTKRQVREFLGTIGYCRLWIPGFAELAQPLYAATRPGNDPLVWGEKEEEAFQSLKLALTQPPALALPSLDKPFQLFVEETSGAAKGVLTQALGPWKRPVAYLSKRLDPVAAGWPRCLRAIAAAALLTREASKLTFGQDIEITSSHNLESLLRSPPDKWLTNARITQYQVLLLDPPRVRFKQTAALNPATLLPETDDTLPIHHCLDTLDSLTSTRPDLTDQPLAQAEATLFTDGSSYIRDGKRYAGAAVVTLDSVIWAEPLPIGTSAQKAELIALTKALEWSKDKSVNIYTDSRYAFATLHVHGMIYRERGWLTAGGKAIKNAPEILALLTAVWLPKRVAVMHCKGHQKDDAPTSTGNRRADEVAREVAIRPLSTQATISAGKRTADGSEFEKRTADGSEFESPKKKAKVE

SEQ ID NO: 1164 - protein, 2098 aa, synthetic construct
MPAAKRVKLDGGDKKYSIGLDIGTNSVGWAVITDEYKVPSKKFKVLGNTDRHSIKKNLIGALLFDSGETAEATRLKRTARRRYTRRKNRICYLQEIFSNEMAKVDDSFFHRLEESFLVEEDKKHERHPIFGNIVDEVAYHEKYPTIYHLRKKLVDSTDKADLRLIYLALAHMIKFRGHFLIEGDLNPDNSDVDKLFIQLVQTYNQLFEENPINASGVDAKAILSARLSKSRRLENLIAQLPGEKKNGLFGNLIALSLGLTPNFKSNFDLAEDAKLQLSKDTYDDDLDNLLAQIGDQYADLFLAAKNLSDAILLSDILRVNTEITKAPLSASMIKRYDEHHQDLTLLKALVRQQLPEKYKEIFFDQSKNGYAGYIDGGASQEEFYKFIKPILEKMDGTEELLVKLNREDLLRKQRTFDNGSIPHQIHLGELHAILRRQEDFYPFLKDNREKIEKILTFRIPYYVGPLARGNSRFAWMTRKSEETITPWNFEEVVDKGASAQSFIERMTNFDKNLPNEKVLPKHSLLYEYFTVYNELTKVKYVTEGMRKPAFLSGEQKKAIVDLLFKTNRKVTVKQLKEDYFKKIECFDSVEISGVEDRFNASLGTYHDLLKIIKDKDFLDNEENEDILEDIVLTLTLFEDREMIEERLKTYAHLFDDKVMKQLKRRRYTGWGRLSRKLINGIRDKQSGKTILDFLKSDGFANRNFMQLIHDDSLTFKEDIQKAQVSGQGDSLHEHIANLAGSPAIKKGILQTVKVVDELVKVMGRHKPENIVIEMARENQTTQKGQKNSRERMKRIEEGIKELGSQILKEHPVENTQLQNEKLYLYYLQNGRDMYVDQELDINRLSDYDVDHIVPQSFLKDDSIDNKVLTRSDKARGKSDNVPSEEVVKKMKNYWRQLLNAKLITQRKFDNLTKAERGGLSELDKAGFIKRQLVETRQITKHVAQILDSRMNTKYDENDKLIREVKVITLKSKLVSDFRKDFQFYKVREINNYHHAHDAYLNAVVGTALIKKYPKLESEFVYGDYKVYDVRKMIAKSEQEIGKATAKYFFYSNIMNFFKTEITLANGEIRKRPLIETNGETGEIVWDKGRDFATVRKVLSMPQVNIVKKTEVQTGGFSKESILPKRNSDKLIARKKDWDPKKYGGFDSPTVAYSVLVVAKVEKGKSKKLKSVKELLGITIMERSSFEKNPIDFLEAKGYKEVKKDLIIKLPKYSLFELENGRKRMLASAGELQKGNELALPSKYVNFLYLASHYEKLKGSPEDNEQKQLFVEQHKHYLDEIIEQISEFSKRVILADANLDKVLSAYNKHRDKPIREQAENIIHLFTLTNLGAPAAFKYFDTTIDRKRYTSTKEVLDATLIHQSITGLYETRIDLSQLGGDGGGSSPAPEAAAKGGTAPLEEEYRLFLEAPIQNVTLLEQWKREIPKVWAEINPPGLASTQAPIHVQLLSTALPVRVRQYPITLEAKRSLRETIRKFRAAGILRPVHSPWNTPLLPVRKSGTSEYRMVQDLREVNKRVETIHPTVPNPYTLLSLLPPDRIWYSVLDLKDAFFCIPLAPESQLIFAFEWADAEEGESGQLTWTRLPQGFKNSPTLFNEALNRDLQGFRLDHPSVSLLQYVDDLLIAADTQAACLSATRDLLMTLAELGYRVSGKKAQLCQEEVTYLGFKIHKGSRSLSNSRTQAILQIPVPKTKRQVREFLGTIGYCRLWIPGFAELAQPLYAATRPGNDPLVWGEKEEEAFQSLKLALTQPPALALPSLDKPFQLFVEETSGAAKGVLTQALGPWKRPVAYLSKRLDPVAAGWPRCLRAIAAAALLTREASKLTFGQDIEITSSHNLESLLRSPPDKWLTNARITQYQVLLLDPPRVRFKQTAALNPATLLPETDDTLPIHHCLDTLDSLTSTRPDLTDQPLAQAEATLFTDGSSYIRDGKRYAGAAVVTLDSVIWAEPLPIGTSAQKAELIALTKALEWSKDKSVNIYTDSRYAFATLHVHGMIYRERGWLTAGGKAIKNAPEILALLTAVWLPKRVAVMHCKGHQKDDAPTSTGNRRADEVAREVAIRPLSTQATISAGKRTADGSEFEKRTADGSEFESPKKKAKVE

SEQ ID NO: 1165 - protein, 2096 aa, synthetic construct
MPAAKRVKLDGGDKKYSIGLDIGTNSVGWAVITDEYKVPSKKFKVLGNTDRHSIKKNLIGALLFDSGETAEATRLKRTARRRYTRRKNRICYLQEIFSNEMAKVDDSFFHRLEESFLVEEDKKHERHPIFGNIVDEVAYHEKYPTIYHLRKKLVDSTDKADLRLIYLALAHMIKFRGHFLIEGDLNPDNSDVDKLFIQLVQTYNQLFEENPINASGVDAKAILSARLSKSRRLENLIAQLPGEKKNGLFGNLIALSLGLTPNFKSNFDLAEDAKLQLSKDTYDDDLDNLLAQIGDQYADLFLAAKNLSDAILLSDILRVNTEITKAPLSASMIKRYDEHHQDLTLLKALVRQQLPEKYKEIFFDQSKNGYAGYIDGGASQEEFYKFIKPILEKMDGTEELLVKLNREDLLRKQRTFDNGSIPHQIHLGELHAILRRQEDFYPFLKDNREKIEKILTFRIPYYVGPLARGNSRFAWMTRKSEETITPWNFEEVVDKGASAQSFIERMTNFDKNLPNEKVLPKHSLLYEYFTVYNELTKVKYVTEGMRKPAFLSGEQKKAIVDLLFKTNRKVTVKQLKEDYFKKIECFDSVEISGVEDRFNASLGTYHDLLKIIKDKDFLDNEENEDILEDIVLTLTLFEDREMIEERLKTYAHLFDDKVMKQLKRRRYTGWGRLSRKLINGIRDKQSGKTILDFLKSDGFANRNFMQLIHDDSLTFKEDIQKAQVSGQGDSLHEHIANLAGSPAIKKGILQTVKVVDELVKVMGRHKPENIVIEMARENQTTQKGQKNSRERMKRIEEGIKELGSQILKEHPVENTQLQNEKLYLYYLQNGRDMYVDQELDINRLSDYDVDHIVPQSFLKDDSIDNKVLTRSDKARGKSDNVPSEEVVKKMKNYWRQLLNAKLITQRKFDNLTKAERGGLSELDKAGFIKRQLVETRQITKHVAQILDSRMNTKYDENDKLIREVKVITLKSKLVSDFRKDFQFYKVREINNYHHAHDAYLNAVVGTALIKKYPKLESEFVYGDYKVYDVRKMIAKSEQEIGKATAKYFFYSNIMNFFKTEITLANGEIRKRPLIETNGETGEIVWDKGRDFATVRKVLSMPQVNIVKKTEVQTGGFSKESILPKRNSDKLIARKKDWDPKKYGGFDSPTVAYSVLVVAKVEKGKSKKLKSVKELLGITIMERSSFEKNPIDFLEAKGYKEVKKDLIIKLPKYSLFELENGRKRMLASAGELQKGNELALPSKYVNFLYLASHYEKLKGSPEDNEQKQLFVEQHKHYLDEIIEQISEFSKRVILADANLDKVLSAYNKHRDKPIREQAENIIHLFTLTNLGAPAAFKYFDTTIDRKRYTSTKEVLDATLIHQSITGLYETRIDLSQLGGDGGGSSGGSPAPGGTAPLEEEYRLFLEAPIQNVTLLEQWKREIPKVWAEINPPGLASTQAPIHVQLLSTALPVRVRQYPITLEAKRSLRETIRKFRAAGILRPVHSPWNTPLLPVRKSGTSEYRMVQDLREVNKRVETIHPTVPNPYTLLSLLPPDRIWYSVLDLKDAFFCIPLAPESQLIFAFEWADAEEGESGQLTWTRLPQGFKNSPTLFNEALNRDLQGFRLDHPSVSLLQYVDDLLIAADTQAACLSATRDLLMTLAELGYRVSGKKAQLCQEEVTYLGFKIHKGSRSLSNSRTQAILQIPVPKTKRQVREFLGTIGYCRLWIPGFAELAQPLYAATRPGNDPLVWGEKEEEAFQSLKLALTQPPALALPSLDKPFQLFVEETSGAAKGVLTQALGPWKRPVAYLSKRLDPVAAGWPRCLRAIAAAALLTREASKLTFGQDIEITSSHNLESLLRSPPDKWLTNARITQYQVLLLDPPRVRFKQTAALNPATLLPETDDTLPIHHCLDTLDSLTSTRPDLTDQPLAQAEATLFTDGSSYIRDGKRYAGAAVVTLDSVIWAEPLPIGTSAQKAELIALTKALEWSKDKSVNIYTDSRYAFATLHVHGMIYRERGWLTAGGKAIKNAPEILALLTAVWLPKRVAVMHCKGHQKDDAPTSTGNRRADEVAREVAIRPLSTQATISAGKRTADGSEFEKRTADGSEFESPKKKAKVE

SEQ ID NO: 1166 - protein, 2093 aa, synthetic construct
MPAAKRVKLDGGDKKYSIGLDIGTNSVGWAVITDEYKVPSKKFKVLGNTDRHSIKKNLIGALLFDSGETAEATRLKRTARRRYTRRKNRICYLQEIFSNEMAKVDDSFFHRLEESFLVEEDKKHERHPIFGNIVDEVAYHEKYPTIYHLRKKLVDSTDKADLRLIYLALAHMIKFRGHFLIEGDLNPDNSDVDKLFIQLVQTYNQLFEENPINASGVDAKAILSARLSKSRRLENLIAQLPGEKKNGLFGNLIALSLGLTPNFKSNFDLAEDAKLQLSKDTYDDDLDNLLAQIGDQYADLFLAAKNLSDAILLSDILRVNTEITKAPLSASMIKRYDEHHQDLTLLKALVRQQLPEKYKEIFFDQSKNGYAGYIDGGASQEEFYKFIKPILEKMDGTEELLVKLNREDLLRKQRTFDNGSIPHQIHLGELHAILRRQEDFYPFLKDNREKIEKILTFRIPYYVGPLARGNSRFAWMTRKSEETITPWNFEEVVDKGASAQSFIERMTNFDKNLPNEKVLPKHSLLYEYFTVYNELTKVKYVTEGMRKPAFLSGEQKKAIVDLLFKTNRKVTVKQLKEDYFKKIECFDSVEISGVEDRFNASLGTYHDLLKIIKDKDFLDNEENEDILEDIVLTLTLFEDREMIEERLKTYAHLFDDKVMKQLKRRRYTGWGRLSRKLINGIRDKQSGKTILDFLKSDGFANRNFMQLIHDDSLTFKEDIQKAQVSGQGDSLHEHIANLAGSPAIKKGILQTVKVVDELVKVMGRHKPENIVIEMARENQTTQKGQKNSRERMKRIEEGIKELGSQILKEHPVENTQLQNEKLYLYYLQNGRDMYVDQELDINRLSDYDVDHIVPQSFLKDDSIDNKVLTRSDKARGKSDNVPSEEVVKKMKNYWRQLLNAKLITQRKFDNLTKAERGGLSELDKAGFIKRQLVETRQITKHVAQILDSRMNTKYDENDKLIREVKVITLKSKLVSDFRKDFQFYKVREINNYHHAHDAYLNAVVGTALIKKYPKLESEFVYGDYKVYDVRKMIAKSEQEIGKATAKYFFYSNIMNFFKTEITLANGEIRKRPLIETNGETGEIVWDKGRDFATVRKVLSMPQVNIVKKTEVQTGGFSKESILPKRNSDKLIARKKDWDPKKYGGFDSPTVAYSVLVVAKVEKGKSKKLKSVKELLGITIMERSSFEKNPIDFLEAKGYKEVKKDLIIKLPKYSLFELENGRKRMLASAGELQKGNELALPSKYVNFLYLASHYEKLKGSPEDNEQKQLFVEQHKHYLDEIIEQISEFSKRVILADANLDKVLSAYNKHRDKPIREQAENIIHLFTLTNLGAPAAFKYFDTTIDRKRYTSTKEVLDATLIHQSITGLYETRIDLSQLGGDGGGGSGSSGGTAPLEEEYRLFLEAPIQNVTLLEQWKREIPKVWAEINPPGLASTQAPIHVQLLSTALPVRVRQYPITLEAKRSLRETIRKFRAAGILRPVHSPWNTPLLPVRKSGTSEYRMVQDLREVNKRVETIHPTVPNPYTLLSLLPPDRIWYSVLDLKDAFFCIPLAPESQLIFAFEWADAEEGESGQLTWTRLPQGFKNSPTLFNEALNRDLQGFRLDHPSVSLLQYVDDLLIAADTQAACLSATRDLLMTLAELGYRVSGKKAQLCQEEVTYLGFKIHKGSRSLSNSRTQAILQIPVPKTKRQVREFLGTIGYCRLWIPGFAELAQPLYAATRPGNDPLVWGEKEEEAFQSLKLALTQPPALALPSLDKPFQLFVEETSGAAKGVLTQALGPWKRPVAYLSKRLDPVAAGWPRCLRAIAAAALLTREASKLTFGQDIEITSSHNLESLLRSPPDKWLTNARITQYQVLLLDPPRVRFKQTAALNPATLLPETDDTLPIHHCLDTLDSLTSTRPDLTDQPLAQAEATLFTDGSSYIRDGKRYAGAAVVTLDSVIWAEPLPIGTSAQKAELIALTKALEWSKDKSVNIYTDSRYAFATLHVHGMIYRERGWLTAGGKAIKNAPEILALLTAVWLPKRVAVMHCKGHQKDDAPTSTGNRRADEVAREVAIRPLSTQATISAGKRTADGSEFEKRTADGSEFESPKKKAKVE

SEQ ID NO: 1167 - protein, 2098 aa, synthetic construct
MPAAKRVKLDGGDKKYSIGLDIGTNSVGWAVITDEYKVPSKKFKVLGNTDRHSIKKNLIGALLFDSGETAEATRLKRTARRRYTRRKNRICYLQEIFSNEMAKVDDSFFHRLEESFLVEEDKKHERHPIFGNIVDEVAYHEKYPTIYHLRKKLVDSTDKADLRLIYLALAHMIKFRGHFLIEGDLNPDNSDVDKLFIQLVQTYNQLFEENPINASGVDAKAILSARLSKSRRLENLIAQLPGEKKNGLFGNLIALSLGLTPNFKSNFDLAEDAKLQLSKDTYDDDLDNLLAQIGDQYADLFLAAKNLSDAILLSDILRVNTEITKAPLSASMIKRYDEHHQDLTLLKALVRQQLPEKYKEIFFDQSKNGYAGYIDGGASQEEFYKFIKPILEKMDGTEELLVKLNREDLLRKQRTFDNGSIPHQIHLGELHAILRRQEDFYPFLKDNREKIEKILTFRIPYYVGPLARGNSRFAWMTRKSEETITPWNFEEVVDKGASAQSFIERMTNFDKNLPNEKVLPKHSLLYEYFTVYNELTKVKYVTEGMRKPAFLSGEQKKAIVDLLFKTNRKVTVKQLKEDYFKKIECFDSVEISGVEDRFNASLGTYHDLLKIIKDKDFLDNEENEDILEDIVLTLTLFEDREMIEERLKTYAHLFDDKVMKQLKRRRYTGWGRLSRKLINGIRDKQSGKTILDFLKSDGFANRNFMQLIHDDSLTFKEDIQKAQVSGQGDSLHEHIANLAGSPAIKKGILQTVKVVDELVKVMGRHKPENIVIEMARENQTTQKGQKNSRERMKRIEEGIKELGSQILKEHPVENTQLQNEKLYLYYLQNGRDMYVDQELDINRLSDYDVDHIVPQSFLKDDSIDNKVLTRSDKARGKSDNVPSEEVVKKMKNYWRQLLNAKLITQRKFDNLTKAERGGLSELDKAGFIKRQLVETRQITKHVAQILDSRMNTKYDENDKLIREVKVITLKSKLVSDFRKDFQFYKVREINNYHHAHDAYLNAVVGTALIKKYPKLESEFVYGDYKVYDVRKMIAKSEQEIGKATAKYFFYSNIMNFFKTEITLANGEIRKRPLIETNGETGEIVWDKGRDFATVRKVLSMPQVNIVKKTEVQTGGFSKESILPKRNSDKLIARKKDWDPKKYGGFDSPTVAYSVLVVAKVEKGKSKKLKSVKELLGITIMERSSFEKNPIDFLEAKGYKEVKKDLIIKLPKYSLFELENGRKRMLASAGELQKGNELALPSKYVNFLYLASHYEKLKGSPEDNEQKQLFVEQHKHYLDEIIEQISEFSKRVILADANLDKVLSAYNKHRDKPIREQAENIIHLFTLTNLGAPAAFKYFDTTIDRKRYTSTKEVLDATLIHQSITGLYETRIDLSQLGGDGGEAAAKPAPGGGGGTAPLEEEYRLFLEAPIQNVTLLEQWKREIPKVWAEINPPGLASTQAPIHVQLLSTALPVRVRQYPITLEAKRSLRETIRKFRAAGILRPVHSPWNTPLLPVRKSGTSEYRMVQDLREVNKRVETIHPTVPNPYTLLSLLPPDRIWYSVLDLKDAFFCIPLAPESQLIFAFEWADAEEGESGQLTWTRLPQGFKNSPTLFNEALNRDLQGFRLDHPSVSLLQYVDDLLIAADTQAACLSATRDLLMTLAELGYRVSGKKAQLCQEEVTYLGFKIHKGSRSLSNSRTQAILQIPVPKTKRQVREFLGTIGYCRLWIPGFAELAQPLYAATRPGNDPLVWGEKEEEAFQSLKLALTQPPALALPSLDKPFQLFVEETSGAAKGVLTQALGPWKRPVAYLSKRLDPVAAGWPRCLRAIAAAALLTREASKLTFGQDIEITSSHNLESLLRSPPDKWLTNARITQYQVLLLDPPRVRFKQTAALNPATLLPETDDTLPIHHCLDTLDSLTSTRPDLTDQPLAQAEATLFTDGSSYIRDGKRYAGAAVVTLDSVIWAEPLPIGTSAQKAELIALTKALEWSKDKSVNIYTDSRYAFATLHVHGMIYRERGWLTAGGKAIKNAPEILALLTAVWLPKRVAVMHCKGHQKDDAPTSTGNRRADEVAREVAIRPLSTQATISAGKRTADGSEFEKRTADGSEFESPKKKAKVE

SEQ ID NO: 1168 - protein, 2093 aa, synthetic construct
MPAAKRVKLDGGDKKYSIGLDIGTNSVGWAVITDEYKVPSKKFKVLGNTDRHSIKKNLIGALLFDSGETAEATRLKRTARRRYTRRKNRICYLQEIFSNEMAKVDDSFFHRLEESFLVEEDKKHERHPIFGNIVDEVAYHEKYPTIYHLRKKLVDSTDKADLRLIYLALAHMIKFRGHFLIEGDLNPDNSDVDKLFIQLVQTYNQLFEENPINASGVDAKAILSARLSKSRRLENLIAQLPGEKKNGLFGNLIALSLGLTPNFKSNFDLAEDAKLQLSKDTYDDDLDNLLAQIGDQYADLFLAAKNLSDAILLSDILRVNTEITKAPLSASMIKRYDEHHQDLTLLKALVRQQLPEKYKEIFFDQSKNGYAGYIDGGASQEEFYKFIKPILEKMDGTEELLVKLNREDLLRKQRTFDNGSIPHQIHLGELHAILRRQEDFYPFLKDNREKIEKILTFRIPYYVGPLARGNSRFAWMTRKSEETITPWNFEEVVDKGASAQSFIERMTNFDKNLPNEKVLPKHSLLYEYFTVYNELTKVKYVTEGMRKPAFLSGEQKKAIVDLLFKTNRKVTVKQLKEDYFKKIECFDSVEISGVEDRFNASLGTYHDLLKIIKDKDFLDNEENEDILEDIVLTLTLFEDREMIEERLKTYAHLFDDKVMKQLKRRRYTGWGRLSRKLINGIRDKQSGKTILDFLKSDGFANRNFMQLIHDDSLTFKEDIQKAQVSGQGDSLHEHIANLAGSPAIKKGILQTVKVVDELVKVMGRHKPENIVIEMARENQTTQKGQKNSRERMKRIEEGIKELGSQILKEHPVENTQLQNEKLYLYYLQNGRDMYVDQELDINRLSDYDVDHIVPQSFLKDDSIDNKVLTRSDKARGKSDNVPSEEVVKKMKNYWRQLLNAKLITQRKFDNLTKAERGGLSELDKAGFIKRQLVETRQITKHVAQILDSRMNTKYDENDKLIREVKVITLKSKLVSDFRKDFQFYKVREINNYHHAHDAYLNAVVGTALIKKYPKLESEFVYGDYKVYDVRKMIAKSEQEIGKATAKYFFYSNIMNFFKTEITLANGEIRKRPLIETNGETGEIVWDKGRDFATVRKVLSMPQVNIVKKTEVQTGGFSKESILPKRNSDKLIARKKDWDPKKYGGFDSPTVAYSVLVVAKVEKGKSKKLKSVKELLGITIMERSSFEKNPIDFLEAKGYKEVKKDLIIKLPKYSLFELENGRKRMLASAGELQKGNELALPSKYVNFLYLASHYEKLKGSPEDNEQKQLFVEQHKHYLDEIIEQISEFSKRVILADANLDKVLSAYNKHRDKPIREQAENIIHLFTLTNLGAPAAFKYFDTTIDRKRYTSTKEVLDATLIHQSITGLYETRIDLSQLGGDGGGGGGGSPAPGGTLQLEEEYRLFEPESTQKQEMDIWLKNFPQAWAETGGMGTAHCQAPVLIQLKATATPISIRQYPMPHEAYQGIKPHIRRMLDQGILKPCQSPWNTPLLPVKKPGTEDYRPVQDLREVNKRVEDIHPTVPNPYNLLSTLPPSHPWYTVLDLKDAFFCLRLHSESQLLFAFEWRDPEIGLSGQLTWTRLPQGFKNSPTLFNEALHSDLADFRVRYPALVLLQYVDDLLLAAATRTECLEGTKALLETLGNKGYRASAKKAQICLQEVTYLGYSLKDGQRWLTKARKEAILSIPVPKNSRQVREFLGTAGYCRLWIPGFAELAAPLYPLTRPGTLFQWGTEQQLAFEDIKKALLSSPALGLPDITKPFELFIDENSGFAKGVLVQKLGPWKRPVAYLSKKLDTVASGWPPCLRMVAAIAILVKDAGKLTLGQPLTILTSHPVEALVRQPPNKWLSNARMTHYQAMLLDAERVHFGPTVSLNPATLLPLPSGGNHHDCLQILAETHGTRPDLTDQPLPDADLTWYTDGSSFIRNGEREAGAAVTTESEVIWAAPLPPGTSAQRAELIALTQALKMAEGKKLTVYTDSRYAFATTHVHGEIYRRRGWLTSEGKEIKNKNEILALLEALFLPKRLSIIHCPGHQKGDSPQAKGNRLADDTAKKAATETHSSLTVLPAGKRTADGSEFEKRTADGSEFESPKKKAKVE

SEQ ID NO: 1169 - protein, 2117 aa, synthetic construct
MPAAKRVKLDGGDKKYSIGLDIGTNSVGWAVITDEYKVPSKKFKVLGNTDRHSIKKNLIGALLFDSGETAEATRLKRTARRRYTRRKNRICYLQEIFSNEMAKVDDSFFHRLEESFLVEEDKKHERHPIFGNIVDEVAYHEKYPTIYHLRKKLVDSTDKADLRLIYLALAHMIKFRGHFLIEGDLNPDNSDVDKLFIQLVQTYNQLFEENPINASGVDAKAILSARLSKSRRLENLIAQLPGEKKNGLFGNLIALSLGLTPNFKSNFDLAEDAKLQLSKDTYDDDLDNLLAQIGDQYADLFLAAKNLSDAILLSDILRVNTEITKAPLSASMIKRYDEHHQDLTLLKALVRQQLPEKYKEIFFDQSKNGYAGYIDGGASQEEFYKFIKPILEKMDGTEELLVKLNREDLLRKQRTFDNGSIPHQIHLGELHAILRRQEDFYPFLKDNREKIEKILTFRIPYYVGPLARGNSRFAWMTRKSEETITPWNFEEVVDKGASAQSFIERMTNFDKNLPNEKVLPKHSLLYEYFTVYNELTKVKYVTEGMRKPAFLSGEQKKAIVDLLFKTNRKVTVKQLKEDYFKKIECFDSVEISGVEDRFNASLGTYHDLLKIIKDKDFLDNEENEDILEDIVLTLTLFEDREMIEERLKTYAHLFDDKVMKQLKRRRYTGWGRLSRKLINGIRDKQSGKTILDFLKSDGFANRNFMQLIHDDSLTFKEDIQKAQVSGQGDSLHEHIANLAGSPAIKKGILQTVKVVDELVKVMGRHKPENIVIEMARENQTTQKGQKNSRERMKRIEEGIKELGSQILKEHPVENTQLQNEKLYLYYLQNGRDMYVDQELDINRLSDYDVDHIVPQSFLKDDSIDNKVLTRSDKARGKSDNVPSEEVVKKMKNYWRQLLNAKLITQRKFDNLTKAERGGLSELDKAGFIKRQLVETRQITKHVAQILDSRMNTKYDENDKLIREVKVITLKSKLVSDFRKDFQFYKVREINNYHHAHDAYLNAVVGTALIKKYPKLESEFVYGDYKVYDVRKMIAKSEQEIGKATAKYFFYSNIMNFFKTEITLANGEIRKRPLIETNGETGEIVWDKGRDFATVRKVLSMPQVNIVKKTEVQTGGFSKESILPKRNSDKLIARKKDWDPKKYGGFDSPTVAYSVLVVAKVEKGKSKKLKSVKELLGITIMERSSFEKNPIDFLEAKGYKEVKKDLIIKLPKYSLFELENGRKRMLASAGELQKGNELALPSKYVNFLYLASHYEKLKGSPEDNEQKQLFVEQHKHYLDEIIEQISEFSKRVILADANLDKVLSAYNKHRDKPIREQAENIIHLFTLTNLGAPAAFKYFDTTIDRKRYTSTKEVLDATLIHQSITGLYETRIDLSQLGGDGGSGGSSGGSSGSETPGTSESATPESSGGSSGGSSGGTLQLEEEYRLFEPESTQKQEMDIWLKNFPQAWAETGGMGTAHCQAPVLIQLKATATPISIRQYPMPHEAYQGIKPHIRRMLDQGILKPCQSPWNTPLLPVKKPGTEDYRPVQDLREVNKRVEDIHPTVPNPYNLLSTLPPSHPWYTVLDLKDAFFCLRLHSESQLLFAFEWRDPEIGLSGQLTWTRLPQGFKNSPTLFNEALHSDLADFRVRYPALVLLQYVDDLLLAAATRTECLEGTKALLETLGNKGYRASAKKAQICLQEVTYLGYSLKDGQRWLTKARKEAILSIPVPKNSRQVREFLGTAGYCRLWIPGFAELAAPLYPLTRPGTLFQWGTEQQLAFEDIKKALLSSPALGLPDITKPFELFIDENSGFAKGVLVQKLGPWKRPVAYLSKKLDTVASGWPPCLRMVAAIAILVKDAGKLTLGQPLTILTSHPVEALVRQPPNKWLSNARMTHYQAMLLDAERVHFGPTVSLNPATLLPLPSGGNHHDCLQILAETHGTRPDLTDQPLPDADLTWYTDGSSFIRNGEREAGAAVTTESEVIWAAPLPPGTSAQRAELIALTQALKMAEGKKLTVYTDSRYAFATTHVHGEIYRRRGWLTSEGKEIKNKNEILALLEALFLPKRLSIIHCPGHQKGDSPQAKGNRLADDTAKKAATETHSSLTVLPAGKRTADGSEFEKRTADGSEFESPKKKAKVE

SEQ ID NO: 1170 - protein, 2130 aa, synthetic construct
MPAAKRVKLDGGDKKYSIGLDIGTNSVGWAVITDEYKVPSKKFKVLGNTDRHSIKKNLIGALLFDSGETAEATRLKRTARRRYTRRKNRICYLQEIFSNEMAKVDDSFFHRLEESFLVEEDKKHERHPIFGNIVDEVAYHEKYPTIYHLRKKLVDSTDKADLRLIYLALAHMIKFRGHFLIEGDLNPDNSDVDKLFIQLVQTYNQLFEENPINASGVDAKAILSARLSKSRRLENLIAQLPGEKKNGLFGNLIALSLGLTPNFKSNFDLAEDAKLQLSKDTYDDDLDNLLAQIGDQYADLFLAAKNLSDAILLSDILRVNTEITKAPLSASMIKRYDEHHQDLTLLKALVRQQLPEKYKEIFFDQSKNGYAGYIDGGASQEEFYKFIKPILEKMDGTEELLVKLNREDLLRKQRTFDNGSIPHQIHLGELHAILRRQEDFYPFLKDNREKIEKILTFRIPYYVGPLARGNSRFAWMTRKSEETITPWNFEEVVDKGASAQSFIERMTNFDKNLPNEKVLPKHSLLYEYFTVYNELTKVKYVTEGMRKPAFLSGEQKKAIVDLLFKTNRKVTVKQLKEDYFKKIECFDSVEISGVEDRFNASLGTYHDLLKIIKDKDFLDNEENEDILEDIVLTLTLFEDREMIEERLKTYAHLFDDKVMKQLKRRRYTGWGRLSRKLINGIRDKQSGKTILDFLKSDGFANRNFMQLIHDDSLTFKEDIQKAQVSGQGDSLHEHIANLAGSPAIKKGILQTVKVVDELVKVMGRHKPENIVIEMARENQTTQKGQKNSRERMKRIEEGIKELGSQILKEHPVENTQLQNEKLYLYYLQNGRDMYVDQELDINRLSDYDVDHIVPQSFLKDDSIDNKVLTRSDKARGKSDNVPSEEVVKKMKNYWRQLLNAKLITQRKFDNLTKAERGGLSELDKAGFIKRQLVETRQITKHVAQILDSRMNTKYDENDKLIREVKVITLKSKLVSDFRKDFQFYKVREINNYHHAHDAYLNAVVGTALIKKYPKLESEFVYGDYKVYDVRKMIAKSEQEIGKATAKYFFYSNIMNFFKTEITLANGEIRKRPLIETNGETGEIVWDKGRDFATVRKVLSMPQVNIVKKTEVQTGGFSKESILPKRNSDKLIARKKDWDPKKYGGFDSPTVAYSVLVVAKVEKGKSKKLKSVKELLGITIMERSSFEKNPIDFLEAKGYKEVKKDLIIKLPKYSLFELENGRKRMLASAGELQKGNELALPSKYVNFLYLASHYEKLKGSPEDNEQKQLFVEQHKHYLDEIIEQISEFSKRVILADANLDKVLSAYNKHRDKPIREQAENIIHLFTLTNLGAPAAFKYFDTTIDRKRYTSTKEVLDATLIHQSITGLYETRIDLSQLGGDGGAEAAAKEAAAKEAAAKEAAAKALEAEAAAKEAAAKEAAAKEAAAKAGGTLQLEEEYRLFEPESTQKQEMDIWLKNFPQAWAETGGMGTAHCQAPVLIQLKATATPISIRQYPMPHEAYQGIKPHIRRMLDQGILKPCQSPWNTPLLPVKKPGTEDYRPVQDLREVNKRVEDIHPTVPNPYNLLSTLPPSHPWYTVLDLKDAFFCLRLHSESQLLFAFEWRDPEIGLSGQLTWTRLPQGFKNSPTLFNEALHSDLADFRVRYPALVLLQYVDDLLLAAATRTECLEGTKALLETLGNKGYRASAKKAQICLQEVTYLGYSLKDGQRWLTKARKEAILSIPVPKNSRQVREFLGTAGYCRLWIPGFAELAAPLYPLTRPGTLFQWGTEQQLAFEDIKKALLSSPALGLPDITKPFELFIDENSGFAKGVLVQKLGPWKRPVAYLSKKLDTVASGWPPCLRMVAAIAILVKDAGKLTLGQPLTILTSHPVEALVRQPPNKWLSNARMTHYQAMLLDAERVHFGPTVSLNPATLLPLPSGGNHHDCLQILAETHGTRPDLTDQPLPDADLTWYTDGSSFIRNGEREAGAAVTTESEVIWAAPLPPGTSAQRAELIALTQALKMAEGKKLTVYTDSRYAFATTHVHGEIYRRRGWLTSEGKEIKNKNEILALLEALFLPKRLSIIHCPGHQKGDSPQAKGNRLADDTAKKAATETHSSLTVLPAGKRTADGSEFEKRTADGSEFESPKKKAKVE

SEQ ID NO: 1171 - protein, 2114 aa, synthetic construct
MPAAKRVKLDGGDKKYSIGLDIGTNSVGWAVITDEYKVPSKKFKVLGNTDRHSIKKNLIGALLFDSGETAEATRLKRTARRRYTRRKNRICYLQEIFSNEMAKVDDSFFHRLEESFLVEEDKKHERHPIFGNIVDEVAYHEKYPTIYHLRKKLVDSTDKADLRLIYLALAHMIKFRGHFLIEGDLNPDNSDVDKLFIQLVQTYNQLFEENPINASGVDAKAILSARLSKSRRLENLIAQLPGEKKNGLFGNLIALSLGLTPNFKSNFDLAEDAKLQLSKDTYDDDLDNLLAQIGDQYADLFLAAKNLSDAILLSDILRVNTEITKAPLSASMIKRYDEHHQDLTLLKALVRQQLPEKYKEIFFDQSKNGYAGYIDGGASQEEFYKFIKPILEKMDGTEELLVKLNREDLLRKQRTFDNGSIPHQIHLGELHAILRRQEDFYPFLKDNREKIEKILTFRIPYYVGPLARGNSRFAWMTRKSEETITPWNFEEVVDKGASAQSFIERMTNFDKNLPNEKVLPKHSLLYEYFTVYNELTKVKYVTEGMRKPAFLSGEQKKAIVDLLFKTNRKVTVKQLKEDYFKKIECFDSVEISGVEDRFNASLGTYHDLLKIIKDKDFLDNEENEDILEDIVLTLTLFEDREMIEERLKTYAHLFDDKVMKQLKRRRYTGWGRLSRKLINGIRDKQSGKTILDFLKSDGFANRNFMQLIHDDSLTFKEDIQKAQVSGQGDSLHEHIANLAGSPAIKKGILQTVKVVDELVKVMGRHKPENIVIEMARENQTTQKGQKNSRERMKRIEEGIKELGSQILKEHPVENTQLQNEKLYLYYLQNGRDMYVDQELDINRLSDYDVDHIVPQSFLKDDSIDNKVLTRSDKARGKSDNVPSEEVVKKMKNYWRQLLNAKLITQRKFDNLTKAERGGLSELDKAGFIKRQLVETRQITKHVAQILDSRMNTKYDENDKLIREVKVITLKSKLVSDFRKDFQFYKVREINNYHHAHDAYLNAVVGTALIKKYPKLESEFVYGDYKVYDVRKMIAKSEQEIGKATAKYFFYSNIMNFFKTEITLANGEIRKRPLIETNGETGEIVWDKGRDFATVRKVLSMPQVNIVKKTEVQTGGFSKESILPKRNSDKLIARKKDWDPKKYGGFDSPTVAYSVLVVAKVEKGKSKKLKSVKELLGITIMERSSFEKNPIDFLEAKGYKEVKKDLIIKLPKYSLFELENGRKRMLASAGELQKGNELALPSKYVNFLYLASHYEKLKGSPEDNEQKQLFVEQHKHYLDEIIEQISEFSKRVILADANLDKVLSAYNKHRDKPIREQAENIIHLFTLTNLGAPAAFKYFDTTIDRKRYTSTKEVLDATLIHQSITGLYETRIDLSQLGGDGGEAAAKEAAAKEAAAKEAAAKEAAAKEAAAKGGTLQLEEEYRLFEPESTQKQEMDIWLKNFPQAWAETGGMGTAHCQAPVLIQLKATATPISIRQYPMPHEAYQGIKPHIRRMLDQGILKPCQSPWNTPLLPVKKPGTEDYRPVQDLREVNKRVEDIHPTVPNPYNLLSTLPPSHPWYTVLDLKDAFFCLRLHSESQLLFAFEWRDPEIGLSGQLTWTRLPQGFKNSPTLFNEALHSDLADFRVRYPALVLLQYVDDLLLAAATRTECLEGTKALLETLGNKGYRASAKKAQICLQEVTYLGYSLKDGQRWLTKARKEAILSIPVPKNSRQVREFLGTAGYCRLWIPGFAELAAPLYPLTRPGTLFQWGTEQQLAFEDIKKALLSSPALGLPDITKPFELFIDENSGFAKGVLVQKLGPWKRPVAYLSKKLDTVASGWPPCLRMVAAIAILVKDAGKLTLGQPLTILTSHPVEALVRQPPNKWLSNARMTHYQAMLLDAERVHFGPTVSLNPATLLPLPSGGNHHDCLQILAETHGTRPDLTDQPLPDADLTWYTDGSSFIRNGEREAGAAVTTESEVIWAAPLPPGTSAQRAELIALTQALKMAEGKKLTVYTDSRYAFATTHVHGEIYRRRGWLTSEGKEIKNKNEILALLEALFLPKRLSIIHCPGHQKGDSPQAKGNRLADDTAKKAATETHSSLTVLPAGKRTADGSEFEKRTADGSEFESPKKKAKVE

SEQ ID NO: 1172 - protein, 2092 aa, synthetic construct
MPAAKRVKLDGGDKKYSIGLDIGTNSVGWAVITDEYKVPSKKFKVLGNTDRHSIKKNLIGALLFDSGETAEATRLKRTARRRYTRRKNRICYLQEIFSNEMAKVDDSFFHRLEESFLVEEDKKHERHPIFGNIVDEVAYHEKYPTIYHLRKKLVDSTDKADLRLIYLALAHMIKFRGHFLIEGDLNPDNSDVDKLFIQLVQTYNQLFEENPINASGVDAKAILSARLSKSRRLENLIAQLPGEKKNGLFGNLIALSLGLTPNFKSNFDLAEDAKLQLSKDTYDDDLDNLLAQIGDQYADLFLAAKNLSDAILLSDILRVNTEITKAPLSASMIKRYDEHHQDLTLLKALVRQQLPEKYKEIFFDQSKNGYAGYIDGGASQEEFYKFIKPILEKMDGTEELLVKLNREDLLRKQRTFDNGSIPHQIHLGELHAILRRQEDFYPFLKDNREKIEKILTFRIPYYVGPLARGNSRFAWMTRKSEETITPWNFEEVVDKGASAQSFIERMTNFDKNLPNEKVLPKHSLLYEYFTVYNELTKVKYVTEGMRKPAFLSGEQKKAIVDLLFKTNRKVTVKQLKEDYFKKIECFDSVEISGVEDRFNASLGTYHDLLKIIKDKDFLDNEENEDILEDIVLTLTLFEDREMIEERLKTYAHLFDDKVMKQLKRRRYTGWGRLSRKLINGIRDKQSGKTILDFLKSDGFANRNFMQLIHDDSLTFKEDIQKAQVSGQGDSLHEHIANLAGSPAIKKGILQTVKVVDELVKVMGRHKPENIVIEMARENQTTQKGQKNSRERMKRIEEGIKELGSQILKEHPVENTQLQNEKLYLYYLQNGRDMYVDQELDINRLSDYDVDHIVPQSFLKDDSIDNKVLTRSDKARGKSDNVPSEEVVKKMKNYWRQLLNAKLITQRKFDNLTKAERGGLSELDKAGFIKRQLVETRQITKHVAQILDSRMNTKYDENDKLIREVKVITLKSKLVSDFRKDFQFYKVREINNYHHAHDAYLNAVVGTALIKKYPKLESEFVYGDYKVYDVRKMIAKSEQEIGKATAKYFFYSNIMNFFKTEITLANGEIRKRPLIETNGETGEIVWDKGRDFATVRKVLSMPQVNIVKKTEVQTGGFSKESILPKRNSDKLIARKKDWDPKKYGGFDSPTVAYSVLVVAKVEKGKSKKLKSVKELLGITIMERSSFEKNPIDFLEAKGYKEVKKDLIIKLPKYSLFELENGRKRMLASAGELQKGNELALPSKYVNFLYLASHYEKLKGSPEDNEQKQLFVEQHKHYLDEIIEQISEFSKRVILADANLDKVLSAYNKHRDKPIREQAENIIHLFTLTNLGAPAAFKYFDTTIDRKRYTSTKEVLDATLIHQSITGLYETRIDLSQLGGDGGEAAAKGGSGGTLQLEEEYRLFEPESTQKQEMDIWLKNFPQAWAETGGMGTAHCQAPVLIQLKATATPISIRQYPMPHEAYQGIKPHIRRMLDQGILKPCQSPWNTPLLPVKKPGTEDYRPVQDLREVNKRVEDIHPTVPNPYNLLSTLPPSHPWYTVLDLKDAFFCLRLHSESQLLFAFEWRDPEIGLSGQLTWTRLPQGFKNSPTLFNEALHSDLADFRVRYPALVLLQYVDDLLLAAATRTECLEGTKALLETLGNKGYRASAKKAQICLQEVTYLGYSLKDGQRWLTKARKEAILSIPVPKNSRQVREFLGTAGYCRLWIPGFAELAAPLYPLTRPGTLFQWGTEQQLAFEDIKKALLSSPALGLPDITKPFELFIDENSGFAKGVLVQKLGPWKRPVAYLSKKLDTVASGWPPCLRMVAAIAILVKDAGKLTLGQPLTILTSHPVEALVRQPPNKWLSNARMTHYQAMLLDAERVHFGPTVSLNPATLLPLPSGGNHHDCLQILAETHGTRPDLTDQPLPDADLTWYTDGSSFIRNGEREAGAAVTTESEVIWAAPLPPGTSAQRAELIALTQALKMAEGKKLTVYTDSRYAFATTHVHGEIYRRRGWLTSEGKEIKNKNEILALLEALFLPKRLSIIHCPGHQKGDSPQAKGNRLADDTAKKAATETHSSLTVLPAGKRTADGSEFEKRTADGSEFESPKKKAKVE

SEQ ID NO: 1173 - protein, 2095 aa, synthetic construct
MPAAKRVKLDGGDKKYSIGLDIGTNSVGWAVITDEYKVPSKKFKVLGNTDRHSIKKNLIGALLFDSGETAEATRLKRTARRRYTRRKNRICYLQEIFSNEMAKVDDSFFHRLEESFLVEEDKKHERHPIFGNIVDEVAYHEKYPTIYHLRKKLVDSTDKADLRLIYLALAHMIKFRGHFLIEGDLNPDNSDVDKLFIQLVQTYNQLFEENPINASGVDAKAILSARLSKSRRLENLIAQLPGEKKNGLFGNLIALSLGLTPNFKSNFDLAEDAKLQLSKDTYDDDLDNLLAQIGDQYADLFLAAKNLSDAILLSDILRVNTEITKAPLSASMIKRYDEHHQDLTLLKALVRQQLPEKYKEIFFDQSKNGYAGYIDGGASQEEFYKFIKPILEKMDGTEELLVKLNREDLLRKQRTFDNGSIPHQIHLGELHAILRRQEDFYPFLKDNREKIEKILTFRIPYYVGPLARGNSRFAWMTRKSEETITPWNFEEVVDKGASAQSFIERMTNFDKNLPNEKVLPKHSLLYEYFTVYNELTKVKYVTEGMRKPAFLSGEQKKAIVDLLFKTNRKVTVKQLKEDYFKKIECFDSVEISGVEDRFNASLGTYHDLLKIIKDKDFLDNEENEDILEDIVLTLTLFEDREMIEERLKTYAHLFDDKVMKQLKRRRYTGWGRLSRKLINGIRDKQSGKTILDFLKSDGFANRNFMQLIHDDSLTFKEDIQKAQVSGQGDSLHEHIANLAGSPAIKKGILQTVKVVDELVKVMGRHKPENIVIEMARENQTTQKGQKNSRERMKRIEEGIKELGSQILKEHPVENTQLQNEKLYLYYLQNGRDMYVDQELDINRLSDYDVDHIVPQSFLKDDSIDNKVLTRSDKARGKSDNVPSEEVVKKMKNYWRQLLNAKLITQRKFDNLTKAERGGLSELDKAGFIKRQLVETRQITKHVAQILDSRMNTKYDENDKLIREVKVITLKSKLVSDFRKDFQFYKVREINNYHHAHDAYLNAVVGTALIKKYPKLESEFVYGDYKVYDVRKMIAKSEQEIGKATAKYFFYSNIMNFFKTEITLANGEIRKRPLIETNGETGEIVWDKGRDFATVRKVLSMPQVNIVKKTEVQTGGFSKESILPKRNSDKLIARKKDWDPKKYGGFDSPTVAYSVLVVAKVEKGKSKKLKSVKELLGITIMERSSFEKNPIDFLEAKGYKEVKKDLIIKLPKYSLFELENGRKRMLASAGELQKGNELALPSKYVNFLYLASHYEKLKGSPEDNEQKQLFVEQHKHYLDEIIEQISEFSKRVILADANLDKVLSAYNKHRDKPIREQAENIIHLFTLTNLGAPAAFKYFDTTIDRKRYTSTKEVLDATLIHQSITGLYETRIDLSQLGGDGGPAPAPAPAPAPGGTLQLEEEYRLFEPESTQKQEMDIWLKNFPQAWAETGGMGTAHCQAPVLIQLKATATPISIRQYPMPHEAYQGIKPHIRRMLDQGILKPCQSPWNTPLLPVKKPGTEDYRPVQDLREVNKRVEDIHPTVPNPYNLLSTLPPSHPWYTVLDLKDAFFCLRLHSESQLLFAFEWRDPEIGLSGQLTWTRLPQGFKNSPTLFNEALHSDLADFRVRYPALVLLQYVDDLLLAAATRTECLEGTKALLETLGNKGYRASAKKAQICLQEVTYLGYSLKDGQRWLTKARKEAILSIPVPKNSRQVREFLGTAGYCRLWIPGFAELAAPLYPLTRPGTLFQWGTEQQLAFEDIKKALLSSPALGLPDITKPFELFIDENSGFAKGVLVQKLGPWKRPVAYLSKKLDTVASGWPPCLRMVAAIAILVKDAGKLTLGQPLTILTSHPVEALVRQPPNKWLSNARMTHYQAMLLDAERVHFGPTVSLNPATLLPLPSGGNHHDCLQILAETHGTRPDLTDQPLPDADLTWYTDGSSFIRNGEREAGAAVTTESEVIWAAPLPPGTSAQRAELIALTQALKMAEGKKLTVYTDSRYAFATTHVHGEIYRRRGWLTSEGKEIKNKNEILALLEALFLPKRLSIIHCPGHQKGDSPQAKGNRLADDTAKKAATETHSSLTVLPAGKRTADGSEFEKRTADGSEFESPKKKAKVE

SEQ ID NO: 1174 - protein, 2099 aa, synthetic construct
MPAAKRVKLDGGDKKYSIGLDIGTNSVGWAVITDEYKVPSKKFKVLGNTDRHSIKKNLIGALLFDSGETAEATRLKRTARRRYTRRKNRICYLQEIFSNEMAKVDDSFFHRLEESFLVEEDKKHERHPIFGNIVDEVAYHEKYPTIYHLRKKLVDSTDKADLRLIYLALAHMIKFRGHFLIEGDLNPDNSDVDKLFIQLVQTYNQLFEENPINASGVDAKAILSARLSKSRRLENLIAQLPGEKKNGLFGNLIALSLGLTPNFKSNFDLAEDAKLQLSKDTYDDDLDNLLAQIGDQYADLFLAAKNLSDAILLSDILRVNTEITKAPLSASMIKRYDEHHQDLTLLKALVRQQLPEKYKEIFFDQSKNGYAGYIDGGASQEEFYKFIKPILEKMDGTEELLVKLNREDLLRKQRTFDNGSIPHQIHLGELHAILRRQEDFYPFLKDNREKIEKILTFRIPYYVGPLARGNSRFAWMTRKSEETITPWNFEEVVDKGASAQSFIERMTNFDKNLPNEKVLPKHSLLYEYFTVYNELTKVKYVTEGMRKPAFLSGEQKKAIVDLLFKTNRKVTVKQLKEDYFKKIECFDSVEISGVEDRFNASLGTYHDLLKIIKDKDFLDNEENEDILEDIVLTLTLFEDREMIEERLKTYAHLFDDKVMKQLKRRRYTGWGRLSRKLINGIRDKQSGKTILDFLKSDGFANRNFMQLIHDDSLTFKEDIQKAQVSGQGDSLHEHIANLAGSPAIKKGILQTVKVVDELVKVMGRHKPENIVIEMARENQTTQKGQKNSRERMKRIEEGIKELGSQILKEHPVENTQLQNEKLYLYYLQNGRDMYVDQELDINRLSDYDVDHIVPQSFLKDDSIDNKVLTRSDKARGKSDNVPSEEVVKKMKNYWRQLLNAKLITQRKFDNLTKAERGGLSELDKAGFIKRQLVETRQITKHVAQILDSRMNTKYDENDKLIREVKVITLKSKLVSDFRKDFQFYKVREINNYHHAHDAYLNAVVGTALIKKYPKLESEFVYGDYKVYDVRKMIAKSEQEIGKATAKYFFYSNIMNFFKTEITLANGEIRKRPLIETNGETGEIVWDKGRDFATVRKVLSMPQVNIVKKTEVQTGGFSKESILPKRNSDKLIARKKDWDPKKYGGFDSPTVAYSVLVVAKVEKGKSKKLKSVKELLGITIMERSSFEKNPIDFLEAKGYKEVKKDLIIKLPKYSLFELENGRKRMLASAGELQKGNELALPSKYVNFLYLASHYEKLKGSPEDNEQKQLFVEQHKHYLDEIIEQISEFSKRVILADANLDKVLSAYNKHRDKPIREQAENIIHLFTLTNLGAPAAFKYFDTTIDRKRYTSTKEVLDATLIHQSITGLYETRIDLSQLGGDGGGGGGSGGGGSGGGGSGGTLQLEEEYRLFEPESTQKQEMDIWLKNFPQAWAETGGMGTAHCQAPVLIQLKATATPISIRQYPMPHEAYQGIKPHIRRMLDQGILKPCQSPWNTPLLPVKKPGTEDYRPVQDLREVNKRVEDIHPTVPNPYNLLSTLPPSHPWYTVLDLKDAFFCLRLHSESQLLFAFEWRDPEIGLSGQLTWTRLPQGFKNSPTLFNEALHSDLADFRVRYPALVLLQYVDDLLLAAATRTECLEGTKALLETLGNKGYRASAKKAQICLQEVTYLGYSLKDGQRWLTKARKEAILSIPVPKNSRQVREFLGTAGYCRLWIPGFAELAAPLYPLTRPGTLFQWGTEQQLAFEDIKKALLSSPALGLPDITKPFELFIDENSGFAKGVLVQKLGPWKRPVAYLSKKLDTVASGWPPCLRMVAAIAILVKDAGKLTLGQPLTILTSHPVEALVRQPPNKWLSNARMTHYQAMLLDAERVHFGPTVSLNPATLLPLPSGGNHHDCLQILAETHGTRPDLTDQPLPDADLTWYTDGSSFIRNGEREAGAAVTTESEVIWAAPLPPGTSAQRAELIALTQALKMAEGKKLTVYTDSRYAFATTHVHGEIYRRRGWLTSEGKEIKNKNEILALLEALFLPKRLSIIHCPGHQKGDSPQAKGNRLADDTAKKAATETHSSLTVLPAGKRTADGSEFEKRTADGSEFESPKKKAKVE

SEQ ID NO: 1175 - protein, 2109 aa, synthetic construct
MPAAKRVKLDGGDKKYSIGLDIGTNSVGWAVITDEYKVPSKKFKVLGNTDRHSIKKNLIGALLFDSGETAEATRLKRTARRRYTRRKNRICYLQEIFSNEMAKVDDSFFHRLEESFLVEEDKKHERHPIFGNIVDEVAYHEKYPTIYHLRKKLVDSTDKADLRLIYLALAHMIKFRGHFLIEGDLNPDNSDVDKLFIQLVQTYNQLFEENPINASGVDAKAILSARLSKSRRLENLIAQLPGEKKNGLFGNLIALSLGLTPNFKSNFDLAEDAKLQLSKDTYDDDLDNLLAQIGDQYADLFLAAKNLSDAILLSDILRVNTEITKAPLSASMIKRYDEHHQDLTLLKALVRQQLPEKYKEIFFDQSKNGYAGYIDGGASQEEFYKFIKPILEKMDGTEELLVKLNREDLLRKQRTFDNGSIPHQIHLGELHAILRRQEDFYPFLKDNREKIEKILTFRIPYYVGPLARGNSRFAWMTRKSEETITPWNFEEVVDKGASAQSFIERMTNFDKNLPNEKVLPKHSLLYEYFTVYNELTKVKYVTEGMRKPAFLSGEQKKAIVDLLFKTNRKVTVKQLKEDYFKKIECFDSVEISGVEDRFNASLGTYHDLLKIIKDKDFLDNEENEDILEDIVLTLTLFEDREMIEERLKTYAHLFDDKVMKQLKRRRYTGWGRLSRKLINGIRDKQSGKTILDFLKSDGFANRNFMQLIHDDSLTFKEDIQKAQVSGQGDSLHEHIANLAGSPAIKKGILQTVKVVDELVKVMGRHKPENIVIEMARENQTTQKGQKNSRERMKRIEEGIKELGSQILKEHPVENTQLQNEKLYLYYLQNGRDMYVDQELDINRLSDYDVDHIVPQSFLKDDSIDNKVLTRSDKARGKSDNVPSEEVVKKMKNYWRQLLNAKLITQRKFDNLTKAERGGLSELDKAGFIKRQLVETRQITKHVAQILDSRMNTKYDENDKLIREVKVITLKSKLVSDFRKDFQFYKVREINNYHHAHDAYLNAVVGTALIKKYPKLESEFVYGDYKVYDVRKMIAKSEQEIGKATAKYFFYSNIMNFFKTEITLANGEIRKRPLIETNGETGEIVWDKGRDFATVRKVLSMPQVNIVKKTEVQTGGFSKESILPKRNSDKLIARKKDWDPKKYGGFDSPTVAYSVLVVAKVEKGKSKKLKSVKELLGITIMERSSFEKNPIDFLEAKGYKEVKKDLIIKLPKYSLFELENGRKRMLASAGELQKGNELALPSKYVNFLYLASHYEKLKGSPEDNEQKQLFVEQHKHYLDEIIEQISEFSKRVILADANLDKVLSAYNKHRDKPIREQAENIIHLFTLTNLGAPAAFKYFDTTIDRKRYTSTKEVLDATLIHQSITGLYETRIDLSQLGGDGGEAAAKEAAAKEAAAKEAAAKEAAAKGGTLQLEEEYRLFEPESTQKQEMDIWLKNFPQAWAETGGMGTAHCQAPVLIQLKATATPISIRQYPMPHEAYQGIKPHIRRMLDQGILKPCQSPWNTPLLPVKKPGTEDYRPVQDLREVNKRVEDIHPTVPNPYNLLSTLPPSHPWYTVLDLKDAFFCLRLHSESQLLFAFEWRDPEIGLSGQLTWTRLPQGFKNSPTLFNEALHSDLADFRVRYPALVLLQYVDDLLLAAATRTECLEGTKALLETLGNKGYRASAKKAQICLQEVTYLGYSLKDGQRWLTKARKEAILSIPVPKNSRQVREFLGTAGYCRLWIPGFAELAAPLYPLTRPGTLFQWGTEQQLAFEDIKKALLSSPALGLPDITKPFELFIDENSGFAKGVLVQKLGPWKRPVAYLSKKLDTVASGWPPCLRMVAAIAILVKDAGKLTLGQPLTILTSHPVEALVRQPPNKWLSNARMTHYQAMLLDAERVHFGPTVSLNPATLLPLPSGGNHHDCLQILAETHGTRPDLTDQPLPDADLTWYTDGSSFIRNGEREAGAAVTTESEVIWAAPLPPGTSAQRAELIALTQALKMAEGKKLTVYTDSRYAFATTHVHGEIYRRRGWLTSEGKEIKNKNEILALLEALFLPKRLSIIHCPGHQKGDSPQAKGNRLADDTAKKAATETHSSLTVLPAGKRTADGSEFEKRTADGSEFESPKKKAKVE

SEQ ID NO: 1176 - protein, 2095 aa, synthetic construct
MPAAKRVKLDGGDKKYSIGLDIGTNSVGWAVITDEYKVPSKKFKVLGNTDRHSIKKNLIGALLFDSGETAEATRLKRTARRRYTRRKNRICYLQEIFSNEMAKVDDSFFHRLEESFLVEEDKKHERHPIFGNIVDEVAYHEKYPTIYHLRKKLVDSTDKADLRLIYLALAHMIKFRGHFLIEGDLNPDNSDVDKLFIQLVQTYNQLFEENPINASGVDAKAILSARLSKSRRLENLIAQLPGEKKNGLFGNLIALSLGLTPNFKSNFDLAEDAKLQLSKDTYDDDLDNLLAQIGDQYADLFLAAKNLSDAILLSDILRVNTEITKAPLSASMIKRYDEHHQDLTLLKALVRQQLPEKYKEIFFDQSKNGYAGYIDGGASQEEFYKFIKPILEKMDGTEELLVKLNREDLLRKQRTFDNGSIPHQIHLGELHAILRRQEDFYPFLKDNREKIEKILTFRIPYYVGPLARGNSRFAWMTRKSEETITPWNFEEVVDKGASAQSFIERMTNFDKNLPNEKVLPKHSLLYEYFTVYNELTKVKYVTEGMRKPAFLSGEQKKAIVDLLFKTNRKVTVKQLKEDYFKKIECFDSVEISGVEDRFNASLGTYHDLLKIIKDKDFLDNEENEDILEDIVLTLTLFEDREMIEERLKTYAHLFDDKVMKQLKRRRYTGWGRLSRKLINGIRDKQSGKTILDFLKSDGFANRNFMQLIHDDSLTFKEDIQKAQVSGQGDSLHEHIANLAGSPAIKKGILQTVKVVDELVKVMGRHKPENIVIEMARENQTTQKGQKNSRERMKRIEEGIKELGSQILKEHPVENTQLQNEKLYLYYLQNGRDMYVDQELDINRLSDYDVDHIVPQSFLKDDSIDNKVLTRSDKARGKSDNVPSEEVVKKMKNYWRQLLNAKLITQRKFDNLTKAERGGLSELDKAGFIKRQLVETRQITKHVAQILDSRMNTKYDENDKLIREVKVITLKSKLVSDFRKDFQFYKVREINNYHHAHDAYLNAVVGTALIKKYPKLESEFVYGDYKVYDVRKMIAKSEQEIGKATAKYFFYSNIMNFFKTEITLANGEIRKRPLIETNGETGEIVWDKGRDFATVRKVLSMPQVNIVKKTEVQTGGFSKESILPKRNSDKLIARKKDWDPKKYGGFDSPTVAYSVLVVAKVEKGKSKKLKSVKELLGITIMERSSFEKNPIDFLEAKGYKEVKKDLIIKLPKYSLFELENGRKRMLASAGELQKGNELALPSKYVNFLYLASHYEKLKGSPEDNEQKQLFVEQHKHYLDEIIEQISEFSKRVILADANLDKVLSAYNKHRDKPIREQAENIIHLFTLTNLGAPAAFKYFDTTIDRKRYTSTKEVLDATLIHQSITGLYETRIDLSQLGGDGGGGSPAPEAAAKGGTLQLEEEYRLFEPESTQKQEMDIWLKNFPQAWAETGGMGTAHCQAPVLIQLKATATPISIRQYPMPHEAYQGIKPHIRRMLDQGILKPCQSPWNTPLLPVKKPGTEDYRPVQDLREVNKRVEDIHPTVPNPYNLLSTLPPSHPWYTVLDLKDAFFCLRLHSESQLLFAFEWRDPEIGLSGQLTWTRLPQGFKNSPTLFNEALHSDLADFRVRYPALVLLQYVDDLLLAAATRTECLEGTKALLETLGNKGYRASAKKAQICLQEVTYLGYSLKDGQRWLTKARKEAILSIPVPKNSRQVREFLGTAGYCRLWIPGFAELAAPLYPLTRPGTLFQWGTEQQLAFEDIKKALLSSPALGLPDITKPFELFIDENSGFAKGVLVQKLGPWKRPVAYLSKKLDTVASGWPPCLRMVAAIAILVKDAGKLTLGQPLTILTSHPVEALVRQPPNKWLSNARMTHYQAMLLDAERVHFGPTVSLNPATLLPLPSGGNHHDCLQILAETHGTRPDLTDQPLPDADLTWYTDGSSFIRNGEREAGAAVTTESEVIWAAPLPPGTSAQRAELIALTQALKMAEGKKLTVYTDSRYAFATTHVHGEIYRRRGWLTSEGKEIKNKNEILALLEALFLPKRLSIIHCPGHQKGDSPQAKGNRLADDTAKKAATETHSSLTVLPAGKRTADGSEFEKRTADGSEFESPKKKAKVE

SEQ ID NO: 1177 - protein, 2102 aa, synthetic construct
MPAAKRVKLDGGDKKYSIGLDIGTNSVGWAVITDEYKVPSKKFKVLGNTDRHSIKKNLIGALLFDSGETAEATRLKRTARRRYTRRKNRICYLQEIFSNEMAKVDDSFFHRLEESFLVEEDKKHERHPIFGNIVDEVAYHEKYPTIYHLRKKLVDSTDKADLRLIYLALAHMIKFRGHFLIEGDLNPDNSDVDKLFIQLVQTYNQLFEENPINASGVDAKAILSARLSKSRRLENLIAQLPGEKKNGLFGNLIALSLGLTPNFKSNFDLAEDAKLQLSKDTYDDDLDNLLAQIGDQYADLFLAAKNLSDAILLSDILRVNTEITKAPLSASMIKRYDEHHQDLTLLKALVRQQLPEKYKEIFFDQSKNGYAGYIDGGASQEEFYKFIKPILEKMDGTEELLVKLNREDLLRKQRTFDNGSIPHQIHLGELHAILRRQEDFYPFLKDNREKIEKILTFRIPYYVGPLARGNSRFAWMTRKSEETITPWNFEEVVDKGASAQSFIERMTNFDKNLPNEKVLPKHSLLYEYFTVYNELTKVKYVTEGMRKPAFLSGEQKKAIVDLLFKTNRKVTVKQLKEDYFKKIECFDSVEISGVEDRFNASLGTYHDLLKIIKDKDFLDNEENEDILEDIVLTLTLFEDREMIEERLKTYAHLFDDKVMKQLKRRRYTGWGRLSRKLINGIRDKQSGKTILDFLKSDGFANRNFMQLIHDDSLTFKEDIQKAQVSGQGDSLHEHIANLAGSPAIKKGILQTVKVVDELVKVMGRHKPENIVIEMARENQTTQKGQKNSRERMKRIEEGIKELGSQILKEHPVENTQLQNEKLYLYYLQNGRDMYVDQELDINRLSDYDVDHIVPQSFLKDDSIDNKVLTRSDKARGKSDNVPSEEVVKKMKNYWRQLLNAKLITQRKFDNLTKAERGGLSELDKAGFIKRQLVETRQITKHVAQILDSRMNTKYDENDKLIREVKVITLKSKLVSDFRKDFQFYKVREINNYHHAHDAYLNAVVGTALIKKYPKLESEFVYGDYKVYDVRKMIAKSEQEIGKATAKYFFYSNIMNFFKTEITLANGEIRKRPLIETNGETGEIVWDKGRDFATVRKVLSMPQVNIVKKTEVQTGGFSKESILPKRNSDKLIARKKDWDPKKYGGFDSPTVAYSVLVVAKVEKGKSKKLKSVKELLGITIMERSSFEKNPIDFLEAKGYKEVKKDLIIKLPKYSLFELENGRKRMLASAGELQKGNELALPSKYVNFLYLASHYEKLKGSPEDNEQKQLFVEQHKHYLDEIIEQISEFSKRVILADANLDKVLSAYNKHRDKPIREQAENIIHLFTLTNLGAPAAFKYFDTTIDRKRYTSTKEVLDATLIHQSITGLYETRIDLSQLGGDGGGGSGGSGGSGGSGGSGGSGGTLQLEEEYRLFEPESTQKQEMDIWLKNFPQAWAETGGMGTAHCQAPVLIQLKATATPISIRQYPMPHEAYQGIKPHIRRMLDQGILKPCQSPWNTPLLPVKKPGTEDYRPVQDLREVNKRVEDIHPTVPNPYNLLSTLPPSHPWYTVLDLKDAFFCLRLHSESQLLFAFEWRDPEIGLSGQLTWTRLPQGFKNSPTLFNEALHSDLADFRVRYPALVLLQYVDDLLLAAATRTECLEGTKALLETLGNKGYRASAKKAQICLQEVTYLGYSLKDGQRWLTKARKEAILSIPVPKNSRQVREFLGTAGYCRLWIPGFAELAAPLYPLTRPGTLFQWGTEQQLAFEDIKKALLSSPALGLPDITKPFELFIDENSGFAKGVLVQKLGPWKRPVAYLSKKLDTVASGWPPCLRMVAAIAILVKDAGKLTLGQPLTILTSHPVEALVRQPPNKWLSNARMTHYQAMLLDAERVHFGPTVSLNPATLLPLPSGGNHHDCLQILAETHGTRPDLTDQPLPDADLTWYTDGSSFIRNGEREAGAAVTTESEVIWAAPLPPGTSAQRAELIALTQALKMAEGKKLTVYTDSRYAFATTHVHGEIYRRRGWLTSEGKEIKNKNEILALLEALFLPKRLSIIHCPGHQKGDSPQAKGNRLADDTAKKAATETHSSLTVLPAGKRTADGSEFEKRTADGSEFESPKKKAKVE

SEQ ID NO: 1178 - protein, 2095 aa, synthetic construct
MPAAKRVKLDGGDKKYSIGLDIGTNSVGWAVITDEYKVPSKKFKVLGNTDRHSIKKNLIGALLFDSGETAEATRLKRTARRRYTRRKNRICYLQEIFSNEMAKVDDSFFHRLEESFLVEEDKKHERHPIFGNIVDEVAYHEKYPTIYHLRKKLVDSTDKADLRLIYLALAHMIKFRGHFLIEGDLNPDNSDVDKLFIQLVQTYNQLFEENPINASGVDAKAILSARLSKSRRLENLIAQLPGEKKNGLFGNLIALSLGLTPNFKSNFDLAEDAKLQLSKDTYDDDLDNLLAQIGDQYADLFLAAKNLSDAILLSDILRVNTEITKAPLSASMIKRYDEHHQDLTLLKALVRQQLPEKYKEIFFDQSKNGYAGYIDGGASQEEFYKFIKPILEKMDGTEELLVKLNREDLLRKQRTFDNGSIPHQIHLGELHAILRRQEDFYPFLKDNREKIEKILTFRIPYYVGPLARGNSRFAWMTRKSEETITPWNFEEVVDKGASAQSFIERMTNFDKNLPNEKVLPKHSLLYEYFTVYNELTKVKYVTEGMRKPAFLSGEQKKAIVDLLFKTNRKVTVKQLKEDYFKKIECFDSVEISGVEDRFNASLGTYHDLLKIIKDKDFLDNEENEDILEDIVLTLTLFEDREMIEERLKTYAHLFDDKVMKQLKRRRYTGWGRLSRKLINGIRDKQSGKTILDFLKSDGFANRNFMQLIHDDSLTFKEDIQKAQVSGQGDSLHEHIANLAGSPAIKKGILQTVKVVDELVKVMGRHKPENIVIEMARENQTTQKGQKNSRERMKRIEEGIKELGSQILKEHPVENTQLQNEKLYLYYLQNGRDMYVDQELDINRLSDYDVDHIVPQSFLKDDSIDNKVLTRSDKARGKSDNVPSEEVVKKMKNYWRQLLNAKLITQRKFDNLTKAERGGLSELDKAGFIKRQLVETRQITKHVAQILDSRMNTKYDENDKLIREVKVITLKSKLVSDFRKDFQFYKVREINNYHHAHDAYLNAVVGTALIKKYPKLESEFVYGDYKVYDVRKMIAKSEQEIGKATAKYFFYSNIMNFFKTEITLANGEIRKRPLIETNGETGEIVWDKGRDFATVRKVLSMPQVNIVKKTEVQTGGFSKESILPKRNSDKLIARKKDWDPKKYGGFDSPTVAYSVLVVAKVEKGKSKKLKSVKELLGITIMERSSFEKNPIDFLEAKGYKEVKKDLIIKLPKYSLFELENGRKRMLASAGELQKGNELALPSKYVNFLYLASHYEKLKGSPEDNEQKQLFVEQHKHYLDEIIEQISEFSKRVILADANLDKVLSAYNKHRDKPIREQAENIIHLFTLTNLGAPAAFKYFDTTIDRKRYTSTKEVLDATLIHQSITGLYETRIDLSQLGGDGGEAAAKGGSGSSGGTLQLEEEYRLFEPESTQKQEMDIWLKNFPQAWAETGGMGTAHCQAPVLIQLKATATPISIRQYPMPHEAYQGIKPHIRRMLDQGILKPCQSPWNTPLLPVKKPGTEDYRPVQDLREVNKRVEDIHPTVPNPYNLLSTLPPSHPWYTVLDLKDAFFCLRLHSESQLLFAFEWRDPEIGLSGQLTWTRLPQGFKNSPTLFNEALHSDLADFRVRYPALVLLQYVDDLLLAAATRTECLEGTKALLETLGNKGYRASAKKAQICLQEVTYLGYSLKDGQRWLTKARKEAILSIPVPKNSRQVREFLGTAGYCRLWIPGFAELAAPLYPLTRPGTLFQWGTEQQLAFEDIKKALLSSPALGLPDITKPFELFIDENSGFAKGVLVQKLGPWKRPVAYLSKKLDTVASGWPPCLRMVAAIAILVKDAGKLTLGQPLTILTSHPVEALVRQPPNKWLSNARMTHYQAMLLDAERVHFGPTVSLNPATLLPLPSGGNHHDCLQILAETHGTRPDLTDQPLPDADLTWYTDGSSFIRNGEREAGAAVTTESEVIWAAPLPPGTSAQRAELIALTQALKMAEGKKLTVYTDSRYAFATTHVHGEIYRRRGWLTSEGKEIKNKNEILALLEALFLPKRLSIIHCPGHQKGDSPQAKGNRLADDTAKKAATETHSSLTVLPAGKRTADGSEFEKRTADGSEFESPKKKAKVE

SEQ ID NO: 1179 - protein, 2095 aa, synthetic construct
MPAAKRVKLDGGDKKYSIGLDIGTNSVGWAVITDEYKVPSKKFKVLGNTDRHSIKKNLIGALLFDSGETAEATRLKRTARRRYTRRKNRICYLQEIFSNEMAKVDDSFFHRLEESFLVEEDKKHERHPIFGNIVDEVAYHEKYPTIYHLRKKLVDSTDKADLRLIYLALAHMIKFRGHFLIEGDLNPDNSDVDKLFIQLVQTYNQLFEENPINASGVDAKAILSARLSKSRRLENLIAQLPGEKKNGLFGNLIALSLGLTPNFKSNFDLAEDAKLQLSKDTYDDDLDNLLAQIGDQYADLFLAAKNLSDAILLSDILRVNTEITKAPLSASMIKRYDEHHQDLTLLKALVRQQLPEKYKEIFFDQSKNGYAGYIDGGASQEEFYKFIKPILEKMDGTEELLVKLNREDLLRKQRTFDNGSIPHQIHLGELHAILRRQEDFYPFLKDNREKIEKILTFRIPYYVGPLARGNSRFAWMTRKSEETITPWNFEEVVDKGASAQSFIERMTNFDKNLPNEKVLPKHSLLYEYFTVYNELTKVKYVTEGMRKPAFLSGEQKKAIVDLLFKTNRKVTVKQLKEDYFKKIECFDSVEISGVEDRFNASLGTYHDLLKIIKDKDFLDNEENEDILEDIVLTLTLFEDREMIEERLKTYAHLFDDKVMKQLKRRRYTGWGRLSRKLINGIRDKQSGKTILDFLKSDGFANRNFMQLIHDDSLTFKEDIQKAQVSGQGDSLHEHIANLAGSPAIKKGILQTVKVVDELVKVMGRHKPENIVIEMARENQTTQKGQKNSRERMKRIEEGIKELGSQILKEHPVENTQLQNEKLYLYYLQNGRDMYVDQELDINRLSDYDVDHIVPQSFLKDDSIDNKVLTRSDKARGKSDNVPSEEVVKKMKNYWRQLLNAKLITQRKFDNLTKAERGGLSELDKAGFIKRQLVETRQITKHVAQILDSRMNTKYDENDKLIREVKVITLKSKLVSDFRKDFQFYKVREINNYHHAHDAYLNAVVGTALIKKYPKLESEFVYGDYKVYDVRKMIAKSEQEIGKATAKYFFYSNIMNFFKTEITLANGEIRKRPLIETNGETGEIVWDKGRDFATVRKVLSMPQVNIVKKTEVQTGGFSKESILPKRNSDKLIARKKDWDPKKYGGFDSPTVAYSVLVVAKVEKGKSKKLKSVKELLGITIMERSSFEKNPIDFLEAKGYKEVKKDLIIKLPKYSLFELENGRKRMLASAGELQKGNELALPSKYVNFLYLASHYEKLKGSPEDNEQKQLFVEQHKHYLDEIIEQISEFSKRVILADANLDKVLSAYNKHRDKPIREQAENIIHLFTLTNLGAPAAFKYFDTTIDRKRYTSTKEVLDATLIHQSITGLYETRIDLSQLGGDGGGGGEAAAKPAPGGTLQLEEEYRLFEPESTQKQEMDIWLKNFPQAWAETGGMGTAHCQAPVLIQLKATATPISIRQYPMPHEAYQGIKPHIRRMLDQGILKPCQSPWNTPLLPVKKPGTEDYRPVQDLREVNKRVEDIHPTVPNPYNLLSTLPPSHPWYTVLDLKDAFFCLRLHSESQLLFAFEWRDPEIGLSGQLTWTRLPQGFKNSPTLFNEALHSDLADFRVRYPALVLLQYVDDLLLAAATRTECLEGTKALLETLGNKGYRASAKKAQICLQEVTYLGYSLKDGQRWLTKARKEAILSIPVPKNSRQVREFLGTAGYCRLWIPGFAELAAPLYPLTRPGTLFQWGTEQQLAFEDIKKALLSSPALGLPDITKPFELFIDENSGFAKGVLVQKLGPWKRPVAYLSKKLDTVASGWPPCLRMVAAIAILVKDAGKLTLGQPLTILTSHPVEALVRQPPNKWLSNARMTHYQAMLLDAERVHFGPTVSLNPATLLPLPSGGNHHDCLQILAETHGTRPDLTDQPLPDADLTWYTDGSSFIRNGEREAGAAVTTESEVIWAAPLPPGTSAQRAELIALTQALKMAEGKKLTVYTDSRYAFATTHVHGEIYRRRGWLTSEGKEIKNKNEILALLEALFLPKRLSIIHCPGHQKGDSPQAKGNRLADDTAKKAATETHSSLTVLPAGKRTADGSEFEKRTADGSEFESPKKKAKVE

SEQ ID NO: 1180 - protein, 2094 aa, synthetic construct
MPAAKRVKLDGGDKKYSIGLDIGTNSVGWAVITDEYKVPSKKFKVLGNTDRHSIKKNLIGALLFDSGETAEATRLKRTARRRYTRRKNRICYLQEIFSNEMAKVDDSFFHRLEESFLVEEDKKHERHPIFGNIVDEVAYHEKYPTIYHLRKKLVDSTDKADLRLIYLALAHMIKFRGHFLIEGDLNPDNSDVDKLFIQLVQTYNQLFEENPINASGVDAKAILSARLSKSRRLENLIAQLPGEKKNGLFGNLIALSLGLTPNFKSNFDLAEDAKLQLSKDTYDDDLDNLLAQIGDQYADLFLAAKNLSDAILLSDILRVNTEITKAPLSASMIKRYDEHHQDLTLLKALVRQQLPEKYKEIFFDQSKNGYAGYIDGGASQEEFYKFIKPILEKMDGTEELLVKLNREDLLRKQRTFDNGSIPHQIHLGELHAILRRQEDFYPFLKDNREKIEKILTFRIPYYVGPLARGNSRFAWMTRKSEETITPWNFEEVVDKGASAQSFIERMTNFDKNLPNEKVLPKHSLLYEYFTVYNELTKVKYVTEGMRKPAFLSGEQKKAIVDLLFKTNRKVTVKQLKEDYFKKIECFDSVEISGVEDRFNASLGTYHDLLKIIKDKDFLDNEENEDILEDIVLTLTLFEDREMIEERLKTYAHLFDDKVMKQLKRRRYTGWGRLSRKLINGIRDKQSGKTILDFLKSDGFANRNFMQLIHDDSLTFKEDIQKAQVSGQGDSLHEHIANLAGSPAIKKGILQTVKVVDELVKVMGRHKPENIVIEMARENQTTQKGQKNSRERMKRIEEGIKELGSQILKEHPVENTQLQNEKLYLYYLQNGRDMYVDQELDINRLSDYDVDHIVPQSFLKDDSIDNKVLTRSDKARGKSDNVPSEEVVKKMKNYWRQLLNAKLITQRKFDNLTKAERGGLSELDKAGFIKRQLVETRQITKHVAQILDSRMNTKYDENDKLIREVKVITLKSKLVSDFRKDFQFYKVREINNYHHAHDAYLNAVVGTALIKKYPKLESEFVYGDYKVYDVRKMIAKSEQEIGKATAKYFFYSNIMNFFKTEITLANGEIRKRPLIETNGETGEIVWDKGRDFATVRKVLSMPQVNIVKKTEVQTGGFSKESILPKRNSDKLIARKKDWDPKKYGGFDSPTVAYSVLVVAKVEKGKSKKLKSVKELLGITIMERSSFEKNPIDFLEAKGYKEVKKDLIIKLPKYSLFELENGRKRMLASAGELQKGNELALPSKYVNFLYLASHYEKLKGSPEDNEQKQLFVEQHKHYLDEIIEQISEFSKRVILADANLDKVLSAYNKHRDKPIREQAENIIHLFTLTNLGAPAAFKYFDTTIDRKRYTSTKEVLDATLIHQSITGLYETRIDLSQLGGDGGGGGGSGGGGSGGTLQLEEEYRLFEPESTQKQEMDIWLKNFPQAWAETGGMGTAHCQAPVLIQLKATATPISIRQYPMPHEAYQGIKPHIRRMLDQGILKPCQSPWNTPLLPVKKPGTEDYRPVQDLREVNKRVEDIHPTVPNPYNLLSTLPPSHPWYTVLDLKDAFFCLRLHSESQLLFAFEWRDPEIGLSGQLTWTRLPQGFKNSPTLFNEALHSDLADFRVRYPALVLLQYVDDLLLAAATRTECLEGTKALLETLGNKGYRASAKKAQICLQEVTYLGYSLKDGQRWLTKARKEAILSIPVPKNSRQVREFLGTAGYCRLWIPGFAELAAPLYPLTRPGTLFQWGTEQQLAFEDIKKALLSSPALGLPDITKPFELFIDENSGFAKGVLVQKLGPWKRPVAYLSKKLDTVASGWPPCLRMVAAIAILVKDAGKLTLGQPLTILTSHPVEALVRQPPNKWLSNARMTHYQAMLLDAERVHFGPTVSLNPATLLPLPSGGNHHDCLQILAETHGTRPDLTDQPLPDADLTWYTDGSSFIRNGEREAGAAVTTESEVIWAAPLPPGTSAQRAELIALTQALKMAEGKKLTVYTDSRYAFATTHVHGEIYRRRGWLTSEGKEIKNKNEILALLEALFLPKRLSIIHCPGHQKGDSPQAKGNRLADDTAKKAATETHSSLTVLPAGKRTADGSEFEKRTADGSEFESPKKKAKVE

SEQ ID NO: 1181 - protein, 2091 aa, synthetic construct
MPAAKRVKLDGGDKKYSIGLDIGTNSVGWAVITDEYKVPSKKFKVLGNTDRHSIKKNLIGALLFDSGETAEATRLKRTARRRYTRRKNRICYLQEIFSNEMAKVDDSFFHRLEESFLVEEDKKHERHPIFGNIVDEVAYHEKYPTIYHLRKKLVDSTDKADLRLIYLALAHMIKFRGHFLIEGDLNPDNSDVDKLFIQLVQTYNQLFEENPINASGVDAKAILSARLSKSRRLENLIAQLPGEKKNGLFGNLIALSLGLTPNFKSNFDLAEDAKLQLSKDTYDDDLDNLLAQIGDQYADLFLAAKNLSDAILLSDILRVNTEITKAPLSASMIKRYDEHHQDLTLLKALVRQQLPEKYKEIFFDQSKNGYAGYIDGGASQEEFYKFIKPILEKMDGTEELLVKLNREDLLRKQRTFDNGSIPHQIHLGELHAILRRQEDFYPFLKDNREKIEKILTFRIPYYVGPLARGNSRFAWMTRKSEETITPWNFEEVVDKGASAQSFIERMTNFDKNLPNEKVLPKHSLLYEYFTVYNELTKVKYVTEGMRKPAFLSGEQKKAIVDLLFKTNRKVTVKQLKEDYFKKIECFDSVEISGVEDRFNASLGTYHDLLKIIKDKDFLDNEENEDILEDIVLTLTLFEDREMIEERLKTYAHLFDDKVMKQLKRRRYTGWGRLSRKLINGIRDKQSGKTILDFLKSDGFANRNFMQLIHDDSLTFKEDIQKAQVSGQGDSLHEHIANLAGSPAIKKGILQTVKVVDELVKVMGRHKPENIVIEMARENQTTQKGQKNSRERMKRIEEGIKELGSQILKEHPVENTQLQNEKLYLYYLQNGRDMYVDQELDINRLSDYDVDHIVPQSFLKDDSIDNKVLTRSDKARGKSDNVPSEEVVKKMKNYWRQLLNAKLITQRKFDNLTKAERGGLSELDKAGFIKRQLVETRQITKHVAQILDSRMNTKYDENDKLIREVKVITLKSKLVSDFRKDFQFYKVREINNYHHAHDAYLNAVVGTALIKKYPKLESEFVYGDYKVYDVRKMIAKSEQEIGKATAKYFFYSNIMNFFKTEITLANGEIRKRPLIETNGETGEIVWDKGRDFATVRKVLSMPQVNIVKKTEVQTGGFSKESILPKRNSDKLIARKKDWDPKKYGGFDSPTVAYSVLVVAKVEKGKSKKLKSVKELLGITIMERSSFEKNPIDFLEAKGYKEVKKDLIIKLPKYSLFELENGRKRMLASAGELQKGNELALPSKYVNFLYLASHYEKLKGSPEDNEQKQLFVEQHKHYLDEIIEQISEFSKRVILADANLDKVLSAYNKHRDKPIREQAENIIHLFTLTNLGAPAAFKYFDTTIDRKRYTSTKEVLDATLIHQSITGLYETRIDLSQLGGDGGGGGGGGGGGTLQLEEEYRLFEPESTQKQEMDIWLKNFPQAWAETGGMGTAHCQAPVLIQLKATATPISIRQYPMPHEAYQGIKPHIRRMLDQGILKPCQSPWNTPLLPVKKPGTEDYRPVQDLREVNKRVEDIHPTVPNPYNLLSTLPPSHPWYTVLDLKDAFFCLRLHSESQLLFAFEWRDPEIGLSGQLTWTRLPQGFKNSPTLFNEALHSDLADFRVRYPALVLLQYVDDLLLAAATRTECLEGTKALLETLGNKGYRASAKKAQICLQEVTYLGYSLKDGQRWLTKARKEAILSIPVPKNSRQVREFLGTAGYCRLWIPGFAELAAPLYPLTRPGTLFQWGTEQQLAFEDIKKALLSSPALGLPDITKPFELFIDENSGFAKGVLVQKLGPWKRPVAYLSKKLDTVASGWPPCLRMVAAIAILVKDAGKLTLGQPLTILTSHPVEALVRQPPNKWLSNARMTHYQAMLLDAERVHFGPTVSLNPATLLPLPSGGNHHDCLQILAETHGTRPDLTDQPLPDADLTWYTDGSSFIRNGEREAGAAVTTESEVIWAAPLPPGTSAQRAELIALTQALKMAEGKKLTVYTDSRYAFATTHVHGEIYRRRGWLTSEGKEIKNKNEILALLEALFLPKRLSIIHCPGHQKGDSPQAKGNRLADDTAKKAATETHSSLTVLPAGKRTADGSEFEKRTADGSEFESPKKKAKVE

SEQ ID NO: 1182 - protein, 2093 aa, synthetic construct
MPAAKRVKLDGGDKKYSIGLDIGTNSVGWAVITDEYKVPSKKFKVLGNTDRHSIKKNLIGALLFDSGETAEATRLKRTARRRYTRRKNRICYLQEIFSNEMAKVDDSFFHRLEESFLVEEDKKHERHPIFGNIVDEVAYHEKYPTIYHLRKKLVDSTDKADLRLIYLALAHMIKFRGHFLIEGDLNPDNSDVDKLFIQLVQTYNQLFEENPINASGVDAKAILSARLSKSRRLENLIAQLPGEKKNGLFGNLIALSLGLTPNFKSNFDLAEDAKLQLSKDTYDDDLDNLLAQIGDQYADLFLAAKNLSDAILLSDILRVNTEITKAPLSASMIKRYDEHHQDLTLLKALVRQQLPEKYKEIFFDQSKNGYAGYIDGGASQEEFYKFIKPILEKMDGTEELLVKLNREDLLRKQRTFDNGSIPHQIHLGELHAILRRQEDFYPFLKDNREKIEKILTFRIPYYVGPLARGNSRFAWMTRKSEETITPWNFEEVVDKGASAQSFIERMTNFDKNLPNEKVLPKHSLLYEYFTVYNELTKVKYVTEGMRKPAFLSGEQKKAIVDLLFKTNRKVTVKQLKEDYFKKIECFDSVEISGVEDRFNASLGTYHDLLKIIKDKDFLDNEENEDILEDIVLTLTLFEDREMIEERLKTYAHLFDDKVMKQLKRRRYTGWGRLSRKLINGIRDKQSGKTILDFLKSDGFANRNFMQLIHDDSLTFKEDIQKAQVSGQGDSLHEHIANLAGSPAIKKGILQTVKVVDELVKVMGRHKPENIVIEMARENQTTQKGQKNSRERMKRIEEGIKELGSQILKEHPVENTQLQNEKLYLYYLQNGRDMYVDQELDINRLSDYDVDHIVPQSFLKDDSIDNKVLTRSDKARGKSDNVPSEEVVKKMKNYWRQLLNAKLITQRKFDNLTKAERGGLSELDKAGFIKRQLVETRQITKHVAQILDSRMNTKYDENDKLIREVKVITLKSKLVSDFRKDFQFYKVREINNYHHAHDAYLNAVVGTALIKKYPKLESEFVYGDYKVYDVRKMIAKSEQEIGKATAKYFFYSNIMNFFKTEITLANGEIRKRPLIETNGETGEIVWDKGRDFATVRKVLSMPQVNIVKKTEVQTGGFSKESILPKRNSDKLIARKKDWDPKKYGGFDSPTVAYSVLVVAKVEKGKSKKLKSVKELLGITIMERSSFEKNPIDFLEAKGYKEVKKDLIIKLPKYSLFELENGRKRMLASAGELQKGNELALPSKYVNFLYLASHYEKLKGSPEDNEQKQLFVEQHKHYLDEIIEQISEFSKRVILADANLDKVLSAYNKHRDKPIREQAENIIHLFTLTNLGAPAAFKYFDTTIDRKRYTSTKEVLDATLIHQSITGLYETRIDLSQLGGDGGGGGPAPGGSGGTLQLEEEYRLFEPESTQKQEMDIWLKNFPQAWAETGGMGTAHCQAPVLIQLKATATPISIRQYPMPHEAYQGIKPHIRRMLDQGILKPCQSPWNTPLLPVKKPGTEDYRPVQDLREVNKRVEDIHPTVPNPYNLLSTLPPSHPWYTVLDLKDAFFCLRLHSESQLLFAFEWRDPEIGLSGQLTWTRLPQGFKNSPTLFNEALHSDLADFRVRYPALVLLQYVDDLLLAAATRTECLEGTKALLETLGNKGYRASAKKAQICLQEVTYLGYSLKDGQRWLTKARKEAILSIPVPKNSRQVREFLGTAGYCRLWIPGFAELAAPLYPLTRPGTLFQWGTEQQLAFEDIKKALLSSPALGLPDITKPFELFIDENSGFAKGVLVQKLGPWKRPVAYLSKKLDTVASGWPPCLRMVAAIAILVKDAGKLTLGQPLTILTSHPVEALVRQPPNKWLSNARMTHYQAMLLDAERVHFGPTVSLNPATLLPLPSGGNHHDCLQILAETHGTRPDLTDQPLPDADLTWYTDGSSFIRNGEREAGAAVTTESEVIWAAPLPPGTSAQRAELIALTQALKMAEGKKLTVYTDSRYAFATTHVHGEIYRRRGWLTSEGKEIKNKNEILALLEALFLPKRLSIIHCPGHQKGDSPQAKGNRLADDTAKKAATETHSSLTVLPAGKRTADGSEFEKRTADGSEFESPKKKAKVE

SEQ ID NO: 1183 - protein, 2089 aa, synthetic construct
MPAAKRVKLDGGDKKYSIGLDIGTNSVGWAVITDEYKVPSKKFKVLGNTDRHSIKKNLIGALLFDSGETAEATRLKRTARRRYTRRKNRICYLQEIFSNEMAKVDDSFFHRLEESFLVEEDKKHERHPIFGNIVDEVAYHEKYPTIYHLRKKLVDSTDKADLRLIYLALAHMIKFRGHFLIEGDLNPDNSDVDKLFIQLVQTYNQLFEENPINASGVDAKAILSARLSKSRRLENLIAQLPGEKKNGLFGNLIALSLGLTPNFKSNFDLAEDAKLQLSKDTYDDDLDNLLAQIGDQYADLFLAAKNLSDAILLSDILRVNTEITKAPLSASMIKRYDEHHQDLTLLKALVRQQLPEKYKEIFFDQSKNGYAGYIDGGASQEEFYKFIKPILEKMDGTEELLVKLNREDLLRKQRTFDNGSIPHQIHLGELHAILRRQEDFYPFLKDNREKIEKILTFRIPYYVGPLARGNSRFAWMTRKSEETITPWNFEEVVDKGASAQSFIERMTNFDKNLPNEKVLPKHSLLYEYFTVYNELTKVKYVTEGMRKPAFLSGEQKKAIVDLLFKTNRKVTVKQLKEDYFKKIECFDSVEISGVEDRFNASLGTYHDLLKIIKDKDFLDNEENEDILEDIVLTLTLFEDREMIEERLKTYAHLFDDKVMKQLKRRRYTGWGRLSRKLINGIRDKQSGKTILDFLKSDGFANRNFMQLIHDDSLTFKEDIQKAQVSGQGDSLHEHIANLAGSPAIKKGILQTVKVVDELVKVMGRHKPENIVIEMARENQTTQKGQKNSRERMKRIEEGIKELGSQILKEHPVENTQLQNEKLYLYYLQNGRDMYVDQELDINRLSDYDVDHIVPQSFLKDDSIDNKVLTRSDKARGKSDNVPSEEVVKKMKNYWRQLLNAKLITQRKFDNLTKAERGGLSELDKAGFIKRQLVETRQITKHVAQILDSRMNTKYDENDKLIREVKVITLKSKLVSDFRKDFQFYKVREINNYHHAHDAYLNAVVGTALIKKYPKLESEFVYGDYKVYDVRKMIAKSEQEIGKATAKYFFYSNIMNFFKTEITLANGEIRKRPLIETNGETGEIVWDKGRDFATVRKVLSMPQVNIVKKTEVQTGGFSKESILPKRNSDKLIARKKDWDPKKYGGFDSPTVAYSVLVVAKVEKGKSKKLKSVKELLGITIMERSSFEKNPIDFLEAKGYKEVKKDLIIKLPKYSLFELENGRKRMLASAGELQKGNELALPSKYVNFLYLASHYEKLKGSPEDNEQKQLFVEQHKHYLDEIIEQISEFSKRVILADANLDKVLSAYNKHRDKPIREQAENIIHLFTLTNLGAPAAFKYFDTTIDRKRYTSTKEVLDATLIHQSITGLYETRIDLSQLGGDGGEAAAKGGTLQLEEEYRLFEPESTQKQEMDIWLKNFPQAWAETGGMGTAHCQAPVLIQLKATATPISIRQYPMPHEAYQGIKPHIRRMLDQGILKPCQSPWNTPLLPVKKPGTEDYRPVQDLREVNKRVEDIHPTVPNPYNLLSTLPPSHPWYTVLDLKDAFFCLRLHSESQLLFAFEWRDPEIGLSGQLTWTRLPQGFKNSPTLFNEALHSDLADFRVRYPALVLLQYVDDLLLAAATRTECLEGTKALLETLGNKGYRASAKKAQICLQEVTYLGYSLKDGQRWLTKARKEAILSIPVPKNSRQVREFLGTAGYCRLWIPGFAELAAPLYPLTRPGTLFQWGTEQQLAFEDIKKALLSSPALGLPDITKPFELFIDENSGFAKGVLVQKLGPWKRPVAYLSKKLDTVASGWPPCLRMVAAIAILVKDAGKLTLGQPLTILTSHPVEALVRQPPNKWLSNARMTHYQAMLLDAERVHFGPTVSLNPATLLPLPSGGNHHDCLQILAETHGTRPDLTDQPLPDADLTWYTDGSSFIRNGEREAGAAVTTESEVIWAAPLPPGTSAQRAELIALTQALKMAEGKKLTVYTDSRYAFATTHVHGEIYRRRGWLTSEGKEIKNKNEILALLEALFLPKRLSIIHCPGHQKGDSPQAKGNRLADDTAKKAATETHSSLTVLPAGKRTADGSEFEKRTADGSEFESPKKKAKVE

SEQ ID NO: 1184 - protein, 2090 aa, synthetic construct
MPAAKRVKLDGGDKKYSIGLDIGTNSVGWAVITDEYKVPSKKFKVLGNTDRHSIKKNLIGALLFDSGETAEATRLKRTARRRYTRRKNRICYLQEIFSNEMAKVDDSFFHRLEESFLVEEDKKHERHPIFGNIVDEVAYHEKYPTIYHLRKKLVDSTDKADLRLIYLALAHMIKFRGHFLIEGDLNPDNSDVDKLFIQLVQTYNQLFEENPINASGVDAKAILSARLSKSRRLENLIAQLPGEKKNGLFGNLIALSLGLTPNFKSNFDLAEDAKLQLSKDTYDDDLDNLLAQIGDQYADLFLAAKNLSDAILLSDILRVNTEITKAPLSASMIKRYDEHHQDLTLLKALVRQQLPEKYKEIFFDQSKNGYAGYIDGGASQEEFYKFIKPILEKMDGTEELLVKLNREDLLRKQRTFDNGSIPHQIHLGELHAILRRQEDFYPFLKDNREKIEKILTFRIPYYVGPLARGNSRFAWMTRKSEETITPWNFEEVVDKGASAQSFIERMTNFDKNLPNEKVLPKHSLLYEYFTVYNELTKVKYVTEGMRKPAFLSGEQKKAIVDLLFKTNRKVTVKQLKEDYFKKIECFDSVEISGVEDRFNASLGTYHDLLKIIKDKDFLDNEENEDILEDIVLTLTLFEDREMIEERLKTYAHLFDDKVMKQLKRRRYTGWGRLSRKLINGIRDKQSGKTILDFLKSDGFANRNFMQLIHDDSLTFKEDIQKAQVSGQGDSLHEHIANLAGSPAIKKGILQTVKVVDELVKVMGRHKPENIVIEMARENQTTQKGQKNSRERMKRIEEGIKELGSQILKEHPVENTQLQNEKLYLYYLQNGRDMYVDQELDINRLSDYDVDHIVPQSFLKDDSIDNKVLTRSDKARGKSDNVPSEEVVKKMKNYWRQLLNAKLITQRKFDNLTKAERGGLSELDKAGFIKRQLVETRQITKHVAQILDSRMNTKYDENDKLIREVKVITLKSKLVSDFRKDFQFYKVREINNYHHAHDAYLNAVVGTALIKKYPKLESEFVYGDYKVYDVRKMIAKSEQEIGKATAKYFFYSNIMNFFKTEITLANGEIRKRPLIETNGETGEIVWDKGRDFATVRKVLSMPQVNIVKKTEVQTGGFSKESILPKRNSDKLIARKKDWDPKKYGGFDSPTVAYSVLVVAKVEKGKSKKLKSVKELLGITIMERSSFEKNPIDFLEAKGYKEVKKDLIIKLPKYSLFELENGRKRMLASAGELQKGNELALPSKYVNFLYLASHYEKLKGSPEDNEQKQLFVEQHKHYLDEIIEQISEFSKRVILADANLDKVLSAYNKHRDKPIREQAENIIHLFTLTNLGAPAAFKYFDTTIDRKRYTSTKEVLDATLIHQSITGLYETRIDLSQLGGDGGGGSGGGGGTLQLEEEYRLFEPESTQKQEMDIWLKNFPQAWAETGGMGTAHCQAPVLIQLKATATPISIRQYPMPHEAYQGIKPHIRRMLDQGILKPCQSPWNTPLLPVKKPGTEDYRPVQDLREVNKRVEDIHPTVPNPYNLLSTLPPSHPWYTVLDLKDAFFCLRLHSESQLLFAFEWRDPEIGLSGQLTWTRLPQGFKNSPTLFNEALHSDLADFRVRYPALVLLQYVDDLLLAAATRTECLEGTKALLETLGNKGYRASAKKAQICLQEVTYLGYSLKDGQRWLTKARKEAILSIPVPKNSRQVREFLGTAGYCRLWIPGFAELAAPLYPLTRPGTLFQWGTEQQLAFEDIKKALLSSPALGLPDITKPFELFIDENSGFAKGVLVQKLGPWKRPVAYLSKKLDTVASGWPPCLRMVAAIAILVKDAGKLTLGQPLTILTSHPVEALVRQPPNKWLSNARMTHYQAMLLDAERVHFGPTVSLNPATLLPLPSGGNHHDCLQILAETHGTRPDLTDQPLPDADLTWYTDGSSFIRNGEREAGAAVTTESEVIWAAPLPPGTSAQRAELIALTQALKMAEGKKLTVYTDSRYAFATTHVHGEIYRRRGWLTSEGKEIKNKNEILALLEALFLPKRLSIIHCPGHQKGDSPQAKGNRLADDTAKKAATETHSSLTVLPAGKRTADGSEFEKRTADGSEFESPKKKAKVE

SEQ ID NO: 1185 - protein, 2095 aa, synthetic construct
MPAAKRVKLDGGDKKYSIGLDIGTNSVGWAVITDEYKVPSKKFKVLGNTDRHSIKKNLIGALLFDSGETAEATRLKRTARRRYTRRKNRICYLQEIFSNEMAKVDDSFFHRLEESFLVEEDKKHERHPIFGNIVDEVAYHEKYPTIYHLRKKLVDSTDKADLRLIYLALAHMIKFRGHFLIEGDLNPDNSDVDKLFIQLVQTYNQLFEENPINASGVDAKAILSARLSKSRRLENLIAQLPGEKKNGLFGNLIALSLGLTPNFKSNFDLAEDAKLQLSKDTYDDDLDNLLAQIGDQYADLFLAAKNLSDAILLSDILRVNTEITKAPLSASMIKRYDEHHQDLTLLKALVRQQLPEKYKEIFFDQSKNGYAGYIDGGASQEEFYKFIKPILEKMDGTEELLVKLNREDLLRKQRTFDNGSIPHQIHLGELHAILRRQEDFYPFLKDNREKIEKILTFRIPYYVGPLARGNSRFAWMTRKSEETITPWNFEEVVDKGASAQSFIERMTNFDKNLPNEKVLPKHSLLYEYFTVYNELTKVKYVTEGMRKPAFLSGEQKKAIVDLLFKTNRKVTVKQLKEDYFKKIECFDSVEISGVEDRFNASLGTYHDLLKIIKDKDFLDNEENEDILEDIVLTLTLFEDREMIEERLKTYAHLFDDKVMKQLKRRRYTGWGRLSRKLINGIRDKQSGKTILDFLKSDGFANRNFMQLIHDDSLTFKEDIQKAQVSGQGDSLHEHIANLAGSPAIKKGILQTVKVVDELVKVMGRHKPENIVIEMARENQTTQKGQKNSRERMKRIEEGIKELGSQILKEHPVENTQLQNEKLYLYYLQNGRDMYVDQELDINRLSDYDVDHIVPQSFLKDDSIDNKVLTRSDKARGKSDNVPSEEVVKKMKNYWRQLLNAKLITQRKFDNLTKAERGGLSELDKAGFIKRQLVETRQITKHVAQILDSRMNTKYDENDKLIREVKVITLKSKLVSDFRKDFQFYKVREINNYHHAHDAYLNAVVGTALIKKYPKLESEFVYGDYKVYDVRKMIAKSEQEIGKATAKYFFYSNIMNFFKTEITLANGEIRKRPLIETNGETGEIVWDKGRDFATVRKVLSMPQVNIVKKTEVQTGGFSKESILPKRNSDKLIARKKDWDPKKYGGFDSPTVAYSVLVVAKVEKGKSKKLKSVKELLGITIMERSSFEKNPIDFLEAKGYKEVKKDLIIKLPKYSLFELENGRKRMLASAGELQKGNELALPSKYVNFLYLASHYEKLKGSPEDNEQKQLFVEQHKHYLDEIIEQISEFSKRVILADANLDKVLSAYNKHRDKPIREQAENIIHLFTLTNLGAPAAFKYFDTTIDRKRYTSTKEVLDATLIHQSITGLYETRIDLSQLGGDGGEAAAKPAPGGGGGTLQLEEEYRLFEPESTQKQEMDIWLKNFPQAWAETGGMGTAHCQAPVLIQLKATATPISIRQYPMPHEAYQGIKPHIRRMLDQGILKPCQSPWNTPLLPVKKPGTEDYRPVQDLREVNKRVEDIHPTVPNPYNLLSTLPPSHPWYTVLDLKDAFFCLRLHSESQLLFAFEWRDPEIGLSGQLTWTRLPQGFKNSPTLFNEALHSDLADFRVRYPALVLLQYVDDLLLAAATRTECLEGTKALLETLGNKGYRASAKKAQICLQEVTYLGYSLKDGQRWLTKARKEAILSIPVPKNSRQVREFLGTAGYCRLWIPGFAELAAPLYPLTRPGTLFQWGTEQQLAFEDIKKALLSSPALGLPDITKPFELFIDENSGFAKGVLVQKLGPWKRPVAYLSKKLDTVASGWPPCLRMVAAIAILVKDAGKLTLGQPLTILTSHPVEALVRQPPNKWLSNARMTHYQAMLLDAERVHFGPTVSLNPATLLPLPSGGNHHDCLQILAETHGTRPDLTDQPLPDADLTWYTDGSSFIRNGEREAGAAVTTESEVIWAAPLPPGTSAQRAELIALTQALKMAEGKKLTVYTDSRYAFATTHVHGEIYRRRGWLTSEGKEIKNKNEILALLEALFLPKRLSIIHCPGHQKGDSPQAKGNRLADDTAKKAATETHSSLTVLPAGKRTADGSEFEKRTADGSEFESPKKKAKVE

SEQ ID NO: 1186 - protein, 2095 aa, synthetic construct
MPAAKRVKLDGGDKKYSIGLDIGTNSVGWAVITDEYKVPSKKFKVLGNTDRHSIKKNLIGALLFDSGETAEATRLKRTARRRYTRRKNRICYLQEIFSNEMAKVDDSFFHRLEESFLVEEDKKHERHPIFGNIVDEVAYHEKYPTIYHLRKKLVDSTDKADLRLIYLALAHMIKFRGHFLIEGDLNPDNSDVDKLFIQLVQTYNQLFEENPINASGVDAKAILSARLSKSRRLENLIAQLPGEKKNGLFGNLIALSLGLTPNFKSNFDLAEDAKLQLSKDTYDDDLDNLLAQIGDQYADLFLAAKNLSDAILLSDILRVNTEITKAPLSASMIKRYDEHHQDLTLLKALVRQQLPEKYKEIFFDQSKNGYAGYIDGGASQEEFYKFIKPILEKMDGTEELLVKLNREDLLRKQRTFDNGSIPHQIHLGELHAILRRQEDFYPFLKDNREKIEKILTFRIPYYVGPLARGNSRFAWMTRKSEETITPWNFEEVVDKGASAQSFIERMTNFDKNLPNEKVLPKHSLLYEYFTVYNELTKVKYVTEGMRKPAFLSGEQKKAIVDLLFKTNRKVTVKQLKEDYFKKIECFDSVEISGVEDRFNASLGTYHDLLKIIKDKDFLDNEENEDILEDIVLTLTLFEDREMIEERLKTYAHLFDDKVMKQLKRRRYTGWGRLSRKLINGIRDKQSGKTILDFLKSDGFANRNFMQLIHDDSLTFKEDIQKAQVSGQGDSLHEHIANLAGSPAIKKGILQTVKVVDELVKVMGRHKPENIVIEMARENQTTQKGQKNSRERMKRIEEGIKELGSQILKEHPVENTQLQNEKLYLYYLQNGRDMYVDQELDINRLSDYDVDHIVPQSFLKDDSIDNKVLTRSDKARGKSDNVPSEEVVKKMKNYWRQLLNAKLITQRKFDNLTKAERGGLSELDKAGFIKRQLVETRQITKHVAQILDSRMNTKYDENDKLIREVKVITLKSKLVSDFRKDFQFYKVREINNYHHAHDAYLNAVVGTALIKKYPKLESEFVYGDYKVYDVRKMIAKSEQEIGKATAKYFFYSNIMNFFKTEITLANGEIRKRPLIETNGETGEIVWDKGRDFATVRKVLSMPQVNIVKKTEVQTGGFSKESILPKRNSDKLIARKKDWDPKKYGGFDSPTVAYSVLVVAKVEKGKSKKLKSVKELLGITIMERSSFEKNPIDFLEAKGYKEVKKDLIIKLPKYSLFELENGRKRMLASAGELQKGNELALPSKYVNFLYLASHYEKLKGSPEDNEQKQLFVEQHKHYLDEIIEQISEFSKRVILADANLDKVLSAYNKHRDKPIREQAENIIHLFTLTNLGAPAAFKYFDTTIDRKRYTSTKEVLDATLIHQSITGLYETRIDLSQLGGDGGGGGPAPEAAAKGGTLQLEEEYRLFEPESTQKQEMDIWLKNFPQAWAETGGMGTAHCQAPVLIQLKATATPISIRQYPMPHEAYQGIKPHIRRMLDQGILKPCQSPWNTPLLPVKKPGTEDYRPVQDLREVNKRVEDIHPTVPNPYNLLSTLPPSHPWYTVLDLKDAFFCLRLHSESQLLFAFEWRDPEIGLSGQLTWTRLPQGFKNSPTLFNEALHSDLADFRVRYPALVLLQYVDDLLLAAATRTECLEGTKALLETLGNKGYRASAKKAQICLQEVTYLGYSLKDGQRWLTKARKEAILSIPVPKNSRQVREFLGTAGYCRLWIPGFAELAAPLYPLTRPGTLFQWGTEQQLAFEDIKKALLSSPALGLPDITKPFELFIDENSGFAKGVLVQKLGPWKRPVAYLSKKLDTVASGWPPCLRMVAAIAILVKDAGKLTLGQPLTILTSHPVEALVRQPPNKWLSNARMTHYQAMLLDAERVHFGPTVSLNPATLLPLPSGGNHHDCLQILAETHGTRPDLTDQPLPDADLTWYTDGSSFIRNGEREAGAAVTTESEVIWAAPLPPGTSAQRAELIALTQALKMAEGKKLTVYTDSRYAFATTHVHGEIYRRRGWLTSEGKEIKNKNEILALLEALFLPKRLSIIHCPGHQKGDSPQAKGNRLADDTAKKAATETHSSLTVLPAGKRTADGSEFEKRTADGSEFESPKKKAKVE

SEQ ID NO: 1187 - protein, 2095 aa, synthetic construct
MPAAKRVKLDGGDKKYSIGLDIGTNSVGWAVITDEYKVPSKKFKVLGNTDRHSIKKNLIGALLFDSGETAEATRLKRTARRRYTRRKNRICYLQEIFSNEMAKVDDSFFHRLEESFLVEEDKKHERHPIFGNIVDEVAYHEKYPTIYHLRKKLVDSTDKADLRLIYLALAHMIKFRGHFLIEGDLNPDNSDVDKLFIQLVQTYNQLFEENPINASGVDAKAILSARLSKSRRLENLIAQLPGEKKNGLFGNLIALSLGLTPNFKSNFDLAEDAKLQLSKDTYDDDLDNLLAQIGDQYADLFLAAKNLSDAILLSDILRVNTEITKAPLSASMIKRYDEHHQDLTLLKALVRQQLPEKYKEIFFDQSKNGYAGYIDGGASQEEFYKFIKPILEKMDGTEELLVKLNREDLLRKQRTFDNGSIPHQIHLGELHAILRRQEDFYPFLKDNREKIEKILTFRIPYYVGPLARGNSRFAWMTRKSEETITPWNFEEVVDKGASAQSFIERMTNFDKNLPNEKVLPKHSLLYEYFTVYNELTKVKYVTEGMRKPAFLSGEQKKAIVDLLFKTNRKVTVKQLKEDYFKKIECFDSVEISGVEDRFNASLGTYHDLLKIIKDKDFLDNEENEDILEDIVLTLTLFEDREMIEERLKTYAHLFDDKVMKQLKRRRYTGWGRLSRKLINGIRDKQSGKTILDFLKSDGFANRNFMQLIHDDSLTFKEDIQKAQVSGQGDSLHEHIANLAGSPAIKKGILQTVKVVDELVKVMGRHKPENIVIEMARENQTTQKGQKNSRERMKRIEEGIKELGSQILKEHPVENTQLQNEKLYLYYLQNGRDMYVDQELDINRLSDYDVDHIVPQSFLKDDSIDNKVLTRSDKARGKSDNVPSEEVVKKMKNYWRQLLNAKLITQRKFDNLTKAERGGLSELDKAGFIKRQLVETRQITKHVAQILDSRMNTKYDENDKLIREVKVITLKSKLVSDFRKDFQFYKVREINNYHHAHDAYLNAVVGTALIKKYPKLESEFVYGDYKVYDVRKMIAKSEQEIGKATAKYFFYSNIMNFFKTEITLANGEIRKRPLIETNGETGEIVWDKGRDFATVRKVLSMPQVNIVKKTEVQTGGFSKESILPKRNSDKLIARKKDWDPKKYGGFDSPTVAYSVLVVAKVEKGKSKKLKSVKELLGITIMERSSFEKNPIDFLEAKGYKEVKKDLIIKLPKYSLFELENGRKRMLASAGELQKGNELALPSKYVNFLYLASHYEKLKGSPEDNEQKQLFVEQHKHYLDEIIEQISEFSKRVILADANLDKVLSAYNKHRDKPIREQAENIIHLFTLTNLGAPAAFKYFDTTIDRKRYTSTKEVLDATLIHQSITGLYETRIDLSQLGGDGGGGGGGSEAAAKGGTLQLEEEYRLFEPESTQKQEMDIWLKNFPQAWAETGGMGTAHCQAPVLIQLKATATPISIRQYPMPHEAYQGIKPHIRRMLDQGILKPCQSPWNTPLLPVKKPGTEDYRPVQDLREVNKRVEDIHPTVPNPYNLLSTLPPSHPWYTVLDLKDAFFCLRLHSESQLLFAFEWRDPEIGLSGQLTWTRLPQGFKNSPTLFNEALHSDLADFRVRYPALVLLQYVDDLLLAAATRTECLEGTKALLETLGNKGYRASAKKAQICLQEVTYLGYSLKDGQRWLTKARKEAILSIPVPKNSRQVREFLGTAGYCRLWIPGFAELAAPLYPLTRPGTLFQWGTEQQLAFEDIKKALLSSPALGLPDITKPFELFIDENSGFAKGVLVQKLGPWKRPVAYLSKKLDTVASGWPPCLRMVAAIAILVKDAGKLTLGQPLTILTSHPVEALVRQPPNKWLSNARMTHYQAMLLDAERVHFGPTVSLNPATLLPLPSGGNHHDCLQILAETHGTRPDLTDQPLPDADLTWYTDGSSFIRNGEREAGAAVTTESEVIWAAPLPPGTSAQRAELIALTQALKMAEGKKLTVYTDSRYAFATTHVHGEIYRRRGWLTSEGKEIKNKNEILALLEALFLPKRLSIIHCPGHQKGDSPQAKGNRLADDTAKKAATETHSSLTVLPAGKRTADGSEFEKRTADGSEFESPKKKAKVE

SEQ ID NO: 1188 - protein, 2090 aa, synthetic construct
MPAAKRVKLDGGDKKYSIGLDIGTNSVGWAVITDEYKVPSKKFKVLGNTDRHSIKKNLIGALLFDSGETAEATRLKRTARRRYTRRKNRICYLQEIFSNEMAKVDDSFFHRLEESFLVEEDKKHERHPIFGNIVDEVAYHEKYPTIYHLRKKLVDSTDKADLRLIYLALAHMIKFRGHFLIEGDLNPDNSDVDKLFIQLVQTYNQLFEENPINASGVDAKAILSARLSKSRRLENLIAQLPGEKKNGLFGNLIALSLGLTPNFKSNFDLAEDAKLQLSKDTYDDDLDNLLAQIGDQYADLFLAAKNLSDAILLSDILRVNTEITKAPLSASMIKRYDEHHQDLTLLKALVRQQLPEKYKEIFFDQSKNGYAGYIDGGASQEEFYKFIKPILEKMDGTEELLVKLNREDLLRKQRTFDNGSIPHQIHLGELHAILRRQEDFYPFLKDNREKIEKILTFRIPYYVGPLARGNSRFAWMTRKSEETITPWNFEEVVDKGASAQSFIERMTNFDKNLPNEKVLPKHSLLYEYFTVYNELTKVKYVTEGMRKPAFLSGEQKKAIVDLLFKTNRKVTVKQLKEDYFKKIECFDSVEISGVEDRFNASLGTYHDLLKIIKDKDFLDNEENEDILEDIVLTLTLFEDREMIEERLKTYAHLFDDKVMKQLKRRRYTGWGRLSRKLINGIRDKQSGKTILDFLKSDGFANRNFMQLIHDDSLTFKEDIQKAQVSGQGDSLHEHIANLAGSPAIKKGILQTVKVVDELVKVMGRHKPENIVIEMARENQTTQKGQKNSRERMKRIEEGIKELGSQILKEHPVENTQLQNEKLYLYYLQNGRDMYVDQELDINRLSDYDVDHIVPQSFLKDDSIDNKVLTRSDKARGKSDNVPSEEVVKKMKNYWRQLLNAKLITQRKFDNLTKAERGGLSELDKAGFIKRQLVETRQITKHVAQILDSRMNTKYDENDKLIREVKVITLKSKLVSDFRKDFQFYKVREINNYHHAHDAYLNAVVGTALIKKYPKLESEFVYGDYKVYDVRKMIAKSEQEIGKATAKYFFYSNIMNFFKTEITLANGEIRKRPLIETNGETGEIVWDKGRDFATVRKVLSMPQVNIVKKTEVQTGGFSKESILPKRNSDKLIARKKDWDPKKYGGFDSPTVAYSVLVVAKVEKGKSKKLKSVKELLGITIMERSSFEKNPIDFLEAKGYKEVKKDLIIKLPKYSLFELENGRKRMLASAGELQKGNELALPSKYVNFLYLASHYEKLKGSPEDNEQKQLFVEQHKHYLDEIIEQISEFSKRVILADANLDKVLSAYNKHRDKPIREQAENIIHLFTLTNLGAPAAFKYFDTTIDRKRYTSTKEVLDATLIHQSITGLYETRIDLSQLGGDGGGGGGGGGGTLQLEEEYRLFEPESTQKQEMDIWLKNFPQAWAETGGMGTAHCQAPVLIQLKATATPISIRQYPMPHEAYQGIKPHIRRMLDQGILKPCQSPWNTPLLPVKKPGTEDYRPVQDLREVNKRVEDIHPTVPNPYNLLSTLPPSHPWYTVLDLKDAFFCLRLHSESQLLFAFEWRDPEIGLSGQLTWTRLPQGFKNSPTLFNEALHSDLADFRVRYPALVLLQYVDDLLLAAATRTECLEGTKALLETLGNKGYRASAKKAQICLQEVTYLGYSLKDGQRWLTKARKEAILSIPVPKNSRQVREFLGTAGYCRLWIPGFAELAAPLYPLTRPGTLFQWGTEQQLAFEDIKKALLSSPALGLPDITKPFELFIDENSGFAKGVLVQKLGPWKRPVAYLSKKLDTVASGWPPCLRMVAAIAILVKDAGKLTLGQPLTILTSHPVEALVRQPPNKWLSNARMTHYQAMLLDAERVHFGPTVSLNPATLLPLPSGGNHHDCLQILAETHGTRPDLTDQPLPDADLTWYTDGSSFIRNGEREAGAAVTTESEVIWAAPLPPGTSAQRAELIALTQALKMAEGKKLTVYTDSRYAFATTHVHGEIYRRRGWLTSEGKEIKNKNEILALLEALFLPKRLSIIHCPGHQKGDSPQAKGNRLADDTAKKAATETHSSLTVLPAGKRTADGSEFEKRTADGSEFESPKKKAKVE

SEQ ID NO: 1189 - protein, 2093 aa, synthetic construct
MPAAKRVKLDGGDKKYSIGLDIGTNSVGWAVITDEYKVPSKKFKVLGNTDRHSIKKNLIGALLFDSGETAEATRLKRTARRRYTRRKNRICYLQEIFSNEMAKVDDSFFHRLEESFLVEEDKKHERHPIFGNIVDEVAYHEKYPTIYHLRKKLVDSTDKADLRLIYLALAHMIKFRGHFLIEGDLNPDNSDVDKLFIQLVQTYNQLFEENPINASGVDAKAILSARLSKSRRLENLIAQLPGEKKNGLFGNLIALSLGLTPNFKSNFDLAEDAKLQLSKDTYDDDLDNLLAQIGDQYADLFLAAKNLSDAILLSDILRVNTEITKAPLSASMIKRYDEHHQDLTLLKALVRQQLPEKYKEIFFDQSKNGYAGYIDGGASQEEFYKFIKPILEKMDGTEELLVKLNREDLLRKQRTFDNGSIPHQIHLGELHAILRRQEDFYPFLKDNREKIEKILTFRIPYYVGPLARGNSRFAWMTRKSEETITPWNFEEVVDKGASAQSFIERMTNFDKNLPNEKVLPKHSLLYEYFTVYNELTKVKYVTEGMRKPAFLSGEQKKAIVDLLFKTNRKVTVKQLKEDYFKKIECFDSVEISGVEDRFNASLGTYHDLLKIIKDKDFLDNEENEDILEDIVLTLTLFEDREMIEERLKTYAHLFDDKVMKQLKRRRYTGWGRLSRKLINGIRDKQSGKTILDFLKSDGFANRNFMQLIHDDSLTFKEDIQKAQVSGQGDSLHEHIANLAGSPAIKKGILQTVKVVDELVKVMGRHKPENIVIEMARENQTTQKGQKNSRERMKRIEEGIKELGSQILKEHPVENTQLQNEKLYLYYLQNGRDMYVDQELDINRLSDYDVDHIVPQSFLKDDSIDNKVLTRSDKARGKSDNVPSEEVVKKMKNYWRQLLNAKLITQRKFDNLTKAERGGLSELDKAGFIKRQLVETRQITKHVAQILDSRMNTKYDENDKLIREVKVITLKSKLVSDFRKDFQFYKVREINNYHHAHDAYLNAVVGTALIKKYPKLESEFVYGDYKVYDVRKMIAKSEQEIGKATAKYFFYSNIMNFFKTEITLANGEIRKRPLIETNGETGEIVWDKGRDFATVRKVLSMPQVNIVKKTEVQTGGFSKESILPKRNSDKLIARKKDWDPKKYGGFDSPTVAYSVLVVAKVEKGKSKKLKSVKELLGITIMERSSFEKNPIDFLEAKGYKEVKKDLIIKLPKYSLFELENGRKRMLASAGELQKGNELALPSKYVNFLYLASHYEKLKGSPEDNEQKQLFVEQHKHYLDEIIEQISEFSKRVILADANLDKVLSAYNKHRDKPIREQAENIIHLFTLTNLGAPAAFKYFDTTIDRKRYTSTKEVLDATLIHQSITGLYETRIDLSQLGGDGGGGGGSSPAPGGTLQLEEEYRLFEPESTQKQEMDIWLKNFPQAWAETGGMGTAHCQAPVLIQLKATATPISIRQYPMPHEAYQGIKPHIRRMLDQGILKPCQSPWNTPLLPVKKPGTEDYRPVQDLREVNKRVEDIHPTVPNPYNLLSTLPPSHPWYTVLDLKDAFFCLRLHSESQLLFAFEWRDPEIGLSGQLTWTRLPQGFKNSPTLFNEALHSDLADFRVRYPALVLLQYVDDLLLAAATRTECLEGTKALLETLGNKGYRASAKKAQICLQEVTYLGYSLKDGQRWLTKARKEAILSIPVPKNSRQVREFLGTAGYCRLWIPGFAELAAPLYPLTRPGTLFQWGTEQQLAFEDIKKALLSSPALGLPDITKPFELFIDENSGFAKGVLVQKLGPWKRPVAYLSKKLDTVASGWPPCLRMVAAIAILVKDAGKLTLGQPLTILTSHPVEALVRQPPNKWLSNARMTHYQAMLLDAERVHFGPTVSLNPATLLPLPSGGNHHDCLQILAETHGTRPDLTDQPLPDADLTWYTDGSSFIRNGEREAGAAVTTESEVIWAAPLPPGTSAQRAELIALTQALKMAEGKKLTVYTDSRYAFATTHVHGEIYRRRGWLTSEGKEIKNKNEILALLEALFLPKRLSIIHCPGHQKGDSPQAKGNRLADDTAKKAATETHSSLTVLPAGKRTADGSEFEKRTADGSEFESPKKKAKVE

SEQ ID NO: 1190 - protein, 2093 aa, synthetic construct
MPAAKRVKLDGGDKKYSIGLDIGTNSVGWAVITDEYKVPSKKFKVLGNTDRHSIKKNLIGALLFDSGETAEATRLKRTARRRYTRRKNRICYLQEIFSNEMAKVDDSFFHRLEESFLVEEDKKHERHPIFGNIVDEVAYHEKYPTIYHLRKKLVDSTDKADLRLIYLALAHMIKFRGHFLIEGDLNPDNSDVDKLFIQLVQTYNQLFEENPINASGVDAKAILSARLSKSRRLENLIAQLPGEKKNGLFGNLIALSLGLTPNFKSNFDLAEDAKLQLSKDTYDDDLDNLLAQIGDQYADLFLAAKNLSDAILLSDILRVNTEITKAPLSASMIKRYDEHHQDLTLLKALVRQQLPEKYKEIFFDQSKNGYAGYIDGGASQEEFYKFIKPILEKMDGTEELLVKLNREDLLRKQRTFDNGSIPHQIHLGELHAILRRQEDFYPFLKDNREKIEKILTFRIPYYVGPLARGNSRFAWMTRKSEETITPWNFEEVVDKGASAQSFIERMTNFDKNLPNEKVLPKHSLLYEYFTVYNELTKVKYVTEGMRKPAFLSGEQKKAIVDLLFKTNRKVTVKQLKEDYFKKIECFDSVEISGVEDRFNASLGTYHDLLKIIKDKDFLDNEENEDILEDIVLTLTLFEDREMIEERLKTYAHLFDDKVMKQLKRRRYTGWGRLSRKLINGIRDKQSGKTILDFLKSDGFANRNFMQLIHDDSLTFKEDIQKAQVSGQGDSLHEHIANLAGSPAIKKGILQTVKVVDELVKVMGRHKPENIVIEMARENQTTQKGQKNSRERMKRIEEGIKELGSQILKEHPVENTQLQNEKLYLYYLQNGRDMYVDQELDINRLSDYDVDHIVPQSFLKDDSIDNKVLTRSDKARGKSDNVPSEEVVKKMKNYWRQLLNAKLITQRKFDNLTKAERGGLSELDKAGFIKRQLVETRQITKHVAQILDSRMNTKYDENDKLIREVKVITLKSKLVSDFRKDFQFYKVREINNYHHAHDAYLNAVVGTALIKKYPKLESEFVYGDYKVYDVRKMIAKSEQEIGKATAKYFFYSNIMNFFKTEITLANGEIRKRPLIETNGETGEIVWDKGRDFATVRKVLSMPQVNIVKKTEVQTGGFSKESILPKRNSDKLIARKKDWDPKKYGGFDSPTVAYSVLVVAKVEKGKSKKLKSVKELLGITIMERSSFEKNPIDFLEAKGYKEVKKDLIIKLPKYSLFELENGRKRMLASAGELQKGNELALPSKYVNFLYLASHYEKLKGSPEDNEQKQLFVEQHKHYLDEIIEQISEFSKRVILADANLDKVLSAYNKHRDKPIREQAENIIHLFTLTNLGAPAAFKYFDTTIDRKRYTSTKEVLDATLIHQSITGLYETRIDLSQLGGDGGGGSGGGPAPGGTLQLEEEYRLFEPESTQKQEMDIWLKNFPQAWAETGGMGTAHCQAPVLIQLKATATPISIRQYPMPHEAYQGIKPHIRRMLDQGILKPCQSPWNTPLLPVKKPGTEDYRPVQDLREVNKRVEDIHPTVPNPYNLLSTLPPSHPWYTVLDLKDAFFCLRLHSESQLLFAFEWRDPEIGLSGQLTWTRLPQGFKNSPTLFNEALHSDLADFRVRYPALVLLQYVDDLLLAAATRTECLEGTKALLETLGNKGYRASAKKAQICLQEVTYLGYSLKDGQRWLTKARKEAILSIPVPKNSRQVREFLGTAGYCRLWIPGFAELAAPLYPLTRPGTLFQWGTEQQLAFEDIKKALLSSPALGLPDITKPFELFIDENSGFAKGVLVQKLGPWKRPVAYLSKKLDTVASGWPPCLRMVAAIAILVKDAGKLTLGQPLTILTSHPVEALVRQPPNKWLSNARMTHYQAMLLDAERVHFGPTVSLNPATLLPLPSGGNHHDCLQILAETHGTRPDLTDQPLPDADLTWYTDGSSFIRNGEREAGAAVTTESEVIWAAPLPPGTSAQRAELIALTQALKMAEGKKLTVYTDSRYAFATTHVHGEIYRRRGWLTSEGKEIKNKNEILALLEALFLPKRLSIIHCPGHQKGDSPQAKGNRLADDTAKKAATETHSSLTVLPAGKRTADGSEFEKRTADGSEFESPKKKAKVE

SEQ ID NO: 1191 - protein, 2095 aa, synthetic construct
MPAAKRVKLDGGDKKYSIGLDIGTNSVGWAVITDEYKVPSKKFKVLGNTDRHSIKKNLIGALLFDSGETAEATRLKRTARRRYTRRKNRICYLQEIFSNEMAKVDDSFFHRLEESFLVEEDKKHERHPIFGNIVDEVAYHEKYPTIYHLRKKLVDSTDKADLRLIYLALAHMIKFRGHFLIEGDLNPDNSDVDKLFIQLVQTYNQLFEENPINASGVDAKAILSARLSKSRRLENLIAQLPGEKKNGLFGNLIALSLGLTPNFKSNFDLAEDAKLQLSKDTYDDDLDNLLAQIGDQYADLFLAAKNLSDAILLSDILRVNTEITKAPLSASMIKRYDEHHQDLTLLKALVRQQLPEKYKEIFFDQSKNGYAGYIDGGASQEEFYKFIKPILEKMDGTEELLVKLNREDLLRKQRTFDNGSIPHQIHLGELHAILRRQEDFYPFLKDNREKIEKILTFRIPYYVGPLARGNSRFAWMTRKSEETITPWNFEEVVDKGASAQSFIERMTNFDKNLPNEKVLPKHSLLYEYFTVYNELTKVKYVTEGMRKPAFLSGEQKKAIVDLLFKTNRKVTVKQLKEDYFKKIECFDSVEISGVEDRFNASLGTYHDLLKIIKDKDFLDNEENEDILEDIVLTLTLFEDREMIEERLKTYAHLFDDKVMKQLKRRRYTGWGRLSRKLINGIRDKQSGKTILDFLKSDGFANRNFMQLIHDDSLTFKEDIQKAQVSGQGDSLHEHIANLAGSPAIKKGILQTVKVVDELVKVMGRHKPENIVIEMARENQTTQKGQKNSRERMKRIEEGIKELGSQILKEHPVENTQLQNEKLYLYYLQNGRDMYVDQELDINRLSDYDVDHIVPQSFLKDDSIDNKVLTRSDKARGKSDNVPSEEVVKKMKNYWRQLLNAKLITQRKFDNLTKAERGGLSELDKAGFIKRQLVETRQITKHVAQILDSRMNTKYDENDKLIREVKVITLKSKLVSDFRKDFQFYKVREINNYHHAHDAYLNAVVGTALIKKYPKLESEFVYGDYKVYDVRKMIAKSEQEIGKATAKYFFYSNIMNFFKTEITLANGEIRKRPLIETNGETGEIVWDKGRDFATVRKVLSMPQVNIVKKTEVQTGGFSKESILPKRNSDKLIARKKDWDPKKYGGFDSPTVAYSVLVVAKVEKGKSKKLKSVKELLGITIMERSSFEKNPIDFLEAKGYKEVKKDLIIKLPKYSLFELENGRKRMLASAGELQKGNELALPSKYVNFLYLASHYEKLKGSPEDNEQKQLFVEQHKHYLDEIIEQISEFSKRVILADANLDKVLSAYNKHRDKPIREQAENIIHLFTLTNLGAPAAFKYFDTTIDRKRYTSTKEVLDATLIHQSITGLYETRIDLSQLGGDGGGSSPAPEAAAKGGTLQLEEEYRLFEPESTQKQEMDIWLKNFPQAWAETGGMGTAHCQAPVLIQLKATATPISIRQYPMPHEAYQGIKPHIRRMLDQGILKPCQSPWNTPLLPVKKPGTEDYRPVQDLREVNKRVEDIHPTVPNPYNLLSTLPPSHPWYTVLDLKDAFFCLRLHSESQLLFAFEWRDPEIGLSGQLTWTRLPQGFKNSPTLFNEALHSDLADFRVRYPALVLLQYVDDLLLAAATRTECLEGTKALLETLGNKGYRASAKKAQICLQEVTYLGYSLKDGQRWLTKARKEAILSIPVPKNSRQVREFLGTAGYCRLWIPGFAELAAPLYPLTRPGTLFQWGTEQQLAFEDIKKALLSSPALGLPDITKPFELFIDENSGFAKGVLVQKLGPWKRPVAYLSKKLDTVASGWPPCLRMVAAIAILVKDAGKLTLGQPLTILTSHPVEALVRQPPNKWLSNARMTHYQAMLLDAERVHFGPTVSLNPATLLPLPSGGNHHDCLQILAETHGTRPDLTDQPLPDADLTWYTDGSSFIRNGEREAGAAVTTESEVIWAAPLPPGTSAQRAELIALTQALKMAEGKKLTVYTDSRYAFATTHVHGEIYRRRGWLTSEGKEIKNKNEILALLEALFLPKRLSIIHCPGHQKGDSPQAKGNRLADDTAKKAATETHSSLTVLPAGKRTADGSEFEKRTADGSEFESPKKKAKVE

SEQ ID NO: 1192 - protein, 2093 aa, synthetic construct
MPAAKRVKLDGGDKKYSIGLDIGTNSVGWAVITDEYKVPSKKFKVLGNTDRHSIKKNLIGALLFDSGETAEATRLKRTARRRYTRRKNRICYLQEIFSNEMAKVDDSFFHRLEESFLVEEDKKHERHPIFGNIVDEVAYHEKYPTIYHLRKKLVDSTDKADLRLIYLALAHMIKFRGHFLIEGDLNPDNSDVDKLFIQLVQTYNQLFEENPINASGVDAKAILSARLSKSRRLENLIAQLPGEKKNGLFGNLIALSLGLTPNFKSNFDLAEDAKLQLSKDTYDDDLDNLLAQIGDQYADLFLAAKNLSDAILLSDILRVNTEITKAPLSASMIKRYDEHHQDLTLLKALVRQQLPEKYKEIFFDQSKNGYAGYIDGGASQEEFYKFIKPILEKMDGTEELLVKLNREDLLRKQRTFDNGSIPHQIHLGELHAILRRQEDFYPFLKDNREKIEKILTFRIPYYVGPLARGNSRFAWMTRKSEETITPWNFEEVVDKGASAQSFIERMTNFDKNLPNEKVLPKHSLLYEYFTVYNELTKVKYVTEGMRKPAFLSGEQKKAIVDLLFKTNRKVTVKQLKEDYFKKIECFDSVEISGVEDRFNASLGTYHDLLKIIKDKDFLDNEENEDILEDIVLTLTLFEDREMIEERLKTYAHLFDDKVMKQLKRRRYTGWGRLSRKLINGIRDKQSGKTILDFLKSDGFANRNFMQLIHDDSLTFKEDIQKAQVSGQGDSLHEHIANLAGSPAIKKGILQTVKVVDELVKVMGRHKPENIVIEMARENQTTQKGQKNSRERMKRIEEGIKELGSQILKEHPVENTQLQNEKLYLYYLQNGRDMYVDQELDINRLSDYDVDHIVPQSFLKDDSIDNKVLTRSDKARGKSDNVPSEEVVKKMKNYWRQLLNAKLITQRKFDNLTKAERGGLSELDKAGFIKRQLVETRQITKHVAQILDSRMNTKYDENDKLIREVKVITLKSKLVSDFRKDFQFYKVREINNYHHAHDAYLNAVVGTALIKKYPKLESEFVYGDYKVYDVRKMIAKSEQEIGKATAKYFFYSNIMNFFKTEITLANGEIRKRPLIETNGETGEIVWDKGRDFATVRKVLSMPQVNIVKKTEVQTGGFSKESILPKRNSDKLIARKKDWDPKKYGGFDSPTVAYSVLVVAKVEKGKSKKLKSVKELLGITIMERSSFEKNPIDFLEAKGYKEVKKDLIIKLPKYSLFELENGRKRMLASAGELQKGNELALPSKYVNFLYLASHYEKLKGSPEDNEQKQLFVEQHKHYLDEIIEQISEFSKRVILADANLDKVLSAYNKHRDKPIREQAENIIHLFTLTNLGAPAAFKYFDTTIDRKRYTSTKEVLDATLIHQSITGLYETRIDLSQLGGDGGPAPGSSGGGGGTLQLEEEYRLFEPESTQKQEMDIWLKNFPQAWAETGGMGTAHCQAPVLIQLKATATPISIRQYPMPHEAYQGIKPHIRRMLDQGILKPCQSPWNTPLLPVKKPGTEDYRPVQDLREVNKRVEDIHPTVPNPYNLLSTLPPSHPWYTVLDLKDAFFCLRLHSESQLLFAFEWRDPEIGLSGQLTWTRLPQGFKNSPTLFNEALHSDLADFRVRYPALVLLQYVDDLLLAAATRTECLEGTKALLETLGNKGYRASAKKAQICLQEVTYLGYSLKDGQRWLTKARKEAILSIPVPKNSRQVREFLGTAGYCRLWIPGFAELAAPLYPLTRPGTLFQWGTEQQLAFEDIKKALLSSPALGLPDITKPFELFIDENSGFAKGVLVQKLGPWKRPVAYLSKKLDTVASGWPPCLRMVAAIAILVKDAGKLTLGQPLTILTSHPVEALVRQPPNKWLSNARMTHYQAMLLDAERVHFGPTVSLNPATLLPLPSGGNHHDCLQILAETHGTRPDLTDQPLPDADLTWYTDGSSFIRNGEREAGAAVTTESEVIWAAPLPPGTSAQRAELIALTQALKMAEGKKLTVYTDSRYAFATTHVHGEIYRRRGWLTSEGKEIKNKNEILALLEALFLPKRLSIIHCPGHQKGDSPQAKGNRLADDTAKKAATETHSSLTVLPAGKRTADGSEFEKRTADGSEFESPKKKAKVE

SEQ ID NO: 1193 - protein, 2090 aa, synthetic construct
MPAAKRVKLDGGDKKYSIGLDIGTNSVGWAVITDEYKVPSKKFKVLGNTDRHSIKKNLIGALLFDSGETAEATRLKRTARRRYTRRKNRICYLQEIFSNEMAKVDDSFFHRLEESFLVEEDKKHERHPIFGNIVDEVAYHEKYPTIYHLRKKLVDSTDKADLRLIYLALAHMIKFRGHFLIEGDLNPDNSDVDKLFIQLVQTYNQLFEENPINASGVDAKAILSARLSKSRRLENLIAQLPGEKKNGLFGNLIALSLGLTPNFKSNFDLAEDAKLQLSKDTYDDDLDNLLAQIGDQYADLFLAAKNLSDAILLSDILRVNTEITKAPLSASMIKRYDEHHQDLTLLKALVRQQLPEKYKEIFFDQSKNGYAGYIDGGASQEEFYKFIKPILEKMDGTEELLVKLNREDLLRKQRTFDNGSIPHQIHLGELHAILRRQEDFYPFLKDNREKIEKILTFRIPYYVGPLARGNSRFAWMTRKSEETITPWNFEEVVDKGASAQSFIERMTNFDKNLPNEKVLPKHSLLYEYFTVYNELTKVKYVTEGMRKPAFLSGEQKKAIVDLLFKTNRKVTVKQLKEDYFKKIECFDSVEISGVEDRFNASLGTYHDLLKIIKDKDFLDNEENEDILEDIVLTLTLFEDREMIEERLKTYAHLFDDKVMKQLKRRRYTGWGRLSRKLINGIRDKQSGKTILDFLKSDGFANRNFMQLIHDDSLTFKEDIQKAQVSGQGDSLHEHIANLAGSPAIKKGILQTVKVVDELVKVMGRHKPENIVIEMARENQTTQKGQKNSRERMKRIEEGIKELGSQILKEHPVENTQLQNEKLYLYYLQNGRDMYVDQELDINRLSDYDVDHIVPQSFLKDDSIDNKVLTRSDKARGKSDNVPSEEVVKKMKNYWRQLLNAKLITQRKFDNLTKAERGGLSELDKAGFIKRQLVETRQITKHVAQILDSRMNTKYDENDKLIREVKVITLKSKLVSDFRKDFQFYKVREINNYHHAHDAYLNAVVGTALIKKYPKLESEFVYGDYKVYDVRKMIAKSEQEIGKATAKYFFYSNIMNFFKTEITLANGEIRKRPLIETNGETGEIVWDKGRDFATVRKVLSMPQVNIVKKTEVQTGGFSKESILPKRNSDKLIARKKDWDPKKYGGFDSPTVAYSVLVVAKVEKGKSKKLKSVKELLGITIMERSSFEKNPIDFLEAKGYKEVKKDLIIKLPKYSLFELENGRKRMLASAGELQKGNELALPSKYVNFLYLASHYEKLKGSPEDNEQKQLFVEQHKHYLDEIIEQISEFSKRVILADANLDKVLSAYNKHRDKPIREQAENIIHLFTLTNLGAPAAFKYFDTTIDRKRYTSTKEVLDATLIHQSITGLYETRIDLSQLGGDGGGGSGGSGGTLQLEEEYRLFEPESTQKQEMDIWLKNFPQAWAETGGMGTAHCQAPVLIQLKATATPISIRQYPMPHEAYQGIKPHIRRMLDQGILKPCQSPWNTPLLPVKKPGTEDYRPVQDLREVNKRVEDIHPTVPNPYNLLSTLPPSHPWYTVLDLKDAFFCLRLHSESQLLFAFEWRDPEIGLSGQLTWTRLPQGFKNSPTLFNEALHSDLADFRVRYPALVLLQYVDDLLLAAATRTECLEGTKALLETLGNKGYRASAKKAQICLQEVTYLGYSLKDGQRWLTKARKEAILSIPVPKNSRQVREFLGTAGYCRLWIPGFAELAAPLYPLTRPGTLFQWGTEQQLAFEDIKKALLSSPALGLPDITKPFELFIDENSGFAKGVLVQKLGPWKRPVAYLSKKLDTVASGWPPCLRMVAAIAILVKDAGKLTLGQPLTILTSHPVEALVRQPPNKWLSNARMTHYQAMLLDAERVHFGPTVSLNPATLLPLPSGGNHHDCLQILAETHGTRPDLTDQPLPDADLTWYTDGSSFIRNGEREAGAAVTTESEVIWAAPLPPGTSAQRAELIALTQALKMAEGKKLTVYTDSRYAFATTHVHGEIYRRRGWLTSEGKEIKNKNEILALLEALFLPKRLSIIHCPGHQKGDSPQAKGNRLADDTAKKAATETHSSLTVLPAGKRTADGSEFEKRTADGSEFESPKKKAKVE

SEQ ID NO: 1194 - protein, 2093 aa, synthetic construct
MPAAKRVKLDGGDKKYSIGLDIGTNSVGWAVITDEYKVPSKKFKVLGNTDRHSIKKNLIGALLFDSGETAEATRLKRTARRRYTRRKNRICYLQEIFSNEMAKVDDSFFHRLEESFLVEEDKKHERHPIFGNIVDEVAYHEKYPTIYHLRKKLVDSTDKADLRLIYLALAHMIKFRGHFLIEGDLNPDNSDVDKLFIQLVQTYNQLFEENPINASGVDAKAILSARLSKSRRLENLIAQLPGEKKNGLFGNLIALSLGLTPNFKSNFDLAEDAKLQLSKDTYDDDLDNLLAQIGDQYADLFLAAKNLSDAILLSDILRVNTEITKAPLSASMIKRYDEHHQDLTLLKALVRQQLPEKYKEIFFDQSKNGYAGYIDGGASQEEFYKFIKPILEKMDGTEELLVKLNREDLLRKQRTFDNGSIPHQIHLGELHAILRRQEDFYPFLKDNREKIEKILTFRIPYYVGPLARGNSRFAWMTRKSEETITPWNFEEVVDKGASAQSFIERMTNFDKNLPNEKVLPKHSLLYEYFTVYNELTKVKYVTEGMRKPAFLSGEQKKAIVDLLFKTNRKVTVKQLKEDYFKKIECFDSVEISGVEDRFNASLGTYHDLLKIIKDKDFLDNEENEDILEDIVLTLTLFEDREMIEERLKTYAHLFDDKVMKQLKRRRYTGWGRLSRKLINGIRDKQSGKTILDFLKSDGFANRNFMQLIHDDSLTFKEDIQKAQVSGQGDSLHEHIANLAGSPAIKKGILQTVKVVDELVKVMGRHKPENIVIEMARENQTTQKGQKNSRERMKRIEEGIKELGSQILKEHPVENTQLQNEKLYLYYLQNGRDMYVDQELDINRLSDYDVDHIVPQSFLKDDSIDNKVLTRSDKARGKSDNVPSEEVVKKMKNYWRQLLNAKLITQRKFDNLTKAERGGLSELDKAGFIKRQLVETRQITKHVAQILDSRMNTKYDENDKLIREVKVITLKSKLVSDFRKDFQFYKVREINNYHHAHDAYLNAVVGTALIKKYPKLESEFVYGDYKVYDVRKMIAKSEQEIGKATAKYFFYSNIMNFFKTEITLANGEIRKRPLIETNGETGEIVWDKGRDFATVRKVLSMPQVNIVKKTEVQTGGFSKESILPKRNSDKLIARKKDWDPKKYGGFDSPTVAYSVLVVAKVEKGKSKKLKSVKELLGITIMERSSFEKNPIDFLEAKGYKEVKKDLIIKLPKYSLFELENGRKRMLASAGELQKGNELALPSKYVNFLYLASHYEKLKGSPEDNEQKQLFVEQHKHYLDEIIEQISEFSKRVILADANLDKVLSAYNKHRDKPIREQAENIIHLFTLTNLGAPAAFKYFDTTIDRKRYTSTKEVLDATLIHQSITGLYETRIDLSQLGGDGGGGSPAPGGGGGTLQLEEEYRLFEPESTQKQEMDIWLKNFPQAWAETGGMGTAHCQAPVLIQLKATATPISIRQYPMPHEAYQGIKPHIRRMLDQGILKPCQSPWNTPLLPVKKPGTEDYRPVQDLREVNKRVEDIHPTVPNPYNLLSTLPPSHPWYTVLDLKDAFFCLRLHSESQLLFAFEWRDPEIGLSGQLTWTRLPQGFKNSPTLFNEALHSDLADFRVRYPALVLLQYVDDLLLAAATRTECLEGTKALLETLGNKGYRASAKKAQICLQEVTYLGYSLKDGQRWLTKARKEAILSIPVPKNSRQVREFLGTAGYCRLWIPGFAELAAPLYPLTRPGTLFQWGTEQQLAFEDIKKALLSSPALGLPDITKPFELFIDENSGFAKGVLVQKLGPWKRPVAYLSKKLDTVASGWPPCLRMVAAIAILVKDAGKLTLGQPLTILTSHPVEALVRQPPNKWLSNARMTHYQAMLLDAERVHFGPTVSLNPATLLPLPSGGNHHDCLQILAETHGTRPDLTDQPLPDADLTWYTDGSSFIRNGEREAGAAVTTESEVIWAAPLPPGTSAQRAELIALTQALKMAEGKKLTVYTDSRYAFATTHVHGEIYRRRGWLTSEGKEIKNKNEILALLEALFLPKRLSIIHCPGHQKGDSPQAKGNRLADDTAKKAATETHSSLTVLPAGKRTADGSEFEKRTADGSEFESPKKKAKVE

SEQ ID NO: 1195 - protein, 2089 aa, synthetic construct
MPAAKRVKLDGGDKKYSIGLDIGTNSVGWAVITDEYKVPSKKFKVLGNTDRHSIKKNLIGALLFDSGETAEATRLKRTARRRYTRRKNRICYLQEIFSNEMAKVDDSFFHRLEESFLVEEDKKHERHPIFGNIVDEVAYHEKYPTIYHLRKKLVDSTDKADLRLIYLALAHMIKFRGHFLIEGDLNPDNSDVDKLFIQLVQTYNQLFEENPINASGVDAKAILSARLSKSRRLENLIAQLPGEKKNGLFGNLIALSLGLTPNFKSNFDLAEDAKLQLSKDTYDDDLDNLLAQIGDQYADLFLAAKNLSDAILLSDILRVNTEITKAPLSASMIKRYDEHHQDLTLLKALVRQQLPEKYKEIFFDQSKNGYAGYIDGGASQEEFYKFIKPILEKMDGTEELLVKLNREDLLRKQRTFDNGSIPHQIHLGELHAILRRQEDFYPFLKDNREKIEKILTFRIPYYVGPLARGNSRFAWMTRKSEETITPWNFEEVVDKGASAQSFIERMTNFDKNLPNEKVLPKHSLLYEYFTVYNELTKVKYVTEGMRKPAFLSGEQKKAIVDLLFKTNRKVTVKQLKEDYFKKIECFDSVEISGVEDRFNASLGTYHDLLKIIKDKDFLDNEENEDILEDIVLTLTLFEDREMIEERLKTYAHLFDDKVMKQLKRRRYTGWGRLSRKLINGIRDKQSGKTILDFLKSDGFANRNFMQLIHDDSLTFKEDIQKAQVSGQGDSLHEHIANLAGSPAIKKGILQTVKVVDELVKVMGRHKPENIVIEMARENQTTQKGQKNSRERMKRIEEGIKELGSQILKEHPVENTQLQNEKLYLYYLQNGRDMYVDQELDINRLSDYDVDHIVPQSFLKDDSIDNKVLTRSDKARGKSDNVPSEEVVKKMKNYWRQLLNAKLITQRKFDNLTKAERGGLSELDKAGFIKRQLVETRQITKHVAQILDSRMNTKYDENDKLIREVKVITLKSKLVSDFRKDFQFYKVREINNYHHAHDAYLNAVVGTALIKKYPKLESEFVYGDYKVYDVRKMIAKSEQEIGKATAKYFFYSNIMNFFKTEITLANGEIRKRPLIETNGETGEIVWDKGRDFATVRKVLSMPQVNIVKKTEVQTGGFSKESILPKRNSDKLIARKKDWDPKKYGGFDSPTVAYSVLVVAKVEKGKSKKLKSVKELLGITIMERSSFEKNPIDFLEAKGYKEVKKDLIIKLPKYSLFELENGRKRMLASAGELQKGNELALPSKYVNFLYLASHYEKLKGSPEDNEQKQLFVEQHKHYLDEIIEQISEFSKRVILADANLDKVLSAYNKHRDKPIREQAENIIHLFTLTNLGAPAAFKYFDTTIDRKRYTSTKEVLDATLIHQSITGLYETRIDLSQLGGDGGGGGGGGGTLQLEEEYRLFEPESTQKQEMDIWLKNFPQAWAETGGMGTAHCQAPVLIQLKATATPISIRQYPMPHEAYQGIKPHIRRMLDQGILKPCQSPWNTPLLPVKKPGTEDYRPVQDLREVNKRVEDIHPTVPNPYNLLSTLPPSHPWYTVLDLKDAFFCLRLHSESQLLFAFEWRDPEIGLSGQLTWTRLPQGFKNSPTLFNEALHSDLADFRVRYPALVLLQYVDDLLLAAATRTECLEGTKALLETLGNKGYRASAKKAQICLQEVTYLGYSLKDGQRWLTKARKEAILSIPVPKNSRQVREFLGTAGYCRLWIPGFAELAAPLYPLTRPGTLFQWGTEQQLAFEDIKKALLSSPALGLPDITKPFELFIDENSGFAKGVLVQKLGPWKRPVAYLSKKLDTVASGWPPCLRMVAAIAILVKDAGKLTLGQPLTILTSHPVEALVRQPPNKWLSNARMTHYQAMLLDAERVHFGPTVSLNPATLLPLPSGGNHHDCLQILAETHGTRPDLTDQPLPDADLTWYTDGSSFIRNGEREAGAAVTTESEVIWAAPLPPGTSAQRAELIALTQALKMAEGKKLTVYTDSRYAFATTHVHGEIYRRRGWLTSEGKEIKNKNEILALLEALFLPKRLSIIHCPGHQKGDSPQAKGNRLADDTAKKAATETHSSLTVLPAGKRTADGSEFEKRTADGSEFESPKKKAKVE

SEQ ID NO: 1196 - protein, 2093 aa, synthetic construct
MPAAKRVKLDGGDKKYSIGLDIGTNSVGWAVITDEYKVPSKKFKVLGNTDRHSIKKNLIGALLFDSGETAEATRLKRTARRRYTRRKNRICYLQEIFSNEMAKVDDSFFHRLEESFLVEEDKKHERHPIFGNIVDEVAYHEKYPTIYHLRKKLVDSTDKADLRLIYLALAHMIKFRGHFLIEGDLNPDNSDVDKLFIQLVQTYNQLFEENPINASGVDAKAILSARLSKSRRLENLIAQLPGEKKNGLFGNLIALSLGLTPNFKSNFDLAEDAKLQLSKDTYDDDLDNLLAQIGDQYADLFLAAKNLSDAILLSDILRVNTEITKAPLSASMIKRYDEHHQDLTLLKALVRQQLPEKYKEIFFDQSKNGYAGYIDGGASQEEFYKFIKPILEKMDGTEELLVKLNREDLLRKQRTFDNGSIPHQIHLGELHAILRRQEDFYPFLKDNREKIEKILTFRIPYYVGPLARGNSRFAWMTRKSEETITPWNFEEVVDKGASAQSFIERMTNFDKNLPNEKVLPKHSLLYEYFTVYNELTKVKYVTEGMRKPAFLSGEQKKAIVDLLFKTNRKVTVKQLKEDYFKKIECFDSVEISGVEDRFNASLGTYHDLLKIIKDKDFLDNEENEDILEDIVLTLTLFEDREMIEERLKTYAHLFDDKVMKQLKRRRYTGWGRLSRKLINGIRDKQSGKTILDFLKSDGFANRNFMQLIHDDSLTFKEDIQKAQVSGQGDSLHEHIANLAGSPAIKKGILQTVKVVDELVKVMGRHKPENIVIEMARENQTTQKGQKNSRERMKRIEEGIKELGSQILKEHPVENTQLQNEKLYLYYLQNGRDMYVDQELDINRLSDYDVDHIVPQSFLKDDSIDNKVLTRSDKARGKSDNVPSEEVVKKMKNYWRQLLNAKLITQRKFDNLTKAERGGLSELDKAGFIKRQLVETRQITKHVAQILDSRMNTKYDENDKLIREVKVITLKSKLVSDFRKDFQFYKVREINNYHHAHDAYLNAVVGTALIKKYPKLESEFVYGDYKVYDVRKMIAKSEQEIGKATAKYFFYSNIMNFFKTEITLANGEIRKRPLIETNGETGEIVWDKGRDFATVRKVLSMPQVNIVKKTEVQTGGFSKESILPKRNSDKLIARKKDWDPKKYGGFDSPTVAYSVLVVAKVEKGKSKKLKSVKELLGITIMERSSFEKNPIDFLEAKGYKEVKKDLIIKLPKYSLFELENGRKRMLASAGELQKGNELALPSKYVNFLYLASHYEKLKGSPEDNEQKQLFVEQHKHYLDEIIEQISEFSKRVILADANLDKVLSAYNKHRDKPIREQAENIIHLFTLTNLGAPAAFKYFDTTIDRKRYTSTKEVLDATLIHQSITGLYETRIDLSQLGGDGGPAPGGSGGGGGTLQLEEEYRLFEPESTQKQEMDIWLKNFPQAWAETGGMGTAHCQAPVLIQLKATATPISIRQYPMPHEAYQGIKPHIRRMLDQGILKPCQSPWNTPLLPVKKPGTEDYRPVQDLREVNKRVEDIHPTVPNPYNLLSTLPPSHPWYTVLDLKDAFFCLRLHSESQLLFAFEWRDPEIGLSGQLTWTRLPQGFKNSPTLFNEALHSDLADFRVRYPALVLLQYVDDLLLAAATRTECLEGTKALLETLGNKGYRASAKKAQICLQEVTYLGYSLKDGQRWLTKARKEAILSIPVPKNSRQVREFLGTAGYCRLWIPGFAELAAPLYPLTRPGTLFQWGTEQQLAFEDIKKALLSSPALGLPDITKPFELFIDENSGFAKGVLVQKLGPWKRPVAYLSKKLDTVASGWPPCLRMVAAIAILVKDAGKLTLGQPLTILTSHPVEALVRQPPNKWLSNARMTHYQAMLLDAERVHFGPTVSLNPATLLPLPSGGNHHDCLQILAETHGTRPDLTDQPLPDADLTWYTDGSSFIRNGEREAGAAVTTESEVIWAAPLPPGTSAQRAELIALTQALKMAEGKKLTVYTDSRYAFATTHVHGEIYRRRGWLTSEGKEIKNKNEILALLEALFLPKRLSIIHCPGHQKGDSPQAKGNRLADDTAKKAATETHSSLTVLPAGKRTADGSEFEKRTADGSEFESPKKKAKVE

SEQ ID NO: 1197 - protein, 2130 aa, synthetic construct
MPAAKRVKLDGGDKKYSIGLDIGTNSVGWAVITDEYKVPSKKFKVLGNTDRHSIKKNLIGALLFDSGETAEATRLKRTARRRYTRRKNRICYLQEIFSNEMAKVDDSFFHRLEESFLVEEDKKHERHPIFGNIVDEVAYHEKYPTIYHLRKKLVDSTDKADLRLIYLALAHMIKFRGHFLIEGDLNPDNSDVDKLFIQLVQTYNQLFEENPINASGVDAKAILSARLSKSRRLENLIAQLPGEKKNGLFGNLIALSLGLTPNFKSNFDLAEDAKLQLSKDTYDDDLDNLLAQIGDQYADLFLAAKNLSDAILLSDILRVNTEITKAPLSASMIKRYDEHHQDLTLLKALVRQQLPEKYKEIFFDQSKNGYAGYIDGGASQEEFYKFIKPILEKMDGTEELLVKLNREDLLRKQRTFDNGSIPHQIHLGELHAILRRQEDFYPFLKDNREKIEKILTFRIPYYVGPLARGNSRFAWMTRKSEETITPWNFEEVVDKGASAQSFIERMTNFDKNLPNEKVLPKHSLLYEYFTVYNELTKVKYVTEGMRKPAFLSGEQKKAIVDLLFKTNRKVTVKQLKEDYFKKIECFDSVEISGVEDRFNASLGTYHDLLKIIKDKDFLDNEENEDILEDIVLTLTLFEDREMIEERLKTYAHLFDDKVMKQLKRRRYTGWGRLSRKLINGIRDKQSGKTILDFLKSDGFANRNFMQLIHDDSLTFKEDIQKAQVSGQGDSLHEHIANLAGSPAIKKGILQTVKVVDELVKVMGRHKPENIVIEMARENQTTQKGQKNSRERMKRIEEGIKELGSQILKEHPVENTQLQNEKLYLYYLQNGRDMYVDQELDINRLSDYDVDHIVPQSFLKDDSIDNKVLTRSDKARGKSDNVPSEEVVKKMKNYWRQLLNAKLITQRKFDNLTKAERGGLSELDKAGFIKRQLVETRQITKHVAQILDSRMNTKYDENDKLIREVKVITLKSKLVSDFRKDFQFYKVREINNYHHAHDAYLNAVVGTALIKKYPKLESEFVYGDYKVYDVRKMIAKSEQEIGKATAKYFFYSNIMNFFKTEITLANGEIRKRPLIETNGETGEIVWDKGRDFATVRKVLSMPQVNIVKKTEVQTGGFSKESILPKRNSDKLIARKKDWDPKKYGGFDSPTVAYSVLVVAKVEKGKSKKLKSVKELLGITIMERSSFEKNPIDFLEAKGYKEVKKDLIIKLPKYSLFELENGRKRMLASAGELQKGNELALPSKYVNFLYLASHYEKLKGSPEDNEQKQLFVEQHKHYLDEIIEQISEFSKRVILADANLDKVLSAYNKHRDKPIREQAENIIHLFTLTNLGAPAAFKYFDTTIDRKRYTSTKEVLDATLIHQSITGLYETRIDLSQLGGDGGAEAAAKEAAAKEAAAKEAAAKALEAEAAAKEAAAKEAAAKEAAAKAGGTLQLEEEYRLFEPESTQKQEMDIWLKNFPQAWAETGGMGTAHCQAPVLIQLKATATPISIRQYPMPHEAYQGIKPHIRRMLDQGILKPCQSPWNTPLLPVKKPGTEDYRPVQDLREVNKRVEDIHPTVPNPYNLLSTLPPSHPWYTVLDLKDAFFCLRLHSESQLLFAFEWRDPEIGLSGQLTWTRLPQGFKNSPTLFNEALHSDLADFRVRYPALVLLQYVDDLLLAAATRTECLEGTKALLETLGNKGYRASAKKAQICLQEVTYLGYSLKDGQRWLTKARKEAILSIPVPKNSRQVREFLGKAGYCRLFIPGFAELAAPLYPLTRPGTLFQWGTEQQLAFEDIKKALLSSPALGLPDITKPFELFIDENSGFAKGVLVQKLGPWKRPVAYLSKKLDTVASGWPPCLRMVAAIAILVKDAGKLTLGQPLTILTSHPVEALVRQPPNKWLSNARMTHYQAMLLDAERVHFGPTVSLNPATLLPLPSGGNHHDCLQILAETHGTRPDLTDQPLPDADLTWYTDGSSFIRNGEREAGAAVTTESEVIWAAPLPPGTSAQRAELIALTQALKMAEGKKLTVYTDSRYAFATTHVHGEIYRRRGWLTSEGKEIKNKNEILALLEALFLPKRLSIIHCPGHQKGDSPQAKGNRLADDTAKKAATETHSSLTVLPAGKRTADGSEFEKRTADGSEFESPKKKAKVE

SEQ ID NO: 1198 - protein, 2104 aa, synthetic construct
MPAAKRVKLDGGDKKYSIGLDIGTNSVGWAVITDEYKVPSKKFKVLGNTDRHSIKKNLIGALLFDSGETAEATRLKRTARRRYTRRKNRICYLQEIFSNEMAKVDDSFFHRLEESFLVEEDKKHERHPIFGNIVDEVAYHEKYPTIYHLRKKLVDSTDKADLRLIYLALAHMIKFRGHFLIEGDLNPDNSDVDKLFIQLVQTYNQLFEENPINASGVDAKAILSARLSKSRRLENLIAQLPGEKKNGLFGNLIALSLGLTPNFKSNFDLAEDAKLQLSKDTYDDDLDNLLAQIGDQYADLFLAAKNLSDAILLSDILRVNTEITKAPLSASMIKRYDEHHQDLTLLKALVRQQLPEKYKEIFFDQSKNGYAGYIDGGASQEEFYKFIKPILEKMDGTEELLVKLNREDLLRKQRTFDNGSIPHQIHLGELHAILRRQEDFYPFLKDNREKIEKILTFRIPYYVGPLARGNSRFAWMTRKSEETITPWNFEEVVDKGASAQSFIERMTNFDKNLPNEKVLPKHSLLYEYFTVYNELTKVKYVTEGMRKPAFLSGEQKKAIVDLLFKTNRKVTVKQLKEDYFKKIECFDSVEISGVEDRFNASLGTYHDLLKIIKDKDFLDNEENEDILEDIVLTLTLFEDREMIEERLKTYAHLFDDKVMKQLKRRRYTGWGRLSRKLINGIRDKQSGKTILDFLKSDGFANRNFMQLIHDDSLTFKEDIQKAQVSGQGDSLHEHIANLAGSPAIKKGILQTVKVVDELVKVMGRHKPENIVIEMARENQTTQKGQKNSRERMKRIEEGIKELGSQILKEHPVENTQLQNEKLYLYYLQNGRDMYVDQELDINRLSDYDVDHIVPQSFLKDDSIDNKVLTRSDKARGKSDNVPSEEVVKKMKNYWRQLLNAKLITQRKFDNLTKAERGGLSELDKAGFIKRQLVETRQITKHVAQILDSRMNTKYDENDKLIREVKVITLKSKLVSDFRKDFQFYKVREINNYHHAHDAYLNAVVGTALIKKYPKLESEFVYGDYKVYDVRKMIAKSEQEIGKATAKYFFYSNIMNFFKTEITLANGEIRKRPLIETNGETGEIVWDKGRDFATVRKVLSMPQVNIVKKTEVQTGGFSKESILPKRNSDKLIARKKDWDPKKYGGFDSPTVAYSVLVVAKVEKGKSKKLKSVKELLGITIMERSSFEKNPIDFLEAKGYKEVKKDLIIKLPKYSLFELENGRKRMLASAGELQKGNELALPSKYVNFLYLASHYEKLKGSPEDNEQKQLFVEQHKHYLDEIIEQISEFSKRVILADANLDKVLSAYNKHRDKPIREQAENIIHLFTLTNLGAPAAFKYFDTTIDRKRYTSTKEVLDATLIHQSITGLYETRIDLSQLGGDGGEAAAKEAAAKEAAAKEAAAKGGTLQLEEEYRLFEPESTQKQEMDIWLKNFPQAWAETGGMGTAHCQAPVLIQLKATATPISIRQYPMPHEAYQGIKPHIRRMLDQGILKPCQSPWNTPLLPVKKPGTEDYRPVQDLREVNKRVEDIHPTVPNPYNLLSTLPPSHPWYTVLDLKDAFFCLRLHSESQLLFAFEWRDPEIGLSGQLTWTRLPQGFKNSPTLFNEALHSDLADFRVRYPALVLLQYVDDLLLAAATRTECLEGTKALLETLGNKGYRASAKKAQICLQEVTYLGYSLKDGQRWLTKARKEAILSIPVPKNSRQVREFLGKAGYCRLFIPGFAELAAPLYPLTRPGTLFQWGTEQQLAFEDIKKALLSSPALGLPDITKPFELFIDENSGFAKGVLVQKLGPWKRPVAYLSKKLDTVASGWPPCLRMVAAIAILVKDAGKLTLGQPLTILTSHPVEALVRQPPNKWLSNARMTHYQAMLLDAERVHFGPTVSLNPATLLPLPSGGNHHDCLQILAETHGTRPDLTDQPLPDADLTWYTDGSSFIRNGEREAGAAVTTESEVIWAAPLPPGTSAQRAELIALTQALKMAEGKKLTVYTDSRYAFATTHVHGEIYRRRGWLTSEGKEIKNKNEILALLEALFLPKRLSIIHCPGHQKGDSPQAKGNRLADDTAKKAATETHSSLTVLPAGKRTADGSEFEKRTADGSEFESPKKKAKVE

SEQ ID NO: 1199 - protein, 2114 aa, synthetic construct
MPAAKRVKLDGGDKKYSIGLDIGTNSVGWAVITDEYKVPSKKFKVLGNTDRHSIKKNLIGALLFDSGETAEATRLKRTARRRYTRRKNRICYLQEIFSNEMAKVDDSFFHRLEESFLVEEDKKHERHPIFGNIVDEVAYHEKYPTIYHLRKKLVDSTDKADLRLIYLALAHMIKFRGHFLIEGDLNPDNSDVDKLFIQLVQTYNQLFEENPINASGVDAKAILSARLSKSRRLENLIAQLPGEKKNGLFGNLIALSLGLTPNFKSNFDLAEDAKLQLSKDTYDDDLDNLLAQIGDQYADLFLAAKNLSDAILLSDILRVNTEITKAPLSASMIKRYDEHHQDLTLLKALVRQQLPEKYKEIFFDQSKNGYAGYIDGGASQEEFYKFIKPILEKMDGTEELLVKLNREDLLRKQRTFDNGSIPHQIHLGELHAILRRQEDFYPFLKDNREKIEKILTFRIPYYVGPLARGNSRFAWMTRKSEETITPWNFEEVVDKGASAQSFIERMTNFDKNLPNEKVLPKHSLLYEYFTVYNELTKVKYVTEGMRKPAFLSGEQKKAIVDLLFKTNRKVTVKQLKEDYFKKIECFDSVEISGVEDRFNASLGTYHDLLKIIKDKDFLDNEENEDILEDIVLTLTLFEDREMIEERLKTYAHLFDDKVMKQLKRRRYTGWGRLSRKLINGIRDKQSGKTILDFLKSDGFANRNFMQLIHDDSLTFKEDIQKAQVSGQGDSLHEHIANLAGSPAIKKGILQTVKVVDELVKVMGRHKPENIVIEMARENQTTQKGQKNSRERMKRIEEGIKELGSQILKEHPVENTQLQNEKLYLYYLQNGRDMYVDQELDINRLSDYDVDHIVPQSFLKDDSIDNKVLTRSDKARGKSDNVPSEEVVKKMKNYWRQLLNAKLITQRKFDNLTKAERGGLSELDKAGFIKRQLVETRQITKHVAQILDSRMNTKYDENDKLIREVKVITLKSKLVSDFRKDFQFYKVREINNYHHAHDAYLNAVVGTALIKKYPKLESEFVYGDYKVYDVRKMIAKSEQEIGKATAKYFFYSNIMNFFKTEITLANGEIRKRPLIETNGETGEIVWDKGRDFATVRKVLSMPQVNIVKKTEVQTGGFSKESILPKRNSDKLIARKKDWDPKKYGGFDSPTVAYSVLVVAKVEKGKSKKLKSVKELLGITIMERSSFEKNPIDFLEAKGYKEVKKDLIIKLPKYSLFELENGRKRMLASAGELQKGNELALPSKYVNFLYLASHYEKLKGSPEDNEQKQLFVEQHKHYLDEIIEQISEFSKRVILADANLDKVLSAYNKHRDKPIREQAENIIHLFTLTNLGAPAAFKYFDTTIDRKRYTSTKEVLDATLIHQSITGLYETRIDLSQLGGDGGEAAAKEAAAKEAAAKEAAAKEAAAKEAAAKGGTLQLEEEYRLFEPESTQKQEMDIWLKNFPQAWAETGGMGTAHCQAPVLIQLKATATPISIRQYPMPHEAYQGIKPHIRRMLDQGILKPCQSPWNTPLLPVKKPGTEDYRPVQDLREVNKRVEDIHPTVPNPYNLLSTLPPSHPWYTVLDLKDAFFCLRLHSESQLLFAFEWRDPEIGLSGQLTWTRLPQGFKNSPTLFNEALHSDLADFRVRYPALVLLQYVDDLLLAAATRTECLEGTKALLETLGNKGYRASAKKAQICLQEVTYLGYSLKDGQRWLTKARKEAILSIPVPKNSRQVREFLGKAGYCRLFIPGFAELAAPLYPLTRPGTLFQWGTEQQLAFEDIKKALLSSPALGLPDITKPFELFIDENSGFAKGVLVQKLGPWKRPVAYLSKKLDTVASGWPPCLRMVAAIAILVKDAGKLTLGQPLTILTSHPVEALVRQPPNKWLSNARMTHYQAMLLDAERVHFGPTVSLNPATLLPLPSGGNHHDCLQILAETHGTRPDLTDQPLPDADLTWYTDGSSFIRNGEREAGAAVTTESEVIWAAPLPPGTSAQRAELIALTQALKMAEGKKLTVYTDSRYAFATTHVHGEIYRRRGWLTSEGKEIKNKNEILALLEALFLPKRLSIIHCPGHQKGDSPQAKGNRLADDTAKKAATETHSSLTVLPAGKRTADGSEFEKRTADGSEFESPKKKAKVE

SEQ ID NO: 1200 - protein, 2095 aa, synthetic construct
MPAAKRVKLDGGDKKYSIGLDIGTNSVGWAVITDEYKVPSKKFKVLGNTDRHSIKKNLIGALLFDSGETAEATRLKRTARRRYTRRKNRICYLQEIFSNEMAKVDDSFFHRLEESFLVEEDKKHERHPIFGNIVDEVAYHEKYPTIYHLRKKLVDSTDKADLRLIYLALAHMIKFRGHFLIEGDLNPDNSDVDKLFIQLVQTYNQLFEENPINASGVDAKAILSARLSKSRRLENLIAQLPGEKKNGLFGNLIALSLGLTPNFKSNFDLAEDAKLQLSKDTYDDDLDNLLAQIGDQYADLFLAAKNLSDAILLSDILRVNTEITKAPLSASMIKRYDEHHQDLTLLKALVRQQLPEKYKEIFFDQSKNGYAGYIDGGASQEEFYKFIKPILEKMDGTEELLVKLNREDLLRKQRTFDNGSIPHQIHLGELHAILRRQEDFYPFLKDNREKIEKILTFRIPYYVGPLARGNSRFAWMTRKSEETITPWNFEEVVDKGASAQSFIERMTNFDKNLPNEKVLPKHSLLYEYFTVYNELTKVKYVTEGMRKPAFLSGEQKKAIVDLLFKTNRKVTVKQLKEDYFKKIECFDSVEISGVEDRFNASLGTYHDLLKIIKDKDFLDNEENEDILEDIVLTLTLFEDREMIEERLKTYAHLFDDKVMKQLKRRRYTGWGRLSRKLINGIRDKQSGKTILDFLKSDGFANRNFMQLIHDDSLTFKEDIQKAQVSGQGDSLHEHIANLAGSPAIKKGILQTVKVVDELVKVMGRHKPENIVIEMARENQTTQKGQKNSRERMKRIEEGIKELGSQILKEHPVENTQLQNEKLYLYYLQNGRDMYVDQELDINRLSDYDVDHIVPQSFLKDDSIDNKVLTRSDKARGKSDNVPSEEVVKKMKNYWRQLLNAKLITQRKFDNLTKAERGGLSELDKAGFIKRQLVETRQITKHVAQILDSRMNTKYDENDKLIREVKVITLKSKLVSDFRKDFQFYKVREINNYHHAHDAYLNAVVGTALIKKYPKLESEFVYGDYKVYDVRKMIAKSEQEIGKATAKYFFYSNIMNFFKTEITLANGEIRKRPLIETNGETGEIVWDKGRDFATVRKVLSMPQVNIVKKTEVQTGGFSKESILPKRNSDKLIARKKDWDPKKYGGFDSPTVAYSVLVVAKVEKGKSKKLKSVKELLGITIMERSSFEKNPIDFLEAKGYKEVKKDLIIKLPKYSLFELENGRKRMLASAGELQKGNELALPSKYVNFLYLASHYEKLKGSPEDNEQKQLFVEQHKHYLDEIIEQISEFSKRVILADANLDKVLSAYNKHRDKPIREQAENIIHLFTLTNLGAPAAFKYFDTTIDRKRYTSTKEVLDATLIHQSITGLYETRIDLSQLGGDGGPAPEAAAKGGGGGTLQLEEEYRLFEPESTQKQEMDIWLKNFPQAWAETGGMGTAHCQAPVLIQLKATATPISIRQYPMPHEAYQGIKPHIRRMLDQGILKPCQSPWNTPLLPVKKPGTEDYRPVQDLREVNKRVEDIHPTVPNPYNLLSTLPPSHPWYTVLDLKDAFFCLRLHSESQLLFAFEWRDPEIGLSGQLTWTRLPQGFKNSPTLFNEALHSDLADFRVRYPALVLLQYVDDLLLAAATRTECLEGTKALLETLGNKGYRASAKKAQICLQEVTYLGYSLKDGQRWLTKARKEAILSIPVPKNSRQVREFLGKAGYCRLFIPGFAELAAPLYPLTRPGTLFQWGTEQQLAFEDIKKALLSSPALGLPDITKPFELFIDENSGFAKGVLVQKLGPWKRPVAYLSKKLDTVASGWPPCLRMVAAIAILVKDAGKLTLGQPLTILTSHPVEALVRQPPNKWLSNARMTHYQAMLLDAERVHFGPTVSLNPATLLPLPSGGNHHDCLQILAETHGTRPDLTDQPLPDADLTWYTDGSSFIRNGEREAGAAVTTESEVIWAAPLPPGTSAQRAELIALTQALKMAEGKKLTVYTDSRYAFATTHVHGEIYRRRGWLTSEGKEIKNKNEILALLEALFLPKRLSIIHCPGHQKGDSPQAKGNRLADDTAKKAATETHSSLTVLPAGKRTADGSEFEKRTADGSEFESPKKKAKVE

SEQ ID NO: 1201 - protein, 2095 aa, synthetic construct
MPAAKRVKLDGGDKKYSIGLDIGTNSVGWAVITDEYKVPSKKFKVLGNTDRHSIKKNLIGALLFDSGETAEATRLKRTARRRYTRRKNRICYLQEIFSNEMAKVDDSFFHRLEESFLVEEDKKHERHPIFGNIVDEVAYHEKYPTIYHLRKKLVDSTDKADLRLIYLALAHMIKFRGHFLIEGDLNPDNSDVDKLFIQLVQTYNQLFEENPINASGVDAKAILSARLSKSRRLENLIAQLPGEKKNGLFGNLIALSLGLTPNFKSNFDLAEDAKLQLSKDTYDDDLDNLLAQIGDQYADLFLAAKNLSDAILLSDILRVNTEITKAPLSASMIKRYDEHHQDLTLLKALVRQQLPEKYKEIFFDQSKNGYAGYIDGGASQEEFYKFIKPILEKMDGTEELLVKLNREDLLRKQRTFDNGSIPHQIHLGELHAILRRQEDFYPFLKDNREKIEKILTFRIPYYVGPLARGNSRFAWMTRKSEETITPWNFEEVVDKGASAQSFIERMTNFDKNLPNEKVLPKHSLLYEYFTVYNELTKVKYVTEGMRKPAFLSGEQKKAIVDLLFKTNRKVTVKQLKEDYFKKIECFDSVEISGVEDRFNASLGTYHDLLKIIKDKDFLDNEENEDILEDIVLTLTLFEDREMIEERLKTYAHLFDDKVMKQLKRRRYTGWGRLSRKLINGIRDKQSGKTILDFLKSDGFANRNFMQLIHDDSLTFKEDIQKAQVSGQGDSLHEHIANLAGSPAIKKGILQTVKVVDELVKVMGRHKPENIVIEMARENQTTQKGQKNSRERMKRIEEGIKELGSQILKEHPVENTQLQNEKLYLYYLQNGRDMYVDQELDINRLSDYDVDHIVPQSFLKDDSIDNKVLTRSDKARGKSDNVPSEEVVKKMKNYWRQLLNAKLITQRKFDNLTKAERGGLSELDKAGFIKRQLVETRQITKHVAQILDSRMNTKYDENDKLIREVKVITLKSKLVSDFRKDFQFYKVREINNYHHAHDAYLNAVVGTALIKKYPKLESEFVYGDYKVYDVRKMIAKSEQEIGKATAKYFFYSNIMNFFKTEITLANGEIRKRPLIETNGETGEIVWDKGRDFATVRKVLSMPQVNIVKKTEVQTGGFSKESILPKRNSDKLIARKKDWDPKKYGGFDSPTVAYSVLVVAKVEKGKSKKLKSVKELLGITIMERSSFEKNPIDFLEAKGYKEVKKDLIIKLPKYSLFELENGRKRMLASAGELQKGNELALPSKYVNFLYLASHYEKLKGSPEDNEQKQLFVEQHKHYLDEIIEQISEFSKRVILADANLDKVLSAYNKHRDKPIREQAENIIHLFTLTNLGAPAAFKYFDTTIDRKRYTSTKEVLDATLIHQSITGLYETRIDLSQLGGDGGEAAAKGSSPAPGGTLQLEEEYRLFEPESTQKQEMDIWLKNFPQAWAETGGMGTAHCQAPVLIQLKATATPISIRQYPMPHEAYQGIKPHIRRMLDQGILKPCQSPWNTPLLPVKKPGTEDYRPVQDLREVNKRVEDIHPTVPNPYNLLSTLPPSHPWYTVLDLKDAFFCLRLHSESQLLFAFEWRDPEIGLSGQLTWTRLPQGFKNSPTLFNEALHSDLADFRVRYPALVLLQYVDDLLLAAATRTECLEGTKALLETLGNKGYRASAKKAQICLQEVTYLGYSLKDGQRWLTKARKEAILSIPVPKNSRQVREFLGKAGYCRLFIPGFAELAAPLYPLTRPGTLFQWGTEQQLAFEDIKKALLSSPALGLPDITKPFELFIDENSGFAKGVLVQKLGPWKRPVAYLSKKLDTVASGWPPCLRMVAAIAILVKDAGKLTLGQPLTILTSHPVEALVRQPPNKWLSNARMTHYQAMLLDAERVHFGPTVSLNPATLLPLPSGGNHHDCLQILAETHGTRPDLTDQPLPDADLTWYTDGSSFIRNGEREAGAAVTTESEVIWAAPLPPGTSAQRAELIALTQALKMAEGKKLTVYTDSRYAFATTHVHGEIYRRRGWLTSEGKEIKNKNEILALLEALFLPKRLSIIHCPGHQKGDSPQAKGNRLADDTAKKAATETHSSLTVLPAGKRTADGSEFEKRTADGSEFESPKKKAKVE

SEQ ID NO: 1202 - protein, 2109 aa, synthetic construct
MPAAKRVKLDGGDKKYSIGLDIGTNSVGWAVITDEYKVPSKKFKVLGNTDRHSIKKNLIGALLFDSGETAEATRLKRTARRRYTRRKNRICYLQEIFSNEMAKVDDSFFHRLEESFLVEEDKKHERHPIFGNIVDEVAYHEKYPTIYHLRKKLVDSTDKADLRLIYLALAHMIKFRGHFLIEGDLNPDNSDVDKLFIQLVQTYNQLFEENPINASGVDAKAILSARLSKSRRLENLIAQLPGEKKNGLFGNLIALSLGLTPNFKSNFDLAEDAKLQLSKDTYDDDLDNLLAQIGDQYADLFLAAKNLSDAILLSDILRVNTEITKAPLSASMIKRYDEHHQDLTLLKALVRQQLPEKYKEIFFDQSKNGYAGYIDGGASQEEFYKFIKPILEKMDGTEELLVKLNREDLLRKQRTFDNGSIPHQIHLGELHAILRRQEDFYPFLKDNREKIEKILTFRIPYYVGPLARGNSRFAWMTRKSEETITPWNFEEVVDKGASAQSFIERMTNFDKNLPNEKVLPKHSLLYEYFTVYNELTKVKYVTEGMRKPAFLSGEQKKAIVDLLFKTNRKVTVKQLKEDYFKKIECFDSVEISGVEDRFNASLGTYHDLLKIIKDKDFLDNEENEDILEDIVLTLTLFEDREMIEERLKTYAHLFDDKVMKQLKRRRYTGWGRLSRKLINGIRDKQSGKTILDFLKSDGFANRNFMQLIHDDSLTFKEDIQKAQVSGQGDSLHEHIANLAGSPAIKKGILQTVKVVDELVKVMGRHKPENIVIEMARENQTTQKGQKNSRERMKRIEEGIKELGSQILKEHPVENTQLQNEKLYLYYLQNGRDMYVDQELDINRLSDYDVDHIVPQSFLKDDSIDNKVLTRSDKARGKSDNVPSEEVVKKMKNYWRQLLNAKLITQRKFDNLTKAERGGLSELDKAGFIKRQLVETRQITKHVAQILDSRMNTKYDENDKLIREVKVITLKSKLVSDFRKDFQFYKVREINNYHHAHDAYLNAVVGTALIKKYPKLESEFVYGDYKVYDVRKMIAKSEQEIGKATAKYFFYSNIMNFFKTEITLANGEIRKRPLIETNGETGEIVWDKGRDFATVRKVLSMPQVNIVKKTEVQTGGFSKESILPKRNSDKLIARKKDWDPKKYGGFDSPTVAYSVLVVAKVEKGKSKKLKSVKELLGITIMERSSFEKNPIDFLEAKGYKEVKKDLIIKLPKYSLFELENGRKRMLASAGELQKGNELALPSKYVNFLYLASHYEKLKGSPEDNEQKQLFVEQHKHYLDEIIEQISEFSKRVILADANLDKVLSAYNKHRDKPIREQAENIIHLFTLTNLGAPAAFKYFDTTIDRKRYTSTKEVLDATLIHQSITGLYETRIDLSQLGGDGGGGGGSGGGGSGGGGSGGGGSGGGGSGGTLQLEEEYRLFEPESTQKQEMDIWLKNFPQAWAETGGMGTAHCQAPVLIQLKATATPISIRQYPMPHEAYQGIKPHIRRMLDQGILKPCQSPWNTPLLPVKKPGTEDYRPVQDLREVNKRVEDIHPTVPNPYNLLSTLPPSHPWYTVLDLKDAFFCLRLHSESQLLFAFEWRDPEIGLSGQLTWTRLPQGFKNSPTLFNEALHSDLADFRVRYPALVLLQYVDDLLLAAATRTECLEGTKALLETLGNKGYRASAKKAQICLQEVTYLGYSLKDGQRWLTKARKEAILSIPVPKNSRQVREFLGKAGYCRLFIPGFAELAAPLYPLTRPGTLFQWGTEQQLAFEDIKKALLSSPALGLPDITKPFELFIDENSGFAKGVLVQKLGPWKRPVAYLSKKLDTVASGWPPCLRMVAAIAILVKDAGKLTLGQPLTILTSHPVEALVRQPPNKWLSNARMTHYQAMLLDAERVHFGPTVSLNPATLLPLPSGGNHHDCLQILAETHGTRPDLTDQPLPDADLTWYTDGSSFIRNGEREAGAAVTTESEVIWAAPLPPGTSAQRAELIALTQALKMAEGKKLTVYTDSRYAFATTHVHGEIYRRRGWLTSEGKEIKNKNEILALLEALFLPKRLSIIHCPGHQKGDSPQAKGNRLADDTAKKAATETHSSLTVLPAGKRTADGSEFEKRTADGSEFESPKKKAKVE

SEQ ID NO: 1203 - protein, 2099 aa, synthetic construct
MPAAKRVKLDGGDKKYSIGLDIGTNSVGWAVITDEYKVPSKKFKVLGNTDRHSIKKNLIGALLFDSGETAEATRLKRTARRRYTRRKNRICYLQEIFSNEMAKVDDSFFHRLEESFLVEEDKKHERHPIFGNIVDEVAYHEKYPTIYHLRKKLVDSTDKADLRLIYLALAHMIKFRGHFLIEGDLNPDNSDVDKLFIQLVQTYNQLFEENPINASGVDAKAILSARLSKSRRLENLIAQLPGEKKNGLFGNLIALSLGLTPNFKSNFDLAEDAKLQLSKDTYDDDLDNLLAQIGDQYADLFLAAKNLSDAILLSDILRVNTEITKAPLSASMIKRYDEHHQDLTLLKALVRQQLPEKYKEIFFDQSKNGYAGYIDGGASQEEFYKFIKPILEKMDGTEELLVKLNREDLLRKQRTFDNGSIPHQIHLGELHAILRRQEDFYPFLKDNREKIEKILTFRIPYYVGPLARGNSRFAWMTRKSEETITPWNFEEVVDKGASAQSFIERMTNFDKNLPNEKVLPKHSLLYEYFTVYNELTKVKYVTEGMRKPAFLSGEQKKAIVDLLFKTNRKVTVKQLKEDYFKKIECFDSVEISGVEDRFNASLGTYHDLLKIIKDKDFLDNEENEDILEDIVLTLTLFEDREMIEERLKTYAHLFDDKVMKQLKRRRYTGWGRLSRKLINGIRDKQSGKTILDFLKSDGFANRNFMQLIHDDSLTFKEDIQKAQVSGQGDSLHEHIANLAGSPAIKKGILQTVKVVDELVKVMGRHKPENIVIEMARENQTTQKGQKNSRERMKRIEEGIKELGSQILKEHPVENTQLQNEKLYLYYLQNGRDMYVDQELDINRLSDYDVDHIVPQSFLKDDSIDNKVLTRSDKARGKSDNVPSEEVVKKMKNYWRQLLNAKLITQRKFDNLTKAERGGLSELDKAGFIKRQLVETRQITKHVAQILDSRMNTKYDENDKLIREVKVITLKSKLVSDFRKDFQFYKVREINNYHHAHDAYLNAVVGTALIKKYPKLESEFVYGDYKVYDVRKMIAKSEQEIGKATAKYFFYSNIMNFFKTEITLANGEIRKRPLIETNGETGEIVWDKGRDFATVRKVLSMPQVNIVKKTEVQTGGFSKESILPKRNSDKLIARKKDWDPKKYGGFDSPTVAYSVLVVAKVEKGKSKKLKSVKELLGITIMERSSFEKNPIDFLEAKGYKEVKKDLIIKLPKYSLFELENGRKRMLASAGELQKGNELALPSKYVNFLYLASHYEKLKGSPEDNEQKQLFVEQHKHYLDEIIEQISEFSKRVILADANLDKVLSAYNKHRDKPIREQAENIIHLFTLTNLGAPAAFKYFDTTIDRKRYTSTKEVLDATLIHQSITGLYETRIDLSQLGGDGGGGGGSEAAAKGGGGSGGTLQLEEEYRLFEPESTQKQEMDIWLKNFPQAWAETGGMGTAHCQAPVLIQLKATATPISIRQYPMPHEAYQGIKPHIRRMLDQGILKPCQSPWNTPLLPVKKPGTEDYRPVQDLREVNKRVEDIHPTVPNPYNLLSTLPPSHPWYTVLDLKDAFFCLRLHSESQLLFAFEWRDPEIGLSGQLTWTRLPQGFKNSPTLFNEALHSDLADFRVRYPALVLLQYVDDLLLAAATRTECLEGTKALLETLGNKGYRASAKKAQICLQEVTYLGYSLKDGQRWLTKARKEAILSIPVPKNSRQVREFLGKAGYCRLFIPGFAELAAPLYPLTRPGTLFQWGTEQQLAFEDIKKALLSSPALGLPDITKPFELFIDENSGFAKGVLVQKLGPWKRPVAYLSKKLDTVASGWPPCLRMVAAIAILVKDAGKLTLGQPLTILTSHPVEALVRQPPNKWLSNARMTHYQAMLLDAERVHFGPTVSLNPATLLPLPSGGNHHDCLQILAETHGTRPDLTDQPLPDADLTWYTDGSSFIRNGEREAGAAVTTESEVIWAAPLPPGTSAQRAELIALTQALKMAEGKKLTVYTDSRYAFATTHVHGEIYRRRGWLTSEGKEIKNKNEILALLEALFLPKRLSIIHCPGHQKGDSPQAKGNRLADDTAKKAATETHSSLTVLPAGKRTADGSEFEKRTADGSEFESPKKKAKVE

SEQ ID NO: 1204 - protein, 2092 aa, synthetic construct
MPAAKRVKLDGGDKKYSIGLDIGTNSVGWAVITDEYKVPSKKFKVLGNTDRHSIKKNLIGALLFDSGETAEATRLKRTARRRYTRRKNRICYLQEIFSNEMAKVDDSFFHRLEESFLVEEDKKHERHPIFGNIVDEVAYHEKYPTIYHLRKKLVDSTDKADLRLIYLALAHMIKFRGHFLIEGDLNPDNSDVDKLFIQLVQTYNQLFEENPINASGVDAKAILSARLSKSRRLENLIAQLPGEKKNGLFGNLIALSLGLTPNFKSNFDLAEDAKLQLSKDTYDDDLDNLLAQIGDQYADLFLAAKNLSDAILLSDILRVNTEITKAPLSASMIKRYDEHHQDLTLLKALVRQQLPEKYKEIFFDQSKNGYAGYIDGGASQEEFYKFIKPILEKMDGTEELLVKLNREDLLRKQRTFDNGSIPHQIHLGELHAILRRQEDFYPFLKDNREKIEKILTFRIPYYVGPLARGNSRFAWMTRKSEETITPWNFEEVVDKGASAQSFIERMTNFDKNLPNEKVLPKHSLLYEYFTVYNELTKVKYVTEGMRKPAFLSGEQKKAIVDLLFKTNRKVTVKQLKEDYFKKIECFDSVEISGVEDRFNASLGTYHDLLKIIKDKDFLDNEENEDILEDIVLTLTLFEDREMIEERLKTYAHLFDDKVMKQLKRRRYTGWGRLSRKLINGIRDKQSGKTILDFLKSDGFANRNFMQLIHDDSLTFKEDIQKAQVSGQGDSLHEHIANLAGSPAIKKGILQTVKVVDELVKVMGRHKPENIVIEMARENQTTQKGQKNSRERMKRIEEGIKELGSQILKEHPVENTQLQNEKLYLYYLQNGRDMYVDQELDINRLSDYDVDHIVPQSFLKDDSIDNKVLTRSDKARGKSDNVPSEEVVKKMKNYWRQLLNAKLITQRKFDNLTKAERGGLSELDKAGFIKRQLVETRQITKHVAQILDSRMNTKYDENDKLIREVKVITLKSKLVSDFRKDFQFYKVREINNYHHAHDAYLNAVVGTALIKKYPKLESEFVYGDYKVYDVRKMIAKSEQEIGKATAKYFFYSNIMNFFKTEITLANGEIRKRPLIETNGETGEIVWDKGRDFATVRKVLSMPQVNIVKKTEVQTGGFSKESILPKRNSDKLIARKKDWDPKKYGGFDSPTVAYSVLVVAKVEKGKSKKLKSVKELLGITIMERSSFEKNPIDFLEAKGYKEVKKDLIIKLPKYSLFELENGRKRMLASAGELQKGNELALPSKYVNFLYLASHYEKLKGSPEDNEQKQLFVEQHKHYLDEIIEQISEFSKRVILADANLDKVLSAYNKHRDKPIREQAENIIHLFTLTNLGAPAAFKYFDTTIDRKRYTSTKEVLDATLIHQSITGLYETRIDLSQLGGDGGGGSEAAAKGGTLQLEEEYRLFEPESTQKQEMDIWLKNFPQAWAETGGMGTAHCQAPVLIQLKATATPISIRQYPMPHEAYQGIKPHIRRMLDQGILKPCQSPWNTPLLPVKKPGTEDYRPVQDLREVNKRVEDIHPTVPNPYNLLSTLPPSHPWYTVLDLKDAFFCLRLHSESQLLFAFEWRDPEIGLSGQLTWTRLPQGFKNSPTLFNEALHSDLADFRVRYPALVLLQYVDDLLLAAATRTECLEGTKALLETLGNKGYRASAKKAQICLQEVTYLGYSLKDGQRWLTKARKEAILSIPVPKNSRQVREFLGKAGYCRLFIPGFAELAAPLYPLTRPGTLFQWGTEQQLAFEDIKKALLSSPALGLPDITKPFELFIDENSGFAKGVLVQKLGPWKRPVAYLSKKLDTVASGWPPCLRMVAAIAILVKDAGKLTLGQPLTILTSHPVEALVRQPPNKWLSNARMTHYQAMLLDAERVHFGPTVSLNPATLLPLPSGGNHHDCLQILAETHGTRPDLTDQPLPDADLTWYTDGSSFIRNGEREAGAAVTTESEVIWAAPLPPGTSAQRAELIALTQALKMAEGKKLTVYTDSRYAFATTHVHGEIYRRRGWLTSEGKEIKNKNEILALLEALFLPKRLSIIHCPGHQKGDSPQAKGNRLADDTAKKAATETHSSLTVLPAGKRTADGSEFEKRTADGSEFESPKKKAKVE

SEQ ID NO: 1205 - protein, 2100 aa, synthetic construct
MPAAKRVKLDGGDKKYSIGLDIGTNSVGWAVITDEYKVPSKKFKVLGNTDRHSIKKNLIGALLFDSGETAEATRLKRTARRRYTRRKNRICYLQEIFSNEMAKVDDSFFHRLEESFLVEEDKKHERHPIFGNIVDEVAYHEKYPTIYHLRKKLVDSTDKADLRLIYLALAHMIKFRGHFLIEGDLNPDNSDVDKLFIQLVQTYNQLFEENPINASGVDAKAILSARLSKSRRLENLIAQLPGEKKNGLFGNLIALSLGLTPNFKSNFDLAEDAKLQLSKDTYDDDLDNLLAQIGDQYADLFLAAKNLSDAILLSDILRVNTEITKAPLSASMIKRYDEHHQDLTLLKALVRQQLPEKYKEIFFDQSKNGYAGYIDGGASQEEFYKFIKPILEKMDGTEELLVKLNREDLLRKQRTFDNGSIPHQIHLGELHAILRRQEDFYPFLKDNREKIEKILTFRIPYYVGPLARGNSRFAWMTRKSEETITPWNFEEVVDKGASAQSFIERMTNFDKNLPNEKVLPKHSLLYEYFTVYNELTKVKYVTEGMRKPAFLSGEQKKAIVDLLFKTNRKVTVKQLKEDYFKKIECFDSVEISGVEDRFNASLGTYHDLLKIIKDKDFLDNEENEDILEDIVLTLTLFEDREMIEERLKTYAHLFDDKVMKQLKRRRYTGWGRLSRKLINGIRDKQSGKTILDFLKSDGFANRNFMQLIHDDSLTFKEDIQKAQVSGQGDSLHEHIANLAGSPAIKKGILQTVKVVDELVKVMGRHKPENIVIEMARENQTTQKGQKNSRERMKRIEEGIKELGSQILKEHPVENTQLQNEKLYLYYLQNGRDMYVDQELDINRLSDYDVDHIVPQSFLKDDSIDNKVLTRSDKARGKSDNVPSEEVVKKMKNYWRQLLNAKLITQRKFDNLTKAERGGLSELDKAGFIKRQLVETRQITKHVAQILDSRMNTKYDENDKLIREVKVITLKSKLVSDFRKDFQFYKVREINNYHHAHDAYLNAVVGTALIKKYPKLESEFVYGDYKVYDVRKMIAKSEQEIGKATAKYFFYSNIMNFFKTEITLANGEIRKRPLIETNGETGEIVWDKGRDFATVRKVLSMPQVNIVKKTEVQTGGFSKESILPKRNSDKLIARKKDWDPKKYGGFDSPTVAYSVLVVAKVEKGKSKKLKSVKELLGITIMERSSFEKNPIDFLEAKGYKEVKKDLIIKLPKYSLFELENGRKRMLASAGELQKGNELALPSKYVNFLYLASHYEKLKGSPEDNEQKQLFVEQHKHYLDEIIEQISEFSKRVILADANLDKVLSAYNKHRDKPIREQAENIIHLFTLTNLGAPAAFKYFDTTIDRKRYTSTKEVLDATLIHQSITGLYETRIDLSQLGGDGGSGSETPGTSESATPESGGTLQLEEEYRLFEPESTQKQEMDIWLKNFPQAWAETGGMGTAHCQAPVLIQLKATATPISIRQYPMPHEAYQGIKPHIRRMLDQGILKPCQSPWNTPLLPVKKPGTEDYRPVQDLREVNKRVEDIHPTVPNPYNLLSTLPPSHPWYTVLDLKDAFFCLRLHSESQLLFAFEWRDPEIGLSGQLTWTRLPQGFKNSPTLFNEALHSDLADFRVRYPALVLLQYVDDLLLAAATRTECLEGTKALLETLGNKGYRASAKKAQICLQEVTYLGYSLKDGQRWLTKARKEAILSIPVPKNSRQVREFLGKAGYCRLFIPGFAELAAPLYPLTRPGTLFQWGTEQQLAFEDIKKALLSSPALGLPDITKPFELFIDENSGFAKGVLVQKLGPWKRPVAYLSKKLDTVASGWPPCLRMVAAIAILVKDAGKLTLGQPLTILTSHPVEALVRQPPNKWLSNARMTHYQAMLLDAERVHFGPTVSLNPATLLPLPSGGNHHDCLQILAETHGTRPDLTDQPLPDADLTWYTDGSSFIRNGEREAGAAVTTESEVIWAAPLPPGTSAQRAELIALTQALKMAEGKKLTVYTDSRYAFATTHVHGEIYRRRGWLTSEGKEIKNKNEILALLEALFLPKRLSIIHCPGHQKGDSPQAKGNRLADDTAKKAATETHSSLTVLPAGKRTADGSEFEKRTADGSEFESPKKKAKVE

SEQ ID NO: 1206 - protein, 2094 aa, synthetic construct
MPAAKRVKLDGGDKKYSIGLDIGTNSVGWAVITDEYKVPSKKFKVLGNTDRHSIKKNLIGALLFDSGETAEATRLKRTARRRYTRRKNRICYLQEIFSNEMAKVDDSFFHRLEESFLVEEDKKHERHPIFGNIVDEVAYHEKYPTIYHLRKKLVDSTDKADLRLIYLALAHMIKFRGHFLIEGDLNPDNSDVDKLFIQLVQTYNQLFEENPINASGVDAKAILSARLSKSRRLENLIAQLPGEKKNGLFGNLIALSLGLTPNFKSNFDLAEDAKLQLSKDTYDDDLDNLLAQIGDQYADLFLAAKNLSDAILLSDILRVNTEITKAPLSASMIKRYDEHHQDLTLLKALVRQQLPEKYKEIFFDQSKNGYAGYIDGGASQEEFYKFIKPILEKMDGTEELLVKLNREDLLRKQRTFDNGSIPHQIHLGELHAILRRQEDFYPFLKDNREKIEKILTFRIPYYVGPLARGNSRFAWMTRKSEETITPWNFEEVVDKGASAQSFIERMTNFDKNLPNEKVLPKHSLLYEYFTVYNELTKVKYVTEGMRKPAFLSGEQKKAIVDLLFKTNRKVTVKQLKEDYFKKIECFDSVEISGVEDRFNASLGTYHDLLKIIKDKDFLDNEENEDILEDIVLTLTLFEDREMIEERLKTYAHLFDDKVMKQLKRRRYTGWGRLSRKLINGIRDKQSGKTILDFLKSDGFANRNFMQLIHDDSLTFKEDIQKAQVSGQGDSLHEHIANLAGSPAIKKGILQTVKVVDELVKVMGRHKPENIVIEMARENQTTQKGQKNSRERMKRIEEGIKELGSQILKEHPVENTQLQNEKLYLYYLQNGRDMYVDQELDINRLSDYDVDHIVPQSFLKDDSIDNKVLTRSDKARGKSDNVPSEEVVKKMKNYWRQLLNAKLITQRKFDNLTKAERGGLSELDKAGFIKRQLVETRQITKHVAQILDSRMNTKYDENDKLIREVKVITLKSKLVSDFRKDFQFYKVREINNYHHAHDAYLNAVVGTALIKKYPKLESEFVYGDYKVYDVRKMIAKSEQEIGKATAKYFFYSNIMNFFKTEITLANGEIRKRPLIETNGETGEIVWDKGRDFATVRKVLSMPQVNIVKKTEVQTGGFSKESILPKRNSDKLIARKKDWDPKKYGGFDSPTVAYSVLVVAKVEKGKSKKLKSVKELLGITIMERSSFEKNPIDFLEAKGYKEVKKDLIIKLPKYSLFELENGRKRMLASAGELQKGNELALPSKYVNFLYLASHYEKLKGSPEDNEQKQLFVEQHKHYLDEIIEQISEFSKRVILADANLDKVLSAYNKHRDKPIREQAENIIHLFTLTNLGAPAAFKYFDTTIDRKRYTSTKEVLDATLIHQSITGLYETRIDLSQLGGDGGEAAAKEAAAKGGTLQLEEEYRLFEPESTQKQEMDIWLKNFPQAWAETGGMGTAHCQAPVLIQLKATATPISIRQYPMPHEAYQGIKPHIRRMLDQGILKPCQSPWNTPLLPVKKPGTEDYRPVQDLREVNKRVEDIHPTVPNPYNLLSTLPPSHPWYTVLDLKDAFFCLRLHSESQLLFAFEWRDPEIGLSGQLTWTRLPQGFKNSPTLFNEALHSDLADFRVRYPALVLLQYVDDLLLAAATRTECLEGTKALLETLGNKGYRASAKKAQICLQEVTYLGYSLKDGQRWLTKARKEAILSIPVPKNSRQVREFLGKAGYCRLFIPGFAELAAPLYPLTRPGTLFQWGTEQQLAFEDIKKALLSSPALGLPDITKPFELFIDENSGFAKGVLVQKLGPWKRPVAYLSKKLDTVASGWPPCLRMVAAIAILVKDAGKLTLGQPLTILTSHPVEALVRQPPNKWLSNARMTHYQAMLLDAERVHFGPTVSLNPATLLPLPSGGNHHDCLQILAETHGTRPDLTDQPLPDADLTWYTDGSSFIRNGEREAGAAVTTESEVIWAAPLPPGTSAQRAELIALTQALKMAEGKKLTVYTDSRYAFATTHVHGEIYRRRGWLTSEGKEIKNKNEILALLEALFLPKRLSIIHCPGHQKGDSPQAKGNRLADDTAKKAATETHSSLTVLPAGKRTADGSEFEKRTADGSEFESPKKKAKVE

SEQ ID NO: 1207 - protein, 2096 aa, synthetic construct
MPAAKRVKLDGGDKKYSIGLDIGTNSVGWAVITDEYKVPSKKFKVLGNTDRHSIKKNLIGALLFDSGETAEATRLKRTARRRYTRRKNRICYLQEIFSNEMAKVDDSFFHRLEESFLVEEDKKHERHPIFGNIVDEVAYHEKYPTIYHLRKKLVDSTDKADLRLIYLALAHMIKFRGHFLIEGDLNPDNSDVDKLFIQLVQTYNQLFEENPINASGVDAKAILSARLSKSRRLENLIAQLPGEKKNGLFGNLIALSLGLTPNFKSNFDLAEDAKLQLSKDTYDDDLDNLLAQIGDQYADLFLAAKNLSDAILLSDILRVNTEITKAPLSASMIKRYDEHHQDLTLLKALVRQQLPEKYKEIFFDQSKNGYAGYIDGGASQEEFYKFIKPILEKMDGTEELLVKLNREDLLRKQRTFDNGSIPHQIHLGELHAILRRQEDFYPFLKDNREKIEKILTFRIPYYVGPLARGNSRFAWMTRKSEETITPWNFEEVVDKGASAQSFIERMTNFDKNLPNEKVLPKHSLLYEYFTVYNELTKVKYVTEGMRKPAFLSGEQKKAIVDLLFKTNRKVTVKQLKEDYFKKIECFDSVEISGVEDRFNASLGTYHDLLKIIKDKDFLDNEENEDILEDIVLTLTLFEDREMIEERLKTYAHLFDDKVMKQLKRRRYTGWGRLSRKLINGIRDKQSGKTILDFLKSDGFANRNFMQLIHDDSLTFKEDIQKAQVSGQGDSLHEHIANLAGSPAIKKGILQTVKVVDELVKVMGRHKPENIVIEMARENQTTQKGQKNSRERMKRIEEGIKELGSQILKEHPVENTQLQNEKLYLYYLQNGRDMYVDQELDINRLSDYDVDHIVPQSFLKDDSIDNKVLTRSDKARGKSDNVPSEEVVKKMKNYWRQLLNAKLITQRKFDNLTKAERGGLSELDKAGFIKRQLVETRQITKHVAQILDSRMNTKYDENDKLIREVKVITLKSKLVSDFRKDFQFYKVREINNYHHAHDAYLNAVVGTALIKKYPKLESEFVYGDYKVYDVRKMIAKSEQEIGKATAKYFFYSNIMNFFKTEITLANGEIRKRPLIETNGETGEIVWDKGRDFATVRKVLSMPQVNIVKKTEVQTGGFSKESILPKRNSDKLIARKKDWDPKKYGGFDSPTVAYSVLVVAKVEKGKSKKLKSVKELLGITIMERSSFEKNPIDFLEAKGYKEVKKDLIIKLPKYSLFELENGRKRMLASAGELQKGNELALPSKYVNFLYLASHYEKLKGSPEDNEQKQLFVEQHKHYLDEIIEQISEFSKRVILADANLDKVLSAYNKHRDKPIREQAENIIHLFTLTNLGAPAAFKYFDTTIDRKRYTSTKEVLDATLIHQSITGLYETRIDLSQLGGDGGGGSGGSGGSGGSGGTLQLEEEYRLFEPESTQKQEMDIWLKNFPQAWAETGGMGTAHCQAPVLIQLKATATPISIRQYPMPHEAYQGIKPHIRRMLDQGILKPCQSPWNTPLLPVKKPGTEDYRPVQDLREVNKRVEDIHPTVPNPYNLLSTLPPSHPWYTVLDLKDAFFCLRLHSESQLLFAFEWRDPEIGLSGQLTWTRLPQGFKNSPTLFNEALHSDLADFRVRYPALVLLQYVDDLLLAAATRTECLEGTKALLETLGNKGYRASAKKAQICLQEVTYLGYSLKDGQRWLTKARKEAILSIPVPKNSRQVREFLGKAGYCRLFIPGFAELAAPLYPLTRPGTLFQWGTEQQLAFEDIKKALLSSPALGLPDITKPFELFIDENSGFAKGVLVQKLGPWKRPVAYLSKKLDTVASGWPPCLRMVAAIAILVKDAGKLTLGQPLTILTSHPVEALVRQPPNKWLSNARMTHYQAMLLDAERVHFGPTVSLNPATLLPLPSGGNHHDCLQILAETHGTRPDLTDQPLPDADLTWYTDGSSFIRNGEREAGAAVTTESEVIWAAPLPPGTSAQRAELIALTQALKMAEGKKLTVYTDSRYAFATTHVHGEIYRRRGWLTSEGKEIKNKNEILALLEALFLPKRLSIIHCPGHQKGDSPQAKGNRLADDTAKKAATETHSSLTVLPAGKRTADGSEFEKRTADGSEFESPKKKAKVE

SEQ ID NO: 1208 - protein, 2095 aa, synthetic construct
MPAAKRVKLDGGDKKYSIGLDIGTNSVGWAVITDEYKVPSKKFKVLGNTDRHSIKKNLIGALLFDSGETAEATRLKRTARRRYTRRKNRICYLQEIFSNEMAKVDDSFFHRLEESFLVEEDKKHERHPIFGNIVDEVAYHEKYPTIYHLRKKLVDSTDKADLRLIYLALAHMIKFRGHFLIEGDLNPDNSDVDKLFIQLVQTYNQLFEENPINASGVDAKAILSARLSKSRRLENLIAQLPGEKKNGLFGNLIALSLGLTPNFKSNFDLAEDAKLQLSKDTYDDDLDNLLAQIGDQYADLFLAAKNLSDAILLSDILRVNTEITKAPLSASMIKRYDEHHQDLTLLKALVRQQLPEKYKEIFFDQSKNGYAGYIDGGASQEEFYKFIKPILEKMDGTEELLVKLNREDLLRKQRTFDNGSIPHQIHLGELHAILRRQEDFYPFLKDNREKIEKILTFRIPYYVGPLARGNSRFAWMTRKSEETITPWNFEEVVDKGASAQSFIERMTNFDKNLPNEKVLPKHSLLYEYFTVYNELTKVKYVTEGMRKPAFLSGEQKKAIVDLLFKTNRKVTVKQLKEDYFKKIECFDSVEISGVEDRFNASLGTYHDLLKIIKDKDFLDNEENEDILEDIVLTLTLFEDREMIEERLKTYAHLFDDKVMKQLKRRRYTGWGRLSRKLINGIRDKQSGKTILDFLKSDGFANRNFMQLIHDDSLTFKEDIQKAQVSGQGDSLHEHIANLAGSPAIKKGILQTVKVVDELVKVMGRHKPENIVIEMARENQTTQKGQKNSRERMKRIEEGIKELGSQILKEHPVENTQLQNEKLYLYYLQNGRDMYVDQELDINRLSDYDVDHIVPQSFLKDDSIDNKVLTRSDKARGKSDNVPSEEVVKKMKNYWRQLLNAKLITQRKFDNLTKAERGGLSELDKAGFIKRQLVETRQITKHVAQILDSRMNTKYDENDKLIREVKVITLKSKLVSDFRKDFQFYKVREINNYHHAHDAYLNAVVGTALIKKYPKLESEFVYGDYKVYDVRKMIAKSEQEIGKATAKYFFYSNIMNFFKTEITLANGEIRKRPLIETNGETGEIVWDKGRDFATVRKVLSMPQVNIVKKTEVQTGGFSKESILPKRNSDKLIARKKDWDPKKYGGFDSPTVAYSVLVVAKVEKGKSKKLKSVKELLGITIMERSSFEKNPIDFLEAKGYKEVKKDLIIKLPKYSLFELENGRKRMLASAGELQKGNELALPSKYVNFLYLASHYEKLKGSPEDNEQKQLFVEQHKHYLDEIIEQISEFSKRVILADANLDKVLSAYNKHRDKPIREQAENIIHLFTLTNLGAPAAFKYFDTTIDRKRYTSTKEVLDATLIHQSITGLYETRIDLSQLGGDGGPAPEAAAKGSSGGTLQLEEEYRLFEPESTQKQEMDIWLKNFPQAWAETGGMGTAHCQAPVLIQLKATATPISIRQYPMPHEAYQGIKPHIRRMLDQGILKPCQSPWNTPLLPVKKPGTEDYRPVQDLREVNKRVEDIHPTVPNPYNLLSTLPPSHPWYTVLDLKDAFFCLRLHSESQLLFAFEWRDPEIGLSGQLTWTRLPQGFKNSPTLFNEALHSDLADFRVRYPALVLLQYVDDLLLAAATRTECLEGTKALLETLGNKGYRASAKKAQICLQEVTYLGYSLKDGQRWLTKARKEAILSIPVPKNSRQVREFLGKAGYCRLFIPGFAELAAPLYPLTRPGTLFQWGTEQQLAFEDIKKALLSSPALGLPDITKPFELFIDENSGFAKGVLVQKLGPWKRPVAYLSKKLDTVASGWPPCLRMVAAIAILVKDAGKLTLGQPLTILTSHPVEALVRQPPNKWLSNARMTHYQAMLLDAERVHFGPTVSLNPATLLPLPSGGNHHDCLQILAETHGTRPDLTDQPLPDADLTWYTDGSSFIRNGEREAGAAVTTESEVIWAAPLPPGTSAQRAELIALTQALKMAEGKKLTVYTDSRYAFATTHVHGEIYRRRGWLTSEGKEIKNKNEILALLEALFLPKRLSIIHCPGHQKGDSPQAKGNRLADDTAKKAATETHSSLTVLPAGKRTADGSEFEKRTADGSEFESPKKKAKVE

SEQ ID NO: 1209 - protein, 2114 aa, synthetic construct
MPAAKRVKLDGGDKKYSIGLDIGTNSVGWAVITDEYKVPSKKFKVLGNTDRHSIKKNLIGALLFDSGETAEATRLKRTARRRYTRRKNRICYLQEIFSNEMAKVDDSFFHRLEESFLVEEDKKHERHPIFGNIVDEVAYHEKYPTIYHLRKKLVDSTDKADLRLIYLALAHMIKFRGHFLIEGDLNPDNSDVDKLFIQLVQTYNQLFEENPINASGVDAKAILSARLSKSRRLENLIAQLPGEKKNGLFGNLIALSLGLTPNFKSNFDLAEDAKLQLSKDTYDDDLDNLLAQIGDQYADLFLAAKNLSDAILLSDILRVNTEITKAPLSASMIKRYDEHHQDLTLLKALVRQQLPEKYKEIFFDQSKNGYAGYIDGGASQEEFYKFIKPILEKMDGTEELLVKLNREDLLRKQRTFDNGSIPHQIHLGELHAILRRQEDFYPFLKDNREKIEKILTFRIPYYVGPLARGNSRFAWMTRKSEETITPWNFEEVVDKGASAQSFIERMTNFDKNLPNEKVLPKHSLLYEYFTVYNELTKVKYVTEGMRKPAFLSGEQKKAIVDLLFKTNRKVTVKQLKEDYFKKIECFDSVEISGVEDRFNASLGTYHDLLKIIKDKDFLDNEENEDILEDIVLTLTLFEDREMIEERLKTYAHLFDDKVMKQLKRRRYTGWGRLSRKLINGIRDKQSGKTILDFLKSDGFANRNFMQLIHDDSLTFKEDIQKAQVSGQGDSLHEHIANLAGSPAIKKGILQTVKVVDELVKVMGRHKPENIVIEMARENQTTQKGQKNSRERMKRIEEGIKELGSQILKEHPVENTQLQNEKLYLYYLQNGRDMYVDQELDINRLSDYDVDHIVPQSFLKDDSIDNKVLTRSDKARGKSDNVPSEEVVKKMKNYWRQLLNAKLITQRKFDNLTKAERGGLSELDKAGFIKRQLVETRQITKHVAQILDSRMNTKYDENDKLIREVKVITLKSKLVSDFRKDFQFYKVREINNYHHAHDAYLNAVVGTALIKKYPKLESEFVYGDYKVYDVRKMIAKSEQEIGKATAKYFFYSNIMNFFKTEITLANGEIRKRPLIETNGETGEIVWDKGRDFATVRKVLSMPQVNIVKKTEVQTGGFSKESILPKRNSDKLIARKKDWDPKKYGGFDSPTVAYSVLVVAKVEKGKSKKLKSVKELLGITIMERSSFEKNPIDFLEAKGYKEVKKDLIIKLPKYSLFELENGRKRMLASAGELQKGNELALPSKYVNFLYLASHYEKLKGSPEDNEQKQLFVEQHKHYLDEIIEQISEFSKRVILADANLDKVLSAYNKHRDKPIREQAENIIHLFTLTNLGAPAAFKYFDTTIDRKRYTSTKEVLDATLIHQSITGLYETRIDLSQLGGDGGGGGGSGGGGSGGGGSGGGGSGGGGSGGGGSGGTLQLEEEYRLFEPESTQKQEMDIWLKNFPQAWAETGGMGTAHCQAPVLIQLKATATPISIRQYPMPHEAYQGIKPHIRRMLDQGILKPCQSPWNTPLLPVKKPGTEDYRPVQDLREVNKRVEDIHPTVPNPYNLLSTLPPSHPWYTVLDLKDAFFCLRLHSESQLLFAFEWRDPEIGLSGQLTWTRLPQGFKNSPTLFNEALHSDLADFRVRYPALVLLQYVDDLLLAAATRTECLEGTKALLETLGNKGYRASAKKAQICLQEVTYLGYSLKDGQRWLTKARKEAILSIPVPKNSRQVREFLGKAGYCRLFIPGFAELAAPLYPLTRPGTLFQWGTEQQLAFEDIKKALLSSPALGLPDITKPFELFIDENSGFAKGVLVQKLGPWKRPVAYLSKKLDTVASGWPPCLRMVAAIAILVKDAGKLTLGQPLTILTSHPVEALVRQPPNKWLSNARMTHYQAMLLDAERVHFGPTVSLNPATLLPLPSGGNHHDCLQILAETHGTRPDLTDQPLPDADLTWYTDGSSFIRNGEREAGAAVTTESEVIWAAPLPPGTSAQRAELIALTQALKMAEGKKLTVYTDSRYAFATTHVHGEIYRRRGWLTSEGKEIKNKNEILALLEALFLPKRLSIIHCPGHQKGDSPQAKGNRLADDTAKKAATETHSSLTVLPAGKRTADGSEFEKRTADGSEFESPKKKAKVE

SEQ ID NO: 1210 - protein, 2095 aa, synthetic construct
MPAAKRVKLDGGDKKYSIGLDIGTNSVGWAVITDEYKVPSKKFKVLGNTDRHSIKKNLIGALLFDSGETAEATRLKRTARRRYTRRKNRICYLQEIFSNEMAKVDDSFFHRLEESFLVEEDKKHERHPIFGNIVDEVAYHEKYPTIYHLRKKLVDSTDKADLRLIYLALAHMIKFRGHFLIEGDLNPDNSDVDKLFIQLVQTYNQLFEENPINASGVDAKAILSARLSKSRRLENLIAQLPGEKKNGLFGNLIALSLGLTPNFKSNFDLAEDAKLQLSKDTYDDDLDNLLAQIGDQYADLFLAAKNLSDAILLSDILRVNTEITKAPLSASMIKRYDEHHQDLTLLKALVRQQLPEKYKEIFFDQSKNGYAGYIDGGASQEEFYKFIKPILEKMDGTEELLVKLNREDLLRKQRTFDNGSIPHQIHLGELHAILRRQEDFYPFLKDNREKIEKILTFRIPYYVGPLARGNSRFAWMTRKSEETITPWNFEEVVDKGASAQSFIERMTNFDKNLPNEKVLPKHSLLYEYFTVYNELTKVKYVTEGMRKPAFLSGEQKKAIVDLLFKTNRKVTVKQLKEDYFKKIECFDSVEISGVEDRFNASLGTYHDLLKIIKDKDFLDNEENEDILEDIVLTLTLFEDREMIEERLKTYAHLFDDKVMKQLKRRRYTGWGRLSRKLINGIRDKQSGKTILDFLKSDGFANRNFMQLIHDDSLTFKEDIQKAQVSGQGDSLHEHIANLAGSPAIKKGILQTVKVVDELVKVMGRHKPENIVIEMARENQTTQKGQKNSRERMKRIEEGIKELGSQILKEHPVENTQLQNEKLYLYYLQNGRDMYVDQELDINRLSDYDVDHIVPQSFLKDDSIDNKVLTRSDKARGKSDNVPSEEVVKKMKNYWRQLLNAKLITQRKFDNLTKAERGGLSELDKAGFIKRQLVETRQITKHVAQILDSRMNTKYDENDKLIREVKVITLKSKLVSDFRKDFQFYKVREINNYHHAHDAYLNAVVGTALIKKYPKLESEFVYGDYKVYDVRKMIAKSEQEIGKATAKYFFYSNIMNFFKTEITLANGEIRKRPLIETNGETGEIVWDKGRDFATVRKVLSMPQVNIVKKTEVQTGGFSKESILPKRNSDKLIARKKDWDPKKYGGFDSPTVAYSVLVVAKVEKGKSKKLKSVKELLGITIMERSSFEKNPIDFLEAKGYKEVKKDLIIKLPKYSLFELENGRKRMLASAGELQKGNELALPSKYVNFLYLASHYEKLKGSPEDNEQKQLFVEQHKHYLDEIIEQISEFSKRVILADANLDKVLSAYNKHRDKPIREQAENIIHLFTLTNLGAPAAFKYFDTTIDRKRYTSTKEVLDATLIHQSITGLYETRIDLSQLGGDGGEAAAKGSSGGGGGTLQLEEEYRLFEPESTQKQEMDIWLKNFPQAWAETGGMGTAHCQAPVLIQLKATATPISIRQYPMPHEAYQGIKPHIRRMLDQGILKPCQSPWNTPLLPVKKPGTEDYRPVQDLREVNKRVEDIHPTVPNPYNLLSTLPPSHPWYTVLDLKDAFFCLRLHSESQLLFAFEWRDPEIGLSGQLTWTRLPQGFKNSPTLFNEALHSDLADFRVRYPALVLLQYVDDLLLAAATRTECLEGTKALLETLGNKGYRASAKKAQICLQEVTYLGYSLKDGQRWLTKARKEAILSIPVPKNSRQVREFLGKAGYCRLFIPGFAELAAPLYPLTRPGTLFQWGTEQQLAFEDIKKALLSSPALGLPDITKPFELFIDENSGFAKGVLVQKLGPWKRPVAYLSKKLDTVASGWPPCLRMVAAIAILVKDAGKLTLGQPLTILTSHPVEALVRQPPNKWLSNARMTHYQAMLLDAERVHFGPTVSLNPATLLPLPSGGNHHDCLQILAETHGTRPDLTDQPLPDADLTWYTDGSSFIRNGEREAGAAVTTESEVIWAAPLPPGTSAQRAELIALTQALKMAEGKKLTVYTDSRYAFATTHVHGEIYRRRGWLTSEGKEIKNKNEILALLEALFLPKRLSIIHCPGHQKGDSPQAKGNRLADDTAKKAATETHSSLTVLPAGKRTADGSEFEKRTADGSEFESPKKKAKVE

SEQ ID NO: 1211 - protein, 2090 aa, synthetic construct
MPAAKRVKLDGGDKKYSIGLDIGTNSVGWAVITDEYKVPSKKFKVLGNTDRHSIKKNLIGALLFDSGETAEATRLKRTARRRYTRRKNRICYLQEIFSNEMAKVDDSFFHRLEESFLVEEDKKHERHPIFGNIVDEVAYHEKYPTIYHLRKKLVDSTDKADLRLIYLALAHMIKFRGHFLIEGDLNPDNSDVDKLFIQLVQTYNQLFEENPINASGVDAKAILSARLSKSRRLENLIAQLPGEKKNGLFGNLIALSLGLTPNFKSNFDLAEDAKLQLSKDTYDDDLDNLLAQIGDQYADLFLAAKNLSDAILLSDILRVNTEITKAPLSASMIKRYDEHHQDLTLLKALVRQQLPEKYKEIFFDQSKNGYAGYIDGGASQEEFYKFIKPILEKMDGTEELLVKLNREDLLRKQRTFDNGSIPHQIHLGELHAILRRQEDFYPFLKDNREKIEKILTFRIPYYVGPLARGNSRFAWMTRKSEETITPWNFEEVVDKGASAQSFIERMTNFDKNLPNEKVLPKHSLLYEYFTVYNELTKVKYVTEGMRKPAFLSGEQKKAIVDLLFKTNRKVTVKQLKEDYFKKIECFDSVEISGVEDRFNASLGTYHDLLKIIKDKDFLDNEENEDILEDIVLTLTLFEDREMIEERLKTYAHLFDDKVMKQLKRRRYTGWGRLSRKLINGIRDKQSGKTILDFLKSDGFANRNFMQLIHDDSLTFKEDIQKAQVSGQGDSLHEHIANLAGSPAIKKGILQTVKVVDELVKVMGRHKPENIVIEMARENQTTQKGQKNSRERMKRIEEGIKELGSQILKEHPVENTQLQNEKLYLYYLQNGRDMYVDQELDINRLSDYDVDHIVPQSFLKDDSIDNKVLTRSDKARGKSDNVPSEEVVKKMKNYWRQLLNAKLITQRKFDNLTKAERGGLSELDKAGFIKRQLVETRQITKHVAQILDSRMNTKYDENDKLIREVKVITLKSKLVSDFRKDFQFYKVREINNYHHAHDAYLNAVVGTALIKKYPKLESEFVYGDYKVYDVRKMIAKSEQEIGKATAKYFFYSNIMNFFKTEITLANGEIRKRPLIETNGETGEIVWDKGRDFATVRKVLSMPQVNIVKKTEVQTGGFSKESILPKRNSDKLIARKKDWDPKKYGGFDSPTVAYSVLVVAKVEKGKSKKLKSVKELLGITIMERSSFEKNPIDFLEAKGYKEVKKDLIIKLPKYSLFELENGRKRMLASAGELQKGNELALPSKYVNFLYLASHYEKLKGSPEDNEQKQLFVEQHKHYLDEIIEQISEFSKRVILADANLDKVLSAYNKHRDKPIREQAENIIHLFTLTNLGAPAAFKYFDTTIDRKRYTSTKEVLDATLIHQSITGLYETRIDLSQLGGDGGGGGGGGGGTLQLEEEYRLFEPESTQKQEMDIWLKNFPQAWAETGGMGTAHCQAPVLIQLKATATPISIRQYPMPHEAYQGIKPHIRRMLDQGILKPCQSPWNTPLLPVKKPGTEDYRPVQDLREVNKRVEDIHPTVPNPYNLLSTLPPSHPWYTVLDLKDAFFCLRLHSESQLLFAFEWRDPEIGLSGQLTWTRLPQGFKNSPTLFNEALHSDLADFRVRYPALVLLQYVDDLLLAAATRTECLEGTKALLETLGNKGYRASAKKAQICLQEVTYLGYSLKDGQRWLTKARKEAILSIPVPKNSRQVREFLGKAGYCRLFIPGFAELAAPLYPLTRPGTLFQWGTEQQLAFEDIKKALLSSPALGLPDITKPFELFIDENSGFAKGVLVQKLGPWKRPVAYLSKKLDTVASGWPPCLRMVAAIAILVKDAGKLTLGQPLTILTSHPVEALVRQPPNKWLSNARMTHYQAMLLDAERVHFGPTVSLNPATLLPLPSGGNHHDCLQILAETHGTRPDLTDQPLPDADLTWYTDGSSFIRNGEREAGAAVTTESEVIWAAPLPPGTSAQRAELIALTQALKMAEGKKLTVYTDSRYAFATTHVHGEIYRRRGWLTSEGKEIKNKNEILALLEALFLPKRLSIIHCPGHQKGDSPQAKGNRLADDTAKKAATETHSSLTVLPAGKRTADGSEFEKRTADGSEFESPKKKAKVE

SEQ ID NO: 1212 - protein, 2102 aa, synthetic construct
MPAAKRVKLDGGDKKYSIGLDIGTNSVGWAVITDEYKVPSKKFKVLGNTDRHSIKKNLIGALLFDSGETAEATRLKRTARRRYTRRKNRICYLQEIFSNEMAKVDDSFFHRLEESFLVEEDKKHERHPIFGNIVDEVAYHEKYPTIYHLRKKLVDSTDKADLRLIYLALAHMIKFRGHFLIEGDLNPDNSDVDKLFIQLVQTYNQLFEENPINASGVDAKAILSARLSKSRRLENLIAQLPGEKKNGLFGNLIALSLGLTPNFKSNFDLAEDAKLQLSKDTYDDDLDNLLAQIGDQYADLFLAAKNLSDAILLSDILRVNTEITKAPLSASMIKRYDEHHQDLTLLKALVRQQLPEKYKEIFFDQSKNGYAGYIDGGASQEEFYKFIKPILEKMDGTEELLVKLNREDLLRKQRTFDNGSIPHQIHLGELHAILRRQEDFYPFLKDNREKIEKILTFRIPYYVGPLARGNSRFAWMTRKSEETITPWNFEEVVDKGASAQSFIERMTNFDKNLPNEKVLPKHSLLYEYFTVYNELTKVKYVTEGMRKPAFLSGEQKKAIVDLLFKTNRKVTVKQLKEDYFKKIECFDSVEISGVEDRFNASLGTYHDLLKIIKDKDFLDNEENEDILEDIVLTLTLFEDREMIEERLKTYAHLFDDKVMKQLKRRRYTGWGRLSRKLINGIRDKQSGKTILDFLKSDGFANRNFMQLIHDDSLTFKEDIQKAQVSGQGDSLHEHIANLAGSPAIKKGILQTVKVVDELVKVMGRHKPENIVIEMARENQTTQKGQKNSRERMKRIEEGIKELGSQILKEHPVENTQLQNEKLYLYYLQNGRDMYVDQELDINRLSDYDVDHIVPQSFLKDDSIDNKVLTRSDKARGKSDNVPSEEVVKKMKNYWRQLLNAKLITQRKFDNLTKAERGGLSELDKAGFIKRQLVETRQITKHVAQILDSRMNTKYDENDKLIREVKVITLKSKLVSDFRKDFQFYKVREINNYHHAHDAYLNAVVGTALIKKYPKLESEFVYGDYKVYDVRKMIAKSEQEIGKATAKYFFYSNIMNFFKTEITLANGEIRKRPLIETNGETGEIVWDKGRDFATVRKVLSMPQVNIVKKTEVQTGGFSKESILPKRNSDKLIARKKDWDPKKYGGFDSPTVAYSVLVVAKVEKGKSKKLKSVKELLGITIMERSSFEKNPIDFLEAKGYKEVKKDLIIKLPKYSLFELENGRKRMLASAGELQKGNELALPSKYVNFLYLASHYEKLKGSPEDNEQKQLFVEQHKHYLDEIIEQISEFSKRVILADANLDKVLSAYNKHRDKPIREQAENIIHLFTLTNLGAPAAFKYFDTTIDRKRYTSTKEVLDATLIHQSITGLYETRIDLSQLGGDGGGSSGSSGSSGSSGSSGSSGGTLQLEEEYRLFEPESTQKQEMDIWLKNFPQAWAETGGMGTAHCQAPVLIQLKATATPISIRQYPMPHEAYQGIKPHIRRMLDQGILKPCQSPWNTPLLPVKKPGTEDYRPVQDLREVNKRVEDIHPTVPNPYNLLSTLPPSHPWYTVLDLKDAFFCLRLHSESQLLFAFEWRDPEIGLSGQLTWTRLPQGFKNSPTLFNEALHSDLADFRVRYPALVLLQYVDDLLLAAATRTECLEGTKALLETLGNKGYRASAKKAQICLQEVTYLGYSLKDGQRWLTKARKEAILSIPVPKNSRQVREFLGKAGYCRLFIPGFAELAAPLYPLTRPGTLFQWGTEQQLAFEDIKKALLSSPALGLPDITKPFELFIDENSGFAKGVLVQKLGPWKRPVAYLSKKLDTVASGWPPCLRMVAAIAILVKDAGKLTLGQPLTILTSHPVEALVRQPPNKWLSNARMTHYQAMLLDAERVHFGPTVSLNPATLLPLPSGGNHHDCLQILAETHGTRPDLTDQPLPDADLTWYTDGSSFIRNGEREAGAAVTTESEVIWAAPLPPGTSAQRAELIALTQALKMAEGKKLTVYTDSRYAFATTHVHGEIYRRRGWLTSEGKEIKNKNEILALLEALFLPKRLSIIHCPGHQKGDSPQAKGNRLADDTAKKAATETHSSLTVLPAGKRTADGSEFEKRTADGSEFESPKKKAKVE

SEQ ID NO: 1213 - protein, 2099 aa, synthetic construct
MPAAKRVKLDGGDKKYSIGLDIGTNSVGWAVITDEYKVPSKKFKVLGNTDRHSIKKNLIGALLFDSGETAEATRLKRTARRRYTRRKNRICYLQEIFSNEMAKVDDSFFHRLEESFLVEEDKKHERHPIFGNIVDEVAYHEKYPTIYHLRKKLVDSTDKADLRLIYLALAHMIKFRGHFLIEGDLNPDNSDVDKLFIQLVQTYNQLFEENPINASGVDAKAILSARLSKSRRLENLIAQLPGEKKNGLFGNLIALSLGLTPNFKSNFDLAEDAKLQLSKDTYDDDLDNLLAQIGDQYADLFLAAKNLSDAILLSDILRVNTEITKAPLSASMIKRYDEHHQDLTLLKALVRQQLPEKYKEIFFDQSKNGYAGYIDGGASQEEFYKFIKPILEKMDGTEELLVKLNREDLLRKQRTFDNGSIPHQIHLGELHAILRRQEDFYPFLKDNREKIEKILTFRIPYYVGPLARGNSRFAWMTRKSEETITPWNFEEVVDKGASAQSFIERMTNFDKNLPNEKVLPKHSLLYEYFTVYNELTKVKYVTEGMRKPAFLSGEQKKAIVDLLFKTNRKVTVKQLKEDYFKKIECFDSVEISGVEDRFNASLGTYHDLLKIIKDKDFLDNEENEDILEDIVLTLTLFEDREMIEERLKTYAHLFDDKVMKQLKRRRYTGWGRLSRKLINGIRDKQSGKTILDFLKSDGFANRNFMQLIHDDSLTFKEDIQKAQVSGQGDSLHEHIANLAGSPAIKKGILQTVKVVDELVKVMGRHKPENIVIEMARENQTTQKGQKNSRERMKRIEEGIKELGSQILKEHPVENTQLQNEKLYLYYLQNGRDMYVDQELDINRLSDYDVDHIVPQSFLKDDSIDNKVLTRSDKARGKSDNVPSEEVVKKMKNYWRQLLNAKLITQRKFDNLTKAERGGLSELDKAGFIKRQLVETRQITKHVAQILDSRMNTKYDENDKLIREVKVITLKSKLVSDFRKDFQFYKVREINNYHHAHDAYLNAVVGTALIKKYPKLESEFVYGDYKVYDVRKMIAKSEQEIGKATAKYFFYSNIMNFFKTEITLANGEIRKRPLIETNGETGEIVWDKGRDFATVRKVLSMPQVNIVKKTEVQTGGFSKESILPKRNSDKLIARKKDWDPKKYGGFDSPTVAYSVLVVAKVEKGKSKKLKSVKELLGITIMERSSFEKNPIDFLEAKGYKEVKKDLIIKLPKYSLFELENGRKRMLASAGELQKGNELALPSKYVNFLYLASHYEKLKGSPEDNEQKQLFVEQHKHYLDEIIEQISEFSKRVILADANLDKVLSAYNKHRDKPIREQAENIIHLFTLTNLGAPAAFKYFDTTIDRKRYTSTKEVLDATLIHQSITGLYETRIDLSQLGGDGGEAAAKEAAAKEAAAKGGTLQLEEEYRLFEPESTQKQEMDIWLKNFPQAWAETGGMGTAHCQAPVLIQLKATATPISIRQYPMPHEAYQGIKPHIRRMLDQGILKPCQSPWNTPLLPVKKPGTEDYRPVQDLREVNKRVEDIHPTVPNPYNLLSTLPPSHPWYTVLDLKDAFFCLRLHSESQLLFAFEWRDPEIGLSGQLTWTRLPQGFKNSPTLFNEALHSDLADFRVRYPALVLLQYVDDLLLAAATRTECLEGTKALLETLGNKGYRASAKKAQICLQEVTYLGYSLKDGQRWLTKARKEAILSIPVPKNSRQVREFLGKAGYCRLFIPGFAELAAPLYPLTRPGTLFQWGTEQQLAFEDIKKALLSSPALGLPDITKPFELFIDENSGFAKGVLVQKLGPWKRPVAYLSKKLDTVASGWPPCLRMVAAIAILVKDAGKLTLGQPLTILTSHPVEALVRQPPNKWLSNARMTHYQAMLLDAERVHFGPTVSLNPATLLPLPSGGNHHDCLQILAETHGTRPDLTDQPLPDADLTWYTDGSSFIRNGEREAGAAVTTESEVIWAAPLPPGTSAQRAELIALTQALKMAEGKKLTVYTDSRYAFATTHVHGEIYRRRGWLTSEGKEIKNKNEILALLEALFLPKRLSIIHCPGHQKGDSPQAKGNRLADDTAKKAATETHSSLTVLPAGKRTADGSEFEKRTADGSEFESPKKKAKVE

SEQ ID NO: 1214 - protein, 2095 aa, synthetic construct
MPAAKRVKLDGGDKKYSIGLDIGTNSVGWAVITDEYKVPSKKFKVLGNTDRHSIKKNLIGALLFDSGETAEATRLKRTARRRYTRRKNRICYLQEIFSNEMAKVDDSFFHRLEESFLVEEDKKHERHPIFGNIVDEVAYHEKYPTIYHLRKKLVDSTDKADLRLIYLALAHMIKFRGHFLIEGDLNPDNSDVDKLFIQLVQTYNQLFEENPINASGVDAKAILSARLSKSRRLENLIAQLPGEKKNGLFGNLIALSLGLTPNFKSNFDLAEDAKLQLSKDTYDDDLDNLLAQIGDQYADLFLAAKNLSDAILLSDILRVNTEITKAPLSASMIKRYDEHHQDLTLLKALVRQQLPEKYKEIFFDQSKNGYAGYIDGGASQEEFYKFIKPILEKMDGTEELLVKLNREDLLRKQRTFDNGSIPHQIHLGELHAILRRQEDFYPFLKDNREKIEKILTFRIPYYVGPLARGNSRFAWMTRKSEETITPWNFEEVVDKGASAQSFIERMTNFDKNLPNEKVLPKHSLLYEYFTVYNELTKVKYVTEGMRKPAFLSGEQKKAIVDLLFKTNRKVTVKQLKEDYFKKIECFDSVEISGVEDRFNASLGTYHDLLKIIKDKDFLDNEENEDILEDIVLTLTLFEDREMIEERLKTYAHLFDDKVMKQLKRRRYTGWGRLSRKLINGIRDKQSGKTILDFLKSDGFANRNFMQLIHDDSLTFKEDIQKAQVSGQGDSLHEHIANLAGSPAIKKGILQTVKVVDELVKVMGRHKPENIVIEMARENQTTQKGQKNSRERMKRIEEGIKELGSQILKEHPVENTQLQNEKLYLYYLQNGRDMYVDQELDINRLSDYDVDHIVPQSFLKDDSIDNKVLTRSDKARGKSDNVPSEEVVKKMKNYWRQLLNAKLITQRKFDNLTKAERGGLSELDKAGFIKRQLVETRQITKHVAQILDSRMNTKYDENDKLIREVKVITLKSKLVSDFRKDFQFYKVREINNYHHAHDAYLNAVVGTALIKKYPKLESEFVYGDYKVYDVRKMIAKSEQEIGKATAKYFFYSNIMNFFKTEITLANGEIRKRPLIETNGETGEIVWDKGRDFATVRKVLSMPQVNIVKKTEVQTGGFSKESILPKRNSDKLIARKKDWDPKKYGGFDSPTVAYSVLVVAKVEKGKSKKLKSVKELLGITIMERSSFEKNPIDFLEAKGYKEVKKDLIIKLPKYSLFELENGRKRMLASAGELQKGNELALPSKYVNFLYLASHYEKLKGSPEDNEQKQLFVEQHKHYLDEIIEQISEFSKRVILADANLDKVLSAYNKHRDKPIREQAENIIHLFTLTNLGAPAAFKYFDTTIDRKRYTSTKEVLDATLIHQSITGLYETRIDLSQLGGDGGPAPGSSEAAAKGGTLQLEEEYRLFEPESTQKQEMDIWLKNFPQAWAETGGMGTAHCQAPVLIQLKATATPISIRQYPMPHEAYQGIKPHIRRMLDQGILKPCQSPWNTPLLPVKKPGTEDYRPVQDLREVNKRVEDIHPTVPNPYNLLSTLPPSHPWYTVLDLKDAFFCLRLHSESQLLFAFEWRDPEIGLSGQLTWTRLPQGFKNSPTLFNEALHSDLADFRVRYPALVLLQYVDDLLLAAATRTECLEGTKALLETLGNKGYRASAKKAQICLQEVTYLGYSLKDGQRWLTKARKEAILSIPVPKNSRQVREFLGKAGYCRLFIPGFAELAAPLYPLTRPGTLFQWGTEQQLAFEDIKKALLSSPALGLPDITKPFELFIDENSGFAKGVLVQKLGPWKRPVAYLSKKLDTVASGWPPCLRMVAAIAILVKDAGKLTLGQPLTILTSHPVEALVRQPPNKWLSNARMTHYQAMLLDAERVHFGPTVSLNPATLLPLPSGGNHHDCLQILAETHGTRPDLTDQPLPDADLTWYTDGSSFIRNGEREAGAAVTTESEVIWAAPLPPGTSAQRAELIALTQALKMAEGKKLTVYTDSRYAFATTHVHGEIYRRRGWLTSEGKEIKNKNEILALLEALFLPKRLSIIHCPGHQKGDSPQAKGNRLADDTAKKAATETHSSLTVLPAGKRTADGSEFEKRTADGSEFESPKKKAKVE

SEQ ID NO: 1215 - protein, 2092 aa, synthetic construct
MPAAKRVKLDGGDKKYSIGLDIGTNSVGWAVITDEYKVPSKKFKVLGNTDRHSIKKNLIGALLFDSGETAEATRLKRTARRRYTRRKNRICYLQEIFSNEMAKVDDSFFHRLEESFLVEEDKKHERHPIFGNIVDEVAYHEKYPTIYHLRKKLVDSTDKADLRLIYLALAHMIKFRGHFLIEGDLNPDNSDVDKLFIQLVQTYNQLFEENPINASGVDAKAILSARLSKSRRLENLIAQLPGEKKNGLFGNLIALSLGLTPNFKSNFDLAEDAKLQLSKDTYDDDLDNLLAQIGDQYADLFLAAKNLSDAILLSDILRVNTEITKAPLSASMIKRYDEHHQDLTLLKALVRQQLPEKYKEIFFDQSKNGYAGYIDGGASQEEFYKFIKPILEKMDGTEELLVKLNREDLLRKQRTFDNGSIPHQIHLGELHAILRRQEDFYPFLKDNREKIEKILTFRIPYYVGPLARGNSRFAWMTRKSEETITPWNFEEVVDKGASAQSFIERMTNFDKNLPNEKVLPKHSLLYEYFTVYNELTKVKYVTEGMRKPAFLSGEQKKAIVDLLFKTNRKVTVKQLKEDYFKKIECFDSVEISGVEDRFNASLGTYHDLLKIIKDKDFLDNEENEDILEDIVLTLTLFEDREMIEERLKTYAHLFDDKVMKQLKRRRYTGWGRLSRKLINGIRDKQSGKTILDFLKSDGFANRNFMQLIHDDSLTFKEDIQKAQVSGQGDSLHEHIANLAGSPAIKKGILQTVKVVDELVKVMGRHKPENIVIEMARENQTTQKGQKNSRERMKRIEEGIKELGSQILKEHPVENTQLQNEKLYLYYLQNGRDMYVDQELDINRLSDYDVDHIVPQSFLKDDSIDNKVLTRSDKARGKSDNVPSEEVVKKMKNYWRQLLNAKLITQRKFDNLTKAERGGLSELDKAGFIKRQLVETRQITKHVAQILDSRMNTKYDENDKLIREVKVITLKSKLVSDFRKDFQFYKVREINNYHHAHDAYLNAVVGTALIKKYPKLESEFVYGDYKVYDVRKMIAKSEQEIGKATAKYFFYSNIMNFFKTEITLANGEIRKRPLIETNGETGEIVWDKGRDFATVRKVLSMPQVNIVKKTEVQTGGFSKESILPKRNSDKLIARKKDWDPKKYGGFDSPTVAYSVLVVAKVEKGKSKKLKSVKELLGITIMERSSFEKNPIDFLEAKGYKEVKKDLIIKLPKYSLFELENGRKRMLASAGELQKGNELALPSKYVNFLYLASHYEKLKGSPEDNEQKQLFVEQHKHYLDEIIEQISEFSKRVILADANLDKVLSAYNKHRDKPIREQAENIIHLFTLTNLGAPAAFKYFDTTIDRKRYTSTKEVLDATLIHQSITGLYETRIDLSQLGGDGGGGGGGGGGGGTLQLEEEYRLFEPESTQKQEMDIWLKNFPQAWAETGGMGTAHCQAPVLIQLKATATPISIRQYPMPHEAYQGIKPHIRRMLDQGILKPCQSPWNTPLLPVKKPGTEDYRPVQDLREVNKRVEDIHPTVPNPYNLLSTLPPSHPWYTVLDLKDAFFCLRLHSESQLLFAFEWRDPEIGLSGQLTWTRLPQGFKNSPTLFNEALHSDLADFRVRYPALVLLQYVDDLLLAAATRTECLEGTKALLETLGNKGYRASAKKAQICLQEVTYLGYSLKDGQRWLTKARKEAILSIPVPKNSRQVREFLGKAGYCRLFIPGFAELAAPLYPLTRPGTLFQWGTEQQLAFEDIKKALLSSPALGLPDITKPFELFIDENSGFAKGVLVQKLGPWKRPVAYLSKKLDTVASGWPPCLRMVAAIAILVKDAGKLTLGQPLTILTSHPVEALVRQPPNKWLSNARMTHYQAMLLDAERVHFGPTVSLNPATLLPLPSGGNHHDCLQILAETHGTRPDLTDQPLPDADLTWYTDGSSFIRNGEREAGAAVTTESEVIWAAPLPPGTSAQRAELIALTQALKMAEGKKLTVYTDSRYAFATTHVHGEIYRRRGWLTSEGKEIKNKNEILALLEALFLPKRLSIIHCPGHQKGDSPQAKGNRLADDTAKKAATETHSSLTVLPAGKRTADGSEFEKRTADGSEFESPKKKAKVE

SEQ ID NO: 1216 - protein, 2093 aa, synthetic construct
MPAAKRVKLDGGDKKYSIGLDIGTNSVGWAVITDEYKVPSKKFKVLGNTDRHSIKKNLIGALLFDSGETAEATRLKRTARRRYTRRKNRICYLQEIFSNEMAKVDDSFFHRLEESFLVEEDKKHERHPIFGNIVDEVAYHEKYPTIYHLRKKLVDSTDKADLRLIYLALAHMIKFRGHFLIEGDLNPDNSDVDKLFIQLVQTYNQLFEENPINASGVDAKAILSARLSKSRRLENLIAQLPGEKKNGLFGNLIALSLGLTPNFKSNFDLAEDAKLQLSKDTYDDDLDNLLAQIGDQYADLFLAAKNLSDAILLSDILRVNTEITKAPLSASMIKRYDEHHQDLTLLKALVRQQLPEKYKEIFFDQSKNGYAGYIDGGASQEEFYKFIKPILEKMDGTEELLVKLNREDLLRKQRTFDNGSIPHQIHLGELHAILRRQEDFYPFLKDNREKIEKILTFRIPYYVGPLARGNSRFAWMTRKSEETITPWNFEEVVDKGASAQSFIERMTNFDKNLPNEKVLPKHSLLYEYFTVYNELTKVKYVTEGMRKPAFLSGEQKKAIVDLLFKTNRKVTVKQLKEDYFKKIECFDSVEISGVEDRFNASLGTYHDLLKIIKDKDFLDNEENEDILEDIVLTLTLFEDREMIEERLKTYAHLFDDKVMKQLKRRRYTGWGRLSRKLINGIRDKQSGKTILDFLKSDGFANRNFMQLIHDDSLTFKEDIQKAQVSGQGDSLHEHIANLAGSPAIKKGILQTVKVVDELVKVMGRHKPENIVIEMARENQTTQKGQKNSRERMKRIEEGIKELGSQILKEHPVENTQLQNEKLYLYYLQNGRDMYVDQELDINRLSDYDVDHIVPQSFLKDDSIDNKVLTRSDKARGKSDNVPSEEVVKKMKNYWRQLLNAKLITQRKFDNLTKAERGGLSELDKAGFIKRQLVETRQITKHVAQILDSRMNTKYDENDKLIREVKVITLKSKLVSDFRKDFQFYKVREINNYHHAHDAYLNAVVGTALIKKYPKLESEFVYGDYKVYDVRKMIAKSEQEIGKATAKYFFYSNIMNFFKTEITLANGEIRKRPLIETNGETGEIVWDKGRDFATVRKVLSMPQVNIVKKTEVQTGGFSKESILPKRNSDKLIARKKDWDPKKYGGFDSPTVAYSVLVVAKVEKGKSKKLKSVKELLGITIMERSSFEKNPIDFLEAKGYKEVKKDLIIKLPKYSLFELENGRKRMLASAGELQKGNELALPSKYVNFLYLASHYEKLKGSPEDNEQKQLFVEQHKHYLDEIIEQISEFSKRVILADANLDKVLSAYNKHRDKPIREQAENIIHLFTLTNLGAPAAFKYFDTTIDRKRYTSTKEVLDATLIHQSITGLYETRIDLSQLGGDGGPAPAPAPAPGGTLQLEEEYRLFEPESTQKQEMDIWLKNFPQAWAETGGMGTAHCQAPVLIQLKATATPISIRQYPMPHEAYQGIKPHIRRMLDQGILKPCQSPWNTPLLPVKKPGTEDYRPVQDLREVNKRVEDIHPTVPNPYNLLSTLPPSHPWYTVLDLKDAFFCLRLHSESQLLFAFEWRDPEIGLSGQLTWTRLPQGFKNSPTLFNEALHSDLADFRVRYPALVLLQYVDDLLLAAATRTECLEGTKALLETLGNKGYRASAKKAQICLQEVTYLGYSLKDGQRWLTKARKEAILSIPVPKNSRQVREFLGKAGYCRLFIPGFAELAAPLYPLTRPGTLFQWGTEQQLAFEDIKKALLSSPALGLPDITKPFELFIDENSGFAKGVLVQKLGPWKRPVAYLSKKLDTVASGWPPCLRMVAAIAILVKDAGKLTLGQPLTILTSHPVEALVRQPPNKWLSNARMTHYQAMLLDAERVHFGPTVSLNPATLLPLPSGGNHHDCLQILAETHGTRPDLTDQPLPDADLTWYTDGSSFIRNGEREAGAAVTTESEVIWAAPLPPGTSAQRAELIALTQALKMAEGKKLTVYTDSRYAFATTHVHGEIYRRRGWLTSEGKEIKNKNEILALLEALFLPKRLSIIHCPGHQKGDSPQAKGNRLADDTAKKAATETHSSLTVLPAGKRTADGSEFEKRTADGSEFESPKKKAKVE

SEQ ID NO: 1217 - protein, 2089 aa, synthetic construct
MPAAKRVKLDGGDKKYSIGLDIGTNSVGWAVITDEYKVPSKKFKVLGNTDRHSIKKNLIGALLFDSGETAEATRLKRTARRRYTRRKNRICYLQEIFSNEMAKVDDSFFHRLEESFLVEEDKKHERHPIFGNIVDEVAYHEKYPTIYHLRKKLVDSTDKADLRLIYLALAHMIKFRGHFLIEGDLNPDNSDVDKLFIQLVQTYNQLFEENPINASGVDAKAILSARLSKSRRLENLIAQLPGEKKNGLFGNLIALSLGLTPNFKSNFDLAEDAKLQLSKDTYDDDLDNLLAQIGDQYADLFLAAKNLSDAILLSDILRVNTEITKAPLSASMIKRYDEHHQDLTLLKALVRQQLPEKYKEIFFDQSKNGYAGYIDGGASQEEFYKFIKPILEKMDGTEELLVKLNREDLLRKQRTFDNGSIPHQIHLGELHAILRRQEDFYPFLKDNREKIEKILTFRIPYYVGPLARGNSRFAWMTRKSEETITPWNFEEVVDKGASAQSFIERMTNFDKNLPNEKVLPKHSLLYEYFTVYNELTKVKYVTEGMRKPAFLSGEQKKAIVDLLFKTNRKVTVKQLKEDYFKKIECFDSVEISGVEDRFNASLGTYHDLLKIIKDKDFLDNEENEDILEDIVLTLTLFEDREMIEERLKTYAHLFDDKVMKQLKRRRYTGWGRLSRKLINGIRDKQSGKTILDFLKSDGFANRNFMQLIHDDSLTFKEDIQKAQVSGQGDSLHEHIANLAGSPAIKKGILQTVKVVDELVKVMGRHKPENIVIEMARENQTTQKGQKNSRERMKRIEEGIKELGSQILKEHPVENTQLQNEKLYLYYLQNGRDMYVDQELDINRLSDYDVDHIVPQSFLKDDSIDNKVLTRSDKARGKSDNVPSEEVVKKMKNYWRQLLNAKLITQRKFDNLTKAERGGLSELDKAGFIKRQLVETRQITKHVAQILDSRMNTKYDENDKLIREVKVITLKSKLVSDFRKDFQFYKVREINNYHHAHDAYLNAVVGTALIKKYPKLESEFVYGDYKVYDVRKMIAKSEQEIGKATAKYFFYSNIMNFFKTEITLANGEIRKRPLIETNGETGEIVWDKGRDFATVRKVLSMPQVNIVKKTEVQTGGFSKESILPKRNSDKLIARKKDWDPKKYGGFDSPTVAYSVLVVAKVEKGKSKKLKSVKELLGITIMERSSFEKNPIDFLEAKGYKEVKKDLIIKLPKYSLFELENGRKRMLASAGELQKGNELALPSKYVNFLYLASHYEKLKGSPEDNEQKQLFVEQHKHYLDEIIEQISEFSKRVILADANLDKVLSAYNKHRDKPIREQAENIIHLFTLTNLGAPAAFKYFDTTIDRKRYTSTKEVLDATLIHQSITGLYETRIDLSQLGGDGGGGGGGGGTLQLEEEYRLFEPESTQKQEMDIWLKNFPQAWAETGGMGTAHCQAPVLIQLKATATPISIRQYPMPHEAYQGIKPHIRRMLDQGILKPCQSPWNTPLLPVKKPGTEDYRPVQDLREVNKRVEDIHPTVPNPYNLLSTLPPSHPWYTVLDLKDAFFCLRLHSESQLLFAFEWRDPEIGLSGQLTWTRLPQGFKNSPTLFNEALHSDLADFRVRYPALVLLQYVDDLLLAAATRTECLEGTKALLETLGNKGYRASAKKAQICLQEVTYLGYSLKDGQRWLTKARKEAILSIPVPKNSRQVREFLGKAGYCRLFIPGFAELAAPLYPLTRPGTLFQWGTEQQLAFEDIKKALLSSPALGLPDITKPFELFIDENSGFAKGVLVQKLGPWKRPVAYLSKKLDTVASGWPPCLRMVAAIAILVKDAGKLTLGQPLTILTSHPVEALVRQPPNKWLSNARMTHYQAMLLDAERVHFGPTVSLNPATLLPLPSGGNHHDCLQILAETHGTRPDLTDQPLPDADLTWYTDGSSFIRNGEREAGAAVTTESEVIWAAPLPPGTSAQRAELIALTQALKMAEGKKLTVYTDSRYAFATTHVHGEIYRRRGWLTSEGKEIKNKNEILALLEALFLPKRLSIIHCPGHQKGDSPQAKGNRLADDTAKKAATETHSSLTVLPAGKRTADGSEFEKRTADGSEFESPKKKAKVE

SEQ ID NO: 1218 - protein, 2095 aa, synthetic construct
MPAAKRVKLDGGDKKYSIGLDIGTNSVGWAVITDEYKVPSKKFKVLGNTDRHSIKKNLIGALLFDSGETAEATRLKRTARRRYTRRKNRICYLQEIFSNEMAKVDDSFFHRLEESFLVEEDKKHERHPIFGNIVDEVAYHEKYPTIYHLRKKLVDSTDKADLRLIYLALAHMIKFRGHFLIEGDLNPDNSDVDKLFIQLVQTYNQLFEENPINASGVDAKAILSARLSKSRRLENLIAQLPGEKKNGLFGNLIALSLGLTPNFKSNFDLAEDAKLQLSKDTYDDDLDNLLAQIGDQYADLFLAAKNLSDAILLSDILRVNTEITKAPLSASMIKRYDEHHQDLTLLKALVRQQLPEKYKEIFFDQSKNGYAGYIDGGASQEEFYKFIKPILEKMDGTEELLVKLNREDLLRKQRTFDNGSIPHQIHLGELHAILRRQEDFYPFLKDNREKIEKILTFRIPYYVGPLARGNSRFAWMTRKSEETITPWNFEEVVDKGASAQSFIERMTNFDKNLPNEKVLPKHSLLYEYFTVYNELTKVKYVTEGMRKPAFLSGEQKKAIVDLLFKTNRKVTVKQLKEDYFKKIECFDSVEISGVEDRFNASLGTYHDLLKIIKDKDFLDNEENEDILEDIVLTLTLFEDREMIEERLKTYAHLFDDKVMKQLKRRRYTGWGRLSRKLINGIRDKQSGKTILDFLKSDGFANRNFMQLIHDDSLTFKEDIQKAQVSGQGDSLHEHIANLAGSPAIKKGILQTVKVVDELVKVMGRHKPENIVIEMARENQTTQKGQKNSRERMKRIEEGIKELGSQILKEHPVENTQLQNEKLYLYYLQNGRDMYVDQELDINRLSDYDVDHIVPQSFLKDDSIDNKVLTRSDKARGKSDNVPSEEVVKKMKNYWRQLLNAKLITQRKFDNLTKAERGGLSELDKAGFIKRQLVETRQITKHVAQILDSRMNTKYDENDKLIREVKVITLKSKLVSDFRKDFQFYKVREINNYHHAHDAYLNAVVGTALIKKYPKLESEFVYGDYKVYDVRKMIAKSEQEIGKATAKYFFYSNIMNFFKTEITLANGEIRKRPLIETNGETGEIVWDKGRDFATVRKVLSMPQVNIVKKTEVQTGGFSKESILPKRNSDKLIARKKDWDPKKYGGFDSPTVAYSVLVVAKVEKGKSKKLKSVKELLGITIMERSSFEKNPIDFLEAKGYKEVKKDLIIKLPKYSLFELENGRKRMLASAGELQKGNELALPSKYVNFLYLASHYEKLKGSPEDNEQKQLFVEQHKHYLDEIIEQISEFSKRVILADANLDKVLSAYNKHRDKPIREQAENIIHLFTLTNLGAPAAFKYFDTTIDRKRYTSTKEVLDATLIHQSITGLYETRIDLSQLGGDGGGSSEAAAKPAPGGTLQLEEEYRLFEPESTQKQEMDIWLKNFPQAWAETGGMGTAHCQAPVLIQLKATATPISIRQYPMPHEAYQGIKPHIRRMLDQGILKPCQSPWNTPLLPVKKPGTEDYRPVQDLREVNKRVEDIHPTVPNPYNLLSTLPPSHPWYTVLDLKDAFFCLRLHSESQLLFAFEWRDPEIGLSGQLTWTRLPQGFKNSPTLFNEALHSDLADFRVRYPALVLLQYVDDLLLAAATRTECLEGTKALLETLGNKGYRASAKKAQICLQEVTYLGYSLKDGQRWLTKARKEAILSIPVPKNSRQVREFLGKAGYCRLFIPGFAELAAPLYPLTRPGTLFQWGTEQQLAFEDIKKALLSSPALGLPDITKPFELFIDENSGFAKGVLVQKLGPWKRPVAYLSKKLDTVASGWPPCLRMVAAIAILVKDAGKLTLGQPLTILTSHPVEALVRQPPNKWLSNARMTHYQAMLLDAERVHFGPTVSLNPATLLPLPSGGNHHDCLQILAETHGTRPDLTDQPLPDADLTWYTDGSSFIRNGEREAGAAVTTESEVIWAAPLPPGTSAQRAELIALTQALKMAEGKKLTVYTDSRYAFATTHVHGEIYRRRGWLTSEGKEIKNKNEILALLEALFLPKRLSIIHCPGHQKGDSPQAKGNRLADDTAKKAATETHSSLTVLPAGKRTADGSEFEKRTADGSEFESPKKKAKVE

SEQ ID NO: 1219 - protein, 2097 aa, synthetic construct
MPAAKRVKLDGGDKKYSIGLDIGTNSVGWAVITDEYKVPSKKFKVLGNTDRHSIKKNLIGALLFDSGETAEATRLKRTARRRYTRRKNRICYLQEIFSNEMAKVDDSFFHRLEESFLVEEDKKHERHPIFGNIVDEVAYHEKYPTIYHLRKKLVDSTDKADLRLIYLALAHMIKFRGHFLIEGDLNPDNSDVDKLFIQLVQTYNQLFEENPINASGVDAKAILSARLSKSRRLENLIAQLPGEKKNGLFGNLIALSLGLTPNFKSNFDLAEDAKLQLSKDTYDDDLDNLLAQIGDQYADLFLAAKNLSDAILLSDILRVNTEITKAPLSASMIKRYDEHHQDLTLLKALVRQQLPEKYKEIFFDQSKNGYAGYIDGGASQEEFYKFIKPILEKMDGTEELLVKLNREDLLRKQRTFDNGSIPHQIHLGELHAILRRQEDFYPFLKDNREKIEKILTFRIPYYVGPLARGNSRFAWMTRKSEETITPWNFEEVVDKGASAQSFIERMTNFDKNLPNEKVLPKHSLLYEYFTVYNELTKVKYVTEGMRKPAFLSGEQKKAIVDLLFKTNRKVTVKQLKEDYFKKIECFDSVEISGVEDRFNASLGTYHDLLKIIKDKDFLDNEENEDILEDIVLTLTLFEDREMIEERLKTYAHLFDDKVMKQLKRRRYTGWGRLSRKLINGIRDKQSGKTILDFLKSDGFANRNFMQLIHDDSLTFKEDIQKAQVSGQGDSLHEHIANLAGSPAIKKGILQTVKVVDELVKVMGRHKPENIVIEMARENQTTQKGQKNSRERMKRIEEGIKELGSQILKEHPVENTQLQNEKLYLYYLQNGRDMYVDQELDINRLSDYDVDHIVPQSFLKDDSIDNKVLTRSDKARGKSDNVPSEEVVKKMKNYWRQLLNAKLITQRKFDNLTKAERGGLSELDKAGFIKRQLVETRQITKHVAQILDSRMNTKYDENDKLIREVKVITLKSKLVSDFRKDFQFYKVREINNYHHAHDAYLNAVVGTALIKKYPKLESEFVYGDYKVYDVRKMIAKSEQEIGKATAKYFFYSNIMNFFKTEITLANGEIRKRPLIETNGETGEIVWDKGRDFATVRKVLSMPQVNIVKKTEVQTGGFSKESILPKRNSDKLIARKKDWDPKKYGGFDSPTVAYSVLVVAKVEKGKSKKLKSVKELLGITIMERSSFEKNPIDFLEAKGYKEVKKDLIIKLPKYSLFELENGRKRMLASAGELQKGNELALPSKYVNFLYLASHYEKLKGSPEDNEQKQLFVEQHKHYLDEIIEQISEFSKRVILADANLDKVLSAYNKHRDKPIREQAENIIHLFTLTNLGAPAAFKYFDTTIDRKRYTSTKEVLDATLIHQSITGLYETRIDLSQLGGDGGPAPAPAPAPAPAPGGTLQLEEEYRLFEPESTQKQEMDIWLKNFPQAWAETGGMGTAHCQAPVLIQLKATATPISIRQYPMPHEAYQGIKPHIRRMLDQGILKPCQSPWNTPLLPVKKPGTEDYRPVQDLREVNKRVEDIHPTVPNPYNLLSTLPPSHPWYTVLDLKDAFFCLRLHSESQLLFAFEWRDPEIGLSGQLTWTRLPQGFKNSPTLFNEALHSDLADFRVRYPALVLLQYVDDLLLAAATRTECLEGTKALLETLGNKGYRASAKKAQICLQEVTYLGYSLKDGQRWLTKARKEAILSIPVPKNSRQVREFLGKAGYCRLFIPGFAELAAPLYPLTRPGTLFQWGTEQQLAFEDIKKALLSSPALGLPDITKPFELFIDENSGFAKGVLVQKLGPWKRPVAYLSKKLDTVASGWPPCLRMVAAIAILVKDAGKLTLGQPLTILTSHPVEALVRQPPNKWLSNARMTHYQAMLLDAERVHFGPTVSLNPATLLPLPSGGNHHDCLQILAETHGTRPDLTDQPLPDADLTWYTDGSSFIRNGEREAGAAVTTESEVIWAAPLPPGTSAQRAELIALTQALKMAEGKKLTVYTDSRYAFATTHVHGEIYRRRGWLTSEGKEIKNKNEILALLEALFLPKRLSIIHCPGHQKGDSPQAKGNRLADDTAKKAATETHSSLTVLPAGKRTADGSEFEKRTADGSEFESPKKKAKVE

SEQ ID NO: 1220 - protein, 2095 aa, synthetic construct
MPAAKRVKLDGGDKKYSIGLDIGTNSVGWAVITDEYKVPSKKFKVLGNTDRHSIKKNLIGALLFDSGETAEATRLKRTARRRYTRRKNRICYLQEIFSNEMAKVDDSFFHRLEESFLVEEDKKHERHPIFGNIVDEVAYHEKYPTIYHLRKKLVDSTDKADLRLIYLALAHMIKFRGHFLIEGDLNPDNSDVDKLFIQLVQTYNQLFEENPINASGVDAKAILSARLSKSRRLENLIAQLPGEKKNGLFGNLIALSLGLTPNFKSNFDLAEDAKLQLSKDTYDDDLDNLLAQIGDQYADLFLAAKNLSDAILLSDILRVNTEITKAPLSASMIKRYDEHHQDLTLLKALVRQQLPEKYKEIFFDQSKNGYAGYIDGGASQEEFYKFIKPILEKMDGTEELLVKLNREDLLRKQRTFDNGSIPHQIHLGELHAILRRQEDFYPFLKDNREKIEKILTFRIPYYVGPLARGNSRFAWMTRKSEETITPWNFEEVVDKGASAQSFIERMTNFDKNLPNEKVLPKHSLLYEYFTVYNELTKVKYVTEGMRKPAFLSGEQKKAIVDLLFKTNRKVTVKQLKEDYFKKIECFDSVEISGVEDRFNASLGTYHDLLKIIKDKDFLDNEENEDILEDIVLTLTLFEDREMIEERLKTYAHLFDDKVMKQLKRRRYTGWGRLSRKLINGIRDKQSGKTILDFLKSDGFANRNFMQLIHDDSLTFKEDIQKAQVSGQGDSLHEHIANLAGSPAIKKGILQTVKVVDELVKVMGRHKPENIVIEMARENQTTQKGQKNSRERMKRIEEGIKELGSQILKEHPVENTQLQNEKLYLYYLQNGRDMYVDQELDINRLSDYDVDHIVPQSFLKDDSIDNKVLTRSDKARGKSDNVPSEEVVKKMKNYWRQLLNAKLITQRKFDNLTKAERGGLSELDKAGFIKRQLVETRQITKHVAQILDSRMNTKYDENDKLIREVKVITLKSKLVSDFRKDFQFYKVREINNYHHAHDAYLNAVVGTALIKKYPKLESEFVYGDYKVYDVRKMIAKSEQEIGKATAKYFFYSNIMNFFKTEITLANGEIRKRPLIETNGETGEIVWDKGRDFATVRKVLSMPQVNIVKKTEVQTGGFSKESILPKRNSDKLIARKKDWDPKKYGGFDSPTVAYSVLVVAKVEKGKSKKLKSVKELLGITIMERSSFEKNPIDFLEAKGYKEVKKDLIIKLPKYSLFELENGRKRMLASAGELQKGNELALPSKYVNFLYLASHYEKLKGSPEDNEQKQLFVEQHKHYLDEIIEQISEFSKRVILADANLDKVLSAYNKHRDKPIREQAENIIHLFTLTNLGAPAAFKYFDTTIDRKRYTSTKEVLDATLIHQSITGLYETRIDLSQLGGDGGGGSGSSEAAAKGGTLQLEEEYRLFEPESTQKQEMDIWLKNFPQAWAETGGMGTAHCQAPVLIQLKATATPISIRQYPMPHEAYQGIKPHIRRMLDQGILKPCQSPWNTPLLPVKKPGTEDYRPVQDLREVNKRVEDIHPTVPNPYNLLSTLPPSHPWYTVLDLKDAFFCLRLHSESQLLFAFEWRDPEIGLSGQLTWTRLPQGFKNSPTLFNEALHSDLADFRVRYPALVLLQYVDDLLLAAATRTECLEGTKALLETLGNKGYRASAKKAQICLQEVTYLGYSLKDGQRWLTKARKEAILSIPVPKNSRQVREFLGKAGYCRLFIPGFAELAAPLYPLTRPGTLFQWGTEQQLAFEDIKKALLSSPALGLPDITKPFELFIDENSGFAKGVLVQKLGPWKRPVAYLSKKLDTVASGWPPCLRMVAAIAILVKDAGKLTLGQPLTILTSHPVEALVRQPPNKWLSNARMTHYQAMLLDAERVHFGPTVSLNPATLLPLPSGGNHHDCLQILAETHGTRPDLTDQPLPDADLTWYTDGSSFIRNGEREAGAAVTTESEVIWAAPLPPGTSAQRAELIALTQALKMAEGKKLTVYTDSRYAFATTHVHGEIYRRRGWLTSEGKEIKNKNEILALLEALFLPKRLSIIHCPGHQKGDSPQAKGNRLADDTAKKAATETHSSLTVLPAGKRTADGSEFEKRTADGSEFESPKKKAKVE

SEQ ID NO: 1221 - protein, 2095 aa, synthetic construct
MPAAKRVKLDGGDKKYSIGLDIGTNSVGWAVITDEYKVPSKKFKVLGNTDRHSIKKNLIGALLFDSGETAEATRLKRTARRRYTRRKNRICYLQEIFSNEMAKVDDSFFHRLEESFLVEEDKKHERHPIFGNIVDEVAYHEKYPTIYHLRKKLVDSTDKADLRLIYLALAHMIKFRGHFLIEGDLNPDNSDVDKLFIQLVQTYNQLFEENPINASGVDAKAILSARLSKSRRLENLIAQLPGEKKNGLFGNLIALSLGLTPNFKSNFDLAEDAKLQLSKDTYDDDLDNLLAQIGDQYADLFLAAKNLSDAILLSDILRVNTEITKAPLSASMIKRYDEHHQDLTLLKALVRQQLPEKYKEIFFDQSKNGYAGYIDGGASQEEFYKFIKPILEKMDGTEELLVKLNREDLLRKQRTFDNGSIPHQIHLGELHAILRRQEDFYPFLKDNREKIEKILTFRIPYYVGPLARGNSRFAWMTRKSEETITPWNFEEVVDKGASAQSFIERMTNFDKNLPNEKVLPKHSLLYEYFTVYNELTKVKYVTEGMRKPAFLSGEQKKAIVDLLFKTNRKVTVKQLKEDYFKKIECFDSVEISGVEDRFNASLGTYHDLLKIIKDKDFLDNEENEDILEDIVLTLTLFEDREMIEERLKTYAHLFDDKVMKQLKRRRYTGWGRLSRKLINGIRDKQSGKTILDFLKSDGFANRNFMQLIHDDSLTFKEDIQKAQVSGQGDSLHEHIANLAGSPAIKKGILQTVKVVDELVKVMGRHKPENIVIEMARENQTTQKGQKNSRERMKRIEEGIKELGSQILKEHPVENTQLQNEKLYLYYLQNGRDMYVDQELDINRLSDYDVDHIVPQSFLKDDSIDNKVLTRSDKARGKSDNVPSEEVVKKMKNYWRQLLNAKLITQRKFDNLTKAERGGLSELDKAGFIKRQLVETRQITKHVAQILDSRMNTKYDENDKLIREVKVITLKSKLVSDFRKDFQFYKVREINNYHHAHDAYLNAVVGTALIKKYPKLESEFVYGDYKVYDVRKMIAKSEQEIGKATAKYFFYSNIMNFFKTEITLANGEIRKRPLIETNGETGEIVWDKGRDFATVRKVLSMPQVNIVKKTEVQTGGFSKESILPKRNSDKLIARKKDWDPKKYGGFDSPTVAYSVLVVAKVEKGKSKKLKSVKELLGITIMERSSFEKNPIDFLEAKGYKEVKKDLIIKLPKYSLFELENGRKRMLASAGELQKGNELALPSKYVNFLYLASHYEKLKGSPEDNEQKQLFVEQHKHYLDEIIEQISEFSKRVILADANLDKVLSAYNKHRDKPIREQAENIIHLFTLTNLGAPAAFKYFDTTIDRKRYTSTKEVLDATLIHQSITGLYETRIDLSQLGGDGGGGGPAPEAAAKGGTLQLEEEYRLFEPESTQKQEMDIWLKNFPQAWAETGGMGTAHCQAPVLIQLKATATPISIRQYPMPHEAYQGIKPHIRRMLDQGILKPCQSPWNTPLLPVKKPGTEDYRPVQDLREVNKRVEDIHPTVPNPYNLLSTLPPSHPWYTVLDLKDAFFCLRLHSESQLLFAFEWRDPEIGLSGQLTWTRLPQGFKNSPTLFNEALHSDLADFRVRYPALVLLQYVDDLLLAAATRTECLEGTKALLETLGNKGYRASAKKAQICLQEVTYLGYSLKDGQRWLTKARKEAILSIPVPKNSRQVREFLGKAGYCRLFIPGFAELAAPLYPLTRPGTLFQWGTEQQLAFEDIKKALLSSPALGLPDITKPFELFIDENSGFAKGVLVQKLGPWKRPVAYLSKKLDTVASGWPPCLRMVAAIAILVKDAGKLTLGQPLTILTSHPVEALVRQPPNKWLSNARMTHYQAMLLDAERVHFGPTVSLNPATLLPLPSGGNHHDCLQILAETHGTRPDLTDQPLPDADLTWYTDGSSFIRNGEREAGAAVTTESEVIWAAPLPPGTSAQRAELIALTQALKMAEGKKLTVYTDSRYAFATTHVHGEIYRRRGWLTSEGKEIKNKNEILALLEALFLPKRLSIIHCPGHQKGDSPQAKGNRLADDTAKKAATETHSSLTVLPAGKRTADGSEFEKRTADGSEFESPKKKAKVE

SEQ ID NO: 1222 - protein, 2117 aa, synthetic construct
MPAAKRVKLDGGDKKYSIGLDIGTNSVGWAVITDEYKVPSKKFKVLGNTDRHSIKKNLIGALLFDSGETAEATRLKRTARRRYTRRKNRICYLQEIFSNEMAKVDDSFFHRLEESFLVEEDKKHERHPIFGNIVDEVAYHEKYPTIYHLRKKLVDSTDKADLRLIYLALAHMIKFRGHFLIEGDLNPDNSDVDKLFIQLVQTYNQLFEENPINASGVDAKAILSARLSKSRRLENLIAQLPGEKKNGLFGNLIALSLGLTPNFKSNFDLAEDAKLQLSKDTYDDDLDNLLAQIGDQYADLFLAAKNLSDAILLSDILRVNTEITKAPLSASMIKRYDEHHQDLTLLKALVRQQLPEKYKEIFFDQSKNGYAGYIDGGASQEEFYKFIKPILEKMDGTEELLVKLNREDLLRKQRTFDNGSIPHQIHLGELHAILRRQEDFYPFLKDNREKIEKILTFRIPYYVGPLARGNSRFAWMTRKSEETITPWNFEEVVDKGASAQSFIERMTNFDKNLPNEKVLPKHSLLYEYFTVYNELTKVKYVTEGMRKPAFLSGEQKKAIVDLLFKTNRKVTVKQLKEDYFKKIECFDSVEISGVEDRFNASLGTYHDLLKIIKDKDFLDNEENEDILEDIVLTLTLFEDREMIEERLKTYAHLFDDKVMKQLKRRRYTGWGRLSRKLINGIRDKQSGKTILDFLKSDGFANRNFMQLIHDDSLTFKEDIQKAQVSGQGDSLHEHIANLAGSPAIKKGILQTVKVVDELVKVMGRHKPENIVIEMARENQTTQKGQKNSRERMKRIEEGIKELGSQILKEHPVENTQLQNEKLYLYYLQNGRDMYVDQELDINRLSDYDVDHIVPQSFLKDDSIDNKVLTRSDKARGKSDNVPSEEVVKKMKNYWRQLLNAKLITQRKFDNLTKAERGGLSELDKAGFIKRQLVETRQITKHVAQILDSRMNTKYDENDKLIREVKVITLKSKLVSDFRKDFQFYKVREINNYHHAHDAYLNAVVGTALIKKYPKLESEFVYGDYKVYDVRKMIAKSEQEIGKATAKYFFYSNIMNFFKTEITLANGEIRKRPLIETNGETGEIVWDKGRDFATVRKVLSMPQVNIVKKTEVQTGGFSKESILPKRNSDKLIARKKDWDPKKYGGFDSPTVAYSVLVVAKVEKGKSKKLKSVKELLGITIMERSSFEKNPIDFLEAKGYKEVKKDLIIKLPKYSLFELENGRKRMLASAGELQKGNELALPSKYVNFLYLASHYEKLKGSPEDNEQKQLFVEQHKHYLDEIIEQISEFSKRVILADANLDKVLSAYNKHRDKPIREQAENIIHLFTLTNLGAPAAFKYFDTTIDRKRYTSTKEVLDATLIHQSITGLYETRIDLSQLGGDGGSGGSSGGSSGSETPGTSESATPESSGGSSGGSSGGTLQLEEEYRLFEPESTQKQEMDIWLKNFPQAWAETGGMGTAHCQAPVLIQLKATATPISIRQYPMPHEAYQGIKPHIRRMLDQGILKPCQSPWNTPLLPVKKPGTEDYRPVQDLREVNKRVEDIHPTVPNPYNLLSTLPPSHPWYTVLDLKDAFFCLRLHSESQLLFAFEWRDPEIGLSGQLTWTRLPQGFKNSPTLFNEALHSDLADFRVRYPALVLLQYVDDLLLAAATRTECLEGTKALLETLGNKGYRASAKKAQICLQEVTYLGYSLKDGQRWLTKARKEAILSIPVPKNSRQVREFLGKAGYCRLFIPGFAELAAPLYPLTRPGTLFQWGTEQQLAFEDIKKALLSSPALGLPDITKPFELFIDENSGFAKGVLVQKLGPWKRPVAYLSKKLDTVASGWPPCLRMVAAIAILVKDAGKLTLGQPLTILTSHPVEALVRQPPNKWLSNARMTHYQAMLLDAERVHFGPTVSLNPATLLPLPSGGNHHDCLQILAETHGTRPDLTDQPLPDADLTWYTDGSSFIRNGEREAGAAVTTESEVIWAAPLPPGTSAQRAELIALTQALKMAEGKKLTVYTDSRYAFATTHVHGEIYRRRGWLTSEGKEIKNKNEILALLEALFLPKRLSIIHCPGHQKGDSPQAKGNRLADDTAKKAATETHSSLTVLPAGKRTADGSEFEKRTADGSEFESPKKKAKVE

SEQ ID NO: 1223 - protein, 2087 aa, synthetic construct
MPAAKRVKLDGGDKKYSIGLDIGTNSVGWAVITDEYKVPSKKFKVLGNTDRHSIKKNLIGALLFDSGETAEATRLKRTARRRYTRRKNRICYLQEIFSNEMAKVDDSFFHRLEESFLVEEDKKHERHPIFGNIVDEVAYHEKYPTIYHLRKKLVDSTDKADLRLIYLALAHMIKFRGHFLIEGDLNPDNSDVDKLFIQLVQTYNQLFEENPINASGVDAKAILSARLSKSRRLENLIAQLPGEKKNGLFGNLIALSLGLTPNFKSNFDLAEDAKLQLSKDTYDDDLDNLLAQIGDQYADLFLAAKNLSDAILLSDILRVNTEITKAPLSASMIKRYDEHHQDLTLLKALVRQQLPEKYKEIFFDQSKNGYAGYIDGGASQEEFYKFIKPILEKMDGTEELLVKLNREDLLRKQRTFDNGSIPHQIHLGELHAILRRQEDFYPFLKDNREKIEKILTFRIPYYVGPLARGNSRFAWMTRKSEETITPWNFEEVVDKGASAQSFIERMTNFDKNLPNEKVLPKHSLLYEYFTVYNELTKVKYVTEGMRKPAFLSGEQKKAIVDLLFKTNRKVTVKQLKEDYFKKIECFDSVEISGVEDRFNASLGTYHDLLKIIKDKDFLDNEENEDILEDIVLTLTLFEDREMIEERLKTYAHLFDDKVMKQLKRRRYTGWGRLSRKLINGIRDKQSGKTILDFLKSDGFANRNFMQLIHDDSLTFKEDIQKAQVSGQGDSLHEHIANLAGSPAIKKGILQTVKVVDELVKVMGRHKPENIVIEMARENQTTQKGQKNSRERMKRIEEGIKELGSQILKEHPVENTQLQNEKLYLYYLQNGRDMYVDQELDINRLSDYDVDHIVPQSFLKDDSIDNKVLTRSDKARGKSDNVPSEEVVKKMKNYWRQLLNAKLITQRKFDNLTKAERGGLSELDKAGFIKRQLVETRQITKHVAQILDSRMNTKYDENDKLIREVKVITLKSKLVSDFRKDFQFYKVREINNYHHAHDAYLNAVVGTALIKKYPKLESEFVYGDYKVYDVRKMIAKSEQEIGKATAKYFFYSNIMNFFKTEITLANGEIRKRPLIETNGETGEIVWDKGRDFATVRKVLSMPQVNIVKKTEVQTGGFSKESILPKRNSDKLIARKKDWDPKKYGGFDSPTVAYSVLVVAKVEKGKSKKLKSVKELLGITIMERSSFEKNPIDFLEAKGYKEVKKDLIIKLPKYSLFELENGRKRMLASAGELQKGNELALPSKYVNFLYLASHYEKLKGSPEDNEQKQLFVEQHKHYLDEIIEQISEFSKRVILADANLDKVLSAYNKHRDKPIREQAENIIHLFTLTNLGAPAAFKYFDTTIDRKRYTSTKEVLDATLIHQSITGLYETRIDLSQLGGDGGPAPGGTLQLEEEYRLFEPESTQKQEMDIWLKNFPQAWAETGGMGTAHCQAPVLIQLKATATPISIRQYPMPHEAYQGIKPHIRRMLDQGILKPCQSPWNTPLLPVKKPGTEDYRPVQDLREVNKRVEDIHPTVPNPYNLLSTLPPSHPWYTVLDLKDAFFCLRLHSESQLLFAFEWRDPEIGLSGQLTWTRLPQGFKNSPTLFNEALHSDLADFRVRYPALVLLQYVDDLLLAAATRTECLEGTKALLETLGNKGYRASAKKAQICLQEVTYLGYSLKDGQRWLTKARKEAILSIPVPKNSRQVREFLGKAGYCRLFIPGFAELAAPLYPLTRPGTLFQWGTEQQLAFEDIKKALLSSPALGLPDITKPFELFIDENSGFAKGVLVQKLGPWKRPVAYLSKKLDTVASGWPPCLRMVAAIAILVKDAGKLTLGQPLTILTSHPVEALVRQPPNKWLSNARMTHYQAMLLDAERVHFGPTVSLNPATLLPLPSGGNHHDCLQILAETHGTRPDLTDQPLPDADLTWYTDGSSFIRNGEREAGAAVTTESEVIWAAPLPPGTSAQRAELIALTQALKMAEGKKLTVYTDSRYAFATTHVHGEIYRRRGWLTSEGKEIKNKNEILALLEALFLPKRLSIIHCPGHQKGDSPQAKGNRLADDTAKKAATETHSSLTVLPAGKRTADGSEFEKRTADGSEFESPKKKAKVE

SEQ ID NO: 1224 - protein, 2093 aa, synthetic construct
MPAAKRVKLDGGDKKYSIGLDIGTNSVGWAVITDEYKVPSKKFKVLGNTDRHSIKKNLIGALLFDSGETAEATRLKRTARRRYTRRKNRICYLQEIFSNEMAKVDDSFFHRLEESFLVEEDKKHERHPIFGNIVDEVAYHEKYPTIYHLRKKLVDSTDKADLRLIYLALAHMIKFRGHFLIEGDLNPDNSDVDKLFIQLVQTYNQLFEENPINASGVDAKAILSARLSKSRRLENLIAQLPGEKKNGLFGNLIALSLGLTPNFKSNFDLAEDAKLQLSKDTYDDDLDNLLAQIGDQYADLFLAAKNLSDAILLSDILRVNTEITKAPLSASMIKRYDEHHQDLTLLKALVRQQLPEKYKEIFFDQSKNGYAGYIDGGASQEEFYKFIKPILEKMDGTEELLVKLNREDLLRKQRTFDNGSIPHQIHLGELHAILRRQEDFYPFLKDNREKIEKILTFRIPYYVGPLARGNSRFAWMTRKSEETITPWNFEEVVDKGASAQSFIERMTNFDKNLPNEKVLPKHSLLYEYFTVYNELTKVKYVTEGMRKPAFLSGEQKKAIVDLLFKTNRKVTVKQLKEDYFKKIECFDSVEISGVEDRFNASLGTYHDLLKIIKDKDFLDNEENEDILEDIVLTLTLFEDREMIEERLKTYAHLFDDKVMKQLKRRRYTGWGRLSRKLINGIRDKQSGKTILDFLKSDGFANRNFMQLIHDDSLTFKEDIQKAQVSGQGDSLHEHIANLAGSPAIKKGILQTVKVVDELVKVMGRHKPENIVIEMARENQTTQKGQKNSRERMKRIEEGIKELGSQILKEHPVENTQLQNEKLYLYYLQNGRDMYVDQELDINRLSDYDVDHIVPQSFLKDDSIDNKVLTRSDKARGKSDNVPSEEVVKKMKNYWRQLLNAKLITQRKFDNLTKAERGGLSELDKAGFIKRQLVETRQITKHVAQILDSRMNTKYDENDKLIREVKVITLKSKLVSDFRKDFQFYKVREINNYHHAHDAYLNAVVGTALIKKYPKLESEFVYGDYKVYDVRKMIAKSEQEIGKATAKYFFYSNIMNFFKTEITLANGEIRKRPLIETNGETGEIVWDKGRDFATVRKVLSMPQVNIVKKTEVQTGGFSKESILPKRNSDKLIARKKDWDPKKYGGFDSPTVAYSVLVVAKVEKGKSKKLKSVKELLGITIMERSSFEKNPIDFLEAKGYKEVKKDLIIKLPKYSLFELENGRKRMLASAGELQKGNELALPSKYVNFLYLASHYEKLKGSPEDNEQKQLFVEQHKHYLDEIIEQISEFSKRVILADANLDKVLSAYNKHRDKPIREQAENIIHLFTLTNLGAPAAFKYFDTTIDRKRYTSTKEVLDATLIHQSITGLYETRIDLSQLGGDGGGSSPAPGGGGGTLQLEEEYRLFEPESTQKQEMDIWLKNFPQAWAETGGMGTAHCQAPVLIQLKATATPISIRQYPMPHEAYQGIKPHIRRMLDQGILKPCQSPWNTPLLPVKKPGTEDYRPVQDLREVNKRVEDIHPTVPNPYNLLSTLPPSHPWYTVLDLKDAFFCLRLHSESQLLFAFEWRDPEIGLSGQLTWTRLPQGFKNSPTLFNEALHSDLADFRVRYPALVLLQYVDDLLLAAATRTECLEGTKALLETLGNKGYRASAKKAQICLQEVTYLGYSLKDGQRWLTKARKEAILSIPVPKNSRQVREFLGKAGYCRLFIPGFAELAAPLYPLTRPGTLFQWGTEQQLAFEDIKKALLSSPALGLPDITKPFELFIDENSGFAKGVLVQKLGPWKRPVAYLSKKLDTVASGWPPCLRMVAAIAILVKDAGKLTLGQPLTILTSHPVEALVRQPPNKWLSNARMTHYQAMLLDAERVHFGPTVSLNPATLLPLPSGGNHHDCLQILAETHGTRPDLTDQPLPDADLTWYTDGSSFIRNGEREAGAAVTTESEVIWAAPLPPGTSAQRAELIALTQALKMAEGKKLTVYTDSRYAFATTHVHGEIYRRRGWLTSEGKEIKNKNEILALLEALFLPKRLSIIHCPGHQKGDSPQAKGNRLADDTAKKAATETHSSLTVLPAGKRTADGSEFEKRTADGSEFESPKKKAKVE

SEQ ID NO: 1225 - protein, 2095 aa, synthetic construct
MPAAKRVKLDGGDKKYSIGLDIGTNSVGWAVITDEYKVPSKKFKVLGNTDRHSIKKNLIGALLFDSGETAEATRLKRTARRRYTRRKNRICYLQEIFSNEMAKVDDSFFHRLEESFLVEEDKKHERHPIFGNIVDEVAYHEKYPTIYHLRKKLVDSTDKADLRLIYLALAHMIKFRGHFLIEGDLNPDNSDVDKLFIQLVQTYNQLFEENPINASGVDAKAILSARLSKSRRLENLIAQLPGEKKNGLFGNLIALSLGLTPNFKSNFDLAEDAKLQLSKDTYDDDLDNLLAQIGDQYADLFLAAKNLSDAILLSDILRVNTEITKAPLSASMIKRYDEHHQDLTLLKALVRQQLPEKYKEIFFDQSKNGYAGYIDGGASQEEFYKFIKPILEKMDGTEELLVKLNREDLLRKQRTFDNGSIPHQIHLGELHAILRRQEDFYPFLKDNREKIEKILTFRIPYYVGPLARGNSRFAWMTRKSEETITPWNFEEVVDKGASAQSFIERMTNFDKNLPNEKVLPKHSLLYEYFTVYNELTKVKYVTEGMRKPAFLSGEQKKAIVDLLFKTNRKVTVKQLKEDYFKKIECFDSVEISGVEDRFNASLGTYHDLLKIIKDKDFLDNEENEDILEDIVLTLTLFEDREMIEERLKTYAHLFDDKVMKQLKRRRYTGWGRLSRKLINGIRDKQSGKTILDFLKSDGFANRNFMQLIHDDSLTFKEDIQKAQVSGQGDSLHEHIANLAGSPAIKKGILQTVKVVDELVKVMGRHKPENIVIEMARENQTTQKGQKNSRERMKRIEEGIKELGSQILKEHPVENTQLQNEKLYLYYLQNGRDMYVDQELDINRLSDYDVDHIVPQSFLKDDSIDNKVLTRSDKARGKSDNVPSEEVVKKMKNYWRQLLNAKLITQRKFDNLTKAERGGLSELDKAGFIKRQLVETRQITKHVAQILDSRMNTKYDENDKLIREVKVITLKSKLVSDFRKDFQFYKVREINNYHHAHDAYLNAVVGTALIKKYPKLESEFVYGDYKVYDVRKMIAKSEQEIGKATAKYFFYSNIMNFFKTEITLANGEIRKRPLIETNGETGEIVWDKGRDFATVRKVLSMPQVNIVKKTEVQTGGFSKESILPKRNSDKLIARKKDWDPKKYGGFDSPTVAYSVLVVAKVEKGKSKKLKSVKELLGITIMERSSFEKNPIDFLEAKGYKEVKKDLIIKLPKYSLFELENGRKRMLASAGELQKGNELALPSKYVNFLYLASHYEKLKGSPEDNEQKQLFVEQHKHYLDEIIEQISEFSKRVILADANLDKVLSAYNKHRDKPIREQAENIIHLFTLTNLGAPAAFKYFDTTIDRKRYTSTKEVLDATLIHQSITGLYETRIDLSQLGGDGGGSSPAPEAAAKGGTLQLEEEYRLFEPESTQKQEMDIWLKNFPQAWAETGGMGTAHCQAPVLIQLKATATPISIRQYPMPHEAYQGIKPHIRRMLDQGILKPCQSPWNTPLLPVKKPGTEDYRPVQDLREVNKRVEDIHPTVPNPYNLLSTLPPSHPWYTVLDLKDAFFCLRLHSESQLLFAFEWRDPEIGLSGQLTWTRLPQGFKNSPTLFNEALHSDLADFRVRYPALVLLQYVDDLLLAAATRTECLEGTKALLETLGNKGYRASAKKAQICLQEVTYLGYSLKDGQRWLTKARKEAILSIPVPKNSRQVREFLGKAGYCRLFIPGFAELAAPLYPLTRPGTLFQWGTEQQLAFEDIKKALLSSPALGLPDITKPFELFIDENSGFAKGVLVQKLGPWKRPVAYLSKKLDTVASGWPPCLRMVAAIAILVKDAGKLTLGQPLTILTSHPVEALVRQPPNKWLSNARMTHYQAMLLDAERVHFGPTVSLNPATLLPLPSGGNHHDCLQILAETHGTRPDLTDQPLPDADLTWYTDGSSFIRNGEREAGAAVTTESEVIWAAPLPPGTSAQRAELIALTQALKMAEGKKLTVYTDSRYAFATTHVHGEIYRRRGWLTSEGKEIKNKNEILALLEALFLPKRLSIIHCPGHQKGDSPQAKGNRLADDTAKKAATETHSSLTVLPAGKRTADGSEFEKRTADGSEFESPKKKAKVE

SEQ ID NO: 1226 - protein, 2087 aa, synthetic construct
MPAAKRVKLDGGDKKYSIGLDIGTNSVGWAVITDEYKVPSKKFKVLGNTDRHSIKKNLIGALLFDSGETAEATRLKRTARRRYTRRKNRICYLQEIFSNEMAKVDDSFFHRLEESFLVEEDKKHERHPIFGNIVDEVAYHEKYPTIYHLRKKLVDSTDKADLRLIYLALAHMIKFRGHFLIEGDLNPDNSDVDKLFIQLVQTYNQLFEENPINASGVDAKAILSARLSKSRRLENLIAQLPGEKKNGLFGNLIALSLGLTPNFKSNFDLAEDAKLQLSKDTYDDDLDNLLAQIGDQYADLFLAAKNLSDAILLSDILRVNTEITKAPLSASMIKRYDEHHQDLTLLKALVRQQLPEKYKEIFFDQSKNGYAGYIDGGASQEEFYKFIKPILEKMDGTEELLVKLNREDLLRKQRTFDNGSIPHQIHLGELHAILRRQEDFYPFLKDNREKIEKILTFRIPYYVGPLARGNSRFAWMTRKSEETITPWNFEEVVDKGASAQSFIERMTNFDKNLPNEKVLPKHSLLYEYFTVYNELTKVKYVTEGMRKPAFLSGEQKKAIVDLLFKTNRKVTVKQLKEDYFKKIECFDSVEISGVEDRFNASLGTYHDLLKIIKDKDFLDNEENEDILEDIVLTLTLFEDREMIEERLKTYAHLFDDKVMKQLKRRRYTGWGRLSRKLINGIRDKQSGKTILDFLKSDGFANRNFMQLIHDDSLTFKEDIQKAQVSGQGDSLHEHIANLAGSPAIKKGILQTVKVVDELVKVMGRHKPENIVIEMARENQTTQKGQKNSRERMKRIEEGIKELGSQILKEHPVENTQLQNEKLYLYYLQNGRDMYVDQELDINRLSDYDVDHIVPQSFLKDDSIDNKVLTRSDKARGKSDNVPSEEVVKKMKNYWRQLLNAKLITQRKFDNLTKAERGGLSELDKAGFIKRQLVETRQITKHVAQILDSRMNTKYDENDKLIREVKVITLKSKLVSDFRKDFQFYKVREINNYHHAHDAYLNAVVGTALIKKYPKLESEFVYGDYKVYDVRKMIAKSEQEIGKATAKYFFYSNIMNFFKTEITLANGEIRKRPLIETNGETGEIVWDKGRDFATVRKVLSMPQVNIVKKTEVQTGGFSKESILPKRNSDKLIARKKDWDPKKYGGFDSPTVAYSVLVVAKVEKGKSKKLKSVKELLGITIMERSSFEKNPIDFLEAKGYKEVKKDLIIKLPKYSLFELENGRKRMLASAGELQKGNELALPSKYVNFLYLASHYEKLKGSPEDNEQKQLFVEQHKHYLDEIIEQISEFSKRVILADANLDKVLSAYNKHRDKPIREQAENIIHLFTLTNLGAPAAFKYFDTTIDRKRYTSTKEVLDATLIHQSITGLYETRIDLSQLGGDGGGSSGGTLQLEEEYRLFEPESTQKQEMDIWLKNFPQAWAETGGMGTAHCQAPVLIQLKATATPISIRQYPMPHEAYQGIKPHIRRMLDQGILKPCQSPWNTPLLPVKKPGTEDYRPVQDLREVNKRVEDIHPTVPNPYNLLSTLPPSHPWYTVLDLKDAFFCLRLHSESQLLFAFEWRDPEIGLSGQLTWTRLPQGFKNSPTLFNEALHSDLADFRVRYPALVLLQYVDDLLLAAATRTECLEGTKALLETLGNKGYRASAKKAQICLQEVTYLGYSLKDGQRWLTKARKEAILSIPVPKNSRQVREFLGKAGYCRLFIPGFAELAAPLYPLTRPGTLFQWGTEQQLAFEDIKKALLSSPALGLPDITKPFELFIDENSGFAKGVLVQKLGPWKRPVAYLSKKLDTVASGWPPCLRMVAAIAILVKDAGKLTLGQPLTILTSHPVEALVRQPPNKWLSNARMTHYQAMLLDAERVHFGPTVSLNPATLLPLPSGGNHHDCLQILAETHGTRPDLTDQPLPDADLTWYTDGSSFIRNGEREAGAAVTTESEVIWAAPLPPGTSAQRAELIALTQALKMAEGKKLTVYTDSRYAFATTHVHGEIYRRRGWLTSEGKEIKNKNEILALLEALFLPKRLSIIHCPGHQKGDSPQAKGNRLADDTAKKAATETHSSLTVLPAGKRTADGSEFEKRTADGSEFESPKKKAKVE

SEQ ID NO: 1227 - protein, 2095 aa, synthetic construct
MPAAKRVKLDGGDKKYSIGLDIGTNSVGWAVITDEYKVPSKKFKVLGNTDRHSIKKNLIGALLFDSGETAEATRLKRTARRRYTRRKNRICYLQEIFSNEMAKVDDSFFHRLEESFLVEEDKKHERHPIFGNIVDEVAYHEKYPTIYHLRKKLVDSTDKADLRLIYLALAHMIKFRGHFLIEGDLNPDNSDVDKLFIQLVQTYNQLFEENPINASGVDAKAILSARLSKSRRLENLIAQLPGEKKNGLFGNLIALSLGLTPNFKSNFDLAEDAKLQLSKDTYDDDLDNLLAQIGDQYADLFLAAKNLSDAILLSDILRVNTEITKAPLSASMIKRYDEHHQDLTLLKALVRQQLPEKYKEIFFDQSKNGYAGYIDGGASQEEFYKFIKPILEKMDGTEELLVKLNREDLLRKQRTFDNGSIPHQIHLGELHAILRRQEDFYPFLKDNREKIEKILTFRIPYYVGPLARGNSRFAWMTRKSEETITPWNFEEVVDKGASAQSFIERMTNFDKNLPNEKVLPKHSLLYEYFTVYNELTKVKYVTEGMRKPAFLSGEQKKAIVDLLFKTNRKVTVKQLKEDYFKKIECFDSVEISGVEDRFNASLGTYHDLLKIIKDKDFLDNEENEDILEDIVLTLTLFEDREMIEERLKTYAHLFDDKVMKQLKRRRYTGWGRLSRKLINGIRDKQSGKTILDFLKSDGFANRNFMQLIHDDSLTFKEDIQKAQVSGQGDSLHEHIANLAGSPAIKKGILQTVKVVDELVKVMGRHKPENIVIEMARENQTTQKGQKNSRERMKRIEEGIKELGSQILKEHPVENTQLQNEKLYLYYLQNGRDMYVDQELDINRLSDYDVDHIVPQSFLKDDSIDNKVLTRSDKARGKSDNVPSEEVVKKMKNYWRQLLNAKLITQRKFDNLTKAERGGLSELDKAGFIKRQLVETRQITKHVAQILDSRMNTKYDENDKLIREVKVITLKSKLVSDFRKDFQFYKVREINNYHHAHDAYLNAVVGTALIKKYPKLESEFVYGDYKVYDVRKMIAKSEQEIGKATAKYFFYSNIMNFFKTEITLANGEIRKRPLIETNGETGEIVWDKGRDFATVRKVLSMPQVNIVKKTEVQTGGFSKESILPKRNSDKLIARKKDWDPKKYGGFDSPTVAYSVLVVAKVEKGKSKKLKSVKELLGITIMERSSFEKNPIDFLEAKGYKEVKKDLIIKLPKYSLFELENGRKRMLASAGELQKGNELALPSKYVNFLYLASHYEKLKGSPEDNEQKQLFVEQHKHYLDEIIEQISEFSKRVILADANLDKVLSAYNKHRDKPIREQAENIIHLFTLTNLGAPAAFKYFDTTIDRKRYTSTKEVLDATLIHQSITGLYETRIDLSQLGGDGGGSSGGGEAAAKGGTLQLEEEYRLFEPESTQKQEMDIWLKNFPQAWAETGGMGTAHCQAPVLIQLKATATPISIRQYPMPHEAYQGIKPHIRRMLDQGILKPCQSPWNTPLLPVKKPGTEDYRPVQDLREVNKRVEDIHPTVPNPYNLLSTLPPSHPWYTVLDLKDAFFCLRLHSESQLLFAFEWRDPEIGLSGQLTWTRLPQGFKNSPTLFNEALHSDLADFRVRYPALVLLQYVDDLLLAAATRTECLEGTKALLETLGNKGYRASAKKAQICLQEVTYLGYSLKDGQRWLTKARKEAILSIPVPKNSRQVREFLGKAGYCRLFIPGFAELAAPLYPLTRPGTLFQWGTEQQLAFEDIKKALLSSPALGLPDITKPFELFIDENSGFAKGVLVQKLGPWKRPVAYLSKKLDTVASGWPPCLRMVAAIAILVKDAGKLTLGQPLTILTSHPVEALVRQPPNKWLSNARMTHYQAMLLDAERVHFGPTVSLNPATLLPLPSGGNHHDCLQILAETHGTRPDLTDQPLPDADLTWYTDGSSFIRNGEREAGAAVTTESEVIWAAPLPPGTSAQRAELIALTQALKMAEGKKLTVYTDSRYAFATTHVHGEIYRRRGWLTSEGKEIKNKNEILALLEALFLPKRLSIIHCPGHQKGDSPQAKGNRLADDTAKKAATETHSSLTVLPAGKRTADGSEFEKRTADGSEFESPKKKAKVE

SEQ ID NO: 1228 - protein, 2090 aa, synthetic construct
MPAAKRVKLDGGDKKYSIGLDIGTNSVGWAVITDEYKVPSKKFKVLGNTDRHSIKKNLIGALLFDSGETAEATRLKRTARRRYTRRKNRICYLQEIFSNEMAKVDDSFFHRLEESFLVEEDKKHERHPIFGNIVDEVAYHEKYPTIYHLRKKLVDSTDKADLRLIYLALAHMIKFRGHFLIEGDLNPDNSDVDKLFIQLVQTYNQLFEENPINASGVDAKAILSARLSKSRRLENLIAQLPGEKKNGLFGNLIALSLGLTPNFKSNFDLAEDAKLQLSKDTYDDDLDNLLAQIGDQYADLFLAAKNLSDAILLSDILRVNTEITKAPLSASMIKRYDEHHQDLTLLKALVRQQLPEKYKEIFFDQSKNGYAGYIDGGASQEEFYKFIKPILEKMDGTEELLVKLNREDLLRKQRTFDNGSIPHQIHLGELHAILRRQEDFYPFLKDNREKIEKILTFRIPYYVGPLARGNSRFAWMTRKSEETITPWNFEEVVDKGASAQSFIERMTNFDKNLPNEKVLPKHSLLYEYFTVYNELTKVKYVTEGMRKPAFLSGEQKKAIVDLLFKTNRKVTVKQLKEDYFKKIECFDSVEISGVEDRFNASLGTYHDLLKIIKDKDFLDNEENEDILEDIVLTLTLFEDREMIEERLKTYAHLFDDKVMKQLKRRRYTGWGRLSRKLINGIRDKQSGKTILDFLKSDGFANRNFMQLIHDDSLTFKEDIQKAQVSGQGDSLHEHIANLAGSPAIKKGILQTVKVVDELVKVMGRHKPENIVIEMARENQTTQKGQKNSRERMKRIEEGIKELGSQILKEHPVENTQLQNEKLYLYYLQNGRDMYVDQELDINRLSDYDVDHIVPQSFLKDDSIDNKVLTRSDKARGKSDNVPSEEVVKKMKNYWRQLLNAKLITQRKFDNLTKAERGGLSELDKAGFIKRQLVETRQITKHVAQILDSRMNTKYDENDKLIREVKVITLKSKLVSDFRKDFQFYKVREINNYHHAHDAYLNAVVGTALIKKYPKLESEFVYGDYKVYDVRKMIAKSEQEIGKATAKYFFYSNIMNFFKTEITLANGEIRKRPLIETNGETGEIVWDKGRDFATVRKVLSMPQVNIVKKTEVQTGGFSKESILPKRNSDKLIARKKDWDPKKYGGFDSPTVAYSVLVVAKVEKGKSKKLKSVKELLGITIMERSSFEKNPIDFLEAKGYKEVKKDLIIKLPKYSLFELENGRKRMLASAGELQKGNELALPSKYVNFLYLASHYEKLKGSPEDNEQKQLFVEQHKHYLDEIIEQISEFSKRVILADANLDKVLSAYNKHRDKPIREQAENIIHLFTLTNLGAPAAFKYFDTTIDRKRYTSTKEVLDATLIHQSITGLYETRIDLSQLGGDGGPAPGGSGGTLQLEEEYRLFEPESTQKQEMDIWLKNFPQAWAETGGMGTAHCQAPVLIQLKATATPISIRQYPMPHEAYQGIKPHIRRMLDQGILKPCQSPWNTPLLPVKKPGTEDYRPVQDLREVNKRVEDIHPTVPNPYNLLSTLPPSHPWYTVLDLKDAFFCLRLHSESQLLFAFEWRDPEIGLSGQLTWTRLPQGFKNSPTLFNEALHSDLADFRVRYPALVLLQYVDDLLLAAATRTECLEGTKALLETLGNKGYRASAKKAQICLQEVTYLGYSLKDGQRWLTKARKEAILSIPVPKNSRQVREFLGKAGYCRLFIPGFAELAAPLYPLTRPGTLFQWGTEQQLAFEDIKKALLSSPALGLPDITKPFELFIDENSGFAKGVLVQKLGPWKRPVAYLSKKLDTVASGWPPCLRMVAAIAILVKDAGKLTLGQPLTILTSHPVEALVRQPPNKWLSNARMTHYQAMLLDAERVHFGPTVSLNPATLLPLPSGGNHHDCLQILAETHGTRPDLTDQPLPDADLTWYTDGSSFIRNGEREAGAAVTTESEVIWAAPLPPGTSAQRAELIALTQALKMAEGKKLTVYTDSRYAFATTHVHGEIYRRRGWLTSEGKEIKNKNEILALLEALFLPKRLSIIHCPGHQKGDSPQAKGNRLADDTAKKAATETHSSLTVLPAGKRTADGSEFEKRTADGSEFESPKKKAKVE

SEQ ID NO: 1229 - protein, 2090 aa, synthetic construct
MPAAKRVKLDGGDKKYSIGLDIGTNSVGWAVITDEYKVPSKKFKVLGNTDRHSIKKNLIGALLFDSGETAEATRLKRTARRRYTRRKNRICYLQEIFSNEMAKVDDSFFHRLEESFLVEEDKKHERHPIFGNIVDEVAYHEKYPTIYHLRKKLVDSTDKADLRLIYLALAHMIKFRGHFLIEGDLNPDNSDVDKLFIQLVQTYNQLFEENPINASGVDAKAILSARLSKSRRLENLIAQLPGEKKNGLFGNLIALSLGLTPNFKSNFDLAEDAKLQLSKDTYDDDLDNLLAQIGDQYADLFLAAKNLSDAILLSDILRVNTEITKAPLSASMIKRYDEHHQDLTLLKALVRQQLPEKYKEIFFDQSKNGYAGYIDGGASQEEFYKFIKPILEKMDGTEELLVKLNREDLLRKQRTFDNGSIPHQIHLGELHAILRRQEDFYPFLKDNREKIEKILTFRIPYYVGPLARGNSRFAWMTRKSEETITPWNFEEVVDKGASAQSFIERMTNFDKNLPNEKVLPKHSLLYEYFTVYNELTKVKYVTEGMRKPAFLSGEQKKAIVDLLFKTNRKVTVKQLKEDYFKKIECFDSVEISGVEDRFNASLGTYHDLLKIIKDKDFLDNEENEDILEDIVLTLTLFEDREMIEERLKTYAHLFDDKVMKQLKRRRYTGWGRLSRKLINGIRDKQSGKTILDFLKSDGFANRNFMQLIHDDSLTFKEDIQKAQVSGQGDSLHEHIANLAGSPAIKKGILQTVKVVDELVKVMGRHKPENIVIEMARENQTTQKGQKNSRERMKRIEEGIKELGSQILKEHPVENTQLQNEKLYLYYLQNGRDMYVDQELDINRLSDYDVDHIVPQSFLKDDSIDNKVLTRSDKARGKSDNVPSEEVVKKMKNYWRQLLNAKLITQRKFDNLTKAERGGLSELDKAGFIKRQLVETRQITKHVAQILDSRMNTKYDENDKLIREVKVITLKSKLVSDFRKDFQFYKVREINNYHHAHDAYLNAVVGTALIKKYPKLESEFVYGDYKVYDVRKMIAKSEQEIGKATAKYFFYSNIMNFFKTEITLANGEIRKRPLIETNGETGEIVWDKGRDFATVRKVLSMPQVNIVKKTEVQTGGFSKESILPKRNSDKLIARKKDWDPKKYGGFDSPTVAYSVLVVAKVEKGKSKKLKSVKELLGITIMERSSFEKNPIDFLEAKGYKEVKKDLIIKLPKYSLFELENGRKRMLASAGELQKGNELALPSKYVNFLYLASHYEKLKGSPEDNEQKQLFVEQHKHYLDEIIEQISEFSKRVILADANLDKVLSAYNKHRDKPIREQAENIIHLFTLTNLGAPAAFKYFDTTIDRKRYTSTKEVLDATLIHQSITGLYETRIDLSQLGGDGGGGGPAPGGTLQLEEEYRLFEPESTQKQEMDIWLKNFPQAWAETGGMGTAHCQAPVLIQLKATATPISIRQYPMPHEAYQGIKPHIRRMLDQGILKPCQSPWNTPLLPVKKPGTEDYRPVQDLREVNKRVEDIHPTVPNPYNLLSTLPPSHPWYTVLDLKDAFFCLRLHSESQLLFAFEWRDPEIGLSGQLTWTRLPQGFKNSPTLFNEALHSDLADFRVRYPALVLLQYVDDLLLAAATRTECLEGTKALLETLGNKGYRASAKKAQICLQEVTYLGYSLKDGQRWLTKARKEAILSIPVPKNSRQVREFLGKAGYCRLFIPGFAELAAPLYPLTRPGTLFQWGTEQQLAFEDIKKALLSSPALGLPDITKPFELFIDENSGFAKGVLVQKLGPWKRPVAYLSKKLDTVASGWPPCLRMVAAIAILVKDAGKLTLGQPLTILTSHPVEALVRQPPNKWLSNARMTHYQAMLLDAERVHFGPTVSLNPATLLPLPSGGNHHDCLQILAETHGTRPDLTDQPLPDADLTWYTDGSSFIRNGEREAGAAVTTESEVIWAAPLPPGTSAQRAELIALTQALKMAEGKKLTVYTDSRYAFATTHVHGEIYRRRGWLTSEGKEIKNKNEILALLEALFLPKRLSIIHCPGHQKGDSPQAKGNRLADDTAKKAATETHSSLTVLPAGKRTADGSEFEKRTADGSEFESPKKKAKVE

SEQ ID NO: 1230 - protein, 2092 aa, synthetic construct
MPAAKRVKLDGGDKKYSIGLDIGTNSVGWAVITDEYKVPSKKFKVLGNTDRHSIKKNLIGALLFDSGETAEATRLKRTARRRYTRRKNRICYLQEIFSNEMAKVDDSFFHRLEESFLVEEDKKHERHPIFGNIVDEVAYHEKYPTIYHLRKKLVDSTDKADLRLIYLALAHMIKFRGHFLIEGDLNPDNSDVDKLFIQLVQTYNQLFEENPINASGVDAKAILSARLSKSRRLENLIAQLPGEKKNGLFGNLIALSLGLTPNFKSNFDLAEDAKLQLSKDTYDDDLDNLLAQIGDQYADLFLAAKNLSDAILLSDILRVNTEITKAPLSASMIKRYDEHHQDLTLLKALVRQQLPEKYKEIFFDQSKNGYAGYIDGGASQEEFYKFIKPILEKMDGTEELLVKLNREDLLRKQRTFDNGSIPHQIHLGELHAILRRQEDFYPFLKDNREKIEKILTFRIPYYVGPLARGNSRFAWMTRKSEETITPWNFEEVVDKGASAQSFIERMTNFDKNLPNEKVLPKHSLLYEYFTVYNELTKVKYVTEGMRKPAFLSGEQKKAIVDLLFKTNRKVTVKQLKEDYFKKIECFDSVEISGVEDRFNASLGTYHDLLKIIKDKDFLDNEENEDILEDIVLTLTLFEDREMIEERLKTYAHLFDDKVMKQLKRRRYTGWGRLSRKLINGIRDKQSGKTILDFLKSDGFANRNFMQLIHDDSLTFKEDIQKAQVSGQGDSLHEHIANLAGSPAIKKGILQTVKVVDELVKVMGRHKPENIVIEMARENQTTQKGQKNSRERMKRIEEGIKELGSQILKEHPVENTQLQNEKLYLYYLQNGRDMYVDQELDINRLSDYDVDHIVPQSFLKDDSIDNKVLTRSDKARGKSDNVPSEEVVKKMKNYWRQLLNAKLITQRKFDNLTKAERGGLSELDKAGFIKRQLVETRQITKHVAQILDSRMNTKYDENDKLIREVKVITLKSKLVSDFRKDFQFYKVREINNYHHAHDAYLNAVVGTALIKKYPKLESEFVYGDYKVYDVRKMIAKSEQEIGKATAKYFFYSNIMNFFKTEITLANGEIRKRPLIETNGETGEIVWDKGRDFATVRKVLSMPQVNIVKKTEVQTGGFSKESILPKRNSDKLIARKKDWDPKKYGGFDSPTVAYSVLVVAKVEKGKSKKLKSVKELLGITIMERSSFEKNPIDFLEAKGYKEVKKDLIIKLPKYSLFELENGRKRMLASAGELQKGNELALPSKYVNFLYLASHYEKLKGSPEDNEQKQLFVEQHKHYLDEIIEQISEFSKRVILADANLDKVLSAYNKHRDKPIREQAENIIHLFTLTNLGAPAAFKYFDTTIDRKRYTSTKEVLDATLIHQSITGLYETRIDLSQLGGDGGPAPEAAAKGGTLQLEEEYRLFEPESTQKQEMDIWLKNFPQAWAETGGMGTAHCQAPVLIQLKATATPISIRQYPMPHEAYQGIKPHIRRMLDQGILKPCQSPWNTPLLPVKKPGTEDYRPVQDLREVNKRVEDIHPTVPNPYNLLSTLPPSHPWYTVLDLKDAFFCLRLHSESQLLFAFEWRDPEIGLSGQLTWTRLPQGFKNSPTLFNEALHSDLADFRVRYPALVLLQYVDDLLLAAATRTECLEGTKALLETLGNKGYRASAKKAQICLQEVTYLGYSLKDGQRWLTKARKEAILSIPVPKNSRQVREFLGKAGYCRLFIPGFAELAAPLYPLTRPGTLFQWGTEQQLAFEDIKKALLSSPALGLPDITKPFELFIDENSGFAKGVLVQKLGPWKRPVAYLSKKLDTVASGWPPCLRMVAAIAILVKDAGKLTLGQPLTILTSHPVEALVRQPPNKWLSNARMTHYQAMLLDAERVHFGPTVSLNPATLLPLPSGGNHHDCLQILAETHGTRPDLTDQPLPDADLTWYTDGSSFIRNGEREAGAAVTTESEVIWAAPLPPGTSAQRAELIALTQALKMAEGKKLTVYTDSRYAFATTHVHGEIYRRRGWLTSEGKEIKNKNEILALLEALFLPKRLSIIHCPGHQKGDSPQAKGNRLADDTAKKAATETHSSLTVLPAGKRTADGSEFEKRTADGSEFESPKKKAKVE

SEQ ID NO: 1231 - protein, 2099 aa, synthetic construct
MPAAKRVKLDGGDKKYSIGLDIGTNSVGWAVITDEYKVPSKKFKVLGNTDRHSIKKNLIGALLFDSGETAEATRLKRTARRRYTRRKNRICYLQEIFSNEMAKVDDSFFHRLEESFLVEEDKKHERHPIFGNIVDEVAYHEKYPTIYHLRKKLVDSTDKADLRLIYLALAHMIKFRGHFLIEGDLNPDNSDVDKLFIQLVQTYNQLFEENPINASGVDAKAILSARLSKSRRLENLIAQLPGEKKNGLFGNLIALSLGLTPNFKSNFDLAEDAKLQLSKDTYDDDLDNLLAQIGDQYADLFLAAKNLSDAILLSDILRVNTEITKAPLSASMIKRYDEHHQDLTLLKALVRQQLPEKYKEIFFDQSKNGYAGYIDGGASQEEFYKFIKPILEKMDGTEELLVKLNREDLLRKQRTFDNGSIPHQIHLGELHAILRRQEDFYPFLKDNREKIEKILTFRIPYYVGPLARGNSRFAWMTRKSEETITPWNFEEVVDKGASAQSFIERMTNFDKNLPNEKVLPKHSLLYEYFTVYNELTKVKYVTEGMRKPAFLSGEQKKAIVDLLFKTNRKVTVKQLKEDYFKKIECFDSVEISGVEDRFNASLGTYHDLLKIIKDKDFLDNEENEDILEDIVLTLTLFEDREMIEERLKTYAHLFDDKVMKQLKRRRYTGWGRLSRKLINGIRDKQSGKTILDFLKSDGFANRNFMQLIHDDSLTFKEDIQKAQVSGQGDSLHEHIANLAGSPAIKKGILQTVKVVDELVKVMGRHKPENIVIEMARENQTTQKGQKNSRERMKRIEEGIKELGSQILKEHPVENTQLQNEKLYLYYLQNGRDMYVDQELDINRLSDYDVDHIVPQSFLKDDSIDNKVLTRSDKARGKSDNVPSEEVVKKMKNYWRQLLNAKLITQRKFDNLTKAERGGLSELDKAGFIKRQLVETRQITKHVAQILDSRMNTKYDENDKLIREVKVITLKSKLVSDFRKDFQFYKVREINNYHHAHDAYLNAVVGTALIKKYPKLESEFVYGDYKVYDVRKMIAKSEQEIGKATAKYFFYSNIMNFFKTEITLANGEIRKRPLIETNGETGEIVWDKGRDFATVRKVLSMPQVNIVKKTEVQTGGFSKESILPKRNSDKLIARKKDWDPKKYGGFDSPTVAYSVLVVAKVEKGKSKKLKSVKELLGITIMERSSFEKNPIDFLEAKGYKEVKKDLIIKLPKYSLFELENGRKRMLASAGELQKGNELALPSKYVNFLYLASHYEKLKGSPEDNEQKQLFVEQHKHYLDEIIEQISEFSKRVILADANLDKVLSAYNKHRDKPIREQAENIIHLFTLTNLGAPAAFKYFDTTIDRKRYTSTKEVLDATLIHQSITGLYETRIDLSQLGGDGGGGGGSGGGGSGGGGSGGTLQLEEEYRLFEPESTQKQEMDIWLKNFPQAWAETGGMGTAHCQAPVLIQLKATATPISIRQYPMPHEAYQGIKPHIRRMLDQGILKPCQSPWNTPLLPVKKPGTEDYRPVQDLREVNKRVEDIHPTVPNPYNLLSTLPPSHPWYTVLDLKDAFFCLRLHSESQLLFAFEWRDPEIGLSGQLTWTRLPQGFKNSPTLFNEALHSDLADFRVRYPALVLLQYVDDLLLAAATRTECLEGTKALLETLGNKGYRASAKKAQICLQEVTYLGYSLKDGQRWLTKARKEAILSIPVPKNSRQVREFLGKAGYCRLFIPGFAELAAPLYPLTRPGTLFQWGTEQQLAFEDIKKALLSSPALGLPDITKPFELFIDENSGFAKGVLVQKLGPWKRPVAYLSKKLDTVASGWPPCLRMVAAIAILVKDAGKLTLGQPLTILTSHPVEALVRQPPNKWLSNARMTHYQAMLLDAERVHFGPTVSLNPATLLPLPSGGNHHDCLQILAETHGTRPDLTDQPLPDADLTWYTDGSSFIRNGEREAGAAVTTESEVIWAAPLPPGTSAQRAELIALTQALKMAEGKKLTVYTDSRYAFATTHVHGEIYRRRGWLTSEGKEIKNKNEILALLEALFLPKRLSIIHCPGHQKGDSPQAKGNRLADDTAKKAATETHSSLTVLPAGKRTADGSEFEKRTADGSEFESPKKKAKVE

SEQ ID NO: 1232 - protein, 2095 aa, synthetic construct
MPAAKRVKLDGGDKKYSIGLDIGTNSVGWAVITDEYKVPSKKFKVLGNTDRHSIKKNLIGALLFDSGETAEATRLKRTARRRYTRRKNRICYLQEIFSNEMAKVDDSFFHRLEESFLVEEDKKHERHPIFGNIVDEVAYHEKYPTIYHLRKKLVDSTDKADLRLIYLALAHMIKFRGHFLIEGDLNPDNSDVDKLFIQLVQTYNQLFEENPINASGVDAKAILSARLSKSRRLENLIAQLPGEKKNGLFGNLIALSLGLTPNFKSNFDLAEDAKLQLSKDTYDDDLDNLLAQIGDQYADLFLAAKNLSDAILLSDILRVNTEITKAPLSASMIKRYDEHHQDLTLLKALVRQQLPEKYKEIFFDQSKNGYAGYIDGGASQEEFYKFIKPILEKMDGTEELLVKLNREDLLRKQRTFDNGSIPHQIHLGELHAILRRQEDFYPFLKDNREKIEKILTFRIPYYVGPLARGNSRFAWMTRKSEETITPWNFEEVVDKGASAQSFIERMTNFDKNLPNEKVLPKHSLLYEYFTVYNELTKVKYVTEGMRKPAFLSGEQKKAIVDLLFKTNRKVTVKQLKEDYFKKIECFDSVEISGVEDRFNASLGTYHDLLKIIKDKDFLDNEENEDILEDIVLTLTLFEDREMIEERLKTYAHLFDDKVMKQLKRRRYTGWGRLSRKLINGIRDKQSGKTILDFLKSDGFANRNFMQLIHDDSLTFKEDIQKAQVSGQGDSLHEHIANLAGSPAIKKGILQTVKVVDELVKVMGRHKPENIVIEMARENQTTQKGQKNSRERMKRIEEGIKELGSQILKEHPVENTQLQNEKLYLYYLQNGRDMYVDQELDINRLSDYDVDHIVPQSFLKDDSIDNKVLTRSDKARGKSDNVPSEEVVKKMKNYWRQLLNAKLITQRKFDNLTKAERGGLSELDKAGFIKRQLVETRQITKHVAQILDSRMNTKYDENDKLIREVKVITLKSKLVSDFRKDFQFYKVREINNYHHAHDAYLNAVVGTALIKKYPKLESEFVYGDYKVYDVRKMIAKSEQEIGKATAKYFFYSNIMNFFKTEITLANGEIRKRPLIETNGETGEIVWDKGRDFATVRKVLSMPQVNIVKKTEVQTGGFSKESILPKRNSDKLIARKKDWDPKKYGGFDSPTVAYSVLVVAKVEKGKSKKLKSVKELLGITIMERSSFEKNPIDFLEAKGYKEVKKDLIIKLPKYSLFELENGRKRMLASAGELQKGNELALPSKYVNFLYLASHYEKLKGSPEDNEQKQLFVEQHKHYLDEIIEQISEFSKRVILADANLDKVLSAYNKHRDKPIREQAENIIHLFTLTNLGAPAAFKYFDTTIDRKRYTSTKEVLDATLIHQSITGLYETRIDLSQLGGDGGPAPAPAPAPAPGGTLQLEEEYRLFEPESTQKQEMDIWLKNFPQAWAETGGMGTAHCQAPVLIQLKATATPISIRQYPMPHEAYQGIKPHIRRMLDQGILKPCQSPWNTPLLPVKKPGTEDYRPVQDLREVNKRVEDIHPTVPNPYNLLSTLPPSHPWYTVLDLKDAFFCLRLHSESQLLFAFEWRDPEIGLSGQLTWTRLPQGFKNSPTLFNEALHSDLADFRVRYPALVLLQYVDDLLLAAATRTECLEGTKALLETLGNKGYRASAKKAQICLQEVTYLGYSLKDGQRWLTKARKEAILSIPVPKNSRQVREFLGKAGYCRLFIPGFAELAAPLYPLTRPGTLFQWGTEQQLAFEDIKKALLSSPALGLPDITKPFELFIDENSGFAKGVLVQKLGPWKRPVAYLSKKLDTVASGWPPCLRMVAAIAILVKDAGKLTLGQPLTILTSHPVEALVRQPPNKWLSNARMTHYQAMLLDAERVHFGPTVSLNPATLLPLPSGGNHHDCLQILAETHGTRPDLTDQPLPDADLTWYTDGSSFIRNGEREAGAAVTTESEVIWAAPLPPGTSAQRAELIALTQALKMAEGKKLTVYTDSRYAFATTHVHGEIYRRRGWLTSEGKEIKNKNEILALLEALFLPKRLSIIHCPGHQKGDSPQAKGNRLADDTAKKAATETHSSLTVLPAGKRTADGSEFEKRTADGSEFESPKKKAKVE

SEQ ID NO: 1233 - protein, 2094 aa, synthetic construct
MPAAKRVKLDGGDKKYSIGLDIGTNSVGWAVITDEYKVPSKKFKVLGNTDRHSIKKNLIGALLFDSGETAEATRLKRTARRRYTRRKNRICYLQEIFSNEMAKVDDSFFHRLEESFLVEEDKKHERHPIFGNIVDEVAYHEKYPTIYHLRKKLVDSTDKADLRLIYLALAHMIKFRGHFLIEGDLNPDNSDVDKLFIQLVQTYNQLFEENPINASGVDAKAILSARLSKSRRLENLIAQLPGEKKNGLFGNLIALSLGLTPNFKSNFDLAEDAKLQLSKDTYDDDLDNLLAQIGDQYADLFLAAKNLSDAILLSDILRVNTEITKAPLSASMIKRYDEHHQDLTLLKALVRQQLPEKYKEIFFDQSKNGYAGYIDGGASQEEFYKFIKPILEKMDGTEELLVKLNREDLLRKQRTFDNGSIPHQIHLGELHAILRRQEDFYPFLKDNREKIEKILTFRIPYYVGPLARGNSRFAWMTRKSEETITPWNFEEVVDKGASAQSFIERMTNFDKNLPNEKVLPKHSLLYEYFTVYNELTKVKYVTEGMRKPAFLSGEQKKAIVDLLFKTNRKVTVKQLKEDYFKKIECFDSVEISGVEDRFNASLGTYHDLLKIIKDKDFLDNEENEDILEDIVLTLTLFEDREMIEERLKTYAHLFDDKVMKQLKRRRYTGWGRLSRKLINGIRDKQSGKTILDFLKSDGFANRNFMQLIHDDSLTFKEDIQKAQVSGQGDSLHEHIANLAGSPAIKKGILQTVKVVDELVKVMGRHKPENIVIEMARENQTTQKGQKNSRERMKRIEEGIKELGSQILKEHPVENTQLQNEKLYLYYLQNGRDMYVDQELDINRLSDYDVDHIVPQSFLKDDSIDNKVLTRSDKARGKSDNVPSEEVVKKMKNYWRQLLNAKLITQRKFDNLTKAERGGLSELDKAGFIKRQLVETRQITKHVAQILDSRMNTKYDENDKLIREVKVITLKSKLVSDFRKDFQFYKVREINNYHHAHDAYLNAVVGTALIKKYPKLESEFVYGDYKVYDVRKMIAKSEQEIGKATAKYFFYSNIMNFFKTEITLANGEIRKRPLIETNGETGEIVWDKGRDFATVRKVLSMPQVNIVKKTEVQTGGFSKESILPKRNSDKLIARKKDWDPKKYGGFDSPTVAYSVLVVAKVEKGKSKKLKSVKELLGITIMERSSFEKNPIDFLEAKGYKEVKKDLIIKLPKYSLFELENGRKRMLASAGELQKGNELALPSKYVNFLYLASHYEKLKGSPEDNEQKQLFVEQHKHYLDEIIEQISEFSKRVILADANLDKVLSAYNKHRDKPIREQAENIIHLFTLTNLGAPAAFKYFDTTIDRKRYTSTKEVLDATLIHQSITGLYETRIDLSQLGGDGGGGGGSGGGGSGGTLQLEEEYRLFEPESTQKQEMDIWLKNFPQAWAETGGMGTAHCQAPVLIQLKATATPISIRQYPMPHEAYQGIKPHIRRMLDQGILKPCQSPWNTPLLPVKKPGTEDYRPVQDLREVNKRVEDIHPTVPNPYNLLSTLPPSHPWYTVLDLKDAFFCLRLHSESQLLFAFEWRDPEIGLSGQLTWTRLPQGFKNSPTLFNEALHSDLADFRVRYPALVLLQYVDDLLLAAATRTECLEGTKALLETLGNKGYRASAKKAQICLQEVTYLGYSLKDGQRWLTKARKEAILSIPVPKNSRQVREFLGKAGYCRLFIPGFAELAAPLYPLTRPGTLFQWGTEQQLAFEDIKKALLSSPALGLPDITKPFELFIDENSGFAKGVLVQKLGPWKRPVAYLSKKLDTVASGWPPCLRMVAAIAILVKDAGKLTLGQPLTILTSHPVEALVRQPPNKWLSNARMTHYQAMLLDAERVHFGPTVSLNPATLLPLPSGGNHHDCLQILAETHGTRPDLTDQPLPDADLTWYTDGSSFIRNGEREAGAAVTTESEVIWAAPLPPGTSAQRAELIALTQALKMAEGKKLTVYTDSRYAFATTHVHGEIYRRRGWLTSEGKEIKNKNEILALLEALFLPKRLSIIHCPGHQKGDSPQAKGNRLADDTAKKAATETHSSLTVLPAGKRTADGSEFEKRTADGSEFESPKKKAKVE

SEQ ID NO: 1234 - protein, 2095 aa, synthetic construct
MPAAKRVKLDGGDKKYSIGLDIGTNSVGWAVITDEYKVPSKKFKVLGNTDRHSIKKNLIGALLFDSGETAEATRLKRTARRRYTRRKNRICYLQEIFSNEMAKVDDSFFHRLEESFLVEEDKKHERHPIFGNIVDEVAYHEKYPTIYHLRKKLVDSTDKADLRLIYLALAHMIKFRGHFLIEGDLNPDNSDVDKLFIQLVQTYNQLFEENPINASGVDAKAILSARLSKSRRLENLIAQLPGEKKNGLFGNLIALSLGLTPNFKSNFDLAEDAKLQLSKDTYDDDLDNLLAQIGDQYADLFLAAKNLSDAILLSDILRVNTEITKAPLSASMIKRYDEHHQDLTLLKALVRQQLPEKYKEIFFDQSKNGYAGYIDGGASQEEFYKFIKPILEKMDGTEELLVKLNREDLLRKQRTFDNGSIPHQIHLGELHAILRRQEDFYPFLKDNREKIEKILTFRIPYYVGPLARGNSRFAWMTRKSEETITPWNFEEVVDKGASAQSFIERMTNFDKNLPNEKVLPKHSLLYEYFTVYNELTKVKYVTEGMRKPAFLSGEQKKAIVDLLFKTNRKVTVKQLKEDYFKKIECFDSVEISGVEDRFNASLGTYHDLLKIIKDKDFLDNEENEDILEDIVLTLTLFEDREMIEERLKTYAHLFDDKVMKQLKRRRYTGWGRLSRKLINGIRDKQSGKTILDFLKSDGFANRNFMQLIHDDSLTFKEDIQKAQVSGQGDSLHEHIANLAGSPAIKKGILQTVKVVDELVKVMGRHKPENIVIEMARENQTTQKGQKNSRERMKRIEEGIKELGSQILKEHPVENTQLQNEKLYLYYLQNGRDMYVDQELDINRLSDYDVDHIVPQSFLKDDSIDNKVLTRSDKARGKSDNVPSEEVVKKMKNYWRQLLNAKLITQRKFDNLTKAERGGLSELDKAGFIKRQLVETRQITKHVAQILDSRMNTKYDENDKLIREVKVITLKSKLVSDFRKDFQFYKVREINNYHHAHDAYLNAVVGTALIKKYPKLESEFVYGDYKVYDVRKMIAKSEQEIGKATAKYFFYSNIMNFFKTEITLANGEIRKRPLIETNGETGEIVWDKGRDFATVRKVLSMPQVNIVKKTEVQTGGFSKESILPKRNSDKLIARKKDWDPKKYGGFDSPTVAYSVLVVAKVEKGKSKKLKSVKELLGITIMERSSFEKNPIDFLEAKGYKEVKKDLIIKLPKYSLFELENGRKRMLASAGELQKGNELALPSKYVNFLYLASHYEKLKGSPEDNEQKQLFVEQHKHYLDEIIEQISEFSKRVILADANLDKVLSAYNKHRDKPIREQAENIIHLFTLTNLGAPAAFKYFDTTIDRKRYTSTKEVLDATLIHQSITGLYETRIDLSQLGGDGGEAAAKGSSGGSGGTLQLEEEYRLFEPESTQKQEMDIWLKNFPQAWAETGGMGTAHCQAPVLIQLKATATPISIRQYPMPHEAYQGIKPHIRRMLDQGILKPCQSPWNTPLLPVKKPGTEDYRPVQDLREVNKRVEDIHPTVPNPYNLLSTLPPSHPWYTVLDLKDAFFCLRLHSESQLLFAFEWRDPEIGLSGQLTWTRLPQGFKNSPTLFNEALHSDLADFRVRYPALVLLQYVDDLLLAAATRTECLEGTKALLETLGNKGYRASAKKAQICLQEVTYLGYSLKDGQRWLTKARKEAILSIPVPKNSRQVREFLGKAGYCRLFIPGFAELAAPLYPLTRPGTLFQWGTEQQLAFEDIKKALLSSPALGLPDITKPFELFIDENSGFAKGVLVQKLGPWKRPVAYLSKKLDTVASGWPPCLRMVAAIAILVKDAGKLTLGQPLTILTSHPVEALVRQPPNKWLSNARMTHYQAMLLDAERVHFGPTVSLNPATLLPLPSGGNHHDCLQILAETHGTRPDLTDQPLPDADLTWYTDGSSFIRNGEREAGAAVTTESEVIWAAPLPPGTSAQRAELIALTQALKMAEGKKLTVYTDSRYAFATTHVHGEIYRRRGWLTSEGKEIKNKNEILALLEALFLPKRLSIIHCPGHQKGDSPQAKGNRLADDTAKKAATETHSSLTVLPAGKRTADGSEFEKRTADGSEFESPKKKAKVE

SEQ ID NO: 1235 - protein, 2095 aa, synthetic construct
MPAAKRVKLDGGDKKYSIGLDIGTNSVGWAVITDEYKVPSKKFKVLGNTDRHSIKKNLIGALLFDSGETAEATRLKRTARRRYTRRKNRICYLQEIFSNEMAKVDDSFFHRLEESFLVEEDKKHERHPIFGNIVDEVAYHEKYPTIYHLRKKLVDSTDKADLRLIYLALAHMIKFRGHFLIEGDLNPDNSDVDKLFIQLVQTYNQLFEENPINASGVDAKAILSARLSKSRRLENLIAQLPGEKKNGLFGNLIALSLGLTPNFKSNFDLAEDAKLQLSKDTYDDDLDNLLAQIGDQYADLFLAAKNLSDAILLSDILRVNTEITKAPLSASMIKRYDEHHQDLTLLKALVRQQLPEKYKEIFFDQSKNGYAGYIDGGASQEEFYKFIKPILEKMDGTEELLVKLNREDLLRKQRTFDNGSIPHQIHLGELHAILRRQEDFYPFLKDNREKIEKILTFRIPYYVGPLARGNSRFAWMTRKSEETITPWNFEEVVDKGASAQSFIERMTNFDKNLPNEKVLPKHSLLYEYFTVYNELTKVKYVTEGMRKPAFLSGEQKKAIVDLLFKTNRKVTVKQLKEDYFKKIECFDSVEISGVEDRFNASLGTYHDLLKIIKDKDFLDNEENEDILEDIVLTLTLFEDREMIEERLKTYAHLFDDKVMKQLKRRRYTGWGRLSRKLINGIRDKQSGKTILDFLKSDGFANRNFMQLIHDDSLTFKEDIQKAQVSGQGDSLHEHIANLAGSPAIKKGILQTVKVVDELVKVMGRHKPENIVIEMARENQTTQKGQKNSRERMKRIEEGIKELGSQILKEHPVENTQLQNEKLYLYYLQNGRDMYVDQELDINRLSDYDVDHIVPQSFLKDDSIDNKVLTRSDKARGKSDNVPSEEVVKKMKNYWRQLLNAKLITQRKFDNLTKAERGGLSELDKAGFIKRQLVETRQITKHVAQILDSRMNTKYDENDKLIREVKVITLKSKLVSDFRKDFQFYKVREINNYHHAHDAYLNAVVGTALIKKYPKLESEFVYGDYKVYDVRKMIAKSEQEIGKATAKYFFYSNIMNFFKTEITLANGEIRKRPLIETNGETGEIVWDKGRDFATVRKVLSMPQVNIVKKTEVQTGGFSKESILPKRNSDKLIARKKDWDPKKYGGFDSPTVAYSVLVVAKVEKGKSKKLKSVKELLGITIMERSSFEKNPIDFLEAKGYKEVKKDLIIKLPKYSLFELENGRKRMLASAGELQKGNELALPSKYVNFLYLASHYEKLKGSPEDNEQKQLFVEQHKHYLDEIIEQISEFSKRVILADANLDKVLSAYNKHRDKPIREQAENIIHLFTLTNLGAPAAFKYFDTTIDRKRYTSTKEVLDATLIHQSITGLYETRIDLSQLGGDGGEAAAKGGGGGSGGTLQLEEEYRLFEPESTQKQEMDIWLKNFPQAWAETGGMGTAHCQAPVLIQLKATATPISIRQYPMPHEAYQGIKPHIRRMLDQGILKPCQSPWNTPLLPVKKPGTEDYRPVQDLREVNKRVEDIHPTVPNPYNLLSTLPPSHPWYTVLDLKDAFFCLRLHSESQLLFAFEWRDPEIGLSGQLTWTRLPQGFKNSPTLFNEALHSDLADFRVRYPALVLLQYVDDLLLAAATRTECLEGTKALLETLGNKGYRASAKKAQICLQEVTYLGYSLKDGQRWLTKARKEAILSIPVPKNSRQVREFLGKAGYCRLFIPGFAELAAPLYPLTRPGTLFQWGTEQQLAFEDIKKALLSSPALGLPDITKPFELFIDENSGFAKGVLVQKLGPWKRPVAYLSKKLDTVASGWPPCLRMVAAIAILVKDAGKLTLGQPLTILTSHPVEALVRQPPNKWLSNARMTHYQAMLLDAERVHFGPTVSLNPATLLPLPSGGNHHDCLQILAETHGTRPDLTDQPLPDADLTWYTDGSSFIRNGEREAGAAVTTESEVIWAAPLPPGTSAQRAELIALTQALKMAEGKKLTVYTDSRYAFATTHVHGEIYRRRGWLTSEGKEIKNKNEILALLEALFLPKRLSIIHCPGHQKGDSPQAKGNRLADDTAKKAATETHSSLTVLPAGKRTADGSEFEKRTADGSEFESPKKKAKVE

SEQ ID NO: 1236 - protein, 2092 aa, synthetic construct
MPAAKRVKLDGGDKKYSIGLDIGTNSVGWAVITDEYKVPSKKFKVLGNTDRHSIKKNLIGALLFDSGETAEATRLKRTARRRYTRRKNRICYLQEIFSNEMAKVDDSFFHRLEESFLVEEDKKHERHPIFGNIVDEVAYHEKYPTIYHLRKKLVDSTDKADLRLIYLALAHMIKFRGHFLIEGDLNPDNSDVDKLFIQLVQTYNQLFEENPINASGVDAKAILSARLSKSRRLENLIAQLPGEKKNGLFGNLIALSLGLTPNFKSNFDLAEDAKLQLSKDTYDDDLDNLLAQIGDQYADLFLAAKNLSDAILLSDILRVNTEITKAPLSASMIKRYDEHHQDLTLLKALVRQQLPEKYKEIFFDQSKNGYAGYIDGGASQEEFYKFIKPILEKMDGTEELLVKLNREDLLRKQRTFDNGSIPHQIHLGELHAILRRQEDFYPFLKDNREKIEKILTFRIPYYVGPLARGNSRFAWMTRKSEETITPWNFEEVVDKGASAQSFIERMTNFDKNLPNEKVLPKHSLLYEYFTVYNELTKVKYVTEGMRKPAFLSGEQKKAIVDLLFKTNRKVTVKQLKEDYFKKIECFDSVEISGVEDRFNASLGTYHDLLKIIKDKDFLDNEENEDILEDIVLTLTLFEDREMIEERLKTYAHLFDDKVMKQLKRRRYTGWGRLSRKLINGIRDKQSGKTILDFLKSDGFANRNFMQLIHDDSLTFKEDIQKAQVSGQGDSLHEHIANLAGSPAIKKGILQTVKVVDELVKVMGRHKPENIVIEMARENQTTQKGQKNSRERMKRIEEGIKELGSQILKEHPVENTQLQNEKLYLYYLQNGRDMYVDQELDINRLSDYDVDHIVPQSFLKDDSIDNKVLTRSDKARGKSDNVPSEEVVKKMKNYWRQLLNAKLITQRKFDNLTKAERGGLSELDKAGFIKRQLVETRQITKHVAQILDSRMNTKYDENDKLIREVKVITLKSKLVSDFRKDFQFYKVREINNYHHAHDAYLNAVVGTALIKKYPKLESEFVYGDYKVYDVRKMIAKSEQEIGKATAKYFFYSNIMNFFKTEITLANGEIRKRPLIETNGETGEIVWDKGRDFATVRKVLSMPQVNIVKKTEVQTGGFSKESILPKRNSDKLIARKKDWDPKKYGGFDSPTVAYSVLVVAKVEKGKSKKLKSVKELLGITIMERSSFEKNPIDFLEAKGYKEVKKDLIIKLPKYSLFELENGRKRMLASAGELQKGNELALPSKYVNFLYLASHYEKLKGSPEDNEQKQLFVEQHKHYLDEIIEQISEFSKRVILADANLDKVLSAYNKHRDKPIREQAENIIHLFTLTNLGAPAAFKYFDTTIDRKRYTSTKEVLDATLIHQSITGLYETRIDLSQLGGDGGGSSEAAAKGGTLQLEEEYRLFEPESTQKQEMDIWLKNFPQAWAETGGMGTAHCQAPVLIQLKATATPISIRQYPMPHEAYQGIKPHIRRMLDQGILKPCQSPWNTPLLPVKKPGTEDYRPVQDLREVNKRVEDIHPTVPNPYNLLSTLPPSHPWYTVLDLKDAFFCLRLHSESQLLFAFEWRDPEIGLSGQLTWTRLPQGFKNSPTLFNEALHSDLADFRVRYPALVLLQYVDDLLLAAATRTECLEGTKALLETLGNKGYRASAKKAQICLQEVTYLGYSLKDGQRWLTKARKEAILSIPVPKNSRQVREFLGKAGYCRLFIPGFAELAAPLYPLTRPGTLFQWGTEQQLAFEDIKKALLSSPALGLPDITKPFELFIDENSGFAKGVLVQKLGPWKRPVAYLSKKLDTVASGWPPCLRMVAAIAILVKDAGKLTLGQPLTILTSHPVEALVRQPPNKWLSNARMTHYQAMLLDAERVHFGPTVSLNPATLLPLPSGGNHHDCLQILAETHGTRPDLTDQPLPDADLTWYTDGSSFIRNGEREAGAAVTTESEVIWAAPLPPGTSAQRAELIALTQALKMAEGKKLTVYTDSRYAFATTHVHGEIYRRRGWLTSEGKEIKNKNEILALLEALFLPKRLSIIHCPGHQKGDSPQAKGNRLADDTAKKAATETHSSLTVLPAGKRTADGSEFEKRTADGSEFESPKKKAKVE

SEQ ID NO: 1237 - protein, 2095 aa, synthetic construct
MPAAKRVKLDGGDKKYSIGLDIGTNSVGWAVITDEYKVPSKKFKVLGNTDRHSIKKNLIGALLFDSGETAEATRLKRTARRRYTRRKNRICYLQEIFSNEMAKVDDSFFHRLEESFLVEEDKKHERHPIFGNIVDEVAYHEKYPTIYHLRKKLVDSTDKADLRLIYLALAHMIKFRGHFLIEGDLNPDNSDVDKLFIQLVQTYNQLFEENPINASGVDAKAILSARLSKSRRLENLIAQLPGEKKNGLFGNLIALSLGLTPNFKSNFDLAEDAKLQLSKDTYDDDLDNLLAQIGDQYADLFLAAKNLSDAILLSDILRVNTEITKAPLSASMIKRYDEHHQDLTLLKALVRQQLPEKYKEIFFDQSKNGYAGYIDGGASQEEFYKFIKPILEKMDGTEELLVKLNREDLLRKQRTFDNGSIPHQIHLGELHAILRRQEDFYPFLKDNREKIEKILTFRIPYYVGPLARGNSRFAWMTRKSEETITPWNFEEVVDKGASAQSFIERMTNFDKNLPNEKVLPKHSLLYEYFTVYNELTKVKYVTEGMRKPAFLSGEQKKAIVDLLFKTNRKVTVKQLKEDYFKKIECFDSVEISGVEDRFNASLGTYHDLLKIIKDKDFLDNEENEDILEDIVLTLTLFEDREMIEERLKTYAHLFDDKVMKQLKRRRYTGWGRLSRKLINGIRDKQSGKTILDFLKSDGFANRNFMQLIHDDSLTFKEDIQKAQVSGQGDSLHEHIANLAGSPAIKKGILQTVKVVDELVKVMGRHKPENIVIEMARENQTTQKGQKNSRERMKRIEEGIKELGSQILKEHPVENTQLQNEKLYLYYLQNGRDMYVDQELDINRLSDYDVDHIVPQSFLKDDSIDNKVLTRSDKARGKSDNVPSEEVVKKMKNYWRQLLNAKLITQRKFDNLTKAERGGLSELDKAGFIKRQLVETRQITKHVAQILDSRMNTKYDENDKLIREVKVITLKSKLVSDFRKDFQFYKVREINNYHHAHDAYLNAVVGTALIKKYPKLESEFVYGDYKVYDVRKMIAKSEQEIGKATAKYFFYSNIMNFFKTEITLANGEIRKRPLIETNGETGEIVWDKGRDFATVRKVLSMPQVNIVKKTEVQTGGFSKESILPKRNSDKLIARKKDWDPKKYGGFDSPTVAYSVLVVAKVEKGKSKKLKSVKELLGITIMERSSFEKNPIDFLEAKGYKEVKKDLIIKLPKYSLFELENGRKRMLASAGELQKGNELALPSKYVNFLYLASHYEKLKGSPEDNEQKQLFVEQHKHYLDEIIEQISEFSKRVILADANLDKVLSAYNKHRDKPIREQAENIIHLFTLTNLGAPAAFKYFDTTIDRKRYTSTKEVLDATLIHQSITGLYETRIDLSQLGGDGGGGSEAAAKGGGGGTLQLEEEYRLFEPESTQKQEMDIWLKNFPQAWAETGGMGTAHCQAPVLIQLKATATPISIRQYPMPHEAYQGIKPHIRRMLDQGILKPCQSPWNTPLLPVKKPGTEDYRPVQDLREVNKRVEDIHPTVPNPYNLLSTLPPSHPWYTVLDLKDAFFCLRLHSESQLLFAFEWRDPEIGLSGQLTWTRLPQGFKNSPTLFNEALHSDLADFRVRYPALVLLQYVDDLLLAAATRTECLEGTKALLETLGNKGYRASAKKAQICLQEVTYLGYSLKDGQRWLTKARKEAILSIPVPKNSRQVREFLGKAGYCRLFIPGFAELAAPLYPLTRPGTLFQWGTEQQLAFEDIKKALLSSPALGLPDITKPFELFIDENSGFAKGVLVQKLGPWKRPVAYLSKKLDTVASGWPPCLRMVAAIAILVKDAGKLTLGQPLTILTSHPVEALVRQPPNKWLSNARMTHYQAMLLDAERVHFGPTVSLNPATLLPLPSGGNHHDCLQILAETHGTRPDLTDQPLPDADLTWYTDGSSFIRNGEREAGAAVTTESEVIWAAPLPPGTSAQRAELIALTQALKMAEGKKLTVYTDSRYAFATTHVHGEIYRRRGWLTSEGKEIKNKNEILALLEALFLPKRLSIIHCPGHQKGDSPQAKGNRLADDTAKKAATETHSSLTVLPAGKRTADGSEFEKRTADGSEFESPKKKAKVE

SEQ ID NO: 1238 - protein, 2093 aa, synthetic construct
MPAAKRVKLDGGDKKYSIGLDIGTNSVGWAVITDEYKVPSKKFKVLGNTDRHSIKKNLIGALLFDSGETAEATRLKRTARRRYTRRKNRICYLQEIFSNEMAKVDDSFFHRLEESFLVEEDKKHERHPIFGNIVDEVAYHEKYPTIYHLRKKLVDSTDKADLRLIYLALAHMIKFRGHFLIEGDLNPDNSDVDKLFIQLVQTYNQLFEENPINASGVDAKAILSARLSKSRRLENLIAQLPGEKKNGLFGNLIALSLGLTPNFKSNFDLAEDAKLQLSKDTYDDDLDNLLAQIGDQYADLFLAAKNLSDAILLSDILRVNTEITKAPLSASMIKRYDEHHQDLTLLKALVRQQLPEKYKEIFFDQSKNGYAGYIDGGASQEEFYKFIKPILEKMDGTEELLVKLNREDLLRKQRTFDNGSIPHQIHLGELHAILRRQEDFYPFLKDNREKIEKILTFRIPYYVGPLARGNSRFAWMTRKSEETITPWNFEEVVDKGASAQSFIERMTNFDKNLPNEKVLPKHSLLYEYFTVYNELTKVKYVTEGMRKPAFLSGEQKKAIVDLLFKTNRKVTVKQLKEDYFKKIECFDSVEISGVEDRFNASLGTYHDLLKIIKDKDFLDNEENEDILEDIVLTLTLFEDREMIEERLKTYAHLFDDKVMKQLKRRRYTGWGRLSRKLINGIRDKQSGKTILDFLKSDGFANRNFMQLIHDDSLTFKEDIQKAQVSGQGDSLHEHIANLAGSPAIKKGILQTVKVVDELVKVMGRHKPENIVIEMARENQTTQKGQKNSRERMKRIEEGIKELGSQILKEHPVENTQLQNEKLYLYYLQNGRDMYVDQELDINRLSDYDVDHIVPQSFLKDDSIDNKVLTRSDKARGKSDNVPSEEVVKKMKNYWRQLLNAKLITQRKFDNLTKAERGGLSELDKAGFIKRQLVETRQITKHVAQILDSRMNTKYDENDKLIREVKVITLKSKLVSDFRKDFQFYKVREINNYHHAHDAYLNAVVGTALIKKYPKLESEFVYGDYKVYDVRKMIAKSEQEIGKATAKYFFYSNIMNFFKTEITLANGEIRKRPLIETNGETGEIVWDKGRDFATVRKVLSMPQVNIVKKTEVQTGGFSKESILPKRNSDKLIARKKDWDPKKYGGFDSPTVAYSVLVVAKVEKGKSKKLKSVKELLGITIMERSSFEKNPIDFLEAKGYKEVKKDLIIKLPKYSLFELENGRKRMLASAGELQKGNELALPSKYVNFLYLASHYEKLKGSPEDNEQKQLFVEQHKHYLDEIIEQISEFSKRVILADANLDKVLSAYNKHRDKPIREQAENIIHLFTLTNLGAPAAFKYFDTTIDRKRYTSTKEVLDATLIHQSITGLYETRIDLSQLGGDGGPAPGSSGGGGGTLQLEEEYRLFEPESTQKQEMDIWLKNFPQAWAETGGMGTAHCQAPVLIQLKATATPISIRQYPMPHEAYQGIKPHIRRMLDQGILKPCQSPWNTPLLPVKKPGTEDYRPVQDLREVNKRVEDIHPTVPNPYNLLSTLPPSHPWYTVLDLKDAFFCLRLHSESQLLFAFEWRDPEIGLSGQLTWTRLPQGFKNSPTLFNEALHSDLADFRVRYPALVLLQYVDDLLLAAATRTECLEGTKALLETLGNKGYRASAKKAQICLQEVTYLGYSLKDGQRWLTKARKEAILSIPVPKNSRQVREFLGKAGYCRLFIPGFAELAAPLYPLTRPGTLFQWGTEQQLAFEDIKKALLSSPALGLPDITKPFELFIDENSGFAKGVLVQKLGPWKRPVAYLSKKLDTVASGWPPCLRMVAAIAILVKDAGKLTLGQPLTILTSHPVEALVRQPPNKWLSNARMTHYQAMLLDAERVHFGPTVSLNPATLLPLPSGGNHHDCLQILAETHGTRPDLTDQPLPDADLTWYTDGSSFIRNGEREAGAAVTTESEVIWAAPLPPGTSAQRAELIALTQALKMAEGKKLTVYTDSRYAFATTHVHGEIYRRRGWLTSEGKEIKNKNEILALLEALFLPKRLSIIHCPGHQKGDSPQAKGNRLADDTAKKAATETHSSLTVLPAGKRTADGSEFEKRTADGSEFESPKKKAKVE

SEQ ID NO: 1239 - protein, 2095 aa, synthetic construct
MPAAKRVKLDGGDKKYSIGLDIGTNSVGWAVITDEYKVPSKKFKVLGNTDRHSIKKNLIGALLFDSGETAEATRLKRTARRRYTRRKNRICYLQEIFSNEMAKVDDSFFHRLEESFLVEEDKKHERHPIFGNIVDEVAYHEKYPTIYHLRKKLVDSTDKADLRLIYLALAHMIKFRGHFLIEGDLNPDNSDVDKLFIQLVQTYNQLFEENPINASGVDAKAILSARLSKSRRLENLIAQLPGEKKNGLFGNLIALSLGLTPNFKSNFDLAEDAKLQLSKDTYDDDLDNLLAQIGDQYADLFLAAKNLSDAILLSDILRVNTEITKAPLSASMIKRYDEHHQDLTLLKALVRQQLPEKYKEIFFDQSKNGYAGYIDGGASQEEFYKFIKPILEKMDGTEELLVKLNREDLLRKQRTFDNGSIPHQIHLGELHAILRRQEDFYPFLKDNREKIEKILTFRIPYYVGPLARGNSRFAWMTRKSEETITPWNFEEVVDKGASAQSFIERMTNFDKNLPNEKVLPKHSLLYEYFTVYNELTKVKYVTEGMRKPAFLSGEQKKAIVDLLFKTNRKVTVKQLKEDYFKKIECFDSVEISGVEDRFNASLGTYHDLLKIIKDKDFLDNEENEDILEDIVLTLTLFEDREMIEERLKTYAHLFDDKVMKQLKRRRYTGWGRLSRKLINGIRDKQSGKTILDFLKSDGFANRNFMQLIHDDSLTFKEDIQKAQVSGQGDSLHEHIANLAGSPAIKKGILQTVKVVDELVKVMGRHKPENIVIEMARENQTTQKGQKNSRERMKRIEEGIKELGSQILKEHPVENTQLQNEKLYLYYLQNGRDMYVDQELDINRLSDYDVDHIVPQSFLKDDSIDNKVLTRSDKARGKSDNVPSEEVVKKMKNYWRQLLNAKLITQRKFDNLTKAERGGLSELDKAGFIKRQLVETRQITKHVAQILDSRMNTKYDENDKLIREVKVITLKSKLVSDFRKDFQFYKVREINNYHHAHDAYLNAVVGTALIKKYPKLESEFVYGDYKVYDVRKMIAKSEQEIGKATAKYFFYSNIMNFFKTEITLANGEIRKRPLIETNGETGEIVWDKGRDFATVRKVLSMPQVNIVKKTEVQTGGFSKESILPKRNSDKLIARKKDWDPKKYGGFDSPTVAYSVLVVAKVEKGKSKKLKSVKELLGITIMERSSFEKNPIDFLEAKGYKEVKKDLIIKLPKYSLFELENGRKRMLASAGELQKGNELALPSKYVNFLYLASHYEKLKGSPEDNEQKQLFVEQHKHYLDEIIEQISEFSKRVILADANLDKVLSAYNKHRDKPIREQAENIIHLFTLTNLGAPAAFKYFDTTIDRKRYTSTKEVLDATLIHQSITGLYETRIDLSQLGGDGGPAPGGSEAAAKGGTLQLEEEYRLFEPESTQKQEMDIWLKNFPQAWAETGGMGTAHCQAPVLIQLKATATPISIRQYPMPHEAYQGIKPHIRRMLDQGILKPCQSPWNTPLLPVKKPGTEDYRPVQDLREVNKRVEDIHPTVPNPYNLLSTLPPSHPWYTVLDLKDAFFCLRLHSESQLLFAFEWRDPEIGLSGQLTWTRLPQGFKNSPTLFNEALHSDLADFRVRYPALVLLQYVDDLLLAAATRTECLEGTKALLETLGNKGYRASAKKAQICLQEVTYLGYSLKDGQRWLTKARKEAILSIPVPKNSRQVREFLGKAGYCRLFIPGFAELAAPLYPLTRPGTLFQWGTEQQLAFEDIKKALLSSPALGLPDITKPFELFIDENSGFAKGVLVQKLGPWKRPVAYLSKKLDTVASGWPPCLRMVAAIAILVKDAGKLTLGQPLTILTSHPVEALVRQPPNKWLSNARMTHYQAMLLDAERVHFGPTVSLNPATLLPLPSGGNHHDCLQILAETHGTRPDLTDQPLPDADLTWYTDGSSFIRNGEREAGAAVTTESEVIWAAPLPPGTSAQRAELIALTQALKMAEGKKLTVYTDSRYAFATTHVHGEIYRRRGWLTSEGKEIKNKNEILALLEALFLPKRLSIIHCPGHQKGDSPQAKGNRLADDTAKKAATETHSSLTVLPAGKRTADGSEFEKRTADGSEFESPKKKAKVE

SEQ ID NO: 1240 - protein, 2093 aa, synthetic construct
MPAAKRVKLDGGDKKYSIGLDIGTNSVGWAVITDEYKVPSKKFKVLGNTDRHSIKKNLIGALLFDSGETAEATRLKRTARRRYTRRKNRICYLQEIFSNEMAKVDDSFFHRLEESFLVEEDKKHERHPIFGNIVDEVAYHEKYPTIYHLRKKLVDSTDKADLRLIYLALAHMIKFRGHFLIEGDLNPDNSDVDKLFIQLVQTYNQLFEENPINASGVDAKAILSARLSKSRRLENLIAQLPGEKKNGLFGNLIALSLGLTPNFKSNFDLAEDAKLQLSKDTYDDDLDNLLAQIGDQYADLFLAAKNLSDAILLSDILRVNTEITKAPLSASMIKRYDEHHQDLTLLKALVRQQLPEKYKEIFFDQSKNGYAGYIDGGASQEEFYKFIKPILEKMDGTEELLVKLNREDLLRKQRTFDNGSIPHQIHLGELHAILRRQEDFYPFLKDNREKIEKILTFRIPYYVGPLARGNSRFAWMTRKSEETITPWNFEEVVDKGASAQSFIERMTNFDKNLPNEKVLPKHSLLYEYFTVYNELTKVKYVTEGMRKPAFLSGEQKKAIVDLLFKTNRKVTVKQLKEDYFKKIECFDSVEISGVEDRFNASLGTYHDLLKIIKDKDFLDNEENEDILEDIVLTLTLFEDREMIEERLKTYAHLFDDKVMKQLKRRRYTGWGRLSRKLINGIRDKQSGKTILDFLKSDGFANRNFMQLIHDDSLTFKEDIQKAQVSGQGDSLHEHIANLAGSPAIKKGILQTVKVVDELVKVMGRHKPENIVIEMARENQTTQKGQKNSRERMKRIEEGIKELGSQILKEHPVENTQLQNEKLYLYYLQNGRDMYVDQELDINRLSDYDVDHIVPQSFLKDDSIDNKVLTRSDKARGKSDNVPSEEVVKKMKNYWRQLLNAKLITQRKFDNLTKAERGGLSELDKAGFIKRQLVETRQITKHVAQILDSRMNTKYDENDKLIREVKVITLKSKLVSDFRKDFQFYKVREINNYHHAHDAYLNAVVGTALIKKYPKLESEFVYGDYKVYDVRKMIAKSEQEIGKATAKYFFYSNIMNFFKTEITLANGEIRKRPLIETNGETGEIVWDKGRDFATVRKVLSMPQVNIVKKTEVQTGGFSKESILPKRNSDKLIARKKDWDPKKYGGFDSPTVAYSVLVVAKVEKGKSKKLKSVKELLGITIMERSSFEKNPIDFLEAKGYKEVKKDLIIKLPKYSLFELENGRKRMLASAGELQKGNELALPSKYVNFLYLASHYEKLKGSPEDNEQKQLFVEQHKHYLDEIIEQISEFSKRVILADANLDKVLSAYNKHRDKPIREQAENIIHLFTLTNLGAPAAFKYFDTTIDRKRYTSTKEVLDATLIHQSITGLYETRIDLSQLGGDGGGSSGGGPAPGGTLQLEEEYRLFEPESTQKQEMDIWLKNFPQAWAETGGMGTAHCQAPVLIQLKATATPISIRQYPMPHEAYQGIKPHIRRMLDQGILKPCQSPWNTPLLPVKKPGTEDYRPVQDLREVNKRVEDIHPTVPNPYNLLSTLPPSHPWYTVLDLKDAFFCLRLHSESQLLFAFEWRDPEIGLSGQLTWTRLPQGFKNSPTLFNEALHSDLADFRVRYPALVLLQYVDDLLLAAATRTECLEGTKALLETLGNKGYRASAKKAQICLQEVTYLGYSLKDGQRWLTKARKEAILSIPVPKNSRQVREFLGKAGYCRLFIPGFAELAAPLYPLTRPGTLFQWGTEQQLAFEDIKKALLSSPALGLPDITKPFELFIDENSGFAKGVLVQKLGPWKRPVAYLSKKLDTVASGWPPCLRMVAAIAILVKDAGKLTLGQPLTILTSHPVEALVRQPPNKWLSNARMTHYQAMLLDAERVHFGPTVSLNPATLLPLPSGGNHHDCLQILAETHGTRPDLTDQPLPDADLTWYTDGSSFIRNGEREAGAAVTTESEVIWAAPLPPGTSAQRAELIALTQALKMAEGKKLTVYTDSRYAFATTHVHGEIYRRRGWLTSEGKEIKNKNEILALLEALFLPKRLSIIHCPGHQKGDSPQAKGNRLADDTAKKAATETHSSLTVLPAGKRTADGSEFEKRTADGSEFESPKKKAKVE

SEQ ID NO: 1241 - protein, 2095 aa, synthetic construct
MPAAKRVKLDGGDKKYSIGLDIGTNSVGWAVITDEYKVPSKKFKVLGNTDRHSIKKNLIGALLFDSGETAEATRLKRTARRRYTRRKNRICYLQEIFSNEMAKVDDSFFHRLEESFLVEEDKKHERHPIFGNIVDEVAYHEKYPTIYHLRKKLVDSTDKADLRLIYLALAHMIKFRGHFLIEGDLNPDNSDVDKLFIQLVQTYNQLFEENPINASGVDAKAILSARLSKSRRLENLIAQLPGEKKNGLFGNLIALSLGLTPNFKSNFDLAEDAKLQLSKDTYDDDLDNLLAQIGDQYADLFLAAKNLSDAILLSDILRVNTEITKAPLSASMIKRYDEHHQDLTLLKALVRQQLPEKYKEIFFDQSKNGYAGYIDGGASQEEFYKFIKPILEKMDGTEELLVKLNREDLLRKQRTFDNGSIPHQIHLGELHAILRRQEDFYPFLKDNREKIEKILTFRIPYYVGPLARGNSRFAWMTRKSEETITPWNFEEVVDKGASAQSFIERMTNFDKNLPNEKVLPKHSLLYEYFTVYNELTKVKYVTEGMRKPAFLSGEQKKAIVDLLFKTNRKVTVKQLKEDYFKKIECFDSVEISGVEDRFNASLGTYHDLLKIIKDKDFLDNEENEDILEDIVLTLTLFEDREMIEERLKTYAHLFDDKVMKQLKRRRYTGWGRLSRKLINGIRDKQSGKTILDFLKSDGFANRNFMQLIHDDSLTFKEDIQKAQVSGQGDSLHEHIANLAGSPAIKKGILQTVKVVDELVKVMGRHKPENIVIEMARENQTTQKGQKNSRERMKRIEEGIKELGSQILKEHPVENTQLQNEKLYLYYLQNGRDMYVDQELDINRLSDYDVDHIVPQSFLKDDSIDNKVLTRSDKARGKSDNVPSEEVVKKMKNYWRQLLNAKLITQRKFDNLTKAERGGLSELDKAGFIKRQLVETRQITKHVAQILDSRMNTKYDENDKLIREVKVITLKSKLVSDFRKDFQFYKVREINNYHHAHDAYLNAVVGTALIKKYPKLESEFVYGDYKVYDVRKMIAKSEQEIGKATAKYFFYSNIMNFFKTEITLANGEIRKRPLIETNGETGEIVWDKGRDFATVRKVLSMPQVNIVKKTEVQTGGFSKESILPKRNSDKLIARKKDWDPKKYGGFDSPTVAYSVLVVAKVEKGKSKKLKSVKELLGITIMERSSFEKNPIDFLEAKGYKEVKKDLIIKLPKYSLFELENGRKRMLASAGELQKGNELALPSKYVNFLYLASHYEKLKGSPEDNEQKQLFVEQHKHYLDEIIEQISEFSKRVILADANLDKVLSAYNKHRDKPIREQAENIIHLFTLTNLGAPAAFKYFDTTIDRKRYTSTKEVLDATLIHQSITGLYETRIDLSQLGGDGGEAAAKGGSGSSGGTLQLEEEYRLFEPESTQKQEMDIWLKNFPQAWAETGGMGTAHCQAPVLIQLKATATPISIRQYPMPHEAYQGIKPHIRRMLDQGILKPCQSPWNTPLLPVKKPGTEDYRPVQDLREVNKRVEDIHPTVPNPYNLLSTLPPSHPWYTVLDLKDAFFCLRLHSESQLLFAFEWRDPEIGLSGQLTWTRLPQGFKNSPTLFNEALHSDLADFRVRYPALVLLQYVDDLLLAAATRTECLEGTKALLETLGNKGYRASAKKAQICLQEVTYLGYSLKDGQRWLTKARKEAILSIPVPKNSRQVREFLGKAGYCRLFIPGFAELAAPLYPLTRPGTLFQWGTEQQLAFEDIKKALLSSPALGLPDITKPFELFIDENSGFAKGVLVQKLGPWKRPVAYLSKKLDTVASGWPPCLRMVAAIAILVKDAGKLTLGQPLTILTSHPVEALVRQPPNKWLSNARMTHYQAMLLDAERVHFGPTVSLNPATLLPLPSGGNHHDCLQILAETHGTRPDLTDQPLPDADLTWYTDGSSFIRNGEREAGAAVTTESEVIWAAPLPPGTSAQRAELIALTQALKMAEGKKLTVYTDSRYAFATTHVHGEIYRRRGWLTSEGKEIKNKNEILALLEALFLPKRLSIIHCPGHQKGDSPQAKGNRLADDTAKKAATETHSSLTVLPAGKRTADGSEFEKRTADGSEFESPKKKAKVE

SEQ ID NO: 1242 - protein, 2095 aa, synthetic construct
MPAAKRVKLDGGDKKYSIGLDIGTNSVGWAVITDEYKVPSKKFKVLGNTDRHSIKKNLIGALLFDSGETAEATRLKRTARRRYTRRKNRICYLQEIFSNEMAKVDDSFFHRLEESFLVEEDKKHERHPIFGNIVDEVAYHEKYPTIYHLRKKLVDSTDKADLRLIYLALAHMIKFRGHFLIEGDLNPDNSDVDKLFIQLVQTYNQLFEENPINASGVDAKAILSARLSKSRRLENLIAQLPGEKKNGLFGNLIALSLGLTPNFKSNFDLAEDAKLQLSKDTYDDDLDNLLAQIGDQYADLFLAAKNLSDAILLSDILRVNTEITKAPLSASMIKRYDEHHQDLTLLKALVRQQLPEKYKEIFFDQSKNGYAGYIDGGASQEEFYKFIKPILEKMDGTEELLVKLNREDLLRKQRTFDNGSIPHQIHLGELHAILRRQEDFYPFLKDNREKIEKILTFRIPYYVGPLARGNSRFAWMTRKSEETITPWNFEEVVDKGASAQSFIERMTNFDKNLPNEKVLPKHSLLYEYFTVYNELTKVKYVTEGMRKPAFLSGEQKKAIVDLLFKTNRKVTVKQLKEDYFKKIECFDSVEISGVEDRFNASLGTYHDLLKIIKDKDFLDNEENEDILEDIVLTLTLFEDREMIEERLKTYAHLFDDKVMKQLKRRRYTGWGRLSRKLINGIRDKQSGKTILDFLKSDGFANRNFMQLIHDDSLTFKEDIQKAQVSGQGDSLHEHIANLAGSPAIKKGILQTVKVVDELVKVMGRHKPENIVIEMARENQTTQKGQKNSRERMKRIEEGIKELGSQILKEHPVENTQLQNEKLYLYYLQNGRDMYVDQELDINRLSDYDVDHIVPQSFLKDDSIDNKVLTRSDKARGKSDNVPSEEVVKKMKNYWRQLLNAKLITQRKFDNLTKAERGGLSELDKAGFIKRQLVETRQITKHVAQILDSRMNTKYDENDKLIREVKVITLKSKLVSDFRKDFQFYKVREINNYHHAHDAYLNAVVGTALIKKYPKLESEFVYGDYKVYDVRKMIAKSEQEIGKATAKYFFYSNIMNFFKTEITLANGEIRKRPLIETNGETGEIVWDKGRDFATVRKVLSMPQVNIVKKTEVQTGGFSKESILPKRNSDKLIARKKDWDPKKYGGFDSPTVAYSVLVVAKVEKGKSKKLKSVKELLGITIMERSSFEKNPIDFLEAKGYKEVKKDLIIKLPKYSLFELENGRKRMLASAGELQKGNELALPSKYVNFLYLASHYEKLKGSPEDNEQKQLFVEQHKHYLDEIIEQISEFSKRVILADANLDKVLSAYNKHRDKPIREQAENIIHLFTLTNLGAPAAFKYFDTTIDRKRYTSTKEVLDATLIHQSITGLYETRIDLSQLGGDGGGSSGGSEAAAKGGTLQLEEEYRLFEPESTQKQEMDIWLKNFPQAWAETGGMGTAHCQAPVLIQLKATATPISIRQYPMPHEAYQGIKPHIRRMLDQGILKPCQSPWNTPLLPVKKPGTEDYRPVQDLREVNKRVEDIHPTVPNPYNLLSTLPPSHPWYTVLDLKDAFFCLRLHSESQLLFAFEWRDPEIGLSGQLTWTRLPQGFKNSPTLFNEALHSDLADFRVRYPALVLLQYVDDLLLAAATRTECLEGTKALLETLGNKGYRASAKKAQICLQEVTYLGYSLKDGQRWLTKARKEAILSIPVPKNSRQVREFLGKAGYCRLFIPGFAELAAPLYPLTRPGTLFQWGTEQQLAFEDIKKALLSSPALGLPDITKPFELFIDENSGFAKGVLVQKLGPWKRPVAYLSKKLDTVASGWPPCLRMVAAIAILVKDAGKLTLGQPLTILTSHPVEALVRQPPNKWLSNARMTHYQAMLLDAERVHFGPTVSLNPATLLPLPSGGNHHDCLQILAETHGTRPDLTDQPLPDADLTWYTDGSSFIRNGEREAGAAVTTESEVIWAAPLPPGTSAQRAELIALTQALKMAEGKKLTVYTDSRYAFATTHVHGEIYRRRGWLTSEGKEIKNKNEILALLEALFLPKRLSIIHCPGHQKGDSPQAKGNRLADDTAKKAATETHSSLTVLPAGKRTADGSEFEKRTADGSEFESPKKKAKVE

SEQ ID NO: 1243 - protein, 2099 aa, synthetic construct
MPAAKRVKLDGGDKKYSIGLDIGTNSVGWAVITDEYKVPSKKFKVLGNTDRHSIKKNLIGALLFDSGETAEATRLKRTARRRYTRRKNRICYLQEIFSNEMAKVDDSFFHRLEESFLVEEDKKHERHPIFGNIVDEVAYHEKYPTIYHLRKKLVDSTDKADLRLIYLALAHMIKFRGHFLIEGDLNPDNSDVDKLFIQLVQTYNQLFEENPINASGVDAKAILSARLSKSRRLENLIAQLPGEKKNGLFGNLIALSLGLTPNFKSNFDLAEDAKLQLSKDTYDDDLDNLLAQIGDQYADLFLAAKNLSDAILLSDILRVNTEITKAPLSASMIKRYDEHHQDLTLLKALVRQQLPEKYKEIFFDQSKNGYAGYIDGGASQEEFYKFIKPILEKMDGTEELLVKLNREDLLRKQRTFDNGSIPHQIHLGELHAILRRQEDFYPFLKDNREKIEKILTFRIPYYVGPLARGNSRFAWMTRKSEETITPWNFEEVVDKGASAQSFIERMTNFDKNLPNEKVLPKHSLLYEYFTVYNELTKVKYVTEGMRKPAFLSGEQKKAIVDLLFKTNRKVTVKQLKEDYFKKIECFDSVEISGVEDRFNASLGTYHDLLKIIKDKDFLDNEENEDILEDIVLTLTLFEDREMIEERLKTYAHLFDDKVMKQLKRRRYTGWGRLSRKLINGIRDKQSGKTILDFLKSDGFANRNFMQLIHDDSLTFKEDIQKAQVSGQGDSLHEHIANLAGSPAIKKGILQTVKVVDELVKVMGRHKPENIVIEMARENQTTQKGQKNSRERMKRIEEGIKELGSQILKEHPVENTQLQNEKLYLYYLQNGRDMYVDQELDINRLSDYDVDHIVPQSFLKDDSIDNKVLTRSDKARGKSDNVPSEEVVKKMKNYWRQLLNAKLITQRKFDNLTKAERGGLSELDKAGFIKRQLVETRQITKHVAQILDSRMNTKYDENDKLIREVKVITLKSKLVSDFRKDFQFYKVREINNYHHAHDAYLNAVVGTALIKKYPKLESEFVYGDYKVYDVRKMIAKSEQEIGKATAKYFFYSNIMNFFKTEITLANGEIRKRPLIETNGETGEIVWDKGRDFATVRKVLSMPQVNIVKKTEVQTGGFSKESILPKRNSDKLIARKKDWDPKKYGGFDSPTVAYSVLVVAKVEKGKSKKLKSVKELLGITIMERSSFEKNPIDFLEAKGYKEVKKDLIIKLPKYSLFELENGRKRMLASAGELQKGNELALPSKYVNFLYLASHYEKLKGSPEDNEQKQLFVEQHKHYLDEIIEQISEFSKRVILADANLDKVLSAYNKHRDKPIREQAENIIHLFTLTNLGAPAAFKYFDTTIDRKRYTSTKEVLDATLIHQSITGLYETRIDLSQLGGDGGEAAAKGGGGSEAAAKGGTLQLEEEYRLFEPESTQKQEMDIWLKNFPQAWAETGGMGTAHCQAPVLIQLKATATPISIRQYPMPHEAYQGIKPHIRRMLDQGILKPCQSPWNTPLLPVKKPGTEDYRPVQDLREVNKRVEDIHPTVPNPYNLLSTLPPSHPWYTVLDLKDAFFCLRLHSESQLLFAFEWRDPEIGLSGQLTWTRLPQGFKNSPTLFNEALHSDLADFRVRYPALVLLQYVDDLLLAAATRTECLEGTKALLETLGNKGYRASAKKAQICLQEVTYLGYSLKDGQRWLTKARKEAILSIPVPKNSRQVREFLGKAGYCRLFIPGFAELAAPLYPLTRPGTLFQWGTEQQLAFEDIKKALLSSPALGLPDITKPFELFIDENSGFAKGVLVQKLGPWKRPVAYLSKKLDTVASGWPPCLRMVAAIAILVKDAGKLTLGQPLTILTSHPVEALVRQPPNKWLSNARMTHYQAMLLDAERVHFGPTVSLNPATLLPLPSGGNHHDCLQILAETHGTRPDLTDQPLPDADLTWYTDGSSFIRNGEREAGAAVTTESEVIWAAPLPPGTSAQRAELIALTQALKMAEGKKLTVYTDSRYAFATTHVHGEIYRRRGWLTSEGKEIKNKNEILALLEALFLPKRLSIIHCPGHQKGDSPQAKGNRLADDTAKKAATETHSSLTVLPAGKRTADGSEFEKRTADGSEFESPKKKAKVE

SEQ ID NO: 1244 - protein, 2093 aa, synthetic construct
MPAAKRVKLDGGDKKYSIGLDIGTNSVGWAVITDEYKVPSKKFKVLGNTDRHSIKKNLIGALLFDSGETAEATRLKRTARRRYTRRKNRICYLQEIFSNEMAKVDDSFFHRLEESFLVEEDKKHERHPIFGNIVDEVAYHEKYPTIYHLRKKLVDSTDKADLRLIYLALAHMIKFRGHFLIEGDLNPDNSDVDKLFIQLVQTYNQLFEENPINASGVDAKAILSARLSKSRRLENLIAQLPGEKKNGLFGNLIALSLGLTPNFKSNFDLAEDAKLQLSKDTYDDDLDNLLAQIGDQYADLFLAAKNLSDAILLSDILRVNTEITKAPLSASMIKRYDEHHQDLTLLKALVRQQLPEKYKEIFFDQSKNGYAGYIDGGASQEEFYKFIKPILEKMDGTEELLVKLNREDLLRKQRTFDNGSIPHQIHLGELHAILRRQEDFYPFLKDNREKIEKILTFRIPYYVGPLARGNSRFAWMTRKSEETITPWNFEEVVDKGASAQSFIERMTNFDKNLPNEKVLPKHSLLYEYFTVYNELTKVKYVTEGMRKPAFLSGEQKKAIVDLLFKTNRKVTVKQLKEDYFKKIECFDSVEISGVEDRFNASLGTYHDLLKIIKDKDFLDNEENEDILEDIVLTLTLFEDREMIEERLKTYAHLFDDKVMKQLKRRRYTGWGRLSRKLINGIRDKQSGKTILDFLKSDGFANRNFMQLIHDDSLTFKEDIQKAQVSGQGDSLHEHIANLAGSPAIKKGILQTVKVVDELVKVMGRHKPENIVIEMARENQTTQKGQKNSRERMKRIEEGIKELGSQILKEHPVENTQLQNEKLYLYYLQNGRDMYVDQELDINRLSDYDVDHIVPQSFLKDDSIDNKVLTRSDKARGKSDNVPSEEVVKKMKNYWRQLLNAKLITQRKFDNLTKAERGGLSELDKAGFIKRQLVETRQITKHVAQILDSRMNTKYDENDKLIREVKVITLKSKLVSDFRKDFQFYKVREINNYHHAHDAYLNAVVGTALIKKYPKLESEFVYGDYKVYDVRKMIAKSEQEIGKATAKYFFYSNIMNFFKTEITLANGEIRKRPLIETNGETGEIVWDKGRDFATVRKVLSMPQVNIVKKTEVQTGGFSKESILPKRNSDKLIARKKDWDPKKYGGFDSPTVAYSVLVVAKVEKGKSKKLKSVKELLGITIMERSSFEKNPIDFLEAKGYKEVKKDLIIKLPKYSLFELENGRKRMLASAGELQKGNELALPSKYVNFLYLASHYEKLKGSPEDNEQKQLFVEQHKHYLDEIIEQISEFSKRVILADANLDKVLSAYNKHRDKPIREQAENIIHLFTLTNLGAPAAFKYFDTTIDRKRYTSTKEVLDATLIHQSITGLYETRIDLSQLGGDGGGGSGSSPAPGGTLQLEEEYRLFEPESTQKQEMDIWLKNFPQAWAETGGMGTAHCQAPVLIQLKATATPISIRQYPMPHEAYQGIKPHIRRMLDQGILKPCQSPWNTPLLPVKKPGTEDYRPVQDLREVNKRVEDIHPTVPNPYNLLSTLPPSHPWYTVLDLKDAFFCLRLHSESQLLFAFEWRDPEIGLSGQLTWTRLPQGFKNSPTLFNEALHSDLADFRVRYPALVLLQYVDDLLLAAATRTECLEGTKALLETLGNKGYRASAKKAQICLQEVTYLGYSLKDGQRWLTKARKEAILSIPVPKNSRQVREFLGKAGYCRLFIPGFAELAAPLYPLTRPGTLFQWGTEQQLAFEDIKKALLSSPALGLPDITKPFELFIDENSGFAKGVLVQKLGPWKRPVAYLSKKLDTVASGWPPCLRMVAAIAILVKDAGKLTLGQPLTILTSHPVEALVRQPPNKWLSNARMTHYQAMLLDAERVHFGPTVSLNPATLLPLPSGGNHHDCLQILAETHGTRPDLTDQPLPDADLTWYTDGSSFIRNGEREAGAAVTTESEVIWAAPLPPGTSAQRAELIALTQALKMAEGKKLTVYTDSRYAFATTHVHGEIYRRRGWLTSEGKEIKNKNEILALLEALFLPKRLSIIHCPGHQKGDSPQAKGNRLADDTAKKAATETHSSLTVLPAGKRTADGSEFEKRTADGSEFESPKKKAKVE

SEQ ID NO: 1245 - protein, 2090 aa, synthetic construct
MPAAKRVKLDGGDKKYSIGLDIGTNSVGWAVITDEYKVPSKKFKVLGNTDRHSIKKNLIGALLFDSGETAEATRLKRTARRRYTRRKNRICYLQEIFSNEMAKVDDSFFHRLEESFLVEEDKKHERHPIFGNIVDEVAYHEKYPTIYHLRKKLVDSTDKADLRLIYLALAHMIKFRGHFLIEGDLNPDNSDVDKLFIQLVQTYNQLFEENPINASGVDAKAILSARLSKSRRLENLIAQLPGEKKNGLFGNLIALSLGLTPNFKSNFDLAEDAKLQLSKDTYDDDLDNLLAQIGDQYADLFLAAKNLSDAILLSDILRVNTEITKAPLSASMIKRYDEHHQDLTLLKALVRQQLPEKYKEIFFDQSKNGYAGYIDGGASQEEFYKFIKPILEKMDGTEELLVKLNREDLLRKQRTFDNGSIPHQIHLGELHAILRRQEDFYPFLKDNREKIEKILTFRIPYYVGPLARGNSRFAWMTRKSEETITPWNFEEVVDKGASAQSFIERMTNFDKNLPNEKVLPKHSLLYEYFTVYNELTKVKYVTEGMRKPAFLSGEQKKAIVDLLFKTNRKVTVKQLKEDYFKKIECFDSVEISGVEDRFNASLGTYHDLLKIIKDKDFLDNEENEDILEDIVLTLTLFEDREMIEERLKTYAHLFDDKVMKQLKRRRYTGWGRLSRKLINGIRDKQSGKTILDFLKSDGFANRNFMQLIHDDSLTFKEDIQKAQVSGQGDSLHEHIANLAGSPAIKKGILQTVKVVDELVKVMGRHKPENIVIEMARENQTTQKGQKNSRERMKRIEEGIKELGSQILKEHPVENTQLQNEKLYLYYLQNGRDMYVDQELDINRLSDYDVDHIVPQSFLKDDSIDNKVLTRSDKARGKSDNVPSEEVVKKMKNYWRQLLNAKLITQRKFDNLTKAERGGLSELDKAGFIKRQLVETRQITKHVAQILDSRMNTKYDENDKLIREVKVITLKSKLVSDFRKDFQFYKVREINNYHHAHDAYLNAVVGTALIKKYPKLESEFVYGDYKVYDVRKMIAKSEQEIGKATAKYFFYSNIMNFFKTEITLANGEIRKRPLIETNGETGEIVWDKGRDFATVRKVLSMPQVNIVKKTEVQTGGFSKESILPKRNSDKLIARKKDWDPKKYGGFDSPTVAYSVLVVAKVEKGKSKKLKSVKELLGITIMERSSFEKNPIDFLEAKGYKEVKKDLIIKLPKYSLFELENGRKRMLASAGELQKGNELALPSKYVNFLYLASHYEKLKGSPEDNEQKQLFVEQHKHYLDEIIEQISEFSKRVILADANLDKVLSAYNKHRDKPIREQAENIIHLFTLTNLGAPAAFKYFDTTIDRKRYTSTKEVLDATLIHQSITGLYETRIDLSQLGGDGGGSSPAPGGTLQLEEEYRLFEPESTQKQEMDIWLKNFPQAWAETGGMGTAHCQAPVLIQLKATATPISIRQYPMPHEAYQGIKPHIRRMLDQGILKPCQSPWNTPLLPVKKPGTEDYRPVQDLREVNKRVEDIHPTVPNPYNLLSTLPPSHPWYTVLDLKDAFFCLRLHSESQLLFAFEWRDPEIGLSGQLTWTRLPQGFKNSPTLFNEALHSDLADFRVRYPALVLLQYVDDLLLAAATRTECLEGTKALLETLGNKGYRASAKKAQICLQEVTYLGYSLKDGQRWLTKARKEAILSIPVPKNSRQVREFLGKAGYCRLFIPGFAELAAPLYPLTRPGTLFQWGTEQQLAFEDIKKALLSSPALGLPDITKPFELFIDENSGFAKGVLVQKLGPWKRPVAYLSKKLDTVASGWPPCLRMVAAIAILVKDAGKLTLGQPLTILTSHPVEALVRQPPNKWLSNARMTHYQAMLLDAERVHFGPTVSLNPATLLPLPSGGNHHDCLQILAETHGTRPDLTDQPLPDADLTWYTDGSSFIRNGEREAGAAVTTESEVIWAAPLPPGTSAQRAELIALTQALKMAEGKKLTVYTDSRYAFATTHVHGEIYRRRGWLTSEGKEIKNKNEILALLEALFLPKRLSIIHCPGHQKGDSPQAKGNRLADDTAKKAATETHSSLTVLPAGKRTADGSEFEKRTADGSEFESPKKKAKVE

SEQ ID NO: 1246 - protein, 2089 aa, synthetic construct
MPAAKRVKLDGGDKKYSIGLDIGTNSVGWAVITDEYKVPSKKFKVLGNTDRHSIKKNLIGALLFDSGETAEATRLKRTARRRYTRRKNRICYLQEIFSNEMAKVDDSFFHRLEESFLVEEDKKHERHPIFGNIVDEVAYHEKYPTIYHLRKKLVDSTDKADLRLIYLALAHMIKFRGHFLIEGDLNPDNSDVDKLFIQLVQTYNQLFEENPINASGVDAKAILSARLSKSRRLENLIAQLPGEKKNGLFGNLIALSLGLTPNFKSNFDLAEDAKLQLSKDTYDDDLDNLLAQIGDQYADLFLAAKNLSDAILLSDILRVNTEITKAPLSASMIKRYDEHHQDLTLLKALVRQQLPEKYKEIFFDQSKNGYAGYIDGGASQEEFYKFIKPILEKMDGTEELLVKLNREDLLRKQRTFDNGSIPHQIHLGELHAILRRQEDFYPFLKDNREKIEKILTFRIPYYVGPLARGNSRFAWMTRKSEETITPWNFEEVVDKGASAQSFIERMTNFDKNLPNEKVLPKHSLLYEYFTVYNELTKVKYVTEGMRKPAFLSGEQKKAIVDLLFKTNRKVTVKQLKEDYFKKIECFDSVEISGVEDRFNASLGTYHDLLKIIKDKDFLDNEENEDILEDIVLTLTLFEDREMIEERLKTYAHLFDDKVMKQLKRRRYTGWGRLSRKLINGIRDKQSGKTILDFLKSDGFANRNFMQLIHDDSLTFKEDIQKAQVSGQGDSLHEHIANLAGSPAIKKGILQTVKVVDELVKVMGRHKPENIVIEMARENQTTQKGQKNSRERMKRIEEGIKELGSQILKEHPVENTQLQNEKLYLYYLQNGRDMYVDQELDINRLSDYDVDHIVPQSFLKDDSIDNKVLTRSDKARGKSDNVPSEEVVKKMKNYWRQLLNAKLITQRKFDNLTKAERGGLSELDKAGFIKRQLVETRQITKHVAQILDSRMNTKYDENDKLIREVKVITLKSKLVSDFRKDFQFYKVREINNYHHAHDAYLNAVVGTALIKKYPKLESEFVYGDYKVYDVRKMIAKSEQEIGKATAKYFFYSNIMNFFKTEITLANGEIRKRPLIETNGETGEIVWDKGRDFATVRKVLSMPQVNIVKKTEVQTGGFSKESILPKRNSDKLIARKKDWDPKKYGGFDSPTVAYSVLVVAKVEKGKSKKLKSVKELLGITIMERSSFEKNPIDFLEAKGYKEVKKDLIIKLPKYSLFELENGRKRMLASAGELQKGNELALPSKYVNFLYLASHYEKLKGSPEDNEQKQLFVEQHKHYLDEIIEQISEFSKRVILADANLDKVLSAYNKHRDKPIREQAENIIHLFTLTNLGAPAAFKYFDTTIDRKRYTSTKEVLDATLIHQSITGLYETRIDLSQLGGDGGPAPAPGGTLQLEEEYRLFEPESTQKQEMDIWLKNFPQAWAETGGMGTAHCQAPVLIQLKATATPISIRQYPMPHEAYQGIKPHIRRMLDQGILKPCQSPWNTPLLPVKKPGTEDYRPVQDLREVNKRVEDIHPTVPNPYNLLSTLPPSHPWYTVLDLKDAFFCLRLHSESQLLFAFEWRDPEIGLSGQLTWTRLPQGFKNSPTLFNEALHSDLADFRVRYPALVLLQYVDDLLLAAATRTECLEGTKALLETLGNKGYRASAKKAQICLQEVTYLGYSLKDGQRWLTKARKEAILSIPVPKNSRQVREFLGKAGYCRLFIPGFAELAAPLYPLTRPGTLFQWGTEQQLAFEDIKKALLSSPALGLPDITKPFELFIDENSGFAKGVLVQKLGPWKRPVAYLSKKLDTVASGWPPCLRMVAAIAILVKDAGKLTLGQPLTILTSHPVEALVRQPPNKWLSNARMTHYQAMLLDAERVHFGPTVSLNPATLLPLPSGGNHHDCLQILAETHGTRPDLTDQPLPDADLTWYTDGSSFIRNGEREAGAAVTTESEVIWAAPLPPGTSAQRAELIALTQALKMAEGKKLTVYTDSRYAFATTHVHGEIYRRRGWLTSEGKEIKNKNEILALLEALFLPKRLSIIHCPGHQKGDSPQAKGNRLADDTAKKAATETHSSLTVLPAGKRTADGSEFEKRTADGSEFESPKKKAKVE

SEQ ID NO: 1247 - protein, 2093 aa, synthetic construct
MPAAKRVKLDGGDKKYSIGLDIGTNSVGWAVITDEYKVPSKKFKVLGNTDRHSIKKNLIGALLFDSGETAEATRLKRTARRRYTRRKNRICYLQEIFSNEMAKVDDSFFHRLEESFLVEEDKKHERHPIFGNIVDEVAYHEKYPTIYHLRKKLVDSTDKADLRLIYLALAHMIKFRGHFLIEGDLNPDNSDVDKLFIQLVQTYNQLFEENPINASGVDAKAILSARLSKSRRLENLIAQLPGEKKNGLFGNLIALSLGLTPNFKSNFDLAEDAKLQLSKDTYDDDLDNLLAQIGDQYADLFLAAKNLSDAILLSDILRVNTEITKAPLSASMIKRYDEHHQDLTLLKALVRQQLPEKYKEIFFDQSKNGYAGYIDGGASQEEFYKFIKPILEKMDGTEELLVKLNREDLLRKQRTFDNGSIPHQIHLGELHAILRRQEDFYPFLKDNREKIEKILTFRIPYYVGPLARGNSRFAWMTRKSEETITPWNFEEVVDKGASAQSFIERMTNFDKNLPNEKVLPKHSLLYEYFTVYNELTKVKYVTEGMRKPAFLSGEQKKAIVDLLFKTNRKVTVKQLKEDYFKKIECFDSVEISGVEDRFNASLGTYHDLLKIIKDKDFLDNEENEDILEDIVLTLTLFEDREMIEERLKTYAHLFDDKVMKQLKRRRYTGWGRLSRKLINGIRDKQSGKTILDFLKSDGFANRNFMQLIHDDSLTFKEDIQKAQVSGQGDSLHEHIANLAGSPAIKKGILQTVKVVDELVKVMGRHKPENIVIEMARENQTTQKGQKNSRERMKRIEEGIKELGSQILKEHPVENTQLQNEKLYLYYLQNGRDMYVDQELDINRLSDYDVDHIVPQSFLKDDSIDNKVLTRSDKARGKSDNVPSEEVVKKMKNYWRQLLNAKLITQRKFDNLTKAERGGLSELDKAGFIKRQLVETRQITKHVAQILDSRMNTKYDENDKLIREVKVITLKSKLVSDFRKDFQFYKVREINNYHHAHDAYLNAVVGTALIKKYPKLESEFVYGDYKVYDVRKMIAKSEQEIGKATAKYFFYSNIMNFFKTEITLANGEIRKRPLIETNGETGEIVWDKGRDFATVRKVLSMPQVNIVKKTEVQTGGFSKESILPKRNSDKLIARKKDWDPKKYGGFDSPTVAYSVLVVAKVEKGKSKKLKSVKELLGITIMERSSFEKNPIDFLEAKGYKEVKKDLIIKLPKYSLFELENGRKRMLASAGELQKGNELALPSKYVNFLYLASHYEKLKGSPEDNEQKQLFVEQHKHYLDEIIEQISEFSKRVILADANLDKVLSAYNKHRDKPIREQAENIIHLFTLTNLGAPAAFKYFDTTIDRKRYTSTKEVLDATLIHQSITGLYETRIDLSQLGGDGGGGGGSSGGSGGTLQLEEEYRLFEPESTQKQEMDIWLKNFPQAWAETGGMGTAHCQAPVLIQLKATATPISIRQYPMPHEAYQGIKPHIRRMLDQGILKPCQSPWNTPLLPVKKPGTEDYRPVQDLREVNKRVEDIHPTVPNPYNLLSTLPPSHPWYTVLDLKDAFFCLRLHSESQLLFAFEWRDPEIGLSGQLTWTRLPQGFKNSPTLFNEALHSDLADFRVRYPALVLLQYVDDLLLAAATRTECLEGTKALLETLGNKGYRASAKKAQICLQEVTYLGYSLKDGQRWLTKARKEAILSIPVPKNSRQVREFLGKAGYCRLFIPGFAELAAPLYPLTRPGTLFQWGTEQQLAFEDIKKALLSSPALGLPDITKPFELFIDENSGFAKGVLVQKLGPWKRPVAYLSKKLDTVASGWPPCLRMVAAIAILVKDAGKLTLGQPLTILTSHPVEALVRQPPNKWLSNARMTHYQAMLLDAERVHFGPTVSLNPATLLPLPSGGNHHDCLQILAETHGTRPDLTDQPLPDADLTWYTDGSSFIRNGEREAGAAVTTESEVIWAAPLPPGTSAQRAELIALTQALKMAEGKKLTVYTDSRYAFATTHVHGEIYRRRGWLTSEGKEIKNKNEILALLEALFLPKRLSIIHCPGHQKGDSPQAKGNRLADDTAKKAATETHSSLTVLPAGKRTADGSEFEKRTADGSEFESPKKKAKVE

SEQ ID NO: 1248 - protein, 2090 aa, synthetic construct
MPAAKRVKLDGGDKKYSIGLDIGTNSVGWAVITDEYKVPSKKFKVLGNTDRHSIKKNLIGALLFDSGETAEATRLKRTARRRYTRRKNRICYLQEIFSNEMAKVDDSFFHRLEESFLVEEDKKHERHPIFGNIVDEVAYHEKYPTIYHLRKKLVDSTDKADLRLIYLALAHMIKFRGHFLIEGDLNPDNSDVDKLFIQLVQTYNQLFEENPINASGVDAKAILSARLSKSRRLENLIAQLPGEKKNGLFGNLIALSLGLTPNFKSNFDLAEDAKLQLSKDTYDDDLDNLLAQIGDQYADLFLAAKNLSDAILLSDILRVNTEITKAPLSASMIKRYDEHHQDLTLLKALVRQQLPEKYKEIFFDQSKNGYAGYIDGGASQEEFYKFIKPILEKMDGTEELLVKLNREDLLRKQRTFDNGSIPHQIHLGELHAILRRQEDFYPFLKDNREKIEKILTFRIPYYVGPLARGNSRFAWMTRKSEETITPWNFEEVVDKGASAQSFIERMTNFDKNLPNEKVLPKHSLLYEYFTVYNELTKVKYVTEGMRKPAFLSGEQKKAIVDLLFKTNRKVTVKQLKEDYFKKIECFDSVEISGVEDRFNASLGTYHDLLKIIKDKDFLDNEENEDILEDIVLTLTLFEDREMIEERLKTYAHLFDDKVMKQLKRRRYTGWGRLSRKLINGIRDKQSGKTILDFLKSDGFANRNFMQLIHDDSLTFKEDIQKAQVSGQGDSLHEHIANLAGSPAIKKGILQTVKVVDELVKVMGRHKPENIVIEMARENQTTQKGQKNSRERMKRIEEGIKELGSQILKEHPVENTQLQNEKLYLYYLQNGRDMYVDQELDINRLSDYDVDHIVPQSFLKDDSIDNKVLTRSDKARGKSDNVPSEEVVKKMKNYWRQLLNAKLITQRKFDNLTKAERGGLSELDKAGFIKRQLVETRQITKHVAQILDSRMNTKYDENDKLIREVKVITLKSKLVSDFRKDFQFYKVREINNYHHAHDAYLNAVVGTALIKKYPKLESEFVYGDYKVYDVRKMIAKSEQEIGKATAKYFFYSNIMNFFKTEITLANGEIRKRPLIETNGETGEIVWDKGRDFATVRKVLSMPQVNIVKKTEVQTGGFSKESILPKRNSDKLIARKKDWDPKKYGGFDSPTVAYSVLVVAKVEKGKSKKLKSVKELLGITIMERSSFEKNPIDFLEAKGYKEVKKDLIIKLPKYSLFELENGRKRMLASAGELQKGNELALPSKYVNFLYLASHYEKLKGSPEDNEQKQLFVEQHKHYLDEIIEQISEFSKRVILADANLDKVLSAYNKHRDKPIREQAENIIHLFTLTNLGAPAAFKYFDTTIDRKRYTSTKEVLDATLIHQSITGLYETRIDLSQLGGDGGPAPGGGGGTLQLEEEYRLFEPESTQKQEMDIWLKNFPQAWAETGGMGTAHCQAPVLIQLKATATPISIRQYPMPHEAYQGIKPHIRRMLDQGILKPCQSPWNTPLLPVKKPGTEDYRPVQDLREVNKRVEDIHPTVPNPYNLLSTLPPSHPWYTVLDLKDAFFCLRLHSESQLLFAFEWRDPEIGLSGQLTWTRLPQGFKNSPTLFNEALHSDLADFRVRYPALVLLQYVDDLLLAAATRTECLEGTKALLETLGNKGYRASAKKAQICLQEVTYLGYSLKDGQRWLTKARKEAILSIPVPKNSRQVREFLGKAGYCRLFIPGFAELAAPLYPLTRPGTLFQWGTEQQLAFEDIKKALLSSPALGLPDITKPFELFIDENSGFAKGVLVQKLGPWKRPVAYLSKKLDTVASGWPPCLRMVAAIAILVKDAGKLTLGQPLTILTSHPVEALVRQPPNKWLSNARMTHYQAMLLDAERVHFGPTVSLNPATLLPLPSGGNHHDCLQILAETHGTRPDLTDQPLPDADLTWYTDGSSFIRNGEREAGAAVTTESEVIWAAPLPPGTSAQRAELIALTQALKMAEGKKLTVYTDSRYAFATTHVHGEIYRRRGWLTSEGKEIKNKNEILALLEALFLPKRLSIIHCPGHQKGDSPQAKGNRLADDTAKKAATETHSSLTVLPAGKRTADGSEFEKRTADGSEFESPKKKAKVE

SEQ ID NO: 1249 - protein, 2090 aa, synthetic construct
MPAAKRVKLDGGDKKYSIGLDIGTNSVGWAVITDEYKVPSKKFKVLGNTDRHSIKKNLIGALLFDSGETAEATRLKRTARRRYTRRKNRICYLQEIFSNEMAKVDDSFFHRLEESFLVEEDKKHERHPIFGNIVDEVAYHEKYPTIYHLRKKLVDSTDKADLRLIYLALAHMIKFRGHFLIEGDLNPDNSDVDKLFIQLVQTYNQLFEENPINASGVDAKAILSARLSKSRRLENLIAQLPGEKKNGLFGNLIALSLGLTPNFKSNFDLAEDAKLQLSKDTYDDDLDNLLAQIGDQYADLFLAAKNLSDAILLSDILRVNTEITKAPLSASMIKRYDEHHQDLTLLKALVRQQLPEKYKEIFFDQSKNGYAGYIDGGASQEEFYKFIKPILEKMDGTEELLVKLNREDLLRKQRTFDNGSIPHQIHLGELHAILRRQEDFYPFLKDNREKIEKILTFRIPYYVGPLARGNSRFAWMTRKSEETITPWNFEEVVDKGASAQSFIERMTNFDKNLPNEKVLPKHSLLYEYFTVYNELTKVKYVTEGMRKPAFLSGEQKKAIVDLLFKTNRKVTVKQLKEDYFKKIECFDSVEISGVEDRFNASLGTYHDLLKIIKDKDFLDNEENEDILEDIVLTLTLFEDREMIEERLKTYAHLFDDKVMKQLKRRRYTGWGRLSRKLINGIRDKQSGKTILDFLKSDGFANRNFMQLIHDDSLTFKEDIQKAQVSGQGDSLHEHIANLAGSPAIKKGILQTVKVVDELVKVMGRHKPENIVIEMARENQTTQKGQKNSRERMKRIEEGIKELGSQILKEHPVENTQLQNEKLYLYYLQNGRDMYVDQELDINRLSDYDVDHIVPQSFLKDDSIDNKVLTRSDKARGKSDNVPSEEVVKKMKNYWRQLLNAKLITQRKFDNLTKAERGGLSELDKAGFIKRQLVETRQITKHVAQILDSRMNTKYDENDKLIREVKVITLKSKLVSDFRKDFQFYKVREINNYHHAHDAYLNAVVGTALIKKYPKLESEFVYGDYKVYDVRKMIAKSEQEIGKATAKYFFYSNIMNFFKTEITLANGEIRKRPLIETNGETGEIVWDKGRDFATVRKVLSMPQVNIVKKTEVQTGGFSKESILPKRNSDKLIARKKDWDPKKYGGFDSPTVAYSVLVVAKVEKGKSKKLKSVKELLGITIMERSSFEKNPIDFLEAKGYKEVKKDLIIKLPKYSLFELENGRKRMLASAGELQKGNELALPSKYVNFLYLASHYEKLKGSPEDNEQKQLFVEQHKHYLDEIIEQISEFSKRVILADANLDKVLSAYNKHRDKPIREQAENIIHLFTLTNLGAPAAFKYFDTTIDRKRYTSTKEVLDATLIHQSITGLYETRIDLSQLGGDGGGSSGGGGGTLQLEEEYRLFEPESTQKQEMDIWLKNFPQAWAETGGMGTAHCQAPVLIQLKATATPISIRQYPMPHEAYQGIKPHIRRMLDQGILKPCQSPWNTPLLPVKKPGTEDYRPVQDLREVNKRVEDIHPTVPNPYNLLSTLPPSHPWYTVLDLKDAFFCLRLHSESQLLFAFEWRDPEIGLSGQLTWTRLPQGFKNSPTLFNEALHSDLADFRVRYPALVLLQYVDDLLLAAATRTECLEGTKALLETLGNKGYRASAKKAQICLQEVTYLGYSLKDGQRWLTKARKEAILSIPVPKNSRQVREFLGKAGYCRLFIPGFAELAAPLYPLTRPGTLFQWGTEQQLAFEDIKKALLSSPALGLPDITKPFELFIDENSGFAKGVLVQKLGPWKRPVAYLSKKLDTVASGWPPCLRMVAAIAILVKDAGKLTLGQPLTILTSHPVEALVRQPPNKWLSNARMTHYQAMLLDAERVHFGPTVSLNPATLLPLPSGGNHHDCLQILAETHGTRPDLTDQPLPDADLTWYTDGSSFIRNGEREAGAAVTTESEVIWAAPLPPGTSAQRAELIALTQALKMAEGKKLTVYTDSRYAFATTHVHGEIYRRRGWLTSEGKEIKNKNEILALLEALFLPKRLSIIHCPGHQKGDSPQAKGNRLADDTAKKAATETHSSLTVLPAGKRTADGSEFEKRTADGSEFESPKKKAKVE

SEQ ID NO: 1250 - protein, 2090 aa, synthetic construct
MPAAKRVKLDGGDKKYSIGLDIGTNSVGWAVITDEYKVPSKKFKVLGNTDRHSIKKNLIGALLFDSGETAEATRLKRTARRRYTRRKNRICYLQEIFSNEMAKVDDSFFHRLEESFLVEEDKKHERHPIFGNIVDEVAYHEKYPTIYHLRKKLVDSTDKADLRLIYLALAHMIKFRGHFLIEGDLNPDNSDVDKLFIQLVQTYNQLFEENPINASGVDAKAILSARLSKSRRLENLIAQLPGEKKNGLFGNLIALSLGLTPNFKSNFDLAEDAKLQLSKDTYDDDLDNLLAQIGDQYADLFLAAKNLSDAILLSDILRVNTEITKAPLSASMIKRYDEHHQDLTLLKALVRQQLPEKYKEIFFDQSKNGYAGYIDGGASQEEFYKFIKPILEKMDGTEELLVKLNREDLLRKQRTFDNGSIPHQIHLGELHAILRRQEDFYPFLKDNREKIEKILTFRIPYYVGPLARGNSRFAWMTRKSEETITPWNFEEVVDKGASAQSFIERMTNFDKNLPNEKVLPKHSLLYEYFTVYNELTKVKYVTEGMRKPAFLSGEQKKAIVDLLFKTNRKVTVKQLKEDYFKKIECFDSVEISGVEDRFNASLGTYHDLLKIIKDKDFLDNEENEDILEDIVLTLTLFEDREMIEERLKTYAHLFDDKVMKQLKRRRYTGWGRLSRKLINGIRDKQSGKTILDFLKSDGFANRNFMQLIHDDSLTFKEDIQKAQVSGQGDSLHEHIANLAGSPAIKKGILQTVKVVDELVKVMGRHKPENIVIEMARENQTTQKGQKNSRERMKRIEEGIKELGSQILKEHPVENTQLQNEKLYLYYLQNGRDMYVDQELDINRLSDYDVDHIVPQSFLKDDSIDNKVLTRSDKARGKSDNVPSEEVVKKMKNYWRQLLNAKLITQRKFDNLTKAERGGLSELDKAGFIKRQLVETRQITKHVAQILDSRMNTKYDENDKLIREVKVITLKSKLVSDFRKDFQFYKVREINNYHHAHDAYLNAVVGTALIKKYPKLESEFVYGDYKVYDVRKMIAKSEQEIGKATAKYFFYSNIMNFFKTEITLANGEIRKRPLIETNGETGEIVWDKGRDFATVRKVLSMPQVNIVKKTEVQTGGFSKESILPKRNSDKLIARKKDWDPKKYGGFDSPTVAYSVLVVAKVEKGKSKKLKSVKELLGITIMERSSFEKNPIDFLEAKGYKEVKKDLIIKLPKYSLFELENGRKRMLASAGELQKGNELALPSKYVNFLYLASHYEKLKGSPEDNEQKQLFVEQHKHYLDEIIEQISEFSKRVILADANLDKVLSAYNKHRDKPIREQAENIIHLFTLTNLGAPAAFKYFDTTIDRKRYTSTKEVLDATLIHQSITGLYETRIDLSQLGGDGGGSSGSSGGTLQLEEEYRLFEPESTQKQEMDIWLKNFPQAWAETGGMGTAHCQAPVLIQLKATATPISIRQYPMPHEAYQGIKPHIRRMLDQGILKPCQSPWNTPLLPVKKPGTEDYRPVQDLREVNKRVEDIHPTVPNPYNLLSTLPPSHPWYTVLDLKDAFFCLRLHSESQLLFAFEWRDPEIGLSGQLTWTRLPQGFKNSPTLFNEALHSDLADFRVRYPALVLLQYVDDLLLAAATRTECLEGTKALLETLGNKGYRASAKKAQICLQEVTYLGYSLKDGQRWLTKARKEAILSIPVPKNSRQVREFLGKAGYCRLFIPGFAELAAPLYPLTRPGTLFQWGTEQQLAFEDIKKALLSSPALGLPDITKPFELFIDENSGFAKGVLVQKLGPWKRPVAYLSKKLDTVASGWPPCLRMVAAIAILVKDAGKLTLGQPLTILTSHPVEALVRQPPNKWLSNARMTHYQAMLLDAERVHFGPTVSLNPATLLPLPSGGNHHDCLQILAETHGTRPDLTDQPLPDADLTWYTDGSSFIRNGEREAGAAVTTESEVIWAAPLPPGTSAQRAELIALTQALKMAEGKKLTVYTDSRYAFATTHVHGEIYRRRGWLTSEGKEIKNKNEILALLEALFLPKRLSIIHCPGHQKGDSPQAKGNRLADDTAKKAATETHSSLTVLPAGKRTADGSEFEKRTADGSEFESPKKKAKVE

SEQ ID NO: 1251 - protein, 2088 aa, synthetic construct
MPAAKRVKLDGGDKKYSIGLDIGTNSVGWAVITDEYKVPSKKFKVLGNTDRHSIKKNLIGALLFDSGETAEATRLKRTARRRYTRRKNRICYLQEIFSNEMAKVDDSFFHRLEESFLVEEDKKHERHPIFGNIVDEVAYHEKYPTIYHLRKKLVDSTDKADLRLIYLALAHMIKFRGHFLIEGDLNPDNSDVDKLFIQLVQTYNQLFEENPINASGVDAKAILSARLSKSRRLENLIAQLPGEKKNGLFGNLIALSLGLTPNFKSNFDLAEDAKLQLSKDTYDDDLDNLLAQIGDQYADLFLAAKNLSDAILLSDILRVNTEITKAPLSASMIKRYDEHHQDLTLLKALVRQQLPEKYKEIFFDQSKNGYAGYIDGGASQEEFYKFIKPILEKMDGTEELLVKLNREDLLRKQRTFDNGSIPHQIHLGELHAILRRQEDFYPFLKDNREKIEKILTFRIPYYVGPLARGNSRFAWMTRKSEETITPWNFEEVVDKGASAQSFIERMTNFDKNLPNEKVLPKHSLLYEYFTVYNELTKVKYVTEGMRKPAFLSGEQKKAIVDLLFKTNRKVTVKQLKEDYFKKIECFDSVEISGVEDRFNASLGTYHDLLKIIKDKDFLDNEENEDILEDIVLTLTLFEDREMIEERLKTYAHLFDDKVMKQLKRRRYTGWGRLSRKLINGIRDKQSGKTILDFLKSDGFANRNFMQLIHDDSLTFKEDIQKAQVSGQGDSLHEHIANLAGSPAIKKGILQTVKVVDELVKVMGRHKPENIVIEMARENQTTQKGQKNSRERMKRIEEGIKELGSQILKEHPVENTQLQNEKLYLYYLQNGRDMYVDQELDINRLSDYDVDHIVPQSFLKDDSIDNKVLTRSDKARGKSDNVPSEEVVKKMKNYWRQLLNAKLITQRKFDNLTKAERGGLSELDKAGFIKRQLVETRQITKHVAQILDSRMNTKYDENDKLIREVKVITLKSKLVSDFRKDFQFYKVREINNYHHAHDAYLNAVVGTALIKKYPKLESEFVYGDYKVYDVRKMIAKSEQEIGKATAKYFFYSNIMNFFKTEITLANGEIRKRPLIETNGETGEIVWDKGRDFATVRKVLSMPQVNIVKKTEVQTGGFSKESILPKRNSDKLIARKKDWDPKKYGGFDSPTVAYSVLVVAKVEKGKSKKLKSVKELLGITIMERSSFEKNPIDFLEAKGYKEVKKDLIIKLPKYSLFELENGRKRMLASAGELQKGNELALPSKYVNFLYLASHYEKLKGSPEDNEQKQLFVEQHKHYLDEIIEQISEFSKRVILADANLDKVLSAYNKHRDKPIREQAENIIHLFTLTNLGAPAAFKYFDTTIDRKRYTSTKEVLDATLIHQSITGLYETRIDLSQLGGDGGGGGGGGTLQLEEEYRLFEPESTQKQEMDIWLKNFPQAWAETGGMGTAHCQAPVLIQLKATATPISIRQYPMPHEAYQGIKPHIRRMLDQGILKPCQSPWNTPLLPVKKPGTEDYRPVQDLREVNKRVEDIHPTVPNPYNLLSTLPPSHPWYTVLDLKDAFFCLRLHSESQLLFAFEWRDPEIGLSGQLTWTRLPQGFKNSPTLFNEALHSDLADFRVRYPALVLLQYVDDLLLAAATRTECLEGTKALLETLGNKGYRASAKKAQICLQEVTYLGYSLKDGQRWLTKARKEAILSIPVPKNSRQVREFLGKAGYCRLFIPGFAELAAPLYPLTRPGTLFQWGTEQQLAFEDIKKALLSSPALGLPDITKPFELFIDENSGFAKGVLVQKLGPWKRPVAYLSKKLDTVASGWPPCLRMVAAIAILVKDAGKLTLGQPLTILTSHPVEALVRQPPNKWLSNARMTHYQAMLLDAERVHFGPTVSLNPATLLPLPSGGNHHDCLQILAETHGTRPDLTDQPLPDADLTWYTDGSSFIRNGEREAGAAVTTESEVIWAAPLPPGTSAQRAELIALTQALKMAEGKKLTVYTDSRYAFATTHVHGEIYRRRGWLTSEGKEIKNKNEILALLEALFLPKRLSIIHCPGHQKGDSPQAKGNRLADDTAKKAATETHSSLTVLPAGKRTADGSEFEKRTADGSEFESPKKKAKVE

SEQ ID NO: 1252 - protein, 2090 aa, synthetic construct
MPAAKRVKLDGGDKKYSIGLDIGTNSVGWAVITDEYKVPSKKFKVLGNTDRHSIKKNLIGALLFDSGETAEATRLKRTARRRYTRRKNRICYLQEIFSNEMAKVDDSFFHRLEESFLVEEDKKHERHPIFGNIVDEVAYHEKYPTIYHLRKKLVDSTDKADLRLIYLALAHMIKFRGHFLIEGDLNPDNSDVDKLFIQLVQTYNQLFEENPINASGVDAKAILSARLSKSRRLENLIAQLPGEKKNGLFGNLIALSLGLTPNFKSNFDLAEDAKLQLSKDTYDDDLDNLLAQIGDQYADLFLAAKNLSDAILLSDILRVNTEITKAPLSASMIKRYDEHHQDLTLLKALVRQQLPEKYKEIFFDQSKNGYAGYIDGGASQEEFYKFIKPILEKMDGTEELLVKLNREDLLRKQRTFDNGSIPHQIHLGELHAILRRQEDFYPFLKDNREKIEKILTFRIPYYVGPLARGNSRFAWMTRKSEETITPWNFEEVVDKGASAQSFIERMTNFDKNLPNEKVLPKHSLLYEYFTVYNELTKVKYVTEGMRKPAFLSGEQKKAIVDLLFKTNRKVTVKQLKEDYFKKIECFDSVEISGVEDRFNASLGTYHDLLKIIKDKDFLDNEENEDILEDIVLTLTLFEDREMIEERLKTYAHLFDDKVMKQLKRRRYTGWGRLSRKLINGIRDKQSGKTILDFLKSDGFANRNFMQLIHDDSLTFKEDIQKAQVSGQGDSLHEHIANLAGSPAIKKGILQTVKVVDELVKVMGRHKPENIVIEMARENQTTQKGQKNSRERMKRIEEGIKELGSQILKEHPVENTQLQNEKLYLYYLQNGRDMYVDQELDINRLSDYDVDHIVPQSFLKDDSIDNKVLTRSDKARGKSDNVPSEEVVKKMKNYWRQLLNAKLITQRKFDNLTKAERGGLSELDKAGFIKRQLVETRQITKHVAQILDSRMNTKYDENDKLIREVKVITLKSKLVSDFRKDFQFYKVREINNYHHAHDAYLNAVVGTALIKKYPKLESEFVYGDYKVYDVRKMIAKSEQEIGKATAKYFFYSNIMNFFKTEITLANGEIRKRPLIETNGETGEIVWDKGRDFATVRKVLSMPQVNIVKKTEVQTGGFSKESILPKRNSDKLIARKKDWDPKKYGGFDSPTVAYSVLVVAKVEKGKSKKLKSVKELLGITIMERSSFEKNPIDFLEAKGYKEVKKDLIIKLPKYSLFELENGRKRMLASAGELQKGNELALPSKYVNFLYLASHYEKLKGSPEDNEQKQLFVEQHKHYLDEIIEQISEFSKRVILADANLDKVLSAYNKHRDKPIREQAENIIHLFTLTNLGAPAAFKYFDTTIDRKRYTSTKEVLDATLIHQSITGLYETRIDLSQLGGDGGPAPGSSGGTLQLEEEYRLFEPESTQKQEMDIWLKNFPQAWAETGGMGTAHCQAPVLIQLKATATPISIRQYPMPHEAYQGIKPHIRRMLDQGILKPCQSPWNTPLLPVKKPGTEDYRPVQDLREVNKRVEDIHPTVPNPYNLLSTLPPSHPWYTVLDLKDAFFCLRLHSESQLLFAFEWRDPEIGLSGQLTWTRLPQGFKNSPTLFNEALHSDLADFRVRYPALVLLQYVDDLLLAAATRTECLEGTKALLETLGNKGYRASAKKAQICLQEVTYLGYSLKDGQRWLTKARKEAILSIPVPKNSRQVREFLGKAGYCRLFIPGFAELAAPLYPLTRPGTLFQWGTEQQLAFEDIKKALLSSPALGLPDITKPFELFIDENSGFAKGVLVQKLGPWKRPVAYLSKKLDTVASGWPPCLRMVAAIAILVKDAGKLTLGQPLTILTSHPVEALVRQPPNKWLSNARMTHYQAMLLDAERVHFGPTVSLNPATLLPLPSGGNHHDCLQILAETHGTRPDLTDQPLPDADLTWYTDGSSFIRNGEREAGAAVTTESEVIWAAPLPPGTSAQRAELIALTQALKMAEGKKLTVYTDSRYAFATTHVHGEIYRRRGWLTSEGKEIKNKNEILALLEALFLPKRLSIIHCPGHQKGDSPQAKGNRLADDTAKKAATETHSSLTVLPAGKRTADGSEFEKRTADGSEFESPKKKAKVE

SEQ ID NO: 1253 - protein, 2095 aa, synthetic construct
MPAAKRVKLDGGDKKYSIGLDIGTNSVGWAVITDEYKVPSKKFKVLGNTDRHSIKKNLIGALLFDSGETAEATRLKRTARRRYTRRKNRICYLQEIFSNEMAKVDDSFFHRLEESFLVEEDKKHERHPIFGNIVDEVAYHEKYPTIYHLRKKLVDSTDKADLRLIYLALAHMIKFRGHFLIEGDLNPDNSDVDKLFIQLVQTYNQLFEENPINASGVDAKAILSARLSKSRRLENLIAQLPGEKKNGLFGNLIALSLGLTPNFKSNFDLAEDAKLQLSKDTYDDDLDNLLAQIGDQYADLFLAAKNLSDAILLSDILRVNTEITKAPLSASMIKRYDEHHQDLTLLKALVRQQLPEKYKEIFFDQSKNGYAGYIDGGASQEEFYKFIKPILEKMDGTEELLVKLNREDLLRKQRTFDNGSIPHQIHLGELHAILRRQEDFYPFLKDNREKIEKILTFRIPYYVGPLARGNSRFAWMTRKSEETITPWNFEEVVDKGASAQSFIERMTNFDKNLPNEKVLPKHSLLYEYFTVYNELTKVKYVTEGMRKPAFLSGEQKKAIVDLLFKTNRKVTVKQLKEDYFKKIECFDSVEISGVEDRFNASLGTYHDLLKIIKDKDFLDNEENEDILEDIVLTLTLFEDREMIEERLKTYAHLFDDKVMKQLKRRRYTGWGRLSRKLINGIRDKQSGKTILDFLKSDGFANRNFMQLIHDDSLTFKEDIQKAQVSGQGDSLHEHIANLAGSPAIKKGILQTVKVVDELVKVMGRHKPENIVIEMARENQTTQKGQKNSRERMKRIEEGIKELGSQILKEHPVENTQLQNEKLYLYYLQNGRDMYVDQELDINRLSDYDVDHIVPQSFLKDDSIDNKVLTRSDKARGKSDNVPSEEVVKKMKNYWRQLLNAKLITQRKFDNLTKAERGGLSELDKAGFIKRQLVETRQITKHVAQILDSRMNTKYDENDKLIREVKVITLKSKLVSDFRKDFQFYKVREINNYHHAHDAYLNAVVGTALIKKYPKLESEFVYGDYKVYDVRKMIAKSEQEIGKATAKYFFYSNIMNFFKTEITLANGEIRKRPLIETNGETGEIVWDKGRDFATVRKVLSMPQVNIVKKTEVQTGGFSKESILPKRNSDKLIARKKDWDPKKYGGFDSPTVAYSVLVVAKVEKGKSKKLKSVKELLGITIMERSSFEKNPIDFLEAKGYKEVKKDLIIKLPKYSLFELENGRKRMLASAGELQKGNELALPSKYVNFLYLASHYEKLKGSPEDNEQKQLFVEQHKHYLDEIIEQISEFSKRVILADANLDKVLSAYNKHRDKPIREQAENIIHLFTLTNLGAPAAFKYFDTTIDRKRYTSTKEVLDATLIHQSITGLYETRIDLSQLGGDGGEAAAKGGGPAPGGTLQLEEEYRLFEPESTQKQEMDIWLKNFPQAWAETGGMGTAHCQAPVLIQLKATATPISIRQYPMPHEAYQGIKPHIRRMLDQGILKPCQSPWNTPLLPVKKPGTEDYRPVQDLREVNKRVEDIHPTVPNPYNLLSTLPPSHPWYTVLDLKDAFFCLRLHSESQLLFAFEWRDPEIGLSGQLTWTRLPQGFKNSPTLFNEALHSDLADFRVRYPALVLLQYVDDLLLAAATRTECLEGTKALLETLGNKGYRASAKKAQICLQEVTYLGYSLKDGQRWLTKARKEAILSIPVPKNSRQVREFLGKAGYCRLFIPGFAELAAPLYPLTRPGTLFQWGTEQQLAFEDIKKALLSSPALGLPDITKPFELFIDENSGFAKGVLVQKLGPWKRPVAYLSKKLDTVASGWPPCLRMVAAIAILVKDAGKLTLGQPLTILTSHPVEALVRQPPNKWLSNARMTHYQAMLLDAERVHFGPTVSLNPATLLPLPSGGNHHDCLQILAETHGTRPDLTDQPLPDADLTWYTDGSSFIRNGEREAGAAVTTESEVIWAAPLPPGTSAQRAELIALTQALKMAEGKKLTVYTDSRYAFATTHVHGEIYRRRGWLTSEGKEIKNKNEILALLEALFLPKRLSIIHCPGHQKGDSPQAKGNRLADDTAKKAATETHSSLTVLPAGKRTADGSEFEKRTADGSEFESPKKKAKVE

SEQ ID NO: 1254 - protein, 2095 aa, synthetic construct
MPAAKRVKLDGGDKKYSIGLDIGTNSVGWAVITDEYKVPSKKFKVLGNTDRHSIKKNLIGALLFDSGETAEATRLKRTARRRYTRRKNRICYLQEIFSNEMAKVDDSFFHRLEESFLVEEDKKHERHPIFGNIVDEVAYHEKYPTIYHLRKKLVDSTDKADLRLIYLALAHMIKFRGHFLIEGDLNPDNSDVDKLFIQLVQTYNQLFEENPINASGVDAKAILSARLSKSRRLENLIAQLPGEKKNGLFGNLIALSLGLTPNFKSNFDLAEDAKLQLSKDTYDDDLDNLLAQIGDQYADLFLAAKNLSDAILLSDILRVNTEITKAPLSASMIKRYDEHHQDLTLLKALVRQQLPEKYKEIFFDQSKNGYAGYIDGGASQEEFYKFIKPILEKMDGTEELLVKLNREDLLRKQRTFDNGSIPHQIHLGELHAILRRQEDFYPFLKDNREKIEKILTFRIPYYVGPLARGNSRFAWMTRKSEETITPWNFEEVVDKGASAQSFIERMTNFDKNLPNEKVLPKHSLLYEYFTVYNELTKVKYVTEGMRKPAFLSGEQKKAIVDLLFKTNRKVTVKQLKEDYFKKIECFDSVEISGVEDRFNASLGTYHDLLKIIKDKDFLDNEENEDILEDIVLTLTLFEDREMIEERLKTYAHLFDDKVMKQLKRRRYTGWGRLSRKLINGIRDKQSGKTILDFLKSDGFANRNFMQLIHDDSLTFKEDIQKAQVSGQGDSLHEHIANLAGSPAIKKGILQTVKVVDELVKVMGRHKPENIVIEMARENQTTQKGQKNSRERMKRIEEGIKELGSQILKEHPVENTQLQNEKLYLYYLQNGRDMYVDQELDINRLSDYDVDHIVPQSFLKDDSIDNKVLTRSDKARGKSDNVPSEEVVKKMKNYWRQLLNAKLITQRKFDNLTKAERGGLSELDKAGFIKRQLVETRQITKHVAQILDSRMNTKYDENDKLIREVKVITLKSKLVSDFRKDFQFYKVREINNYHHAHDAYLNAVVGTALIKKYPKLESEFVYGDYKVYDVRKMIAKSEQEIGKATAKYFFYSNIMNFFKTEITLANGEIRKRPLIETNGETGEIVWDKGRDFATVRKVLSMPQVNIVKKTEVQTGGFSKESILPKRNSDKLIARKKDWDPKKYGGFDSPTVAYSVLVVAKVEKGKSKKLKSVKELLGITIMERSSFEKNPIDFLEAKGYKEVKKDLIIKLPKYSLFELENGRKRMLASAGELQKGNELALPSKYVNFLYLASHYEKLKGSPEDNEQKQLFVEQHKHYLDEIIEQISEFSKRVILADANLDKVLSAYNKHRDKPIREQAENIIHLFTLTNLGAPAAFKYFDTTIDRKRYTSTKEVLDATLIHQSITGLYETRIDLSQLGGDGGEAAAKPAPGGSGGTLQLEEEYRLFEPESTQKQEMDIWLKNFPQAWAETGGMGTAHCQAPVLIQLKATATPISIRQYPMPHEAYQGIKPHIRRMLDQGILKPCQSPWNTPLLPVKKPGTEDYRPVQDLREVNKRVEDIHPTVPNPYNLLSTLPPSHPWYTVLDLKDAFFCLRLHSESQLLFAFEWRDPEIGLSGQLTWTRLPQGFKNSPTLFNEALHSDLADFRVRYPALVLLQYVDDLLLAAATRTECLEGTKALLETLGNKGYRASAKKAQICLQEVTYLGYSLKDGQRWLTKARKEAILSIPVPKNSRQVREFLGKAGYCRLFIPGFAELAAPLYPLTRPGTLFQWGTEQQLAFEDIKKALLSSPALGLPDITKPFELFIDENSGFAKGVLVQKLGPWKRPVAYLSKKLDTVASGWPPCLRMVAAIAILVKDAGKLTLGQPLTILTSHPVEALVRQPPNKWLSNARMTHYQAMLLDAERVHFGPTVSLNPATLLPLPSGGNHHDCLQILAETHGTRPDLTDQPLPDADLTWYTDGSSFIRNGEREAGAAVTTESEVIWAAPLPPGTSAQRAELIALTQALKMAEGKKLTVYTDSRYAFATTHVHGEIYRRRGWLTSEGKEIKNKNEILALLEALFLPKRLSIIHCPGHQKGDSPQAKGNRLADDTAKKAATETHSSLTVLPAGKRTADGSEFEKRTADGSEFESPKKKAKVE

SEQ ID NO: 1255 - protein, 2093 aa, synthetic construct
MPAAKRVKLDGGDKKYSIGLDIGTNSVGWAVITDEYKVPSKKFKVLGNTDRHSIKKNLIGALLFDSGETAEATRLKRTARRRYTRRKNRICYLQEIFSNEMAKVDDSFFHRLEESFLVEEDKKHERHPIFGNIVDEVAYHEKYPTIYHLRKKLVDSTDKADLRLIYLALAHMIKFRGHFLIEGDLNPDNSDVDKLFIQLVQTYNQLFEENPINASGVDAKAILSARLSKSRRLENLIAQLPGEKKNGLFGNLIALSLGLTPNFKSNFDLAEDAKLQLSKDTYDDDLDNLLAQIGDQYADLFLAAKNLSDAILLSDILRVNTEITKAPLSASMIKRYDEHHQDLTLLKALVRQQLPEKYKEIFFDQSKNGYAGYIDGGASQEEFYKFIKPILEKMDGTEELLVKLNREDLLRKQRTFDNGSIPHQIHLGELHAILRRQEDFYPFLKDNREKIEKILTFRIPYYVGPLARGNSRFAWMTRKSEETITPWNFEEVVDKGASAQSFIERMTNFDKNLPNEKVLPKHSLLYEYFTVYNELTKVKYVTEGMRKPAFLSGEQKKAIVDLLFKTNRKVTVKQLKEDYFKKIECFDSVEISGVEDRFNASLGTYHDLLKIIKDKDFLDNEENEDILEDIVLTLTLFEDREMIEERLKTYAHLFDDKVMKQLKRRRYTGWGRLSRKLINGIRDKQSGKTILDFLKSDGFANRNFMQLIHDDSLTFKEDIQKAQVSGQGDSLHEHIANLAGSPAIKKGILQTVKVVDELVKVMGRHKPENIVIEMARENQTTQKGQKNSRERMKRIEEGIKELGSQILKEHPVENTQLQNEKLYLYYLQNGRDMYVDQELDINRLSDYDVDHIVPQSFLKDDSIDNKVLTRSDKARGKSDNVPSEEVVKKMKNYWRQLLNAKLITQRKFDNLTKAERGGLSELDKAGFIKRQLVETRQITKHVAQILDSRMNTKYDENDKLIREVKVITLKSKLVSDFRKDFQFYKVREINNYHHAHDAYLNAVVGTALIKKYPKLESEFVYGDYKVYDVRKMIAKSEQEIGKATAKYFFYSNIMNFFKTEITLANGEIRKRPLIETNGETGEIVWDKGRDFATVRKVLSMPQVNIVKKTEVQTGGFSKESILPKRNSDKLIARKKDWDPKKYGGFDSPTVAYSVLVVAKVEKGKSKKLKSVKELLGITIMERSSFEKNPIDFLEAKGYKEVKKDLIIKLPKYSLFELENGRKRMLASAGELQKGNELALPSKYVNFLYLASHYEKLKGSPEDNEQKQLFVEQHKHYLDEIIEQISEFSKRVILADANLDKVLSAYNKHRDKPIREQAENIIHLFTLTNLGAPAAFKYFDTTIDRKRYTSTKEVLDATLIHQSITGLYETRIDLSQLGGDGGGSSGSSGSSGGTLQLEEEYRLFEPESTQKQEMDIWLKNFPQAWAETGGMGTAHCQAPVLIQLKATATPISIRQYPMPHEAYQGIKPHIRRMLDQGILKPCQSPWNTPLLPVKKPGTEDYRPVQDLREVNKRVEDIHPTVPNPYNLLSTLPPSHPWYTVLDLKDAFFCLRLHSESQLLFAFEWRDPEIGLSGQLTWTRLPQGFKNSPTLFNEALHSDLADFRVRYPALVLLQYVDDLLLAAATRTECLEGTKALLETLGNKGYRASAKKAQICLQEVTYLGYSLKDGQRWLTKARKEAILSIPVPKNSRQVREFLGKAGYCRLFIPGFAELAAPLYPLTRPGTLFQWGTEQQLAFEDIKKALLSSPALGLPDITKPFELFIDENSGFAKGVLVQKLGPWKRPVAYLSKKLDTVASGWPPCLRMVAAIAILVKDAGKLTLGQPLTILTSHPVEALVRQPPNKWLSNARMTHYQAMLLDAERVHFGPTVSLNPATLLPLPSGGNHHDCLQILAETHGTRPDLTDQPLPDADLTWYTDGSSFIRNGEREAGAAVTTESEVIWAAPLPPGTSAQRAELIALTQALKMAEGKKLTVYTDSRYAFATTHVHGEIYRRRGWLTSEGKEIKNKNEILALLEALFLPKRLSIIHCPGHQKGDSPQAKGNRLADDTAKKAATETHSSLTVLPAGKRTADGSEFEKRTADGSEFESPKKKAKVE

SEQ ID NO: 1256 - protein, 2093 aa, synthetic construct
MPAAKRVKLDGGDKKYSIGLDIGTNSVGWAVITDEYKVPSKKFKVLGNTDRHSIKKNLIGALLFDSGETAEATRLKRTARRRYTRRKNRICYLQEIFSNEMAKVDDSFFHRLEESFLVEEDKKHERHPIFGNIVDEVAYHEKYPTIYHLRKKLVDSTDKADLRLIYLALAHMIKFRGHFLIEGDLNPDNSDVDKLFIQLVQTYNQLFEENPINASGVDAKAILSARLSKSRRLENLIAQLPGEKKNGLFGNLIALSLGLTPNFKSNFDLAEDAKLQLSKDTYDDDLDNLLAQIGDQYADLFLAAKNLSDAILLSDILRVNTEITKAPLSASMIKRYDEHHQDLTLLKALVRQQLPEKYKEIFFDQSKNGYAGYIDGGASQEEFYKFIKPILEKMDGTEELLVKLNREDLLRKQRTFDNGSIPHQIHLGELHAILRRQEDFYPFLKDNREKIEKILTFRIPYYVGPLARGNSRFAWMTRKSEETITPWNFEEVVDKGASAQSFIERMTNFDKNLPNEKVLPKHSLLYEYFTVYNELTKVKYVTEGMRKPAFLSGEQKKAIVDLLFKTNRKVTVKQLKEDYFKKIECFDSVEISGVEDRFNASLGTYHDLLKIIKDKDFLDNEENEDILEDIVLTLTLFEDREMIEERLKTYAHLFDDKVMKQLKRRRYTGWGRLSRKLINGIRDKQSGKTILDFLKSDGFANRNFMQLIHDDSLTFKEDIQKAQVSGQGDSLHEHIANLAGSPAIKKGILQTVKVVDELVKVMGRHKPENIVIEMARENQTTQKGQKNSRERMKRIEEGIKELGSQILKEHPVENTQLQNEKLYLYYLQNGRDMYVDQELDINRLSDYDVDHIVPQSFLKDDSIDNKVLTRSDKARGKSDNVPSEEVVKKMKNYWRQLLNAKLITQRKFDNLTKAERGGLSELDKAGFIKRQLVETRQITKHVAQILDSRMNTKYDENDKLIREVKVITLKSKLVSDFRKDFQFYKVREINNYHHAHDAYLNAVVGTALIKKYPKLESEFVYGDYKVYDVRKMIAKSEQEIGKATAKYFFYSNIMNFFKTEITLANGEIRKRPLIETNGETGEIVWDKGRDFATVRKVLSMPQVNIVKKTEVQTGGFSKESILPKRNSDKLIARKKDWDPKKYGGFDSPTVAYSVLVVAKVEKGKSKKLKSVKELLGITIMERSSFEKNPIDFLEAKGYKEVKKDLIIKLPKYSLFELENGRKRMLASAGELQKGNELALPSKYVNFLYLASHYEKLKGSPEDNEQKQLFVEQHKHYLDEIIEQISEFSKRVILADANLDKVLSAYNKHRDKPIREQAENIIHLFTLTNLGAPAAFKYFDTTIDRKRYTSTKEVLDATLIHQSITGLYETRIDLSQLGGDGGPAPGGSGGGGGTLQLEEEYRLFEPESTQKQEMDIWLKNFPQAWAETGGMGTAHCQAPVLIQLKATATPISIRQYPMPHEAYQGIKPHIRRMLDQGILKPCQSPWNTPLLPVKKPGTEDYRPVQDLREVNKRVEDIHPTVPNPYNLLSTLPPSHPWYTVLDLKDAFFCLRLHSESQLLFAFEWRDPEIGLSGQLTWTRLPQGFKNSPTLFNEALHSDLADFRVRYPALVLLQYVDDLLLAAATRTECLEGTKALLETLGNKGYRASAKKAQICLQEVTYLGYSLKDGQRWLTKARKEAILSIPVPKNSRQVREFLGKAGYCRLFIPGFAELAAPLYPLTRPGTLFQWGTEQQLAFEDIKKALLSSPALGLPDITKPFELFIDENSGFAKGVLVQKLGPWKRPVAYLSKKLDTVASGWPPCLRMVAAIAILVKDAGKLTLGQPLTILTSHPVEALVRQPPNKWLSNARMTHYQAMLLDAERVHFGPTVSLNPATLLPLPSGGNHHDCLQILAETHGTRPDLTDQPLPDADLTWYTDGSSFIRNGEREAGAAVTTESEVIWAAPLPPGTSAQRAELIALTQALKMAEGKKLTVYTDSRYAFATTHVHGEIYRRRGWLTSEGKEIKNKNEILALLEALFLPKRLSIIHCPGHQKGDSPQAKGNRLADDTAKKAATETHSSLTVLPAGKRTADGSEFEKRTADGSEFESPKKKAKVE

SEQ ID NO: 1257 - protein, 2093 aa, synthetic construct
MPAAKRVKLDGGDKKYSIGLDIGTNSVGWAVITDEYKVPSKKFKVLGNTDRHSIKKNLIGALLFDSGETAEATRLKRTARRRYTRRKNRICYLQEIFSNEMAKVDDSFFHRLEESFLVEEDKKHERHPIFGNIVDEVAYHEKYPTIYHLRKKLVDSTDKADLRLIYLALAHMIKFRGHFLIEGDLNPDNSDVDKLFIQLVQTYNQLFEENPINASGVDAKAILSARLSKSRRLENLIAQLPGEKKNGLFGNLIALSLGLTPNFKSNFDLAEDAKLQLSKDTYDDDLDNLLAQIGDQYADLFLAAKNLSDAILLSDILRVNTEITKAPLSASMIKRYDEHHQDLTLLKALVRQQLPEKYKEIFFDQSKNGYAGYIDGGASQEEFYKFIKPILEKMDGTEELLVKLNREDLLRKQRTFDNGSIPHQIHLGELHAILRRQEDFYPFLKDNREKIEKILTFRIPYYVGPLARGNSRFAWMTRKSEETITPWNFEEVVDKGASAQSFIERMTNFDKNLPNEKVLPKHSLLYEYFTVYNELTKVKYVTEGMRKPAFLSGEQKKAIVDLLFKTNRKVTVKQLKEDYFKKIECFDSVEISGVEDRFNASLGTYHDLLKIIKDKDFLDNEENEDILEDIVLTLTLFEDREMIEERLKTYAHLFDDKVMKQLKRRRYTGWGRLSRKLINGIRDKQSGKTILDFLKSDGFANRNFMQLIHDDSLTFKEDIQKAQVSGQGDSLHEHIANLAGSPAIKKGILQTVKVVDELVKVMGRHKPENIVIEMARENQTTQKGQKNSRERMKRIEEGIKELGSQILKEHPVENTQLQNEKLYLYYLQNGRDMYVDQELDINRLSDYDVDHIVPQSFLKDDSIDNKVLTRSDKARGKSDNVPSEEVVKKMKNYWRQLLNAKLITQRKFDNLTKAERGGLSELDKAGFIKRQLVETRQITKHVAQILDSRMNTKYDENDKLIREVKVITLKSKLVSDFRKDFQFYKVREINNYHHAHDAYLNAVVGTALIKKYPKLESEFVYGDYKVYDVRKMIAKSEQEIGKATAKYFFYSNIMNFFKTEITLANGEIRKRPLIETNGETGEIVWDKGRDFATVRKVLSMPQVNIVKKTEVQTGGFSKESILPKRNSDKLIARKKDWDPKKYGGFDSPTVAYSVLVVAKVEKGKSKKLKSVKELLGITIMERSSFEKNPIDFLEAKGYKEVKKDLIIKLPKYSLFELENGRKRMLASAGELQKGNELALPSKYVNFLYLASHYEKLKGSPEDNEQKQLFVEQHKHYLDEIIEQISEFSKRVILADANLDKVLSAYNKHRDKPIREQAENIIHLFTLTNLGAPAAFKYFDTTIDRKRYTSTKEVLDATLIHQSITGLYETRIDLSQLGGDGGGGSPAPGGGGGTLQLEEEYRLFEPESTQKQEMDIWLKNFPQAWAETGGMGTAHCQAPVLIQLKATATPISIRQYPMPHEAYQGIKPHIRRMLDQGILKPCQSPWNTPLLPVKKPGTEDYRPVQDLREVNKRVEDIHPTVPNPYNLLSTLPPSHPWYTVLDLKDAFFCLRLHSESQLLFAFEWRDPEIGLSGQLTWTRLPQGFKNSPTLFNEALHSDLADFRVRYPALVLLQYVDDLLLAAATRTECLEGTKALLETLGNKGYRASAKKAQICLQEVTYLGYSLKDGQRWLTKARKEAILSIPVPKNSRQVREFLGKAGYCRLFIPGFAELAAPLYPLTRPGTLFQWGTEQQLAFEDIKKALLSSPALGLPDITKPFELFIDENSGFAKGVLVQKLGPWKRPVAYLSKKLDTVASGWPPCLRMVAAIAILVKDAGKLTLGQPLTILTSHPVEALVRQPPNKWLSNARMTHYQAMLLDAERVHFGPTVSLNPATLLPLPSGGNHHDCLQILAETHGTRPDLTDQPLPDADLTWYTDGSSFIRNGEREAGAAVTTESEVIWAAPLPPGTSAQRAELIALTQALKMAEGKKLTVYTDSRYAFATTHVHGEIYRRRGWLTSEGKEIKNKNEILALLEALFLPKRLSIIHCPGHQKGDSPQAKGNRLADDTAKKAATETHSSLTVLPAGKRTADGSEFEKRTADGSEFESPKKKAKVE

SEQ ID NO: 1258 - protein, 2093 aa, synthetic construct
MPAAKRVKLDGGDKKYSIGLDIGTNSVGWAVITDEYKVPSKKFKVLGNTDRHSIKKNLIGALLFDSGETAEATRLKRTARRRYTRRKNRICYLQEIFSNEMAKVDDSFFHRLEESFLVEEDKKHERHPIFGNIVDEVAYHEKYPTIYHLRKKLVDSTDKADLRLIYLALAHMIKFRGHFLIEGDLNPDNSDVDKLFIQLVQTYNQLFEENPINASGVDAKAILSARLSKSRRLENLIAQLPGEKKNGLFGNLIALSLGLTPNFKSNFDLAEDAKLQLSKDTYDDDLDNLLAQIGDQYADLFLAAKNLSDAILLSDILRVNTEITKAPLSASMIKRYDEHHQDLTLLKALVRQQLPEKYKEIFFDQSKNGYAGYIDGGASQEEFYKFIKPILEKMDGTEELLVKLNREDLLRKQRTFDNGSIPHQIHLGELHAILRRQEDFYPFLKDNREKIEKILTFRIPYYVGPLARGNSRFAWMTRKSEETITPWNFEEVVDKGASAQSFIERMTNFDKNLPNEKVLPKHSLLYEYFTVYNELTKVKYVTEGMRKPAFLSGEQKKAIVDLLFKTNRKVTVKQLKEDYFKKIECFDSVEISGVEDRFNASLGTYHDLLKIIKDKDFLDNEENEDILEDIVLTLTLFEDREMIEERLKTYAHLFDDKVMKQLKRRRYTGWGRLSRKLINGIRDKQSGKTILDFLKSDGFANRNFMQLIHDDSLTFKEDIQKAQVSGQGDSLHEHIANLAGSPAIKKGILQTVKVVDELVKVMGRHKPENIVIEMARENQTTQKGQKNSRERMKRIEEGIKELGSQILKEHPVENTQLQNEKLYLYYLQNGRDMYVDQELDINRLSDYDVDHIVPQSFLKDDSIDNKVLTRSDKARGKSDNVPSEEVVKKMKNYWRQLLNAKLITQRKFDNLTKAERGGLSELDKAGFIKRQLVETRQITKHVAQILDSRMNTKYDENDKLIREVKVITLKSKLVSDFRKDFQFYKVREINNYHHAHDAYLNAVVGTALIKKYPKLESEFVYGDYKVYDVRKMIAKSEQEIGKATAKYFFYSNIMNFFKTEITLANGEIRKRPLIETNGETGEIVWDKGRDFATVRKVLSMPQVNIVKKTEVQTGGFSKESILPKRNSDKLIARKKDWDPKKYGGFDSPTVAYSVLVVAKVEKGKSKKLKSVKELLGITIMERSSFEKNPIDFLEAKGYKEVKKDLIIKLPKYSLFELENGRKRMLASAGELQKGNELALPSKYVNFLYLASHYEKLKGSPEDNEQKQLFVEQHKHYLDEIIEQISEFSKRVILADANLDKVLSAYNKHRDKPIREQAENIIHLFTLTNLGAPAAFKYFDTTIDRKRYTSTKEVLDATLIHQSITGLYETRIDLSQLGGDGGGSSGGGGGSGGTLQLEEEYRLFEPESTQKQEMDIWLKNFPQAWAETGGMGTAHCQAPVLIQLKATATPISIRQYPMPHEAYQGIKPHIRRMLDQGILKPCQSPWNTPLLPVKKPGTEDYRPVQDLREVNKRVEDIHPTVPNPYNLLSTLPPSHPWYTVLDLKDAFFCLRLHSESQLLFAFEWRDPEIGLSGQLTWTRLPQGFKNSPTLFNEALHSDLADFRVRYPALVLLQYVDDLLLAAATRTECLEGTKALLETLGNKGYRASAKKAQICLQEVTYLGYSLKDGQRWLTKARKEAILSIPVPKNSRQVREFLGKAGYCRLFIPGFAELAAPLYPLTRPGTLFQWGTEQQLAFEDIKKALLSSPALGLPDITKPFELFIDENSGFAKGVLVQKLGPWKRPVAYLSKKLDTVASGWPPCLRMVAAIAILVKDAGKLTLGQPLTILTSHPVEALVRQPPNKWLSNARMTHYQAMLLDAERVHFGPTVSLNPATLLPLPSGGNHHDCLQILAETHGTRPDLTDQPLPDADLTWYTDGSSFIRNGEREAGAAVTTESEVIWAAPLPPGTSAQRAELIALTQALKMAEGKKLTVYTDSRYAFATTHVHGEIYRRRGWLTSEGKEIKNKNEILALLEALFLPKRLSIIHCPGHQKGDSPQAKGNRLADDTAKKAATETHSSLTVLPAGKRTADGSEFEKRTADGSEFESPKKKAKVE

SEQ ID NO: 1259 - protein, 2095 aa, synthetic construct
MPAAKRVKLDGGDKKYSIGLDIGTNSVGWAVITDEYKVPSKKFKVLGNTDRHSIKKNLIGALLFDSGETAEATRLKRTARRRYTRRKNRICYLQEIFSNEMAKVDDSFFHRLEESFLVEEDKKHERHPIFGNIVDEVAYHEKYPTIYHLRKKLVDSTDKADLRLIYLALAHMIKFRGHFLIEGDLNPDNSDVDKLFIQLVQTYNQLFEENPINASGVDAKAILSARLSKSRRLENLIAQLPGEKKNGLFGNLIALSLGLTPNFKSNFDLAEDAKLQLSKDTYDDDLDNLLAQIGDQYADLFLAAKNLSDAILLSDILRVNTEITKAPLSASMIKRYDEHHQDLTLLKALVRQQLPEKYKEIFFDQSKNGYAGYIDGGASQEEFYKFIKPILEKMDGTEELLVKLNREDLLRKQRTFDNGSIPHQIHLGELHAILRRQEDFYPFLKDNREKIEKILTFRIPYYVGPLARGNSRFAWMTRKSEETITPWNFEEVVDKGASAQSFIERMTNFDKNLPNEKVLPKHSLLYEYFTVYNELTKVKYVTEGMRKPAFLSGEQKKAIVDLLFKTNRKVTVKQLKEDYFKKIECFDSVEISGVEDRFNASLGTYHDLLKIIKDKDFLDNEENEDILEDIVLTLTLFEDREMIEERLKTYAHLFDDKVMKQLKRRRYTGWGRLSRKLINGIRDKQSGKTILDFLKSDGFANRNFMQLIHDDSLTFKEDIQKAQVSGQGDSLHEHIANLAGSPAIKKGILQTVKVVDELVKVMGRHKPENIVIEMARENQTTQKGQKNSRERMKRIEEGIKELGSQILKEHPVENTQLQNEKLYLYYLQNGRDMYVDQELDINRLSDYDVDHIVPQSFLKDDSIDNKVLTRSDKARGKSDNVPSEEVVKKMKNYWRQLLNAKLITQRKFDNLTKAERGGLSELDKAGFIKRQLVETRQITKHVAQILDSRMNTKYDENDKLIREVKVITLKSKLVSDFRKDFQFYKVREINNYHHAHDAYLNAVVGTALIKKYPKLESEFVYGDYKVYDVRKMIAKSEQEIGKATAKYFFYSNIMNFFKTEITLANGEIRKRPLIETNGETGEIVWDKGRDFATVRKVLSMPQVNIVKKTEVQTGGFSKESILPKRNSDKLIARKKDWDPKKYGGFDSPTVAYSVLVVAKVEKGKSKKLKSVKELLGITIMERSSFEKNPIDFLEAKGYKEVKKDLIIKLPKYSLFELENGRKRMLASAGELQKGNELALPSKYVNFLYLASHYEKLKGSPEDNEQKQLFVEQHKHYLDEIIEQISEFSKRVILADANLDKVLSAYNKHRDKPIREQAENIIHLFTLTNLGAPAAFKYFDTTIDRKRYTSTKEVLDATLIHQSITGLYETRIDLSQLGGDGGGGGEAAAKGGSGGTLQLEEEYRLFEPESTQKQEMDIWLKNFPQAWAETGGMGTAHCQAPVLIQLKATATPISIRQYPMPHEAYQGIKPHIRRMLDQGILKPCQSPWNTPLLPVKKPGTEDYRPVQDLREVNKRVEDIHPTVPNPYNLLSTLPPSHPWYTVLDLKDAFFCLRLHSESQLLFAFEWRDPEIGLSGQLTWTRLPQGFKNSPTLFNEALHSDLADFRVRYPALVLLQYVDDLLLAAATRTECLEGTKALLETLGNKGYRASAKKAQICLQEVTYLGYSLKDGQRWLTKARKEAILSIPVPKNSRQVREFLGKAGYCRLFIPGFAELAAPLYPLTRPGTLFQWGTEQQLAFEDIKKALLSSPALGLPDITKPFELFIDENSGFAKGVLVQKLGPWKRPVAYLSKKLDTVASGWPPCLRMVAAIAILVKDAGKLTLGQPLTILTSHPVEALVRQPPNKWLSNARMTHYQAMLLDAERVHFGPTVSLNPATLLPLPSGGNHHDCLQILAETHGTRPDLTDQPLPDADLTWYTDGSSFIRNGEREAGAAVTTESEVIWAAPLPPGTSAQRAELIALTQALKMAEGKKLTVYTDSRYAFATTHVHGEIYRRRGWLTSEGKEIKNKNEILALLEALFLPKRLSIIHCPGHQKGDSPQAKGNRLADDTAKKAATETHSSLTVLPAGKRTADGSEFEKRTADGSEFESPKKKAKVE

SEQ ID NO: 1260 - protein, 2089 aa, synthetic construct
MPAAKRVKLDGGDKKYSIGLDIGTNSVGWAVITDEYKVPSKKFKVLGNTDRHSIKKNLIGALLFDSGETAEATRLKRTARRRYTRRKNRICYLQEIFSNEMAKVDDSFFHRLEESFLVEEDKKHERHPIFGNIVDEVAYHEKYPTIYHLRKKLVDSTDKADLRLIYLALAHMIKFRGHFLIEGDLNPDNSDVDKLFIQLVQTYNQLFEENPINASGVDAKAILSARLSKSRRLENLIAQLPGEKKNGLFGNLIALSLGLTPNFKSNFDLAEDAKLQLSKDTYDDDLDNLLAQIGDQYADLFLAAKNLSDAILLSDILRVNTEITKAPLSASMIKRYDEHHQDLTLLKALVRQQLPEKYKEIFFDQSKNGYAGYIDGGASQEEFYKFIKPILEKMDGTEELLVKLNREDLLRKQRTFDNGSIPHQIHLGELHAILRRQEDFYPFLKDNREKIEKILTFRIPYYVGPLARGNSRFAWMTRKSEETITPWNFEEVVDKGASAQSFIERMTNFDKNLPNEKVLPKHSLLYEYFTVYNELTKVKYVTEGMRKPAFLSGEQKKAIVDLLFKTNRKVTVKQLKEDYFKKIECFDSVEISGVEDRFNASLGTYHDLLKIIKDKDFLDNEENEDILEDIVLTLTLFEDREMIEERLKTYAHLFDDKVMKQLKRRRYTGWGRLSRKLINGIRDKQSGKTILDFLKSDGFANRNFMQLIHDDSLTFKEDIQKAQVSGQGDSLHEHIANLAGSPAIKKGILQTVKVVDELVKVMGRHKPENIVIEMARENQTTQKGQKNSRERMKRIEEGIKELGSQILKEHPVENTQLQNEKLYLYYLQNGRDMYVDQELDINRLSDYDVDHIVPQSFLKDDSIDNKVLTRSDKARGKSDNVPSEEVVKKMKNYWRQLLNAKLITQRKFDNLTKAERGGLSELDKAGFIKRQLVETRQITKHVAQILDSRMNTKYDENDKLIREVKVITLKSKLVSDFRKDFQFYKVREINNYHHAHDAYLNAVVGTALIKKYPKLESEFVYGDYKVYDVRKMIAKSEQEIGKATAKYFFYSNIMNFFKTEITLANGEIRKRPLIETNGETGEIVWDKGRDFATVRKVLSMPQVNIVKKTEVQTGGFSKESILPKRNSDKLIARKKDWDPKKYGGFDSPTVAYSVLVVAKVEKGKSKKLKSVKELLGITIMERSSFEKNPIDFLEAKGYKEVKKDLIIKLPKYSLFELENGRKRMLASAGELQKGNELALPSKYVNFLYLASHYEKLKGSPEDNEQKQLFVEQHKHYLDEIIEQISEFSKRVILADANLDKVLSAYNKHRDKPIREQAENIIHLFTLTNLGAPAAFKYFDTTIDRKRYTSTKEVLDATLIHQSITGLYETRIDLSQLGGDGGEAAAKGGTLQLEEEYRLFEPESTQKQEMDIWLKNFPQAWAETGGMGTAHCQAPVLIQLKATATPISIRQYPMPHEAYQGIKPHIRRMLDQGILKPCQSPWNTPLLPVKKPGTEDYRPVQDLREVNKRVEDIHPTVPNPYNLLSTLPPSHPWYTVLDLKDAFFCLRLHSESQLLFAFEWRDPEIGLSGQLTWTRLPQGFKNSPTLFNEALHSDLADFRVRYPALVLLQYVDDLLLAAATRTECLEGTKALLETLGNKGYRASAKKAQICLQEVTYLGYSLKDGQRWLTKARKEAILSIPVPKNSRQVREFLGKAGYCRLFIPGFAELAAPLYPLTRPGTLFQWGTEQQLAFEDIKKALLSSPALGLPDITKPFELFIDENSGFAKGVLVQKLGPWKRPVAYLSKKLDTVASGWPPCLRMVAAIAILVKDAGKLTLGQPLTILTSHPVEALVRQPPNKWLSNARMTHYQAMLLDAERVHFGPTVSLNPATLLPLPSGGNHHDCLQILAETHGTRPDLTDQPLPDADLTWYTDGSSFIRNGEREAGAAVTTESEVIWAAPLPPGTSAQRAELIALTQALKMAEGKKLTVYTDSRYAFATTHVHGEIYRRRGWLTSEGKEIKNKNEILALLEALFLPKRLSIIHCPGHQKGDSPQAKGNRLADDTAKKAATETHSSLTVLPAGKRTADGSEFEKRTADGSEFESPKKKAKVE

SEQ ID NO: 1261 - protein, 2095 aa, synthetic construct
MPAAKRVKLDGGDKKYSIGLDIGTNSVGWAVITDEYKVPSKKFKVLGNTDRHSIKKNLIGALLFDSGETAEATRLKRTARRRYTRRKNRICYLQEIFSNEMAKVDDSFFHRLEESFLVEEDKKHERHPIFGNIVDEVAYHEKYPTIYHLRKKLVDSTDKADLRLIYLALAHMIKFRGHFLIEGDLNPDNSDVDKLFIQLVQTYNQLFEENPINASGVDAKAILSARLSKSRRLENLIAQLPGEKKNGLFGNLIALSLGLTPNFKSNFDLAEDAKLQLSKDTYDDDLDNLLAQIGDQYADLFLAAKNLSDAILLSDILRVNTEITKAPLSASMIKRYDEHHQDLTLLKALVRQQLPEKYKEIFFDQSKNGYAGYIDGGASQEEFYKFIKPILEKMDGTEELLVKLNREDLLRKQRTFDNGSIPHQIHLGELHAILRRQEDFYPFLKDNREKIEKILTFRIPYYVGPLARGNSRFAWMTRKSEETITPWNFEEVVDKGASAQSFIERMTNFDKNLPNEKVLPKHSLLYEYFTVYNELTKVKYVTEGMRKPAFLSGEQKKAIVDLLFKTNRKVTVKQLKEDYFKKIECFDSVEISGVEDRFNASLGTYHDLLKIIKDKDFLDNEENEDILEDIVLTLTLFEDREMIEERLKTYAHLFDDKVMKQLKRRRYTGWGRLSRKLINGIRDKQSGKTILDFLKSDGFANRNFMQLIHDDSLTFKEDIQKAQVSGQGDSLHEHIANLAGSPAIKKGILQTVKVVDELVKVMGRHKPENIVIEMARENQTTQKGQKNSRERMKRIEEGIKELGSQILKEHPVENTQLQNEKLYLYYLQNGRDMYVDQELDINRLSDYDVDHIVPQSFLKDDSIDNKVLTRSDKARGKSDNVPSEEVVKKMKNYWRQLLNAKLITQRKFDNLTKAERGGLSELDKAGFIKRQLVETRQITKHVAQILDSRMNTKYDENDKLIREVKVITLKSKLVSDFRKDFQFYKVREINNYHHAHDAYLNAVVGTALIKKYPKLESEFVYGDYKVYDVRKMIAKSEQEIGKATAKYFFYSNIMNFFKTEITLANGEIRKRPLIETNGETGEIVWDKGRDFATVRKVLSMPQVNIVKKTEVQTGGFSKESILPKRNSDKLIARKKDWDPKKYGGFDSPTVAYSVLVVAKVEKGKSKKLKSVKELLGITIMERSSFEKNPIDFLEAKGYKEVKKDLIIKLPKYSLFELENGRKRMLASAGELQKGNELALPSKYVNFLYLASHYEKLKGSPEDNEQKQLFVEQHKHYLDEIIEQISEFSKRVILADANLDKVLSAYNKHRDKPIREQAENIIHLFTLTNLGAPAAFKYFDTTIDRKRYTSTKEVLDATLIHQSITGLYETRIDLSQLGGDGGGGGGSSEAAAKGGTLQLEEEYRLFEPESTQKQEMDIWLKNFPQAWAETGGMGTAHCQAPVLIQLKATATPISIRQYPMPHEAYQGIKPHIRRMLDQGILKPCQSPWNTPLLPVKKPGTEDYRPVQDLREVNKRVEDIHPTVPNPYNLLSTLPPSHPWYTVLDLKDAFFCLRLHSESQLLFAFEWRDPEIGLSGQLTWTRLPQGFKNSPTLFNEALHSDLADFRVRYPALVLLQYVDDLLLAAATRTECLEGTKALLETLGNKGYRASAKKAQICLQEVTYLGYSLKDGQRWLTKARKEAILSIPVPKNSRQVREFLGKAGYCRLFIPGFAELAAPLYPLTRPGTLFQWGTEQQLAFEDIKKALLSSPALGLPDITKPFELFIDENSGFAKGVLVQKLGPWKRPVAYLSKKLDTVASGWPPCLRMVAAIAILVKDAGKLTLGQPLTILTSHPVEALVRQPPNKWLSNARMTHYQAMLLDAERVHFGPTVSLNPATLLPLPSGGNHHDCLQILAETHGTRPDLTDQPLPDADLTWYTDGSSFIRNGEREAGAAVTTESEVIWAAPLPPGTSAQRAELIALTQALKMAEGKKLTVYTDSRYAFATTHVHGEIYRRRGWLTSEGKEIKNKNEILALLEALFLPKRLSIIHCPGHQKGDSPQAKGNRLADDTAKKAATETHSSLTVLPAGKRTADGSEFEKRTADGSEFESPKKKAKVE

SEQ ID NO: 1262 - protein, 2095 aa, synthetic construct
MPAAKRVKLDGGDKKYSIGLDIGTNSVGWAVITDEYKVPSKKFKVLGNTDRHSIKKNLIGALLFDSGETAEATRLKRTARRRYTRRKNRICYLQEIFSNEMAKVDDSFFHRLEESFLVEEDKKHERHPIFGNIVDEVAYHEKYPTIYHLRKKLVDSTDKADLRLIYLALAHMIKFRGHFLIEGDLNPDNSDVDKLFIQLVQTYNQLFEENPINASGVDAKAILSARLSKSRRLENLIAQLPGEKKNGLFGNLIALSLGLTPNFKSNFDLAEDAKLQLSKDTYDDDLDNLLAQIGDQYADLFLAAKNLSDAILLSDILRVNTEITKAPLSASMIKRYDEHHQDLTLLKALVRQQLPEKYKEIFFDQSKNGYAGYIDGGASQEEFYKFIKPILEKMDGTEELLVKLNREDLLRKQRTFDNGSIPHQIHLGELHAILRRQEDFYPFLKDNREKIEKILTFRIPYYVGPLARGNSRFAWMTRKSEETITPWNFEEVVDKGASAQSFIERMTNFDKNLPNEKVLPKHSLLYEYFTVYNELTKVKYVTEGMRKPAFLSGEQKKAIVDLLFKTNRKVTVKQLKEDYFKKIECFDSVEISGVEDRFNASLGTYHDLLKIIKDKDFLDNEENEDILEDIVLTLTLFEDREMIEERLKTYAHLFDDKVMKQLKRRRYTGWGRLSRKLINGIRDKQSGKTILDFLKSDGFANRNFMQLIHDDSLTFKEDIQKAQVSGQGDSLHEHIANLAGSPAIKKGILQTVKVVDELVKVMGRHKPENIVIEMARENQTTQKGQKNSRERMKRIEEGIKELGSQILKEHPVENTQLQNEKLYLYYLQNGRDMYVDQELDINRLSDYDVDHIVPQSFLKDDSIDNKVLTRSDKARGKSDNVPSEEVVKKMKNYWRQLLNAKLITQRKFDNLTKAERGGLSELDKAGFIKRQLVETRQITKHVAQILDSRMNTKYDENDKLIREVKVITLKSKLVSDFRKDFQFYKVREINNYHHAHDAYLNAVVGTALIKKYPKLESEFVYGDYKVYDVRKMIAKSEQEIGKATAKYFFYSNIMNFFKTEITLANGEIRKRPLIETNGETGEIVWDKGRDFATVRKVLSMPQVNIVKKTEVQTGGFSKESILPKRNSDKLIARKKDWDPKKYGGFDSPTVAYSVLVVAKVEKGKSKKLKSVKELLGITIMERSSFEKNPIDFLEAKGYKEVKKDLIIKLPKYSLFELENGRKRMLASAGELQKGNELALPSKYVNFLYLASHYEKLKGSPEDNEQKQLFVEQHKHYLDEIIEQISEFSKRVILADANLDKVLSAYNKHRDKPIREQAENIIHLFTLTNLGAPAAFKYFDTTIDRKRYTSTKEVLDATLIHQSITGLYETRIDLSQLGGDGGGGGEAAAKPAPGGTLQLEEEYRLFEPESTQKQEMDIWLKNFPQAWAETGGMGTAHCQAPVLIQLKATATPISIRQYPMPHEAYQGIKPHIRRMLDQGILKPCQSPWNTPLLPVKKPGTEDYRPVQDLREVNKRVEDIHPTVPNPYNLLSTLPPSHPWYTVLDLKDAFFCLRLHSESQLLFAFEWRDPEIGLSGQLTWTRLPQGFKNSPTLFNEALHSDLADFRVRYPALVLLQYVDDLLLAAATRTECLEGTKALLETLGNKGYRASAKKAQICLQEVTYLGYSLKDGQRWLTKARKEAILSIPVPKNSRQVREFLGKAGYCRLFIPGFAELAAPLYPLTRPGTLFQWGTEQQLAFEDIKKALLSSPALGLPDITKPFELFIDENSGFAKGVLVQKLGPWKRPVAYLSKKLDTVASGWPPCLRMVAAIAILVKDAGKLTLGQPLTILTSHPVEALVRQPPNKWLSNARMTHYQAMLLDAERVHFGPTVSLNPATLLPLPSGGNHHDCLQILAETHGTRPDLTDQPLPDADLTWYTDGSSFIRNGEREAGAAVTTESEVIWAAPLPPGTSAQRAELIALTQALKMAEGKKLTVYTDSRYAFATTHVHGEIYRRRGWLTSEGKEIKNKNEILALLEALFLPKRLSIIHCPGHQKGDSPQAKGNRLADDTAKKAATETHSSLTVLPAGKRTADGSEFEKRTADGSEFESPKKKAKVE

SEQ ID NO: 1263 - protein, 2093 aa, synthetic construct
MPAAKRVKLDGGDKKYSIGLDIGTNSVGWAVITDEYKVPSKKFKVLGNTDRHSIKKNLIGALLFDSGETAEATRLKRTARRRYTRRKNRICYLQEIFSNEMAKVDDSFFHRLEESFLVEEDKKHERHPIFGNIVDEVAYHEKYPTIYHLRKKLVDSTDKADLRLIYLALAHMIKFRGHFLIEGDLNPDNSDVDKLFIQLVQTYNQLFEENPINASGVDAKAILSARLSKSRRLENLIAQLPGEKKNGLFGNLIALSLGLTPNFKSNFDLAEDAKLQLSKDTYDDDLDNLLAQIGDQYADLFLAAKNLSDAILLSDILRVNTEITKAPLSASMIKRYDEHHQDLTLLKALVRQQLPEKYKEIFFDQSKNGYAGYIDGGASQEEFYKFIKPILEKMDGTEELLVKLNREDLLRKQRTFDNGSIPHQIHLGELHAILRRQEDFYPFLKDNREKIEKILTFRIPYYVGPLARGNSRFAWMTRKSEETITPWNFEEVVDKGASAQSFIERMTNFDKNLPNEKVLPKHSLLYEYFTVYNELTKVKYVTEGMRKPAFLSGEQKKAIVDLLFKTNRKVTVKQLKEDYFKKIECFDSVEISGVEDRFNASLGTYHDLLKIIKDKDFLDNEENEDILEDIVLTLTLFEDREMIEERLKTYAHLFDDKVMKQLKRRRYTGWGRLSRKLINGIRDKQSGKTILDFLKSDGFANRNFMQLIHDDSLTFKEDIQKAQVSGQGDSLHEHIANLAGSPAIKKGILQTVKVVDELVKVMGRHKPENIVIEMARENQTTQKGQKNSRERMKRIEEGIKELGSQILKEHPVENTQLQNEKLYLYYLQNGRDMYVDQELDINRLSDYDVDHIVPQSFLKDDSIDNKVLTRSDKARGKSDNVPSEEVVKKMKNYWRQLLNAKLITQRKFDNLTKAERGGLSELDKAGFIKRQLVETRQITKHVAQILDSRMNTKYDENDKLIREVKVITLKSKLVSDFRKDFQFYKVREINNYHHAHDAYLNAVVGTALIKKYPKLESEFVYGDYKVYDVRKMIAKSEQEIGKATAKYFFYSNIMNFFKTEITLANGEIRKRPLIETNGETGEIVWDKGRDFATVRKVLSMPQVNIVKKTEVQTGGFSKESILPKRNSDKLIARKKDWDPKKYGGFDSPTVAYSVLVVAKVEKGKSKKLKSVKELLGITIMERSSFEKNPIDFLEAKGYKEVKKDLIIKLPKYSLFELENGRKRMLASAGELQKGNELALPSKYVNFLYLASHYEKLKGSPEDNEQKQLFVEQHKHYLDEIIEQISEFSKRVILADANLDKVLSAYNKHRDKPIREQAENIIHLFTLTNLGAPAAFKYFDTTIDRKRYTSTKEVLDATLIHQSITGLYETRIDLSQLGGDGGGGSPAPGSSGGTLQLEEEYRLFEPESTQKQEMDIWLKNFPQAWAETGGMGTAHCQAPVLIQLKATATPISIRQYPMPHEAYQGIKPHIRRMLDQGILKPCQSPWNTPLLPVKKPGTEDYRPVQDLREVNKRVEDIHPTVPNPYNLLSTLPPSHPWYTVLDLKDAFFCLRLHSESQLLFAFEWRDPEIGLSGQLTWTRLPQGFKNSPTLFNEALHSDLADFRVRYPALVLLQYVDDLLLAAATRTECLEGTKALLETLGNKGYRASAKKAQICLQEVTYLGYSLKDGQRWLTKARKEAILSIPVPKNSRQVREFLGKAGYCRLFIPGFAELAAPLYPLTRPGTLFQWGTEQQLAFEDIKKALLSSPALGLPDITKPFELFIDENSGFAKGVLVQKLGPWKRPVAYLSKKLDTVASGWPPCLRMVAAIAILVKDAGKLTLGQPLTILTSHPVEALVRQPPNKWLSNARMTHYQAMLLDAERVHFGPTVSLNPATLLPLPSGGNHHDCLQILAETHGTRPDLTDQPLPDADLTWYTDGSSFIRNGEREAGAAVTTESEVIWAAPLPPGTSAQRAELIALTQALKMAEGKKLTVYTDSRYAFATTHVHGEIYRRRGWLTSEGKEIKNKNEILALLEALFLPKRLSIIHCPGHQKGDSPQAKGNRLADDTAKKAATETHSSLTVLPAGKRTADGSEFEKRTADGSEFESPKKKAKVE

SEQ ID NO: 1264 - protein, 2095 aa, synthetic construct
MPAAKRVKLDGGDKKYSIGLDIGTNSVGWAVITDEYKVPSKKFKVLGNTDRHSIKKNLIGALLFDSGETAEATRLKRTARRRYTRRKNRICYLQEIFSNEMAKVDDSFFHRLEESFLVEEDKKHERHPIFGNIVDEVAYHEKYPTIYHLRKKLVDSTDKADLRLIYLALAHMIKFRGHFLIEGDLNPDNSDVDKLFIQLVQTYNQLFEENPINASGVDAKAILSARLSKSRRLENLIAQLPGEKKNGLFGNLIALSLGLTPNFKSNFDLAEDAKLQLSKDTYDDDLDNLLAQIGDQYADLFLAAKNLSDAILLSDILRVNTEITKAPLSASMIKRYDEHHQDLTLLKALVRQQLPEKYKEIFFDQSKNGYAGYIDGGASQEEFYKFIKPILEKMDGTEELLVKLNREDLLRKQRTFDNGSIPHQIHLGELHAILRRQEDFYPFLKDNREKIEKILTFRIPYYVGPLARGNSRFAWMTRKSEETITPWNFEEVVDKGASAQSFIERMTNFDKNLPNEKVLPKHSLLYEYFTVYNELTKVKYVTEGMRKPAFLSGEQKKAIVDLLFKTNRKVTVKQLKEDYFKKIECFDSVEISGVEDRFNASLGTYHDLLKIIKDKDFLDNEENEDILEDIVLTLTLFEDREMIEERLKTYAHLFDDKVMKQLKRRRYTGWGRLSRKLINGIRDKQSGKTILDFLKSDGFANRNFMQLIHDDSLTFKEDIQKAQVSGQGDSLHEHIANLAGSPAIKKGILQTVKVVDELVKVMGRHKPENIVIEMARENQTTQKGQKNSRERMKRIEEGIKELGSQILKEHPVENTQLQNEKLYLYYLQNGRDMYVDQELDINRLSDYDVDHIVPQSFLKDDSIDNKVLTRSDKARGKSDNVPSEEVVKKMKNYWRQLLNAKLITQRKFDNLTKAERGGLSELDKAGFIKRQLVETRQITKHVAQILDSRMNTKYDENDKLIREVKVITLKSKLVSDFRKDFQFYKVREINNYHHAHDAYLNAVVGTALIKKYPKLESEFVYGDYKVYDVRKMIAKSEQEIGKATAKYFFYSNIMNFFKTEITLANGEIRKRPLIETNGETGEIVWDKGRDFATVRKVLSMPQVNIVKKTEVQTGGFSKESILPKRNSDKLIARKKDWDPKKYGGFDSPTVAYSVLVVAKVEKGKSKKLKSVKELLGITIMERSSFEKNPIDFLEAKGYKEVKKDLIIKLPKYSLFELENGRKRMLASAGELQKGNELALPSKYVNFLYLASHYEKLKGSPEDNEQKQLFVEQHKHYLDEIIEQISEFSKRVILADANLDKVLSAYNKHRDKPIREQAENIIHLFTLTNLGAPAAFKYFDTTIDRKRYTSTKEVLDATLIHQSITGLYETRIDLSQLGGDGGPAPEAAAKGGSGGTLQLEEEYRLFEPESTQKQEMDIWLKNFPQAWAETGGMGTAHCQAPVLIQLKATATPISIRQYPMPHEAYQGIKPHIRRMLDQGILKPCQSPWNTPLLPVKKPGTEDYRPVQDLREVNKRVEDIHPTVPNPYNLLSTLPPSHPWYTVLDLKDAFFCLRLHSESQLLFAFEWRDPEIGLSGQLTWTRLPQGFKNSPTLFNEALHSDLADFRVRYPALVLLQYVDDLLLAAATRTECLEGTKALLETLGNKGYRASAKKAQICLQEVTYLGYSLKDGQRWLTKARKEAILSIPVPKNSRQVREFLGKAGYCRLFIPGFAELAAPLYPLTRPGTLFQWGTEQQLAFEDIKKALLSSPALGLPDITKPFELFIDENSGFAKGVLVQKLGPWKRPVAYLSKKLDTVASGWPPCLRMVAAIAILVKDAGKLTLGQPLTILTSHPVEALVRQPPNKWLSNARMTHYQAMLLDAERVHFGPTVSLNPATLLPLPSGGNHHDCLQILAETHGTRPDLTDQPLPDADLTWYTDGSSFIRNGEREAGAAVTTESEVIWAAPLPPGTSAQRAELIALTQALKMAEGKKLTVYTDSRYAFATTHVHGEIYRRRGWLTSEGKEIKNKNEILALLEALFLPKRLSIIHCPGHQKGDSPQAKGNRLADDTAKKAATETHSSLTVLPAGKRTADGSEFEKRTADGSEFESPKKKAKVE

SEQ ID NO: 1265 - protein, 2095 aa, synthetic construct
MPAAKRVKLDGGDKKYSIGLDIGTNSVGWAVITDEYKVPSKKFKVLGNTDRHSIKKNLIGALLFDSGETAEATRLKRTARRRYTRRKNRICYLQEIFSNEMAKVDDSFFHRLEESFLVEEDKKHERHPIFGNIVDEVAYHEKYPTIYHLRKKLVDSTDKADLRLIYLALAHMIKFRGHFLIEGDLNPDNSDVDKLFIQLVQTYNQLFEENPINASGVDAKAILSARLSKSRRLENLIAQLPGEKKNGLFGNLIALSLGLTPNFKSNFDLAEDAKLQLSKDTYDDDLDNLLAQIGDQYADLFLAAKNLSDAILLSDILRVNTEITKAPLSASMIKRYDEHHQDLTLLKALVRQQLPEKYKEIFFDQSKNGYAGYIDGGASQEEFYKFIKPILEKMDGTEELLVKLNREDLLRKQRTFDNGSIPHQIHLGELHAILRRQEDFYPFLKDNREKIEKILTFRIPYYVGPLARGNSRFAWMTRKSEETITPWNFEEVVDKGASAQSFIERMTNFDKNLPNEKVLPKHSLLYEYFTVYNELTKVKYVTEGMRKPAFLSGEQKKAIVDLLFKTNRKVTVKQLKEDYFKKIECFDSVEISGVEDRFNASLGTYHDLLKIIKDKDFLDNEENEDILEDIVLTLTLFEDREMIEERLKTYAHLFDDKVMKQLKRRRYTGWGRLSRKLINGIRDKQSGKTILDFLKSDGFANRNFMQLIHDDSLTFKEDIQKAQVSGQGDSLHEHIANLAGSPAIKKGILQTVKVVDELVKVMGRHKPENIVIEMARENQTTQKGQKNSRERMKRIEEGIKELGSQILKEHPVENTQLQNEKLYLYYLQNGRDMYVDQELDINRLSDYDVDHIVPQSFLKDDSIDNKVLTRSDKARGKSDNVPSEEVVKKMKNYWRQLLNAKLITQRKFDNLTKAERGGLSELDKAGFIKRQLVETRQITKHVAQILDSRMNTKYDENDKLIREVKVITLKSKLVSDFRKDFQFYKVREINNYHHAHDAYLNAVVGTALIKKYPKLESEFVYGDYKVYDVRKMIAKSEQEIGKATAKYFFYSNIMNFFKTEITLANGEIRKRPLIETNGETGEIVWDKGRDFATVRKVLSMPQVNIVKKTEVQTGGFSKESILPKRNSDKLIARKKDWDPKKYGGFDSPTVAYSVLVVAKVEKGKSKKLKSVKELLGITIMERSSFEKNPIDFLEAKGYKEVKKDLIIKLPKYSLFELENGRKRMLASAGELQKGNELALPSKYVNFLYLASHYEKLKGSPEDNEQKQLFVEQHKHYLDEIIEQISEFSKRVILADANLDKVLSAYNKHRDKPIREQAENIIHLFTLTNLGAPAAFKYFDTTIDRKRYTSTKEVLDATLIHQSITGLYETRIDLSQLGGDGGGSSEAAAKGGSGGTLQLEEEYRLFEPESTQKQEMDIWLKNFPQAWAETGGMGTAHCQAPVLIQLKATATPISIRQYPMPHEAYQGIKPHIRRMLDQGILKPCQSPWNTPLLPVKKPGTEDYRPVQDLREVNKRVEDIHPTVPNPYNLLSTLPPSHPWYTVLDLKDAFFCLRLHSESQLLFAFEWRDPEIGLSGQLTWTRLPQGFKNSPTLFNEALHSDLADFRVRYPALVLLQYVDDLLLAAATRTECLEGTKALLETLGNKGYRASAKKAQICLQEVTYLGYSLKDGQRWLTKARKEAILSIPVPKNSRQVREFLGKAGYCRLFIPGFAELAAPLYPLTRPGTLFQWGTEQQLAFEDIKKALLSSPALGLPDITKPFELFIDENSGFAKGVLVQKLGPWKRPVAYLSKKLDTVASGWPPCLRMVAAIAILVKDAGKLTLGQPLTILTSHPVEALVRQPPNKWLSNARMTHYQAMLLDAERVHFGPTVSLNPATLLPLPSGGNHHDCLQILAETHGTRPDLTDQPLPDADLTWYTDGSSFIRNGEREAGAAVTTESEVIWAAPLPPGTSAQRAELIALTQALKMAEGKKLTVYTDSRYAFATTHVHGEIYRRRGWLTSEGKEIKNKNEILALLEALFLPKRLSIIHCPGHQKGDSPQAKGNRLADDTAKKAATETHSSLTVLPAGKRTADGSEFEKRTADGSEFESPKKKAKVE

SEQ ID NO: 1266 - protein, 2095 aa, synthetic construct
MPAAKRVKLDGGDKKYSIGLDIGTNSVGWAVITDEYKVPSKKFKVLGNTDRHSIKKNLIGALLFDSGETAEATRLKRTARRRYTRRKNRICYLQEIFSNEMAKVDDSFFHRLEESFLVEEDKKHERHPIFGNIVDEVAYHEKYPTIYHLRKKLVDSTDKADLRLIYLALAHMIKFRGHFLIEGDLNPDNSDVDKLFIQLVQTYNQLFEENPINASGVDAKAILSARLSKSRRLENLIAQLPGEKKNGLFGNLIALSLGLTPNFKSNFDLAEDAKLQLSKDTYDDDLDNLLAQIGDQYADLFLAAKNLSDAILLSDILRVNTEITKAPLSASMIKRYDEHHQDLTLLKALVRQQLPEKYKEIFFDQSKNGYAGYIDGGASQEEFYKFIKPILEKMDGTEELLVKLNREDLLRKQRTFDNGSIPHQIHLGELHAILRRQEDFYPFLKDNREKIEKILTFRIPYYVGPLARGNSRFAWMTRKSEETITPWNFEEVVDKGASAQSFIERMTNFDKNLPNEKVLPKHSLLYEYFTVYNELTKVKYVTEGMRKPAFLSGEQKKAIVDLLFKTNRKVTVKQLKEDYFKKIECFDSVEISGVEDRFNASLGTYHDLLKIIKDKDFLDNEENEDILEDIVLTLTLFEDREMIEERLKTYAHLFDDKVMKQLKRRRYTGWGRLSRKLINGIRDKQSGKTILDFLKSDGFANRNFMQLIHDDSLTFKEDIQKAQVSGQGDSLHEHIANLAGSPAIKKGILQTVKVVDELVKVMGRHKPENIVIEMARENQTTQKGQKNSRERMKRIEEGIKELGSQILKEHPVENTQLQNEKLYLYYLQNGRDMYVDQELDINRLSDYDVDHIVPQSFLKDDSIDNKVLTRSDKARGKSDNVPSEEVVKKMKNYWRQLLNAKLITQRKFDNLTKAERGGLSELDKAGFIKRQLVETRQITKHVAQILDSRMNTKYDENDKLIREVKVITLKSKLVSDFRKDFQFYKVREINNYHHAHDAYLNAVVGTALIKKYPKLESEFVYGDYKVYDVRKMIAKSEQEIGKATAKYFFYSNIMNFFKTEITLANGEIRKRPLIETNGETGEIVWDKGRDFATVRKVLSMPQVNIVKKTEVQTGGFSKESILPKRNSDKLIARKKDWDPKKYGGFDSPTVAYSVLVVAKVEKGKSKKLKSVKELLGITIMERSSFEKNPIDFLEAKGYKEVKKDLIIKLPKYSLFELENGRKRMLASAGELQKGNELALPSKYVNFLYLASHYEKLKGSPEDNEQKQLFVEQHKHYLDEIIEQISEFSKRVILADANLDKVLSAYNKHRDKPIREQAENIIHLFTLTNLGAPAAFKYFDTTIDRKRYTSTKEVLDATLIHQSITGLYETRIDLSQLGGDGGGGSPAPEAAAKGGTLQLEEEYRLFEPESTQKQEMDIWLKNFPQAWAETGGMGTAHCQAPVLIQLKATATPISIRQYPMPHEAYQGIKPHIRRMLDQGILKPCQSPWNTPLLPVKKPGTEDYRPVQDLREVNKRVEDIHPTVPNPYNLLSTLPPSHPWYTVLDLKDAFFCLRLHSESQLLFAFEWRDPEIGLSGQLTWTRLPQGFKNSPTLFNEALHSDLADFRVRYPALVLLQYVDDLLLAAATRTECLEGTKALLETLGNKGYRASAKKAQICLQEVTYLGYSLKDGQRWLTKARKEAILSIPVPKNSRQVREFLGKAGYCRLFIPGFAELAAPLYPLTRPGTLFQWGTEQQLAFEDIKKALLSSPALGLPDITKPFELFIDENSGFAKGVLVQKLGPWKRPVAYLSKKLDTVASGWPPCLRMVAAIAILVKDAGKLTLGQPLTILTSHPVEALVRQPPNKWLSNARMTHYQAMLLDAERVHFGPTVSLNPATLLPLPSGGNHHDCLQILAETHGTRPDLTDQPLPDADLTWYTDGSSFIRNGEREAGAAVTTESEVIWAAPLPPGTSAQRAELIALTQALKMAEGKKLTVYTDSRYAFATTHVHGEIYRRRGWLTSEGKEIKNKNEILALLEALFLPKRLSIIHCPGHQKGDSPQAKGNRLADDTAKKAATETHSSLTVLPAGKRTADGSEFEKRTADGSEFESPKKKAKVE

SEQ ID NO: 1267 - protein, 2092 aa, synthetic construct
MPAAKRVKLDGGDKKYSIGLDIGTNSVGWAVITDEYKVPSKKFKVLGNTDRHSIKKNLIGALLFDSGETAEATRLKRTARRRYTRRKNRICYLQEIFSNEMAKVDDSFFHRLEESFLVEEDKKHERHPIFGNIVDEVAYHEKYPTIYHLRKKLVDSTDKADLRLIYLALAHMIKFRGHFLIEGDLNPDNSDVDKLFIQLVQTYNQLFEENPINASGVDAKAILSARLSKSRRLENLIAQLPGEKKNGLFGNLIALSLGLTPNFKSNFDLAEDAKLQLSKDTYDDDLDNLLAQIGDQYADLFLAAKNLSDAILLSDILRVNTEITKAPLSASMIKRYDEHHQDLTLLKALVRQQLPEKYKEIFFDQSKNGYAGYIDGGASQEEFYKFIKPILEKMDGTEELLVKLNREDLLRKQRTFDNGSIPHQIHLGELHAILRRQEDFYPFLKDNREKIEKILTFRIPYYVGPLARGNSRFAWMTRKSEETITPWNFEEVVDKGASAQSFIERMTNFDKNLPNEKVLPKHSLLYEYFTVYNELTKVKYVTEGMRKPAFLSGEQKKAIVDLLFKTNRKVTVKQLKEDYFKKIECFDSVEISGVEDRFNASLGTYHDLLKIIKDKDFLDNEENEDILEDIVLTLTLFEDREMIEERLKTYAHLFDDKVMKQLKRRRYTGWGRLSRKLINGIRDKQSGKTILDFLKSDGFANRNFMQLIHDDSLTFKEDIQKAQVSGQGDSLHEHIANLAGSPAIKKGILQTVKVVDELVKVMGRHKPENIVIEMARENQTTQKGQKNSRERMKRIEEGIKELGSQILKEHPVENTQLQNEKLYLYYLQNGRDMYVDQELDINRLSDYDVDHIVPQSFLKDDSIDNKVLTRSDKARGKSDNVPSEEVVKKMKNYWRQLLNAKLITQRKFDNLTKAERGGLSELDKAGFIKRQLVETRQITKHVAQILDSRMNTKYDENDKLIREVKVITLKSKLVSDFRKDFQFYKVREINNYHHAHDAYLNAVVGTALIKKYPKLESEFVYGDYKVYDVRKMIAKSEQEIGKATAKYFFYSNIMNFFKTEITLANGEIRKRPLIETNGETGEIVWDKGRDFATVRKVLSMPQVNIVKKTEVQTGGFSKESILPKRNSDKLIARKKDWDPKKYGGFDSPTVAYSVLVVAKVEKGKSKKLKSVKELLGITIMERSSFEKNPIDFLEAKGYKEVKKDLIIKLPKYSLFELENGRKRMLASAGELQKGNELALPSKYVNFLYLASHYEKLKGSPEDNEQKQLFVEQHKHYLDEIIEQISEFSKRVILADANLDKVLSAYNKHRDKPIREQAENIIHLFTLTNLGAPAAFKYFDTTIDRKRYTSTKEVLDATLIHQSITGLYETRIDLSQLGGDGGEAAAKPAPGGTLQLEEEYRLFEPESTQKQEMDIWLKNFPQAWAETGGMGTAHCQAPVLIQLKATATPISIRQYPMPHEAYQGIKPHIRRMLDQGILKPCQSPWNTPLLPVKKPGTEDYRPVQDLREVNKRVEDIHPTVPNPYNLLSTLPPSHPWYTVLDLKDAFFCLRLHSESQLLFAFEWRDPEIGLSGQLTWTRLPQGFKNSPTLFNEALHSDLADFRVRYPALVLLQYVDDLLLAAATRTECLEGTKALLETLGNKGYRASAKKAQICLQEVTYLGYSLKDGQRWLTKARKEAILSIPVPKNSRQVREFLGKAGYCRLFIPGFAELAAPLYPLTRPGTLFQWGTEQQLAFEDIKKALLSSPALGLPDITKPFELFIDENSGFAKGVLVQKLGPWKRPVAYLSKKLDTVASGWPPCLRMVAAIAILVKDAGKLTLGQPLTILTSHPVEALVRQPPNKWLSNARMTHYQAMLLDAERVHFGPTVSLNPATLLPLPSGGNHHDCLQILAETHGTRPDLTDQPLPDADLTWYTDGSSFIRNGEREAGAAVTTESEVIWAAPLPPGTSAQRAELIALTQALKMAEGKKLTVYTDSRYAFATTHVHGEIYRRRGWLTSEGKEIKNKNEILALLEALFLPKRLSIIHCPGHQKGDSPQAKGNRLADDTAKKAATETHSSLTVLPAGKRTADGSEFEKRTADGSEFESPKKKAKVE

SEQ ID NO: 1268 - protein, 2093 aa, synthetic construct
MPAAKRVKLDGGDKKYSIGLDIGTNSVGWAVITDEYKVPSKKFKVLGNTDRHSIKKNLIGALLFDSGETAEATRLKRTARRRYTRRKNRICYLQEIFSNEMAKVDDSFFHRLEESFLVEEDKKHERHPIFGNIVDEVAYHEKYPTIYHLRKKLVDSTDKADLRLIYLALAHMIKFRGHFLIEGDLNPDNSDVDKLFIQLVQTYNQLFEENPINASGVDAKAILSARLSKSRRLENLIAQLPGEKKNGLFGNLIALSLGLTPNFKSNFDLAEDAKLQLSKDTYDDDLDNLLAQIGDQYADLFLAAKNLSDAILLSDILRVNTEITKAPLSASMIKRYDEHHQDLTLLKALVRQQLPEKYKEIFFDQSKNGYAGYIDGGASQEEFYKFIKPILEKMDGTEELLVKLNREDLLRKQRTFDNGSIPHQIHLGELHAILRRQEDFYPFLKDNREKIEKILTFRIPYYVGPLARGNSRFAWMTRKSEETITPWNFEEVVDKGASAQSFIERMTNFDKNLPNEKVLPKHSLLYEYFTVYNELTKVKYVTEGMRKPAFLSGEQKKAIVDLLFKTNRKVTVKQLKEDYFKKIECFDSVEISGVEDRFNASLGTYHDLLKIIKDKDFLDNEENEDILEDIVLTLTLFEDREMIEERLKTYAHLFDDKVMKQLKRRRYTGWGRLSRKLINGIRDKQSGKTILDFLKSDGFANRNFMQLIHDDSLTFKEDIQKAQVSGQGDSLHEHIANLAGSPAIKKGILQTVKVVDELVKVMGRHKPENIVIEMARENQTTQKGQKNSRERMKRIEEGIKELGSQILKEHPVENTQLQNEKLYLYYLQNGRDMYVDQELDINRLSDYDVDHIVPQSFLKDDSIDNKVLTRSDKARGKSDNVPSEEVVKKMKNYWRQLLNAKLITQRKFDNLTKAERGGLSELDKAGFIKRQLVETRQITKHVAQILDSRMNTKYDENDKLIREVKVITLKSKLVSDFRKDFQFYKVREINNYHHAHDAYLNAVVGTALIKKYPKLESEFVYGDYKVYDVRKMIAKSEQEIGKATAKYFFYSNIMNFFKTEITLANGEIRKRPLIETNGETGEIVWDKGRDFATVRKVLSMPQVNIVKKTEVQTGGFSKESILPKRNSDKLIARKKDWDPKKYGGFDSPTVAYSVLVVAKVEKGKSKKLKSVKELLGITIMERSSFEKNPIDFLEAKGYKEVKKDLIIKLPKYSLFELENGRKRMLASAGELQKGNELALPSKYVNFLYLASHYEKLKGSPEDNEQKQLFVEQHKHYLDEIIEQISEFSKRVILADANLDKVLSAYNKHRDKPIREQAENIIHLFTLTNLGAPAAFKYFDTTIDRKRYTSTKEVLDATLIHQSITGLYETRIDLSQLGGDGGGGGPAPGGSGGTLQLEEEYRLFEPESTQKQEMDIWLKNFPQAWAETGGMGTAHCQAPVLIQLKATATPISIRQYPMPHEAYQGIKPHIRRMLDQGILKPCQSPWNTPLLPVKKPGTEDYRPVQDLREVNKRVEDIHPTVPNPYNLLSTLPPSHPWYTVLDLKDAFFCLRLHSESQLLFAFEWRDPEIGLSGQLTWTRLPQGFKNSPTLFNEALHSDLADFRVRYPALVLLQYVDDLLLAAATRTECLEGTKALLETLGNKGYRASAKKAQICLQEVTYLGYSLKDGQRWLTKARKEAILSIPVPKNSRQVREFLGKAGYCRLFIPGFAELAAPLYPLTRPGTLFQWGTEQQLAFEDIKKALLSSPALGLPDITKPFELFIDENSGFAKGVLVQKLGPWKRPVAYLSKKLDTVASGWPPCLRMVAAIAILVKDAGKLTLGQPLTILTSHPVEALVRQPPNKWLSNARMTHYQAMLLDAERVHFGPTVSLNPATLLPLPSGGNHHDCLQILAETHGTRPDLTDQPLPDADLTWYTDGSSFIRNGEREAGAAVTTESEVIWAAPLPPGTSAQRAELIALTQALKMAEGKKLTVYTDSRYAFATTHVHGEIYRRRGWLTSEGKEIKNKNEILALLEALFLPKRLSIIHCPGHQKGDSPQAKGNRLADDTAKKAATETHSSLTVLPAGKRTADGSEFEKRTADGSEFESPKKKAKVE

SEQ ID NO: 1269 - protein, 2095 aa, synthetic construct
MPAAKRVKLDGGDKKYSIGLDIGTNSVGWAVITDEYKVPSKKFKVLGNTDRHSIKKNLIGALLFDSGETAEATRLKRTARRRYTRRKNRICYLQEIFSNEMAKVDDSFFHRLEESFLVEEDKKHERHPIFGNIVDEVAYHEKYPTIYHLRKKLVDSTDKADLRLIYLALAHMIKFRGHFLIEGDLNPDNSDVDKLFIQLVQTYNQLFEENPINASGVDAKAILSARLSKSRRLENLIAQLPGEKKNGLFGNLIALSLGLTPNFKSNFDLAEDAKLQLSKDTYDDDLDNLLAQIGDQYADLFLAAKNLSDAILLSDILRVNTEITKAPLSASMIKRYDEHHQDLTLLKALVRQQLPEKYKEIFFDQSKNGYAGYIDGGASQEEFYKFIKPILEKMDGTEELLVKLNREDLLRKQRTFDNGSIPHQIHLGELHAILRRQEDFYPFLKDNREKIEKILTFRIPYYVGPLARGNSRFAWMTRKSEETITPWNFEEVVDKGASAQSFIERMTNFDKNLPNEKVLPKHSLLYEYFTVYNELTKVKYVTEGMRKPAFLSGEQKKAIVDLLFKTNRKVTVKQLKEDYFKKIECFDSVEISGVEDRFNASLGTYHDLLKIIKDKDFLDNEENEDILEDIVLTLTLFEDREMIEERLKTYAHLFDDKVMKQLKRRRYTGWGRLSRKLINGIRDKQSGKTILDFLKSDGFANRNFMQLIHDDSLTFKEDIQKAQVSGQGDSLHEHIANLAGSPAIKKGILQTVKVVDELVKVMGRHKPENIVIEMARENQTTQKGQKNSRERMKRIEEGIKELGSQILKEHPVENTQLQNEKLYLYYLQNGRDMYVDQELDINRLSDYDVDHIVPQSFLKDDSIDNKVLTRSDKARGKSDNVPSEEVVKKMKNYWRQLLNAKLITQRKFDNLTKAERGGLSELDKAGFIKRQLVETRQITKHVAQILDSRMNTKYDENDKLIREVKVITLKSKLVSDFRKDFQFYKVREINNYHHAHDAYLNAVVGTALIKKYPKLESEFVYGDYKVYDVRKMIAKSEQEIGKATAKYFFYSNIMNFFKTEITLANGEIRKRPLIETNGETGEIVWDKGRDFATVRKVLSMPQVNIVKKTEVQTGGFSKESILPKRNSDKLIARKKDWDPKKYGGFDSPTVAYSVLVVAKVEKGKSKKLKSVKELLGITIMERSSFEKNPIDFLEAKGYKEVKKDLIIKLPKYSLFELENGRKRMLASAGELQKGNELALPSKYVNFLYLASHYEKLKGSPEDNEQKQLFVEQHKHYLDEIIEQISEFSKRVILADANLDKVLSAYNKHRDKPIREQAENIIHLFTLTNLGAPAAFKYFDTTIDRKRYTSTKEVLDATLIHQSITGLYETRIDLSQLGGDGGGGSGGGEAAAKGGTLQLEEEYRLFEPESTQKQEMDIWLKNFPQAWAETGGMGTAHCQAPVLIQLKATATPISIRQYPMPHEAYQGIKPHIRRMLDQGILKPCQSPWNTPLLPVKKPGTEDYRPVQDLREVNKRVEDIHPTVPNPYNLLSTLPPSHPWYTVLDLKDAFFCLRLHSESQLLFAFEWRDPEIGLSGQLTWTRLPQGFKNSPTLFNEALHSDLADFRVRYPALVLLQYVDDLLLAAATRTECLEGTKALLETLGNKGYRASAKKAQICLQEVTYLGYSLKDGQRWLTKARKEAILSIPVPKNSRQVREFLGKAGYCRLFIPGFAELAAPLYPLTRPGTLFQWGTEQQLAFEDIKKALLSSPALGLPDITKPFELFIDENSGFAKGVLVQKLGPWKRPVAYLSKKLDTVASGWPPCLRMVAAIAILVKDAGKLTLGQPLTILTSHPVEALVRQPPNKWLSNARMTHYQAMLLDAERVHFGPTVSLNPATLLPLPSGGNHHDCLQILAETHGTRPDLTDQPLPDADLTWYTDGSSFIRNGEREAGAAVTTESEVIWAAPLPPGTSAQRAELIALTQALKMAEGKKLTVYTDSRYAFATTHVHGEIYRRRGWLTSEGKEIKNKNEILALLEALFLPKRLSIIHCPGHQKGDSPQAKGNRLADDTAKKAATETHSSLTVLPAGKRTADGSEFEKRTADGSEFESPKKKAKVE

SEQ ID NO: 1270 - protein, 2093 aa, synthetic construct
MPAAKRVKLDGGDKKYSIGLDIGTNSVGWAVITDEYKVPSKKFKVLGNTDRHSIKKNLIGALLFDSGETAEATRLKRTARRRYTRRKNRICYLQEIFSNEMAKVDDSFFHRLEESFLVEEDKKHERHPIFGNIVDEVAYHEKYPTIYHLRKKLVDSTDKADLRLIYLALAHMIKFRGHFLIEGDLNPDNSDVDKLFIQLVQTYNQLFEENPINASGVDAKAILSARLSKSRRLENLIAQLPGEKKNGLFGNLIALSLGLTPNFKSNFDLAEDAKLQLSKDTYDDDLDNLLAQIGDQYADLFLAAKNLSDAILLSDILRVNTEITKAPLSASMIKRYDEHHQDLTLLKALVRQQLPEKYKEIFFDQSKNGYAGYIDGGASQEEFYKFIKPILEKMDGTEELLVKLNREDLLRKQRTFDNGSIPHQIHLGELHAILRRQEDFYPFLKDNREKIEKILTFRIPYYVGPLARGNSRFAWMTRKSEETITPWNFEEVVDKGASAQSFIERMTNFDKNLPNEKVLPKHSLLYEYFTVYNELTKVKYVTEGMRKPAFLSGEQKKAIVDLLFKTNRKVTVKQLKEDYFKKIECFDSVEISGVEDRFNASLGTYHDLLKIIKDKDFLDNEENEDILEDIVLTLTLFEDREMIEERLKTYAHLFDDKVMKQLKRRRYTGWGRLSRKLINGIRDKQSGKTILDFLKSDGFANRNFMQLIHDDSLTFKEDIQKAQVSGQGDSLHEHIANLAGSPAIKKGILQTVKVVDELVKVMGRHKPENIVIEMARENQTTQKGQKNSRERMKRIEEGIKELGSQILKEHPVENTQLQNEKLYLYYLQNGRDMYVDQELDINRLSDYDVDHIVPQSFLKDDSIDNKVLTRSDKARGKSDNVPSEEVVKKMKNYWRQLLNAKLITQRKFDNLTKAERGGLSELDKAGFIKRQLVETRQITKHVAQILDSRMNTKYDENDKLIREVKVITLKSKLVSDFRKDFQFYKVREINNYHHAHDAYLNAVVGTALIKKYPKLESEFVYGDYKVYDVRKMIAKSEQEIGKATAKYFFYSNIMNFFKTEITLANGEIRKRPLIETNGETGEIVWDKGRDFATVRKVLSMPQVNIVKKTEVQTGGFSKESILPKRNSDKLIARKKDWDPKKYGGFDSPTVAYSVLVVAKVEKGKSKKLKSVKELLGITIMERSSFEKNPIDFLEAKGYKEVKKDLIIKLPKYSLFELENGRKRMLASAGELQKGNELALPSKYVNFLYLASHYEKLKGSPEDNEQKQLFVEQHKHYLDEIIEQISEFSKRVILADANLDKVLSAYNKHRDKPIREQAENIIHLFTLTNLGAPAAFKYFDTTIDRKRYTSTKEVLDATLIHQSITGLYETRIDLSQLGGDGGGGSGSSGGGGGTLQLEEEYRLFEPESTQKQEMDIWLKNFPQAWAETGGMGTAHCQAPVLIQLKATATPISIRQYPMPHEAYQGIKPHIRRMLDQGILKPCQSPWNTPLLPVKKPGTEDYRPVQDLREVNKRVEDIHPTVPNPYNLLSTLPPSHPWYTVLDLKDAFFCLRLHSESQLLFAFEWRDPEIGLSGQLTWTRLPQGFKNSPTLFNEALHSDLADFRVRYPALVLLQYVDDLLLAAATRTECLEGTKALLETLGNKGYRASAKKAQICLQEVTYLGYSLKDGQRWLTKARKEAILSIPVPKNSRQVREFLGKAGYCRLFIPGFAELAAPLYPLTRPGTLFQWGTEQQLAFEDIKKALLSSPALGLPDITKPFELFIDENSGFAKGVLVQKLGPWKRPVAYLSKKLDTVASGWPPCLRMVAAIAILVKDAGKLTLGQPLTILTSHPVEALVRQPPNKWLSNARMTHYQAMLLDAERVHFGPTVSLNPATLLPLPSGGNHHDCLQILAETHGTRPDLTDQPLPDADLTWYTDGSSFIRNGEREAGAAVTTESEVIWAAPLPPGTSAQRAELIALTQALKMAEGKKLTVYTDSRYAFATTHVHGEIYRRRGWLTSEGKEIKNKNEILALLEALFLPKRLSIIHCPGHQKGDSPQAKGNRLADDTAKKAATETHSSLTVLPAGKRTADGSEFEKRTADGSEFESPKKKAKVE

SEQ ID NO: 1271 - protein, 2092 aa, synthetic construct
MPAAKRVKLDGGDKKYSIGLDIGTNSVGWAVITDEYKVPSKKFKVLGNTDRHSIKKNLIGALLFDSGETAEATRLKRTARRRYTRRKNRICYLQEIFSNEMAKVDDSFFHRLEESFLVEEDKKHERHPIFGNIVDEVAYHEKYPTIYHLRKKLVDSTDKADLRLIYLALAHMIKFRGHFLIEGDLNPDNSDVDKLFIQLVQTYNQLFEENPINASGVDAKAILSARLSKSRRLENLIAQLPGEKKNGLFGNLIALSLGLTPNFKSNFDLAEDAKLQLSKDTYDDDLDNLLAQIGDQYADLFLAAKNLSDAILLSDILRVNTEITKAPLSASMIKRYDEHHQDLTLLKALVRQQLPEKYKEIFFDQSKNGYAGYIDGGASQEEFYKFIKPILEKMDGTEELLVKLNREDLLRKQRTFDNGSIPHQIHLGELHAILRRQEDFYPFLKDNREKIEKILTFRIPYYVGPLARGNSRFAWMTRKSEETITPWNFEEVVDKGASAQSFIERMTNFDKNLPNEKVLPKHSLLYEYFTVYNELTKVKYVTEGMRKPAFLSGEQKKAIVDLLFKTNRKVTVKQLKEDYFKKIECFDSVEISGVEDRFNASLGTYHDLLKIIKDKDFLDNEENEDILEDIVLTLTLFEDREMIEERLKTYAHLFDDKVMKQLKRRRYTGWGRLSRKLINGIRDKQSGKTILDFLKSDGFANRNFMQLIHDDSLTFKEDIQKAQVSGQGDSLHEHIANLAGSPAIKKGILQTVKVVDELVKVMGRHKPENIVIEMARENQTTQKGQKNSRERMKRIEEGIKELGSQILKEHPVENTQLQNEKLYLYYLQNGRDMYVDQELDINRLSDYDVDHIVPQSFLKDDSIDNKVLTRSDKARGKSDNVPSEEVVKKMKNYWRQLLNAKLITQRKFDNLTKAERGGLSELDKAGFIKRQLVETRQITKHVAQILDSRMNTKYDENDKLIREVKVITLKSKLVSDFRKDFQFYKVREINNYHHAHDAYLNAVVGTALIKKYPKLESEFVYGDYKVYDVRKMIAKSEQEIGKATAKYFFYSNIMNFFKTEITLANGEIRKRPLIETNGETGEIVWDKGRDFATVRKVLSMPQVNIVKKTEVQTGGFSKESILPKRNSDKLIARKKDWDPKKYGGFDSPTVAYSVLVVAKVEKGKSKKLKSVKELLGITIMERSSFEKNPIDFLEAKGYKEVKKDLIIKLPKYSLFELENGRKRMLASAGELQKGNELALPSKYVNFLYLASHYEKLKGSPEDNEQKQLFVEQHKHYLDEIIEQISEFSKRVILADANLDKVLSAYNKHRDKPIREQAENIIHLFTLTNLGAPAAFKYFDTTIDRKRYTSTKEVLDATLIHQSITGLYETRIDLSQLGGDGGEAAAKGGGGGTLQLEEEYRLFEPESTQKQEMDIWLKNFPQAWAETGGMGTAHCQAPVLIQLKATATPISIRQYPMPHEAYQGIKPHIRRMLDQGILKPCQSPWNTPLLPVKKPGTEDYRPVQDLREVNKRVEDIHPTVPNPYNLLSTLPPSHPWYTVLDLKDAFFCLRLHSESQLLFAFEWRDPEIGLSGQLTWTRLPQGFKNSPTLFNEALHSDLADFRVRYPALVLLQYVDDLLLAAATRTECLEGTKALLETLGNKGYRASAKKAQICLQEVTYLGYSLKDGQRWLTKARKEAILSIPVPKNSRQVREFLGKAGYCRLFIPGFAELAAPLYPLTRPGTLFQWGTEQQLAFEDIKKALLSSPALGLPDITKPFELFIDENSGFAKGVLVQKLGPWKRPVAYLSKKLDTVASGWPPCLRMVAAIAILVKDAGKLTLGQPLTILTSHPVEALVRQPPNKWLSNARMTHYQAMLLDAERVHFGPTVSLNPATLLPLPSGGNHHDCLQILAETHGTRPDLTDQPLPDADLTWYTDGSSFIRNGEREAGAAVTTESEVIWAAPLPPGTSAQRAELIALTQALKMAEGKKLTVYTDSRYAFATTHVHGEIYRRRGWLTSEGKEIKNKNEILALLEALFLPKRLSIIHCPGHQKGDSPQAKGNRLADDTAKKAATETHSSLTVLPAGKRTADGSEFEKRTADGSEFESPKKKAKVE

SEQ ID NO: 1272 - protein, 2090 aa, synthetic construct
MPAAKRVKLDGGDKKYSIGLDIGTNSVGWAVITDEYKVPSKKFKVLGNTDRHSIKKNLIGALLFDSGETAEATRLKRTARRRYTRRKNRICYLQEIFSNEMAKVDDSFFHRLEESFLVEEDKKHERHPIFGNIVDEVAYHEKYPTIYHLRKKLVDSTDKADLRLIYLALAHMIKFRGHFLIEGDLNPDNSDVDKLFIQLVQTYNQLFEENPINASGVDAKAILSARLSKSRRLENLIAQLPGEKKNGLFGNLIALSLGLTPNFKSNFDLAEDAKLQLSKDTYDDDLDNLLAQIGDQYADLFLAAKNLSDAILLSDILRVNTEITKAPLSASMIKRYDEHHQDLTLLKALVRQQLPEKYKEIFFDQSKNGYAGYIDGGASQEEFYKFIKPILEKMDGTEELLVKLNREDLLRKQRTFDNGSIPHQIHLGELHAILRRQEDFYPFLKDNREKIEKILTFRIPYYVGPLARGNSRFAWMTRKSEETITPWNFEEVVDKGASAQSFIERMTNFDKNLPNEKVLPKHSLLYEYFTVYNELTKVKYVTEGMRKPAFLSGEQKKAIVDLLFKTNRKVTVKQLKEDYFKKIECFDSVEISGVEDRFNASLGTYHDLLKIIKDKDFLDNEENEDILEDIVLTLTLFEDREMIEERLKTYAHLFDDKVMKQLKRRRYTGWGRLSRKLINGIRDKQSGKTILDFLKSDGFANRNFMQLIHDDSLTFKEDIQKAQVSGQGDSLHEHIANLAGSPAIKKGILQTVKVVDELVKVMGRHKPENIVIEMARENQTTQKGQKNSRERMKRIEEGIKELGSQILKEHPVENTQLQNEKLYLYYLQNGRDMYVDQELDINRLSDYDVDHIVPQSFLKDDSIDNKVLTRSDKARGKSDNVPSEEVVKKMKNYWRQLLNAKLITQRKFDNLTKAERGGLSELDKAGFIKRQLVETRQITKHVAQILDSRMNTKYDENDKLIREVKVITLKSKLVSDFRKDFQFYKVREINNYHHAHDAYLNAVVGTALIKKYPKLESEFVYGDYKVYDVRKMIAKSEQEIGKATAKYFFYSNIMNFFKTEITLANGEIRKRPLIETNGETGEIVWDKGRDFATVRKVLSMPQVNIVKKTEVQTGGFSKESILPKRNSDKLIARKKDWDPKKYGGFDSPTVAYSVLVVAKVEKGKSKKLKSVKELLGITIMERSSFEKNPIDFLEAKGYKEVKKDLIIKLPKYSLFELENGRKRMLASAGELQKGNELALPSKYVNFLYLASHYEKLKGSPEDNEQKQLFVEQHKHYLDEIIEQISEFSKRVILADANLDKVLSAYNKHRDKPIREQAENIIHLFTLTNLGAPAAFKYFDTTIDRKRYTSTKEVLDATLIHQSITGLYETRIDLSQLGGDGGGGGGSSGGTLQLEEEYRLFEPESTQKQEMDIWLKNFPQAWAETGGMGTAHCQAPVLIQLKATATPISIRQYPMPHEAYQGIKPHIRRMLDQGILKPCQSPWNTPLLPVKKPGTEDYRPVQDLREVNKRVEDIHPTVPNPYNLLSTLPPSHPWYTVLDLKDAFFCLRLHSESQLLFAFEWRDPEIGLSGQLTWTRLPQGFKNSPTLFNEALHSDLADFRVRYPALVLLQYVDDLLLAAATRTECLEGTKALLETLGNKGYRASAKKAQICLQEVTYLGYSLKDGQRWLTKARKEAILSIPVPKNSRQVREFLGKAGYCRLFIPGFAELAAPLYPLTRPGTLFQWGTEQQLAFEDIKKALLSSPALGLPDITKPFELFIDENSGFAKGVLVQKLGPWKRPVAYLSKKLDTVASGWPPCLRMVAAIAILVKDAGKLTLGQPLTILTSHPVEALVRQPPNKWLSNARMTHYQAMLLDAERVHFGPTVSLNPATLLPLPSGGNHHDCLQILAETHGTRPDLTDQPLPDADLTWYTDGSSFIRNGEREAGAAVTTESEVIWAAPLPPGTSAQRAELIALTQALKMAEGKKLTVYTDSRYAFATTHVHGEIYRRRGWLTSEGKEIKNKNEILALLEALFLPKRLSIIHCPGHQKGDSPQAKGNRLADDTAKKAATETHSSLTVLPAGKRTADGSEFEKRTADGSEFESPKKKAKVE

SEQ ID NO: 1273 - protein, 2089 aa, synthetic construct
MPAAKRVKLDGGDKKYSIGLDIGTNSVGWAVITDEYKVPSKKFKVLGNTDRHSIKKNLIGALLFDSGETAEATRLKRTARRRYTRRKNRICYLQEIFSNEMAKVDDSFFHRLEESFLVEEDKKHERHPIFGNIVDEVAYHEKYPTIYHLRKKLVDSTDKADLRLIYLALAHMIKFRGHFLIEGDLNPDNSDVDKLFIQLVQTYNQLFEENPINASGVDAKAILSARLSKSRRLENLIAQLPGEKKNGLFGNLIALSLGLTPNFKSNFDLAEDAKLQLSKDTYDDDLDNLLAQIGDQYADLFLAAKNLSDAILLSDILRVNTEITKAPLSASMIKRYDEHHQDLTLLKALVRQQLPEKYKEIFFDQSKNGYAGYIDGGASQEEFYKFIKPILEKMDGTEELLVKLNREDLLRKQRTFDNGSIPHQIHLGELHAILRRQEDFYPFLKDNREKIEKILTFRIPYYVGPLARGNSRFAWMTRKSEETITPWNFEEVVDKGASAQSFIERMTNFDKNLPNEKVLPKHSLLYEYFTVYNELTKVKYVTEGMRKPAFLSGEQKKAIVDLLFKTNRKVTVKQLKEDYFKKIECFDSVEISGVEDRFNASLGTYHDLLKIIKDKDFLDNEENEDILEDIVLTLTLFEDREMIEERLKTYAHLFDDKVMKQLKRRRYTGWGRLSRKLINGIRDKQSGKTILDFLKSDGFANRNFMQLIHDDSLTFKEDIQKAQVSGQGDSLHEHIANLAGSPAIKKGILQTVKVVDELVKVMGRHKPENIVIEMARENQTTQKGQKNSRERMKRIEEGIKELGSQILKEHPVENTQLQNEKLYLYYLQNGRDMYVDQELDINRLSDYDVDHIVPQSFLKDDSIDNKVLTRSDKARGKSDNVPSEEVVKKMKNYWRQLLNAKLITQRKFDNLTKAERGGLSELDKAGFIKRQLVETRQITKHVAQILDSRMNTKYDENDKLIREVKVITLKSKLVSDFRKDFQFYKVREINNYHHAHDAYLNAVVGTALIKKYPKLESEFVYGDYKVYDVRKMIAKSEQEIGKATAKYFFYSNIMNFFKTEITLANGEIRKRPLIETNGETGEIVWDKGRDFATVRKVLSMPQVNIVKKTEVQTGGFSKESILPKRNSDKLIARKKDWDPKKYGGFDSPTVAYSVLVVAKVEKGKSKKLKSVKELLGITIMERSSFEKNPIDFLEAKGYKEVKKDLIIKLPKYSLFELENGRKRMLASAGELQKGNELALPSKYVNFLYLASHYEKLKGSPEDNEQKQLFVEQHKHYLDEIIEQISEFSKRVILADANLDKVLSAYNKHRDKPIREQAENIIHLFTLTNLGAPAAFKYFDTTIDRKRYTSTKEVLDATLIHQSITGLYETRIDLSQLGGDGGGGGGSGGTLQLEEEYRLFEPESTQKQEMDIWLKNFPQAWAETGGMGTAHCQAPVLIQLKATATPISIRQYPMPHEAYQGIKPHIRRMLDQGILKPCQSPWNTPLLPVKKPGTEDYRPVQDLREVNKRVEDIHPTVPNPYNLLSTLPPSHPWYTVLDLKDAFFCLRLHSESQLLFAFEWRDPEIGLSGQLTWTRLPQGFKNSPTLFNEALHSDLADFRVRYPALVLLQYVDDLLLAAATRTECLEGTKALLETLGNKGYRASAKKAQICLQEVTYLGYSLKDGQRWLTKARKEAILSIPVPKNSRQVREFLGKAGYCRLFIPGFAELAAPLYPLTRPGTLFQWGTEQQLAFEDIKKALLSSPALGLPDITKPFELFIDENSGFAKGVLVQKLGPWKRPVAYLSKKLDTVASGWPPCLRMVAAIAILVKDAGKLTLGQPLTILTSHPVEALVRQPPNKWLSNARMTHYQAMLLDAERVHFGPTVSLNPATLLPLPSGGNHHDCLQILAETHGTRPDLTDQPLPDADLTWYTDGSSFIRNGEREAGAAVTTESEVIWAAPLPPGTSAQRAELIALTQALKMAEGKKLTVYTDSRYAFATTHVHGEIYRRRGWLTSEGKEIKNKNEILALLEALFLPKRLSIIHCPGHQKGDSPQAKGNRLADDTAKKAATETHSSLTVLPAGKRTADGSEFEKRTADGSEFESPKKKAKVE

SEQ ID NO: 1274 - protein, 2099 aa, synthetic construct
MPAAKRVKLDGGDKKYSIGLDIGTNSVGWAVITDEYKVPSKKFKVLGNTDRHSIKKNLIGALLFDSGETAEATRLKRTARRRYTRRKNRICYLQEIFSNEMAKVDDSFFHRLEESFLVEEDKKHERHPIFGNIVDEVAYHEKYPTIYHLRKKLVDSTDKADLRLIYLALAHMIKFRGHFLIEGDLNPDNSDVDKLFIQLVQTYNQLFEENPINASGVDAKAILSARLSKSRRLENLIAQLPGEKKNGLFGNLIALSLGLTPNFKSNFDLAEDAKLQLSKDTYDDDLDNLLAQIGDQYADLFLAAKNLSDAILLSDILRVNTEITKAPLSASMIKRYDEHHQDLTLLKALVRQQLPEKYKEIFFDQSKNGYAGYIDGGASQEEFYKFIKPILEKMDGTEELLVKLNREDLLRKQRTFDNGSIPHQIHLGELHAILRRQEDFYPFLKDNREKIEKILTFRIPYYVGPLARGNSRFAWMTRKSEETITPWNFEEVVDKGASAQSFIERMTNFDKNLPNEKVLPKHSLLYEYFTVYNELTKVKYVTEGMRKPAFLSGEQKKAIVDLLFKTNRKVTVKQLKEDYFKKIECFDSVEISGVEDRFNASLGTYHDLLKIIKDKDFLDNEENEDILEDIVLTLTLFEDREMIEERLKTYAHLFDDKVMKQLKRRRYTGWGRLSRKLINGIRDKQSGKTILDFLKSDGFANRNFMQLIHDDSLTFKEDIQKAQVSGQGDSLHEHIANLAGSPAIKKGILQTVKVVDELVKVMGRHKPENIVIEMARENQTTQKGQKNSRERMKRIEEGIKELGSQILKEHPVENTQLQNEKLYLYYLQNGRDMYVDQELDINRLSDYDVDHIVPQSFLKDDSIDNKVLTRSDKARGKSDNVPSEEVVKKMKNYWRQLLNAKLITQRKFDNLTKAERGGLSELDKAGFIKRQLVETRQITKHVAQILDSRMNTKYDENDKLIREVKVITLKSKLVSDFRKDFQFYKVREINNYHHAHDAYLNAVVGTALIKKYPKLESEFVYGDYKVYDVRKMIAKSEQEIGKATAKYFFYSNIMNFFKTEITLANGEIRKRPLIETNGETGEIVWDKGRDFATVRKVLSMPQVNIVKKTEVQTGGFSKESILPKRNSDKLIARKKDWDPKKYGGFDSPTVAYSVLVVAKVEKGKSKKLKSVKELLGITIMERSSFEKNPIDFLEAKGYKEVKKDLIIKLPKYSLFELENGRKRMLASAGELQKGNELALPSKYVNFLYLASHYEKLKGSPEDNEQKQLFVEQHKHYLDEIIEQISEFSKRVILADANLDKVLSAYNKHRDKPIREQAENIIHLFTLTNLGAPAAFKYFDTTIDRKRYTSTKEVLDATLIHQSITGLYETRIDLSQLGGDGGGSSGSSGSSGSSGSSGGTLQLEEEYRLFEPESTQKQEMDIWLKNFPQAWAETGGMGTAHCQAPVLIQLKATATPISIRQYPMPHEAYQGIKPHIRRMLDQGILKPCQSPWNTPLLPVKKPGTEDYRPVQDLREVNKRVEDIHPTVPNPYNLLSTLPPSHPWYTVLDLKDAFFCLRLHSESQLLFAFEWRDPEIGLSGQLTWTRLPQGFKNSPTLFNEALHSDLADFRVRYPALVLLQYVDDLLLAAATRTECLEGTKALLETLGNKGYRASAKKAQICLQEVTYLGYSLKDGQRWLTKARKEAILSIPVPKNSRQVREFLGKAGYCRLFIPGFAELAAPLYPLTRPGTLFQWGTEQQLAFEDIKKALLSSPALGLPDITKPFELFIDENSGFAKGVLVQKLGPWKRPVAYLSKKLDTVASGWPPCLRMVAAIAILVKDAGKLTLGQPLTILTSHPVEALVRQPPNKWLSNARMTHYQAMLLDAERVHFGPTVSLNPATLLPLPSGGNHHDCLQILAETHGTRPDLTDQPLPDADLTWYTDGSSFIRNGEREAGAAVTTESEVIWAAPLPPGTSAQRAELIALTQALKMAEGKKLTVYTDSRYAFATTHVHGEIYRRRGWLTSEGKEIKNKNEILALLEALFLPKRLSIIHCPGHQKGDSPQAKGNRLADDTAKKAATETHSSLTVLPAGKRTADGSEFEKRTADGSEFESPKKKAKVE

SEQ ID NO: 1275 - protein, 2093 aa, synthetic construct
MPAAKRVKLDGGDKKYSIGLDIGTNSVGWAVITDEYKVPSKKFKVLGNTDRHSIKKNLIGALLFDSGETAEATRLKRTARRRYTRRKNRICYLQEIFSNEMAKVDDSFFHRLEESFLVEEDKKHERHPIFGNIVDEVAYHEKYPTIYHLRKKLVDSTDKADLRLIYLALAHMIKFRGHFLIEGDLNPDNSDVDKLFIQLVQTYNQLFEENPINASGVDAKAILSARLSKSRRLENLIAQLPGEKKNGLFGNLIALSLGLTPNFKSNFDLAEDAKLQLSKDTYDDDLDNLLAQIGDQYADLFLAAKNLSDAILLSDILRVNTEITKAPLSASMIKRYDEHHQDLTLLKALVRQQLPEKYKEIFFDQSKNGYAGYIDGGASQEEFYKFIKPILEKMDGTEELLVKLNREDLLRKQRTFDNGSIPHQIHLGELHAILRRQEDFYPFLKDNREKIEKILTFRIPYYVGPLARGNSRFAWMTRKSEETITPWNFEEVVDKGASAQSFIERMTNFDKNLPNEKVLPKHSLLYEYFTVYNELTKVKYVTEGMRKPAFLSGEQKKAIVDLLFKTNRKVTVKQLKEDYFKKIECFDSVEISGVEDRFNASLGTYHDLLKIIKDKDFLDNEENEDILEDIVLTLTLFEDREMIEERLKTYAHLFDDKVMKQLKRRRYTGWGRLSRKLINGIRDKQSGKTILDFLKSDGFANRNFMQLIHDDSLTFKEDIQKAQVSGQGDSLHEHIANLAGSPAIKKGILQTVKVVDELVKVMGRHKPENIVIEMARENQTTQKGQKNSRERMKRIEEGIKELGSQILKEHPVENTQLQNEKLYLYYLQNGRDMYVDQELDINRLSDYDVDHIVPQSFLKDDSIDNKVLTRSDKARGKSDNVPSEEVVKKMKNYWRQLLNAKLITQRKFDNLTKAERGGLSELDKAGFIKRQLVETRQITKHVAQILDSRMNTKYDENDKLIREVKVITLKSKLVSDFRKDFQFYKVREINNYHHAHDAYLNAVVGTALIKKYPKLESEFVYGDYKVYDVRKMIAKSEQEIGKATAKYFFYSNIMNFFKTEITLANGEIRKRPLIETNGETGEIVWDKGRDFATVRKVLSMPQVNIVKKTEVQTGGFSKESILPKRNSDKLIARKKDWDPKKYGGFDSPTVAYSVLVVAKVEKGKSKKLKSVKELLGITIMERSSFEKNPIDFLEAKGYKEVKKDLIIKLPKYSLFELENGRKRMLASAGELQKGNELALPSKYVNFLYLASHYEKLKGSPEDNEQKQLFVEQHKHYLDEIIEQISEFSKRVILADANLDKVLSAYNKHRDKPIREQAENIIHLFTLTNLGAPAAFKYFDTTIDRKRYTSTKEVLDATLIHQSITGLYETRIDLSQLGGDGGGGSGGGGSSGGTLQLEEEYRLFEPESTQKQEMDIWLKNFPQAWAETGGMGTAHCQAPVLIQLKATATPISIRQYPMPHEAYQGIKPHIRRMLDQGILKPCQSPWNTPLLPVKKPGTEDYRPVQDLREVNKRVEDIHPTVPNPYNLLSTLPPSHPWYTVLDLKDAFFCLRLHSESQLLFAFEWRDPEIGLSGQLTWTRLPQGFKNSPTLFNEALHSDLADFRVRYPALVLLQYVDDLLLAAATRTECLEGTKALLETLGNKGYRASAKKAQICLQEVTYLGYSLKDGQRWLTKARKEAILSIPVPKNSRQVREFLGKAGYCRLFIPGFAELAAPLYPLTRPGTLFQWGTEQQLAFEDIKKALLSSPALGLPDITKPFELFIDENSGFAKGVLVQKLGPWKRPVAYLSKKLDTVASGWPPCLRMVAAIAILVKDAGKLTLGQPLTILTSHPVEALVRQPPNKWLSNARMTHYQAMLLDAERVHFGPTVSLNPATLLPLPSGGNHHDCLQILAETHGTRPDLTDQPLPDADLTWYTDGSSFIRNGEREAGAAVTTESEVIWAAPLPPGTSAQRAELIALTQALKMAEGKKLTVYTDSRYAFATTHVHGEIYRRRGWLTSEGKEIKNKNEILALLEALFLPKRLSIIHCPGHQKGDSPQAKGNRLADDTAKKAATETHSSLTVLPAGKRTADGSEFEKRTADGSEFESPKKKAKVE

SEQ ID NO: 1276 - protein, 2093 aa, synthetic construct
MPAAKRVKLDGGDKKYSIGLDIGTNSVGWAVITDEYKVPSKKFKVLGNTDRHSIKKNLIGALLFDSGETAEATRLKRTARRRYTRRKNRICYLQEIFSNEMAKVDDSFFHRLEESFLVEEDKKHERHPIFGNIVDEVAYHEKYPTIYHLRKKLVDSTDKADLRLIYLALAHMIKFRGHFLIEGDLNPDNSDVDKLFIQLVQTYNQLFEENPINASGVDAKAILSARLSKSRRLENLIAQLPGEKKNGLFGNLIALSLGLTPNFKSNFDLAEDAKLQLSKDTYDDDLDNLLAQIGDQYADLFLAAKNLSDAILLSDILRVNTEITKAPLSASMIKRYDEHHQDLTLLKALVRQQLPEKYKEIFFDQSKNGYAGYIDGGASQEEFYKFIKPILEKMDGTEELLVKLNREDLLRKQRTFDNGSIPHQIHLGELHAILRRQEDFYPFLKDNREKIEKILTFRIPYYVGPLARGNSRFAWMTRKSEETITPWNFEEVVDKGASAQSFIERMTNFDKNLPNEKVLPKHSLLYEYFTVYNELTKVKYVTEGMRKPAFLSGEQKKAIVDLLFKTNRKVTVKQLKEDYFKKIECFDSVEISGVEDRFNASLGTYHDLLKIIKDKDFLDNEENEDILEDIVLTLTLFEDREMIEERLKTYAHLFDDKVMKQLKRRRYTGWGRLSRKLINGIRDKQSGKTILDFLKSDGFANRNFMQLIHDDSLTFKEDIQKAQVSGQGDSLHEHIANLAGSPAIKKGILQTVKVVDELVKVMGRHKPENIVIEMARENQTTQKGQKNSRERMKRIEEGIKELGSQILKEHPVENTQLQNEKLYLYYLQNGRDMYVDQELDINRLSDYDVDHIVPQSFLKDDSIDNKVLTRSDKARGKSDNVPSEEVVKKMKNYWRQLLNAKLITQRKFDNLTKAERGGLSELDKAGFIKRQLVETRQITKHVAQILDSRMNTKYDENDKLIREVKVITLKSKLVSDFRKDFQFYKVREINNYHHAHDAYLNAVVGTALIKKYPKLESEFVYGDYKVYDVRKMIAKSEQEIGKATAKYFFYSNIMNFFKTEITLANGEIRKRPLIETNGETGEIVWDKGRDFATVRKVLSMPQVNIVKKTEVQTGGFSKESILPKRNSDKLIARKKDWDPKKYGGFDSPTVAYSVLVVAKVEKGKSKKLKSVKELLGITIMERSSFEKNPIDFLEAKGYKEVKKDLIIKLPKYSLFELENGRKRMLASAGELQKGNELALPSKYVNFLYLASHYEKLKGSPEDNEQKQLFVEQHKHYLDEIIEQISEFSKRVILADANLDKVLSAYNKHRDKPIREQAENIIHLFTLTNLGAPAAFKYFDTTIDRKRYTSTKEVLDATLIHQSITGLYETRIDLSQLGGDGGPAPGSSGGSGGTLQLEEEYRLFEPESTQKQEMDIWLKNFPQAWAETGGMGTAHCQAPVLIQLKATATPISIRQYPMPHEAYQGIKPHIRRMLDQGILKPCQSPWNTPLLPVKKPGTEDYRPVQDLREVNKRVEDIHPTVPNPYNLLSTLPPSHPWYTVLDLKDAFFCLRLHSESQLLFAFEWRDPEIGLSGQLTWTRLPQGFKNSPTLFNEALHSDLADFRVRYPALVLLQYVDDLLLAAATRTECLEGTKALLETLGNKGYRASAKKAQICLQEVTYLGYSLKDGQRWLTKARKEAILSIPVPKNSRQVREFLGKAGYCRLFIPGFAELAAPLYPLTRPGTLFQWGTEQQLAFEDIKKALLSSPALGLPDITKPFELFIDENSGFAKGVLVQKLGPWKRPVAYLSKKLDTVASGWPPCLRMVAAIAILVKDAGKLTLGQPLTILTSHPVEALVRQPPNKWLSNARMTHYQAMLLDAERVHFGPTVSLNPATLLPLPSGGNHHDCLQILAETHGTRPDLTDQPLPDADLTWYTDGSSFIRNGEREAGAAVTTESEVIWAAPLPPGTSAQRAELIALTQALKMAEGKKLTVYTDSRYAFATTHVHGEIYRRRGWLTSEGKEIKNKNEILALLEALFLPKRLSIIHCPGHQKGDSPQAKGNRLADDTAKKAATETHSSLTVLPAGKRTADGSEFEKRTADGSEFESPKKKAKVE

SEQ ID NO: 1277 - protein, 2093 aa, synthetic construct
MPAAKRVKLDGGDKKYSIGLDIGTNSVGWAVITDEYKVPSKKFKVLGNTDRHSIKKNLIGALLFDSGETAEATRLKRTARRRYTRRKNRICYLQEIFSNEMAKVDDSFFHRLEESFLVEEDKKHERHPIFGNIVDEVAYHEKYPTIYHLRKKLVDSTDKADLRLIYLALAHMIKFRGHFLIEGDLNPDNSDVDKLFIQLVQTYNQLFEENPINASGVDAKAILSARLSKSRRLENLIAQLPGEKKNGLFGNLIALSLGLTPNFKSNFDLAEDAKLQLSKDTYDDDLDNLLAQIGDQYADLFLAAKNLSDAILLSDILRVNTEITKAPLSASMIKRYDEHHQDLTLLKALVRQQLPEKYKEIFFDQSKNGYAGYIDGGASQEEFYKFIKPILEKMDGTEELLVKLNREDLLRKQRTFDNGSIPHQIHLGELHAILRRQEDFYPFLKDNREKIEKILTFRIPYYVGPLARGNSRFAWMTRKSEETITPWNFEEVVDKGASAQSFIERMTNFDKNLPNEKVLPKHSLLYEYFTVYNELTKVKYVTEGMRKPAFLSGEQKKAIVDLLFKTNRKVTVKQLKEDYFKKIECFDSVEISGVEDRFNASLGTYHDLLKIIKDKDFLDNEENEDILEDIVLTLTLFEDREMIEERLKTYAHLFDDKVMKQLKRRRYTGWGRLSRKLINGIRDKQSGKTILDFLKSDGFANRNFMQLIHDDSLTFKEDIQKAQVSGQGDSLHEHIANLAGSPAIKKGILQTVKVVDELVKVMGRHKPENIVIEMARENQTTQKGQKNSRERMKRIEEGIKELGSQILKEHPVENTQLQNEKLYLYYLQNGRDMYVDQELDINRLSDYDVDHIVPQSFLKDDSIDNKVLTRSDKARGKSDNVPSEEVVKKMKNYWRQLLNAKLITQRKFDNLTKAERGGLSELDKAGFIKRQLVETRQITKHVAQILDSRMNTKYDENDKLIREVKVITLKSKLVSDFRKDFQFYKVREINNYHHAHDAYLNAVVGTALIKKYPKLESEFVYGDYKVYDVRKMIAKSEQEIGKATAKYFFYSNIMNFFKTEITLANGEIRKRPLIETNGETGEIVWDKGRDFATVRKVLSMPQVNIVKKTEVQTGGFSKESILPKRNSDKLIARKKDWDPKKYGGFDSPTVAYSVLVVAKVEKGKSKKLKSVKELLGITIMERSSFEKNPIDFLEAKGYKEVKKDLIIKLPKYSLFELENGRKRMLASAGELQKGNELALPSKYVNFLYLASHYEKLKGSPEDNEQKQLFVEQHKHYLDEIIEQISEFSKRVILADANLDKVLSAYNKHRDKPIREQAENIIHLFTLTNLGAPAAFKYFDTTIDRKRYTSTKEVLDATLIHQSITGLYETRIDLSQLGGDGGPAPGGGGSSGGTLQLEEEYRLFEPESTQKQEMDIWLKNFPQAWAETGGMGTAHCQAPVLIQLKATATPISIRQYPMPHEAYQGIKPHIRRMLDQGILKPCQSPWNTPLLPVKKPGTEDYRPVQDLREVNKRVEDIHPTVPNPYNLLSTLPPSHPWYTVLDLKDAFFCLRLHSESQLLFAFEWRDPEIGLSGQLTWTRLPQGFKNSPTLFNEALHSDLADFRVRYPALVLLQYVDDLLLAAATRTECLEGTKALLETLGNKGYRASAKKAQICLQEVTYLGYSLKDGQRWLTKARKEAILSIPVPKNSRQVREFLGKAGYCRLFIPGFAELAAPLYPLTRPGTLFQWGTEQQLAFEDIKKALLSSPALGLPDITKPFELFIDENSGFAKGVLVQKLGPWKRPVAYLSKKLDTVASGWPPCLRMVAAIAILVKDAGKLTLGQPLTILTSHPVEALVRQPPNKWLSNARMTHYQAMLLDAERVHFGPTVSLNPATLLPLPSGGNHHDCLQILAETHGTRPDLTDQPLPDADLTWYTDGSSFIRNGEREAGAAVTTESEVIWAAPLPPGTSAQRAELIALTQALKMAEGKKLTVYTDSRYAFATTHVHGEIYRRRGWLTSEGKEIKNKNEILALLEALFLPKRLSIIHCPGHQKGDSPQAKGNRLADDTAKKAATETHSSLTVLPAGKRTADGSEFEKRTADGSEFESPKKKAKVE

SEQ ID NO: 1278 - protein, 2095 aa, synthetic construct
MPAAKRVKLDGGDKKYSIGLDIGTNSVGWAVITDEYKVPSKKFKVLGNTDRHSIKKNLIGALLFDSGETAEATRLKRTARRRYTRRKNRICYLQEIFSNEMAKVDDSFFHRLEESFLVEEDKKHERHPIFGNIVDEVAYHEKYPTIYHLRKKLVDSTDKADLRLIYLALAHMIKFRGHFLIEGDLNPDNSDVDKLFIQLVQTYNQLFEENPINASGVDAKAILSARLSKSRRLENLIAQLPGEKKNGLFGNLIALSLGLTPNFKSNFDLAEDAKLQLSKDTYDDDLDNLLAQIGDQYADLFLAAKNLSDAILLSDILRVNTEITKAPLSASMIKRYDEHHQDLTLLKALVRQQLPEKYKEIFFDQSKNGYAGYIDGGASQEEFYKFIKPILEKMDGTEELLVKLNREDLLRKQRTFDNGSIPHQIHLGELHAILRRQEDFYPFLKDNREKIEKILTFRIPYYVGPLARGNSRFAWMTRKSEETITPWNFEEVVDKGASAQSFIERMTNFDKNLPNEKVLPKHSLLYEYFTVYNELTKVKYVTEGMRKPAFLSGEQKKAIVDLLFKTNRKVTVKQLKEDYFKKIECFDSVEISGVEDRFNASLGTYHDLLKIIKDKDFLDNEENEDILEDIVLTLTLFEDREMIEERLKTYAHLFDDKVMKQLKRRRYTGWGRLSRKLINGIRDKQSGKTILDFLKSDGFANRNFMQLIHDDSLTFKEDIQKAQVSGQGDSLHEHIANLAGSPAIKKGILQTVKVVDELVKVMGRHKPENIVIEMARENQTTQKGQKNSRERMKRIEEGIKELGSQILKEHPVENTQLQNEKLYLYYLQNGRDMYVDQELDINRLSDYDVDHIVPQSFLKDDSIDNKVLTRSDKARGKSDNVPSEEVVKKMKNYWRQLLNAKLITQRKFDNLTKAERGGLSELDKAGFIKRQLVETRQITKHVAQILDSRMNTKYDENDKLIREVKVITLKSKLVSDFRKDFQFYKVREINNYHHAHDAYLNAVVGTALIKKYPKLESEFVYGDYKVYDVRKMIAKSEQEIGKATAKYFFYSNIMNFFKTEITLANGEIRKRPLIETNGETGEIVWDKGRDFATVRKVLSMPQVNIVKKTEVQTGGFSKESILPKRNSDKLIARKKDWDPKKYGGFDSPTVAYSVLVVAKVEKGKSKKLKSVKELLGITIMERSSFEKNPIDFLEAKGYKEVKKDLIIKLPKYSLFELENGRKRMLASAGELQKGNELALPSKYVNFLYLASHYEKLKGSPEDNEQKQLFVEQHKHYLDEIIEQISEFSKRVILADANLDKVLSAYNKHRDKPIREQAENIIHLFTLTNLGAPAAFKYFDTTIDRKRYTSTKEVLDATLIHQSITGLYETRIDLSQLGGDGGGGSEAAAKGSSGGTLQLEEEYRLFEPESTQKQEMDIWLKNFPQAWAETGGMGTAHCQAPVLIQLKATATPISIRQYPMPHEAYQGIKPHIRRMLDQGILKPCQSPWNTPLLPVKKPGTEDYRPVQDLREVNKRVEDIHPTVPNPYNLLSTLPPSHPWYTVLDLKDAFFCLRLHSESQLLFAFEWRDPEIGLSGQLTWTRLPQGFKNSPTLFNEALHSDLADFRVRYPALVLLQYVDDLLLAAATRTECLEGTKALLETLGNKGYRASAKKAQICLQEVTYLGYSLKDGQRWLTKARKEAILSIPVPKNSRQVREFLGKAGYCRLFIPGFAELAAPLYPLTRPGTLFQWGTEQQLAFEDIKKALLSSPALGLPDITKPFELFIDENSGFAKGVLVQKLGPWKRPVAYLSKKLDTVASGWPPCLRMVAAIAILVKDAGKLTLGQPLTILTSHPVEALVRQPPNKWLSNARMTHYQAMLLDAERVHFGPTVSLNPATLLPLPSGGNHHDCLQILAETHGTRPDLTDQPLPDADLTWYTDGSSFIRNGEREAGAAVTTESEVIWAAPLPPGTSAQRAELIALTQALKMAEGKKLTVYTDSRYAFATTHVHGEIYRRRGWLTSEGKEIKNKNEILALLEALFLPKRLSIIHCPGHQKGDSPQAKGNRLADDTAKKAATETHSSLTVLPAGKRTADGSEFEKRTADGSEFESPKKKAKVE

SEQ ID NO: 1279 - protein, 2095 aa, synthetic construct
MPAAKRVKLDGGDKKYSIGLDIGTNSVGWAVITDEYKVPSKKFKVLGNTDRHSIKKNLIGALLFDSGETAEATRLKRTARRRYTRRKNRICYLQEIFSNEMAKVDDSFFHRLEESFLVEEDKKHERHPIFGNIVDEVAYHEKYPTIYHLRKKLVDSTDKADLRLIYLALAHMIKFRGHFLIEGDLNPDNSDVDKLFIQLVQTYNQLFEENPINASGVDAKAILSARLSKSRRLENLIAQLPGEKKNGLFGNLIALSLGLTPNFKSNFDLAEDAKLQLSKDTYDDDLDNLLAQIGDQYADLFLAAKNLSDAILLSDILRVNTEITKAPLSASMIKRYDEHHQDLTLLKALVRQQLPEKYKEIFFDQSKNGYAGYIDGGASQEEFYKFIKPILEKMDGTEELLVKLNREDLLRKQRTFDNGSIPHQIHLGELHAILRRQEDFYPFLKDNREKIEKILTFRIPYYVGPLARGNSRFAWMTRKSEETITPWNFEEVVDKGASAQSFIERMTNFDKNLPNEKVLPKHSLLYEYFTVYNELTKVKYVTEGMRKPAFLSGEQKKAIVDLLFKTNRKVTVKQLKEDYFKKIECFDSVEISGVEDRFNASLGTYHDLLKIIKDKDFLDNEENEDILEDIVLTLTLFEDREMIEERLKTYAHLFDDKVMKQLKRRRYTGWGRLSRKLINGIRDKQSGKTILDFLKSDGFANRNFMQLIHDDSLTFKEDIQKAQVSGQGDSLHEHIANLAGSPAIKKGILQTVKVVDELVKVMGRHKPENIVIEMARENQTTQKGQKNSRERMKRIEEGIKELGSQILKEHPVENTQLQNEKLYLYYLQNGRDMYVDQELDINRLSDYDVDHIVPQSFLKDDSIDNKVLTRSDKARGKSDNVPSEEVVKKMKNYWRQLLNAKLITQRKFDNLTKAERGGLSELDKAGFIKRQLVETRQITKHVAQILDSRMNTKYDENDKLIREVKVITLKSKLVSDFRKDFQFYKVREINNYHHAHDAYLNAVVGTALIKKYPKLESEFVYGDYKVYDVRKMIAKSEQEIGKATAKYFFYSNIMNFFKTEITLANGEIRKRPLIETNGETGEIVWDKGRDFATVRKVLSMPQVNIVKKTEVQTGGFSKESILPKRNSDKLIARKKDWDPKKYGGFDSPTVAYSVLVVAKVEKGKSKKLKSVKELLGITIMERSSFEKNPIDFLEAKGYKEVKKDLIIKLPKYSLFELENGRKRMLASAGELQKGNELALPSKYVNFLYLASHYEKLKGSPEDNEQKQLFVEQHKHYLDEIIEQISEFSKRVILADANLDKVLSAYNKHRDKPIREQAENIIHLFTLTNLGAPAAFKYFDTTIDRKRYTSTKEVLDATLIHQSITGLYETRIDLSQLGGDGGEAAAKGGSGGGGGTLQLEEEYRLFEPESTQKQEMDIWLKNFPQAWAETGGMGTAHCQAPVLIQLKATATPISIRQYPMPHEAYQGIKPHIRRMLDQGILKPCQSPWNTPLLPVKKPGTEDYRPVQDLREVNKRVEDIHPTVPNPYNLLSTLPPSHPWYTVLDLKDAFFCLRLHSESQLLFAFEWRDPEIGLSGQLTWTRLPQGFKNSPTLFNEALHSDLADFRVRYPALVLLQYVDDLLLAAATRTECLEGTKALLETLGNKGYRASAKKAQICLQEVTYLGYSLKDGQRWLTKARKEAILSIPVPKNSRQVREFLGKAGYCRLFIPGFAELAAPLYPLTRPGTLFQWGTEQQLAFEDIKKALLSSPALGLPDITKPFELFIDENSGFAKGVLVQKLGPWKRPVAYLSKKLDTVASGWPPCLRMVAAIAILVKDAGKLTLGQPLTILTSHPVEALVRQPPNKWLSNARMTHYQAMLLDAERVHFGPTVSLNPATLLPLPSGGNHHDCLQILAETHGTRPDLTDQPLPDADLTWYTDGSSFIRNGEREAGAAVTTESEVIWAAPLPPGTSAQRAELIALTQALKMAEGKKLTVYTDSRYAFATTHVHGEIYRRRGWLTSEGKEIKNKNEILALLEALFLPKRLSIIHCPGHQKGDSPQAKGNRLADDTAKKAATETHSSLTVLPAGKRTADGSEFEKRTADGSEFESPKKKAKVE

SEQ ID NO: 1280 - protein, 2092 aa, synthetic construct
MPAAKRVKLDGGDKKYSIGLDIGTNSVGWAVITDEYKVPSKKFKVLGNTDRHSIKKNLIGALLFDSGETAEATRLKRTARRRYTRRKNRICYLQEIFSNEMAKVDDSFFHRLEESFLVEEDKKHERHPIFGNIVDEVAYHEKYPTIYHLRKKLVDSTDKADLRLIYLALAHMIKFRGHFLIEGDLNPDNSDVDKLFIQLVQTYNQLFEENPINASGVDAKAILSARLSKSRRLENLIAQLPGEKKNGLFGNLIALSLGLTPNFKSNFDLAEDAKLQLSKDTYDDDLDNLLAQIGDQYADLFLAAKNLSDAILLSDILRVNTEITKAPLSASMIKRYDEHHQDLTLLKALVRQQLPEKYKEIFFDQSKNGYAGYIDGGASQEEFYKFIKPILEKMDGTEELLVKLNREDLLRKQRTFDNGSIPHQIHLGELHAILRRQEDFYPFLKDNREKIEKILTFRIPYYVGPLARGNSRFAWMTRKSEETITPWNFEEVVDKGASAQSFIERMTNFDKNLPNEKVLPKHSLLYEYFTVYNELTKVKYVTEGMRKPAFLSGEQKKAIVDLLFKTNRKVTVKQLKEDYFKKIECFDSVEISGVEDRFNASLGTYHDLLKIIKDKDFLDNEENEDILEDIVLTLTLFEDREMIEERLKTYAHLFDDKVMKQLKRRRYTGWGRLSRKLINGIRDKQSGKTILDFLKSDGFANRNFMQLIHDDSLTFKEDIQKAQVSGQGDSLHEHIANLAGSPAIKKGILQTVKVVDELVKVMGRHKPENIVIEMARENQTTQKGQKNSRERMKRIEEGIKELGSQILKEHPVENTQLQNEKLYLYYLQNGRDMYVDQELDINRLSDYDVDHIVPQSFLKDDSIDNKVLTRSDKARGKSDNVPSEEVVKKMKNYWRQLLNAKLITQRKFDNLTKAERGGLSELDKAGFIKRQLVETRQITKHVAQILDSRMNTKYDENDKLIREVKVITLKSKLVSDFRKDFQFYKVREINNYHHAHDAYLNAVVGTALIKKYPKLESEFVYGDYKVYDVRKMIAKSEQEIGKATAKYFFYSNIMNFFKTEITLANGEIRKRPLIETNGETGEIVWDKGRDFATVRKVLSMPQVNIVKKTEVQTGGFSKESILPKRNSDKLIARKKDWDPKKYGGFDSPTVAYSVLVVAKVEKGKSKKLKSVKELLGITIMERSSFEKNPIDFLEAKGYKEVKKDLIIKLPKYSLFELENGRKRMLASAGELQKGNELALPSKYVNFLYLASHYEKLKGSPEDNEQKQLFVEQHKHYLDEIIEQISEFSKRVILADANLDKVLSAYNKHRDKPIREQAENIIHLFTLTNLGAPAAFKYFDTTIDRKRYTSTKEVLDATLIHQSITGLYETRIDLSQLGGDGGGGGEAAAKGGTLQLEEEYRLFEPESTQKQEMDIWLKNFPQAWAETGGMGTAHCQAPVLIQLKATATPISIRQYPMPHEAYQGIKPHIRRMLDQGILKPCQSPWNTPLLPVKKPGTEDYRPVQDLREVNKRVEDIHPTVPNPYNLLSTLPPSHPWYTVLDLKDAFFCLRLHSESQLLFAFEWRDPEIGLSGQLTWTRLPQGFKNSPTLFNEALHSDLADFRVRYPALVLLQYVDDLLLAAATRTECLEGTKALLETLGNKGYRASAKKAQICLQEVTYLGYSLKDGQRWLTKARKEAILSIPVPKNSRQVREFLGKAGYCRLFIPGFAELAAPLYPLTRPGTLFQWGTEQQLAFEDIKKALLSSPALGLPDITKPFELFIDENSGFAKGVLVQKLGPWKRPVAYLSKKLDTVASGWPPCLRMVAAIAILVKDAGKLTLGQPLTILTSHPVEALVRQPPNKWLSNARMTHYQAMLLDAERVHFGPTVSLNPATLLPLPSGGNHHDCLQILAETHGTRPDLTDQPLPDADLTWYTDGSSFIRNGEREAGAAVTTESEVIWAAPLPPGTSAQRAELIALTQALKMAEGKKLTVYTDSRYAFATTHVHGEIYRRRGWLTSEGKEIKNKNEILALLEALFLPKRLSIIHCPGHQKGDSPQAKGNRLADDTAKKAATETHSSLTVLPAGKRTADGSEFEKRTADGSEFESPKKKAKVE

SEQ ID NO: 1281 - protein, 2090 aa, synthetic construct
MPAAKRVKLDGGDKKYSIGLDIGTNSVGWAVITDEYKVPSKKFKVLGNTDRHSIKKNLIGALLFDSGETAEATRLKRTARRRYTRRKNRICYLQEIFSNEMAKVDDSFFHRLEESFLVEEDKKHERHPIFGNIVDEVAYHEKYPTIYHLRKKLVDSTDKADLRLIYLALAHMIKFRGHFLIEGDLNPDNSDVDKLFIQLVQTYNQLFEENPINASGVDAKAILSARLSKSRRLENLIAQLPGEKKNGLFGNLIALSLGLTPNFKSNFDLAEDAKLQLSKDTYDDDLDNLLAQIGDQYADLFLAAKNLSDAILLSDILRVNTEITKAPLSASMIKRYDEHHQDLTLLKALVRQQLPEKYKEIFFDQSKNGYAGYIDGGASQEEFYKFIKPILEKMDGTEELLVKLNREDLLRKQRTFDNGSIPHQIHLGELHAILRRQEDFYPFLKDNREKIEKILTFRIPYYVGPLARGNSRFAWMTRKSEETITPWNFEEVVDKGASAQSFIERMTNFDKNLPNEKVLPKHSLLYEYFTVYNELTKVKYVTEGMRKPAFLSGEQKKAIVDLLFKTNRKVTVKQLKEDYFKKIECFDSVEISGVEDRFNASLGTYHDLLKIIKDKDFLDNEENEDILEDIVLTLTLFEDREMIEERLKTYAHLFDDKVMKQLKRRRYTGWGRLSRKLINGIRDKQSGKTILDFLKSDGFANRNFMQLIHDDSLTFKEDIQKAQVSGQGDSLHEHIANLAGSPAIKKGILQTVKVVDELVKVMGRHKPENIVIEMARENQTTQKGQKNSRERMKRIEEGIKELGSQILKEHPVENTQLQNEKLYLYYLQNGRDMYVDQELDINRLSDYDVDHIVPQSFLKDDSIDNKVLTRSDKARGKSDNVPSEEVVKKMKNYWRQLLNAKLITQRKFDNLTKAERGGLSELDKAGFIKRQLVETRQITKHVAQILDSRMNTKYDENDKLIREVKVITLKSKLVSDFRKDFQFYKVREINNYHHAHDAYLNAVVGTALIKKYPKLESEFVYGDYKVYDVRKMIAKSEQEIGKATAKYFFYSNIMNFFKTEITLANGEIRKRPLIETNGETGEIVWDKGRDFATVRKVLSMPQVNIVKKTEVQTGGFSKESILPKRNSDKLIARKKDWDPKKYGGFDSPTVAYSVLVVAKVEKGKSKKLKSVKELLGITIMERSSFEKNPIDFLEAKGYKEVKKDLIIKLPKYSLFELENGRKRMLASAGELQKGNELALPSKYVNFLYLASHYEKLKGSPEDNEQKQLFVEQHKHYLDEIIEQISEFSKRVILADANLDKVLSAYNKHRDKPIREQAENIIHLFTLTNLGAPAAFKYFDTTIDRKRYTSTKEVLDATLIHQSITGLYETRIDLSQLGGDGGGGGGGSGGTLQLEEEYRLFEPESTQKQEMDIWLKNFPQAWAETGGMGTAHCQAPVLIQLKATATPISIRQYPMPHEAYQGIKPHIRRMLDQGILKPCQSPWNTPLLPVKKPGTEDYRPVQDLREVNKRVEDIHPTVPNPYNLLSTLPPSHPWYTVLDLKDAFFCLRLHSESQLLFAFEWRDPEIGLSGQLTWTRLPQGFKNSPTLFNEALHSDLADFRVRYPALVLLQYVDDLLLAAATRTECLEGTKALLETLGNKGYRASAKKAQICLQEVTYLGYSLKDGQRWLTKARKEAILSIPVPKNSRQVREFLGKAGYCRLFIPGFAELAAPLYPLTRPGTLFQWGTEQQLAFEDIKKALLSSPALGLPDITKPFELFIDENSGFAKGVLVQKLGPWKRPVAYLSKKLDTVASGWPPCLRMVAAIAILVKDAGKLTLGQPLTILTSHPVEALVRQPPNKWLSNARMTHYQAMLLDAERVHFGPTVSLNPATLLPLPSGGNHHDCLQILAETHGTRPDLTDQPLPDADLTWYTDGSSFIRNGEREAGAAVTTESEVIWAAPLPPGTSAQRAELIALTQALKMAEGKKLTVYTDSRYAFATTHVHGEIYRRRGWLTSEGKEIKNKNEILALLEALFLPKRLSIIHCPGHQKGDSPQAKGNRLADDTAKKAATETHSSLTVLPAGKRTADGSEFEKRTADGSEFESPKKKAKVE

SEQ ID NO: 1282 - protein, 2211 aa, synthetic construct
MPAAKRVKLDGGDKKYSIGLDIGTNSVGWAVITDEYKVPSKKFKVLGNTDRHSIKKNLIGALLFDSGETAEATRLKRTARRRYTRRKNRICYLQEIFSNEMAKVDDSFFHRLEESFLVEEDKKHERHPIFGNIVDEVAYHEKYPTIYHLRKKLVDSTDKADLRLIYLALAHMIKFRGHFLIEGDLNPDNSDVDKLFIQLVQTYNQLFEENPINASGVDAKAILSARLSKSRRLENLIAQLPGEKKNGLFGNLIALSLGLTPNFKSNFDLAEDAKLQLSKDTYDDDLDNLLAQIGDQYADLFLAAKNLSDAILLSDILRVNTEITKAPLSASMIKRYDEHHQDLTLLKALVRQQLPEKYKEIFFDQSKNGYAGYIDGGASQEEFYKFIKPILEKMDGTEELLVKLNREDLLRKQRTFDNGSIPHQIHLGELHAILRRQEDFYPFLKDNREKIEKILTFRIPYYVGPLARGNSRFAWMTRKSEETITPWNFEEVVDKGASAQSFIERMTNFDKNLPNEKVLPKHSLLYEYFTVYNELTKVKYVTEGMRKPAFLSGEQKKAIVDLLFKTNRKVTVKQLKEDYFKKIECFDSVEISGVEDRFNASLGTYHDLLKIIKDKDFLDNEENEDILEDIVLTLTLFEDREMIEERLKTYAHLFDDKVMKQLKRRRYTGWGRLSRKLINGIRDKQSGKTILDFLKSDGFANRNFMQLIHDDSLTFKEDIQKAQVSGQGDSLHEHIANLAGSPAIKKGILQTVKVVDELVKVMGRHKPENIVIEMARENQTTQKGQKNSRERMKRIEEGIKELGSQILKEHPVENTQLQNEKLYLYYLQNGRDMYVDQELDINRLSDYDVDHIVPQSFLKDDSIDNKVLTRSDKARGKSDNVPSEEVVKKMKNYWRQLLNAKLITQRKFDNLTKAERGGLSELDKAGFIKRQLVETRQITKHVAQILDSRMNTKYDENDKLIREVKVITLKSKLVSDFRKDFQFYKVREINNYHHAHDAYLNAVVGTALIKKYPKLESEFVYGDYKVYDVRKMIAKSEQEIGKATAKYFFYSNIMNFFKTEITLANGEIRKRPLIETNGETGEIVWDKGRDFATVRKVLSMPQVNIVKKTEVQTGGFSKESILPKRNSDKLIARKKDWDPKKYGGFDSPTVAYSVLVVAKVEKGKSKKLKSVKELLGITIMERSSFEKNPIDFLEAKGYKEVKKDLIIKLPKYSLFELENGRKRMLASAGELQKGNELALPSKYVNFLYLASHYEKLKGSPEDNEQKQLFVEQHKHYLDEIIEQISEFSKRVILADANLDKVLSAYNKHRDKPIREQAENIIHLFTLTNLGAPAAFKYFDTTIDRKRYTSTKEVLDATLIHQSITGLYETRIDLSQLGGDGGAEAAAKEAAAKEAAAKEAAAKALEAEAAAKEAAAKEAAAKEAAAKAGGMNPLQLLQPLPAEIKGTKLLAHWNSGATITCIPESFLEDEQPIKKTLIKTIHGEKQQNVYYVTFKVKGRKVEAEVIASPYEYILLSPTDVPWLTQQPLQLTILVPLQEYQEKILSKTALPEDQKQQLKTLFVKYDNLWQHWENQVGHRKIRPHNIATGDYPPRPQKQYPINPKAKPSIQIVIDDLLKQGVLTPQNSTMNTPVYPVPKPDGRWRMVLDYREVNKTIPLTAAQNQHSAGILATIVRQKYKTTLDLANGFWAHPITPESYWLTAFTWQGKQYCWTRLPQGFLNSPALFTADVVDLLKEIPNVQVYVDDIYLSHDDPKEHVQQLEKVFQILLQAGYVVSLKKSEIGQKTVEFLGFNITKEGRGLTDTFKTKLLNITPPKDLKQLQSILGLLNFARNFIPNFAELVQPLYNLIASAKGKYIEWSEENTKQLNMVIEALNTASNLEERLPEQRLVIKVNTSPSAGYVRYYNETGKKPIMYLNYVFSKAELKFSMLEKLLTTMHKALIKAMDLAMGQEILVYSPIVSMTKIQKTPLPERKALPIRWITWMTYLEDPRIQFHYDKTLPELKHIPDVYTSSQSPVKHPSQYEGVFYTDGSAIKSPDPTKSNNAGMGIVHATYKPEYQVLNQWSIPLGNHTAQMAEIAAVEFACKKALKIPGPVLVITDSFYVAESANKELPYWKSNGFVNNKKKPLKHISKWKSIAECLSMKPDITIQHEKGISLQIPVFILKGNALADKLATQGSYVVNAGKRTADGSEFEKRTADGSEFESPKKKAKVE

SEQ ID NO: 1283 - protein, 2190 aa, synthetic construct
MPAAKRVKLDGGDKKYSIGLDIGTNSVGWAVITDEYKVPSKKFKVLGNTDRHSIKKNLIGALLFDSGETAEATRLKRTARRRYTRRKNRICYLQEIFSNEMAKVDDSFFHRLEESFLVEEDKKHERHPIFGNIVDEVAYHEKYPTIYHLRKKLVDSTDKADLRLIYLALAHMIKFRGHFLIEGDLNPDNSDVDKLFIQLVQTYNQLFEENPINASGVDAKAILSARLSKSRRLENLIAQLPGEKKNGLFGNLIALSLGLTPNFKSNFDLAEDAKLQLSKDTYDDDLDNLLAQIGDQYADLFLAAKNLSDAILLSDILRVNTEITKAPLSASMIKRYDEHHQDLTLLKALVRQQLPEKYKEIFFDQSKNGYAGYIDGGASQEEFYKFIKPILEKMDGTEELLVKLNREDLLRKQRTFDNGSIPHQIHLGELHAILRRQEDFYPFLKDNREKIEKILTFRIPYYVGPLARGNSRFAWMTRKSEETITPWNFEEVVDKGASAQSFIERMTNFDKNLPNEKVLPKHSLLYEYFTVYNELTKVKYVTEGMRKPAFLSGEQKKAIVDLLFKTNRKVTVKQLKEDYFKKIECFDSVEISGVEDRFNASLGTYHDLLKIIKDKDFLDNEENEDILEDIVLTLTLFEDREMIEERLKTYAHLFDDKVMKQLKRRRYTGWGRLSRKLINGIRDKQSGKTILDFLKSDGFANRNFMQLIHDDSLTFKEDIQKAQVSGQGDSLHEHIANLAGSPAIKKGILQTVKVVDELVKVMGRHKPENIVIEMARENQTTQKGQKNSRERMKRIEEGIKELGSQILKEHPVENTQLQNEKLYLYYLQNGRDMYVDQELDINRLSDYDVDHIVPQSFLKDDSIDNKVLTRSDKARGKSDNVPSEEVVKKMKNYWRQLLNAKLITQRKFDNLTKAERGGLSELDKAGFIKRQLVETRQITKHVAQILDSRMNTKYDENDKLIREVKVITLKSKLVSDFRKDFQFYKVREINNYHHAHDAYLNAVVGTALIKKYPKLESEFVYGDYKVYDVRKMIAKSEQEIGKATAKYFFYSNIMNFFKTEITLANGEIRKRPLIETNGETGEIVWDKGRDFATVRKVLSMPQVNIVKKTEVQTGGFSKESILPKRNSDKLIARKKDWDPKKYGGFDSPTVAYSVLVVAKVEKGKSKKLKSVKELLGITIMERSSFEKNPIDFLEAKGYKEVKKDLIIKLPKYSLFELENGRKRMLASAGELQKGNELALPSKYVNFLYLASHYEKLKGSPEDNEQKQLFVEQHKHYLDEIIEQISEFSKRVILADANLDKVLSAYNKHRDKPIREQAENIIHLFTLTNLGAPAAFKYFDTTIDRKRYTSTKEVLDATLIHQSITGLYETRIDLSQLGGDGGEAAAKEAAAKEAAAKEAAAKEAAAKGGMNPLQLLQPLPAEIKGTKLLAHWNSGATITCIPESFLEDEQPIKKTLIKTIHGEKQQNVYYVTFKVKGRKVEAEVIASPYEYILLSPTDVPWLTQQPLQLTILVPLQEYQEKILSKTALPEDQKQQLKTLFVKYDNLWQHWENQVGHRKIRPHNIATGDYPPRPQKQYPINPKAKPSIQIVIDDLLKQGVLTPQNSTMNTPVYPVPKPDGRWRMVLDYREVNKTIPLTAAQNQHSAGILATIVRQKYKTTLDLANGFWAHPITPESYWLTAFTWQGKQYCWTRLPQGFLNSPALFTADVVDLLKEIPNVQVYVDDIYLSHDDPKEHVQQLEKVFQILLQAGYVVSLKKSEIGQKTVEFLGFNITKEGRGLTDTFKTKLLNITPPKDLKQLQSILGLLNFARNFIPNFAELVQPLYNLIASAKGKYIEWSEENTKQLNMVIEALNTASNLEERLPEQRLVIKVNTSPSAGYVRYYNETGKKPIMYLNYVFSKAELKFSMLEKLLTTMHKALIKAMDLAMGQEILVYSPIVSMTKIQKTPLPERKALPIRWITWMTYLEDPRIQFHYDKTLPELKHIPDVYTSSQSPVKHPSQYEGVFYTDGSAIKSPDPTKSNNAGMGIVHATYKPEYQVLNQWSIPLGNHTAQMAEIAAVEFACKKALKIPGPVLVITDSFYVAESANKELPYWKSNGFVNNKKKPLKHISKWKSIAECLSMKPDITIQHEKGISLQIPVFILKGNALADKLATQGSYVVNAGKRTADGSEFEKRTADGSEFESPKKKAKVE

SEQ ID NO: 1284 - protein, 2183 aa, synthetic construct
MPAAKRVKLDGGDKKYSIGLDIGTNSVGWAVITDEYKVPSKKFKVLGNTDRHSIKKNLIGALLFDSGETAEATRLKRTARRRYTRRKNRICYLQEIFSNEMAKVDDSFFHRLEESFLVEEDKKHERHPIFGNIVDEVAYHEKYPTIYHLRKKLVDSTDKADLRLIYLALAHMIKFRGHFLIEGDLNPDNSDVDKLFIQLVQTYNQLFEENPINASGVDAKAILSARLSKSRRLENLIAQLPGEKKNGLFGNLIALSLGLTPNFKSNFDLAEDAKLQLSKDTYDDDLDNLLAQIGDQYADLFLAAKNLSDAILLSDILRVNTEITKAPLSASMIKRYDEHHQDLTLLKALVRQQLPEKYKEIFFDQSKNGYAGYIDGGASQEEFYKFIKPILEKMDGTEELLVKLNREDLLRKQRTFDNGSIPHQIHLGELHAILRRQEDFYPFLKDNREKIEKILTFRIPYYVGPLARGNSRFAWMTRKSEETITPWNFEEVVDKGASAQSFIERMTNFDKNLPNEKVLPKHSLLYEYFTVYNELTKVKYVTEGMRKPAFLSGEQKKAIVDLLFKTNRKVTVKQLKEDYFKKIECFDSVEISGVEDRFNASLGTYHDLLKIIKDKDFLDNEENEDILEDIVLTLTLFEDREMIEERLKTYAHLFDDKVMKQLKRRRYTGWGRLSRKLINGIRDKQSGKTILDFLKSDGFANRNFMQLIHDDSLTFKEDIQKAQVSGQGDSLHEHIANLAGSPAIKKGILQTVKVVDELVKVMGRHKPENIVIEMARENQTTQKGQKNSRERMKRIEEGIKELGSQILKEHPVENTQLQNEKLYLYYLQNGRDMYVDQELDINRLSDYDVDHIVPQSFLKDDSIDNKVLTRSDKARGKSDNVPSEEVVKKMKNYWRQLLNAKLITQRKFDNLTKAERGGLSELDKAGFIKRQLVETRQITKHVAQILDSRMNTKYDENDKLIREVKVITLKSKLVSDFRKDFQFYKVREINNYHHAHDAYLNAVVGTALIKKYPKLESEFVYGDYKVYDVRKMIAKSEQEIGKATAKYFFYSNIMNFFKTEITLANGEIRKRPLIETNGETGEIVWDKGRDFATVRKVLSMPQVNIVKKTEVQTGGFSKESILPKRNSDKLIARKKDWDPKKYGGFDSPTVAYSVLVVAKVEKGKSKKLKSVKELLGITIMERSSFEKNPIDFLEAKGYKEVKKDLIIKLPKYSLFELENGRKRMLASAGELQKGNELALPSKYVNFLYLASHYEKLKGSPEDNEQKQLFVEQHKHYLDEIIEQISEFSKRVILADANLDKVLSAYNKHRDKPIREQAENIIHLFTLTNLGAPAAFKYFDTTIDRKRYTSTKEVLDATLIHQSITGLYETRIDLSQLGGDGGGSSGSSGSSGSSGSSGSSGGMNPLQLLQPLPAEIKGTKLLAHWNSGATITCIPESFLEDEQPIKKTLIKTIHGEKQQNVYYVTFKVKGRKVEAEVIASPYEYILLSPTDVPWLTQQPLQLTILVPLQEYQEKILSKTALPEDQKQQLKTLFVKYDNLWQHWENQVGHRKIRPHNIATGDYPPRPQKQYPINPKAKPSIQIVIDDLLKQGVLTPQNSTMNTPVYPVPKPDGRWRMVLDYREVNKTIPLTAAQNQHSAGILATIVRQKYKTTLDLANGFWAHPITPESYWLTAFTWQGKQYCWTRLPQGFLNSPALFTADVVDLLKEIPNVQVYVDDIYLSHDDPKEHVQQLEKVFQILLQAGYVVSLKKSEIGQKTVEFLGFNITKEGRGLTDTFKTKLLNITPPKDLKQLQSILGLLNFARNFIPNFAELVQPLYNLIASAKGKYIEWSEENTKQLNMVIEALNTASNLEERLPEQRLVIKVNTSPSAGYVRYYNETGKKPIMYLNYVFSKAELKFSMLEKLLTTMHKALIKAMDLAMGQEILVYSPIVSMTKIQKTPLPERKALPIRWITWMTYLEDPRIQFHYDKTLPELKHIPDVYTSSQSPVKHPSQYEGVFYTDGSAIKSPDPTKSNNAGMGIVHATYKPEYQVLNQWSIPLGNHTAQMAEIAAVEFACKKALKIPGPVLVITDSFYVAESANKELPYWKSNGFVNNKKKPLKHISKWKSIAECLSMKPDITIQHEKGISLQIPVFILKGNALADKLATQGSYVVNAGKRTADGSEFEKRTADGSEFESPKKKAKVE

SEQ ID NO: 1285 - protein, 2176 aa, synthetic construct
MPAAKRVKLDGGDKKYSIGLDIGTNSVGWAVITDEYKVPSKKFKVLGNTDRHSIKKNLIGALLFDSGETAEATRLKRTARRRYTRRKNRICYLQEIFSNEMAKVDDSFFHRLEESFLVEEDKKHERHPIFGNIVDEVAYHEKYPTIYHLRKKLVDSTDKADLRLIYLALAHMIKFRGHFLIEGDLNPDNSDVDKLFIQLVQTYNQLFEENPINASGVDAKAILSARLSKSRRLENLIAQLPGEKKNGLFGNLIALSLGLTPNFKSNFDLAEDAKLQLSKDTYDDDLDNLLAQIGDQYADLFLAAKNLSDAILLSDILRVNTEITKAPLSASMIKRYDEHHQDLTLLKALVRQQLPEKYKEIFFDQSKNGYAGYIDGGASQEEFYKFIKPILEKMDGTEELLVKLNREDLLRKQRTFDNGSIPHQIHLGELHAILRRQEDFYPFLKDNREKIEKILTFRIPYYVGPLARGNSRFAWMTRKSEETITPWNFEEVVDKGASAQSFIERMTNFDKNLPNEKVLPKHSLLYEYFTVYNELTKVKYVTEGMRKPAFLSGEQKKAIVDLLFKTNRKVTVKQLKEDYFKKIECFDSVEISGVEDRFNASLGTYHDLLKIIKDKDFLDNEENEDILEDIVLTLTLFEDREMIEERLKTYAHLFDDKVMKQLKRRRYTGWGRLSRKLINGIRDKQSGKTILDFLKSDGFANRNFMQLIHDDSLTFKEDIQKAQVSGQGDSLHEHIANLAGSPAIKKGILQTVKVVDELVKVMGRHKPENIVIEMARENQTTQKGQKNSRERMKRIEEGIKELGSQILKEHPVENTQLQNEKLYLYYLQNGRDMYVDQELDINRLSDYDVDHIVPQSFLKDDSIDNKVLTRSDKARGKSDNVPSEEVVKKMKNYWRQLLNAKLITQRKFDNLTKAERGGLSELDKAGFIKRQLVETRQITKHVAQILDSRMNTKYDENDKLIREVKVITLKSKLVSDFRKDFQFYKVREINNYHHAHDAYLNAVVGTALIKKYPKLESEFVYGDYKVYDVRKMIAKSEQEIGKATAKYFFYSNIMNFFKTEITLANGEIRKRPLIETNGETGEIVWDKGRDFATVRKVLSMPQVNIVKKTEVQTGGFSKESILPKRNSDKLIARKKDWDPKKYGGFDSPTVAYSVLVVAKVEKGKSKKLKSVKELLGITIMERSSFEKNPIDFLEAKGYKEVKKDLIIKLPKYSLFELENGRKRMLASAGELQKGNELALPSKYVNFLYLASHYEKLKGSPEDNEQKQLFVEQHKHYLDEIIEQISEFSKRVILADANLDKVLSAYNKHRDKPIREQAENIIHLFTLTNLGAPAAFKYFDTTIDRKRYTSTKEVLDATLIHQSITGLYETRIDLSQLGGDGGPAPAPAPAPAPGGMNPLQLLQPLPAEIKGTKLLAHWNSGATITCIPESFLEDEQPIKKTLIKTIHGEKQQNVYYVTFKVKGRKVEAEVIASPYEYILLSPTDVPWLTQQPLQLTILVPLQEYQEKILSKTALPEDQKQQLKTLFVKYDNLWQHWENQVGHRKIRPHNIATGDYPPRPQKQYPINPKAKPSIQIVIDDLLKQGVLTPQNSTMNTPVYPVPKPDGRWRMVLDYREVNKTIPLTAAQNQHSAGILATIVRQKYKTTLDLANGFWAHPITPESYWLTAFTWQGKQYCWTRLPQGFLNSPALFTADVVDLLKEIPNVQVYVDDIYLSHDDPKEHVQQLEKVFQILLQAGYVVSLKKSEIGQKTVEFLGFNITKEGRGLTDTFKTKLLNITPPKDLKQLQSILGLLNFARNFIPNFAELVQPLYNLIASAKGKYIEWSEENTKQLNMVIEALNTASNLEERLPEQRLVIKVNTSPSAGYVRYYNETGKKPIMYLNYVFSKAELKFSMLEKLLTTMHKALIKAMDLAMGQEILVYSPIVSMTKIQKTPLPERKALPIRWITWMTYLEDPRIQFHYDKTLPELKHIPDVYTSSQSPVKHPSQYEGVFYTDGSAIKSPDPTKSNNAGMGIVHATYKPEYQVLNQWSIPLGNHTAQMAEIAAVEFACKKALKIPGPVLVITDSFYVAESANKELPYWKSNGFVNNKKKPLKHISKWKSIAECLSMKPDITIQHEKGISLQIPVFILKGNALADKLATQGSYVVNAGKRTADGSEFEKRTADGSEFESPKKKAKVE

SEQ ID NO: 1286 - protein, 2176 aa, synthetic construct
MPAAKRVKLDGGDKKYSIGLDIGTNSVGWAVITDEYKVPSKKFKVLGNTDRHSIKKNLIGALLFDSGETAEATRLKRTARRRYTRRKNRICYLQEIFSNEMAKVDDSFFHRLEESFLVEEDKKHERHPIFGNIVDEVAYHEKYPTIYHLRKKLVDSTDKADLRLIYLALAHMIKFRGHFLIEGDLNPDNSDVDKLFIQLVQTYNQLFEENPINASGVDAKAILSARLSKSRRLENLIAQLPGEKKNGLFGNLIALSLGLTPNFKSNFDLAEDAKLQLSKDTYDDDLDNLLAQIGDQYADLFLAAKNLSDAILLSDILRVNTEITKAPLSASMIKRYDEHHQDLTLLKALVRQQLPEKYKEIFFDQSKNGYAGYIDGGASQEEFYKFIKPILEKMDGTEELLVKLNREDLLRKQRTFDNGSIPHQIHLGELHAILRRQEDFYPFLKDNREKIEKILTFRIPYYVGPLARGNSRFAWMTRKSEETITPWNFEEVVDKGASAQSFIERMTNFDKNLPNEKVLPKHSLLYEYFTVYNELTKVKYVTEGMRKPAFLSGEQKKAIVDLLFKTNRKVTVKQLKEDYFKKIECFDSVEISGVEDRFNASLGTYHDLLKIIKDKDFLDNEENEDILEDIVLTLTLFEDREMIEERLKTYAHLFDDKVMKQLKRRRYTGWGRLSRKLINGIRDKQSGKTILDFLKSDGFANRNFMQLIHDDSLTFKEDIQKAQVSGQGDSLHEHIANLAGSPAIKKGILQTVKVVDELVKVMGRHKPENIVIEMARENQTTQKGQKNSRERMKRIEEGIKELGSQILKEHPVENTQLQNEKLYLYYLQNGRDMYVDQELDINRLSDYDVDHIVPQSFLKDDSIDNKVLTRSDKARGKSDNVPSEEVVKKMKNYWRQLLNAKLITQRKFDNLTKAERGGLSELDKAGFIKRQLVETRQITKHVAQILDSRMNTKYDENDKLIREVKVITLKSKLVSDFRKDFQFYKVREINNYHHAHDAYLNAVVGTALIKKYPKLESEFVYGDYKVYDVRKMIAKSEQEIGKATAKYFFYSNIMNFFKTEITLANGEIRKRPLIETNGETGEIVWDKGRDFATVRKVLSMPQVNIVKKTEVQTGGFSKESILPKRNSDKLIARKKDWDPKKYGGFDSPTVAYSVLVVAKVEKGKSKKLKSVKELLGITIMERSSFEKNPIDFLEAKGYKEVKKDLIIKLPKYSLFELENGRKRMLASAGELQKGNELALPSKYVNFLYLASHYEKLKGSPEDNEQKQLFVEQHKHYLDEIIEQISEFSKRVILADANLDKVLSAYNKHRDKPIREQAENIIHLFTLTNLGAPAAFKYFDTTIDRKRYTSTKEVLDATLIHQSITGLYETRIDLSQLGGDGGGGSPAPEAAAKGGMNPLQLLQPLPAEIKGTKLLAHWNSGATITCIPESFLEDEQPIKKTLIKTIHGEKQQNVYYVTFKVKGRKVEAEVIASPYEYILLSPTDVPWLTQQPLQLTILVPLQEYQEKILSKTALPEDQKQQLKTLFVKYDNLWQHWENQVGHRKIRPHNIATGDYPPRPQKQYPINPKAKPSIQIVIDDLLKQGVLTPQNSTMNTPVYPVPKPDGRWRMVLDYREVNKTIPLTAAQNQHSAGILATIVRQKYKTTLDLANGFWAHPITPESYWLTAFTWQGKQYCWTRLPQGFLNSPALFTADVVDLLKEIPNVQVYVDDIYLSHDDPKEHVQQLEKVFQILLQAGYVVSLKKSEIGQKTVEFLGFNITKEGRGLTDTFKTKLLNITPPKDLKQLQSILGLLNFARNFIPNFAELVQPLYNLIASAKGKYIEWSEENTKQLNMVIEALNTASNLEERLPEQRLVIKVNTSPSAGYVRYYNETGKKPIMYLNYVFSKAELKFSMLEKLLTTMHKALIKAMDLAMGQEILVYSPIVSMTKIQKTPLPERKALPIRWITWMTYLEDPRIQFHYDKTLPELKHIPDVYTSSQSPVKHPSQYEGVFYTDGSAIKSPDPTKSNNAGMGIVHATYKPEYQVLNQWSIPLGNHTAQMAEIAAVEFACKKALKIPGPVLVITDSFYVAESANKELPYWKSNGFVNNKKKPLKHISKWKSIAECLSMKPDITIQHEKGISLQIPVFILKGNALADKLATQGSYVVNAGKRTADGSEFEKRTADGSEFESPKKKAKVE

SEQ ID NO: 1287 - protein, 2176 aa, synthetic construct
MPAAKRVKLDGGDKKYSIGLDIGTNSVGWAVITDEYKVPSKKFKVLGNTDRHSIKKNLIGALLFDSGETAEATRLKRTARRRYTRRKNRICYLQEIFSNEMAKVDDSFFHRLEESFLVEEDKKHERHPIFGNIVDEVAYHEKYPTIYHLRKKLVDSTDKADLRLIYLALAHMIKFRGHFLIEGDLNPDNSDVDKLFIQLVQTYNQLFEENPINASGVDAKAILSARLSKSRRLENLIAQLPGEKKNGLFGNLIALSLGLTPNFKSNFDLAEDAKLQLSKDTYDDDLDNLLAQIGDQYADLFLAAKNLSDAILLSDILRVNTEITKAPLSASMIKRYDEHHQDLTLLKALVRQQLPEKYKEIFFDQSKNGYAGYIDGGASQEEFYKFIKPILEKMDGTEELLVKLNREDLLRKQRTFDNGSIPHQIHLGELHAILRRQEDFYPFLKDNREKIEKILTFRIPYYVGPLARGNSRFAWMTRKSEETITPWNFEEVVDKGASAQSFIERMTNFDKNLPNEKVLPKHSLLYEYFTVYNELTKVKYVTEGMRKPAFLSGEQKKAIVDLLFKTNRKVTVKQLKEDYFKKIECFDSVEISGVEDRFNASLGTYHDLLKIIKDKDFLDNEENEDILEDIVLTLTLFEDREMIEERLKTYAHLFDDKVMKQLKRRRYTGWGRLSRKLINGIRDKQSGKTILDFLKSDGFANRNFMQLIHDDSLTFKEDIQKAQVSGQGDSLHEHIANLAGSPAIKKGILQTVKVVDELVKVMGRHKPENIVIEMARENQTTQKGQKNSRERMKRIEEGIKELGSQILKEHPVENTQLQNEKLYLYYLQNGRDMYVDQELDINRLSDYDVDHIVPQSFLKDDSIDNKVLTRSDKARGKSDNVPSEEVVKKMKNYWRQLLNAKLITQRKFDNLTKAERGGLSELDKAGFIKRQLVETRQITKHVAQILDSRMNTKYDENDKLIREVKVITLKSKLVSDFRKDFQFYKVREINNYHHAHDAYLNAVVGTALIKKYPKLESEFVYGDYKVYDVRKMIAKSEQEIGKATAKYFFYSNIMNFFKTEITLANGEIRKRPLIETNGETGEIVWDKGRDFATVRKVLSMPQVNIVKKTEVQTGGFSKESILPKRNSDKLIARKKDWDPKKYGGFDSPTVAYSVLVVAKVEKGKSKKLKSVKELLGITIMERSSFEKNPIDFLEAKGYKEVKKDLIIKLPKYSLFELENGRKRMLASAGELQKGNELALPSKYVNFLYLASHYEKLKGSPEDNEQKQLFVEQHKHYLDEIIEQISEFSKRVILADANLDKVLSAYNKHRDKPIREQAENIIHLFTLTNLGAPAAFKYFDTTIDRKRYTSTKEVLDATLIHQSITGLYETRIDLSQLGGDGGEAAAKGGSPAPGGMNPLQLLQPLPAEIKGTKLLAHWNSGATITCIPESFLEDEQPIKKTLIKTIHGEKQQNVYYVTFKVKGRKVEAEVIASPYEYILLSPTDVPWLTQQPLQLTILVPLQEYQEKILSKTALPEDQKQQLKTLFVKYDNLWQHWENQVGHRKIRPHNIATGDYPPRPQKQYPINPKAKPSIQIVIDDLLKQGVLTPQNSTMNTPVYPVPKPDGRWRMVLDYREVNKTIPLTAAQNQHSAGILATIVRQKYKTTLDLANGFWAHPITPESYWLTAFTWQGKQYCWTRLPQGFLNSPALFTADVVDLLKEIPNVQVYVDDIYLSHDDPKEHVQQLEKVFQILLQAGYVVSLKKSEIGQKTVEFLGFNITKEGRGLTDTFKTKLLNITPPKDLKQLQSILGLLNFARNFIPNFAELVQPLYNLIASAKGKYIEWSEENTKQLNMVIEALNTASNLEERLPEQRLVIKVNTSPSAGYVRYYNETGKKPIMYLNYVFSKAELKFSMLEKLLTTMHKALIKAMDLAMGQEILVYSPIVSMTKIQKTPLPERKALPIRWITWMTYLEDPRIQFHYDKTLPELKHIPDVYTSSQSPVKHPSQYEGVFYTDGSAIKSPDPTKSNNAGMGIVHATYKPEYQVLNQWSIPLGNHTAQMAEIAAVEFACKKALKIPGPVLVITDSFYVAESANKELPYWKSNGFVNNKKKPLKHISKWKSIAECLSMKPDITIQHEKGISLQIPVFILKGNALADKLATQGSYVVNAGKRTADGSEFEKRTADGSEFESPKKKAKVE

SEQ ID NO: 1288 - protein, 2180 aa, synthetic construct
MPAAKRVKLDGGDKKYSIGLDIGTNSVGWAVITDEYKVPSKKFKVLGNTDRHSIKKNLIGALLFDSGETAEATRLKRTARRRYTRRKNRICYLQEIFSNEMAKVDDSFFHRLEESFLVEEDKKHERHPIFGNIVDEVAYHEKYPTIYHLRKKLVDSTDKADLRLIYLALAHMIKFRGHFLIEGDLNPDNSDVDKLFIQLVQTYNQLFEENPINASGVDAKAILSARLSKSRRLENLIAQLPGEKKNGLFGNLIALSLGLTPNFKSNFDLAEDAKLQLSKDTYDDDLDNLLAQIGDQYADLFLAAKNLSDAILLSDILRVNTEITKAPLSASMIKRYDEHHQDLTLLKALVRQQLPEKYKEIFFDQSKNGYAGYIDGGASQEEFYKFIKPILEKMDGTEELLVKLNREDLLRKQRTFDNGSIPHQIHLGELHAILRRQEDFYPFLKDNREKIEKILTFRIPYYVGPLARGNSRFAWMTRKSEETITPWNFEEVVDKGASAQSFIERMTNFDKNLPNEKVLPKHSLLYEYFTVYNELTKVKYVTEGMRKPAFLSGEQKKAIVDLLFKTNRKVTVKQLKEDYFKKIECFDSVEISGVEDRFNASLGTYHDLLKIIKDKDFLDNEENEDILEDIVLTLTLFEDREMIEERLKTYAHLFDDKVMKQLKRRRYTGWGRLSRKLINGIRDKQSGKTILDFLKSDGFANRNFMQLIHDDSLTFKEDIQKAQVSGQGDSLHEHIANLAGSPAIKKGILQTVKVVDELVKVMGRHKPENIVIEMARENQTTQKGQKNSRERMKRIEEGIKELGSQILKEHPVENTQLQNEKLYLYYLQNGRDMYVDQELDINRLSDYDVDHIVPQSFLKDDSIDNKVLTRSDKARGKSDNVPSEEVVKKMKNYWRQLLNAKLITQRKFDNLTKAERGGLSELDKAGFIKRQLVETRQITKHVAQILDSRMNTKYDENDKLIREVKVITLKSKLVSDFRKDFQFYKVREINNYHHAHDAYLNAVVGTALIKKYPKLESEFVYGDYKVYDVRKMIAKSEQEIGKATAKYFFYSNIMNFFKTEITLANGEIRKRPLIETNGETGEIVWDKGRDFATVRKVLSMPQVNIVKKTEVQTGGFSKESILPKRNSDKLIARKKDWDPKKYGGFDSPTVAYSVLVVAKVEKGKSKKLKSVKELLGITIMERSSFEKNPIDFLEAKGYKEVKKDLIIKLPKYSLFELENGRKRMLASAGELQKGNELALPSKYVNFLYLASHYEKLKGSPEDNEQKQLFVEQHKHYLDEIIEQISEFSKRVILADANLDKVLSAYNKHRDKPIREQAENIIHLFTLTNLGAPAAFKYFDTTIDRKRYTSTKEVLDATLIHQSITGLYETRIDLSQLGGDGGEAAAKEAAAKEAAAKGGMNPLQLLQPLPAEIKGTKLLAHWNSGATITCIPESFLEDEQPIKKTLIKTIHGEKQQNVYYVTFKVKGRKVEAEVIASPYEYILLSPTDVPWLTQQPLQLTILVPLQEYQEKILSKTALPEDQKQQLKTLFVKYDNLWQHWENQVGHRKIRPHNIATGDYPPRPQKQYPINPKAKPSIQIVIDDLLKQGVLTPQNSTMNTPVYPVPKPDGRWRMVLDYREVNKTIPLTAAQNQHSAGILATIVRQKYKTTLDLANGFWAHPITPESYWLTAFTWQGKQYCWTRLPQGFLNSPALFTADVVDLLKEIPNVQVYVDDIYLSHDDPKEHVQQLEKVFQILLQAGYVVSLKKSEIGQKTVEFLGFNITKEGRGLTDTFKTKLLNITPPKDLKQLQSILGLLNFARNFIPNFAELVQPLYNLIASAKGKYIEWSEENTKQLNMVIEALNTASNLEERLPEQRLVIKVNTSPSAGYVRYYNETGKKPIMYLNYVFSKAELKFSMLEKLLTTMHKALIKAMDLAMGQEILVYSPIVSMTKIQKTPLPERKALPIRWITWMTYLEDPRIQFHYDKTLPELKHIPDVYTSSQSPVKHPSQYEGVFYTDGSAIKSPDPTKSNNAGMGIVHATYKPEYQVLNQWSIPLGNHTAQMAEIAAVEFACKKALKIPGPVLVITDSFYVAESANKELPYWKSNGFVNNKKKPLKHISKWKSIAECLSMKPDITIQHEKGISLQIPVFILKGNALADKLATQGSYVVNAGKRTADGSEFEKRTADGSEFESPKKKAKVE

SEQ ID NO: 1289 - protein, 2177 aa, synthetic construct
MPAAKRVKLDGGDKKYSIGLDIGTNSVGWAVITDEYKVPSKKFKVLGNTDRHSIKKNLIGALLFDSGETAEATRLKRTARRRYTRRKNRICYLQEIFSNEMAKVDDSFFHRLEESFLVEEDKKHERHPIFGNIVDEVAYHEKYPTIYHLRKKLVDSTDKADLRLIYLALAHMIKFRGHFLIEGDLNPDNSDVDKLFIQLVQTYNQLFEENPINASGVDAKAILSARLSKSRRLENLIAQLPGEKKNGLFGNLIALSLGLTPNFKSNFDLAEDAKLQLSKDTYDDDLDNLLAQIGDQYADLFLAAKNLSDAILLSDILRVNTEITKAPLSASMIKRYDEHHQDLTLLKALVRQQLPEKYKEIFFDQSKNGYAGYIDGGASQEEFYKFIKPILEKMDGTEELLVKLNREDLLRKQRTFDNGSIPHQIHLGELHAILRRQEDFYPFLKDNREKIEKILTFRIPYYVGPLARGNSRFAWMTRKSEETITPWNFEEVVDKGASAQSFIERMTNFDKNLPNEKVLPKHSLLYEYFTVYNELTKVKYVTEGMRKPAFLSGEQKKAIVDLLFKTNRKVTVKQLKEDYFKKIECFDSVEISGVEDRFNASLGTYHDLLKIIKDKDFLDNEENEDILEDIVLTLTLFEDREMIEERLKTYAHLFDDKVMKQLKRRRYTGWGRLSRKLINGIRDKQSGKTILDFLKSDGFANRNFMQLIHDDSLTFKEDIQKAQVSGQGDSLHEHIANLAGSPAIKKGILQTVKVVDELVKVMGRHKPENIVIEMARENQTTQKGQKNSRERMKRIEEGIKELGSQILKEHPVENTQLQNEKLYLYYLQNGRDMYVDQELDINRLSDYDVDHIVPQSFLKDDSIDNKVLTRSDKARGKSDNVPSEEVVKKMKNYWRQLLNAKLITQRKFDNLTKAERGGLSELDKAGFIKRQLVETRQITKHVAQILDSRMNTKYDENDKLIREVKVITLKSKLVSDFRKDFQFYKVREINNYHHAHDAYLNAVVGTALIKKYPKLESEFVYGDYKVYDVRKMIAKSEQEIGKATAKYFFYSNIMNFFKTEITLANGEIRKRPLIETNGETGEIVWDKGRDFATVRKVLSMPQVNIVKKTEVQTGGFSKESILPKRNSDKLIARKKDWDPKKYGGFDSPTVAYSVLVVAKVEKGKSKKLKSVKELLGITIMERSSFEKNPIDFLEAKGYKEVKKDLIIKLPKYSLFELENGRKRMLASAGELQKGNELALPSKYVNFLYLASHYEKLKGSPEDNEQKQLFVEQHKHYLDEIIEQISEFSKRVILADANLDKVLSAYNKHRDKPIREQAENIIHLFTLTNLGAPAAFKYFDTTIDRKRYTSTKEVLDATLIHQSITGLYETRIDLSQLGGDGGGGSGGSGGSGGSGGMNPLQLLQPLPAEIKGTKLLAHWNSGATITCIPESFLEDEQPIKKTLIKTIHGEKQQNVYYVTFKVKGRKVEAEVIASPYEYILLSPTDVPWLTQQPLQLTILVPLQEYQEKILSKTALPEDQKQQLKTLFVKYDNLWQHWENQVGHRKIRPHNIATGDYPPRPQKQYPINPKAKPSIQIVIDDLLKQGVLTPQNSTMNTPVYPVPKPDGRWRMVLDYREVNKTIPLTAAQNQHSAGILATIVRQKYKTTLDLANGFWAHPITPESYWLTAFTWQGKQYCWTRLPQGFLNSPALFTADVVDLLKEIPNVQVYVDDIYLSHDDPKEHVQQLEKVFQILLQAGYVVSLKKSEIGQKTVEFLGFNITKEGRGLTDTFKTKLLNITPPKDLKQLQSILGLLNFARNFIPNFAELVQPLYNLIASAKGKYIEWSEENTKQLNMVIEALNTASNLEERLPEQRLVIKVNTSPSAGYVRYYNETGKKPIMYLNYVFSKAELKFSMLEKLLTTMHKALIKAMDLAMGQEILVYSPIVSMTKIQKTPLPERKALPIRWITWMTYLEDPRIQFHYDKTLPELKHIPDVYTSSQSPVKHPSQYEGVFYTDGSAIKSPDPTKSNNAGMGIVHATYKPEYQVLNQWSIPLGNHTAQMAEIAAVEFACKKALKIPGPVLVITDSFYVAESANKELPYWKSNGFVNNKKKPLKHISKWKSIAECLSMKPDITIQHEKGISLQIPVFILKGNALADKLATQGSYVVNAGKRTADGSEFEKRTADGSEFESPKKKAKVE

SEQ ID NO: 1290 - protein, 2174 aa, synthetic construct
MPAAKRVKLDGGDKKYSIGLDIGTNSVGWAVITDEYKVPSKKFKVLGNTDRHSIKKNLIGALLFDSGETAEATRLKRTARRRYTRRKNRICYLQEIFSNEMAKVDDSFFHRLEESFLVEEDKKHERHPIFGNIVDEVAYHEKYPTIYHLRKKLVDSTDKADLRLIYLALAHMIKFRGHFLIEGDLNPDNSDVDKLFIQLVQTYNQLFEENPINASGVDAKAILSARLSKSRRLENLIAQLPGEKKNGLFGNLIALSLGLTPNFKSNFDLAEDAKLQLSKDTYDDDLDNLLAQIGDQYADLFLAAKNLSDAILLSDILRVNTEITKAPLSASMIKRYDEHHQDLTLLKALVRQQLPEKYKEIFFDQSKNGYAGYIDGGASQEEFYKFIKPILEKMDGTEELLVKLNREDLLRKQRTFDNGSIPHQIHLGELHAILRRQEDFYPFLKDNREKIEKILTFRIPYYVGPLARGNSRFAWMTRKSEETITPWNFEEVVDKGASAQSFIERMTNFDKNLPNEKVLPKHSLLYEYFTVYNELTKVKYVTEGMRKPAFLSGEQKKAIVDLLFKTNRKVTVKQLKEDYFKKIECFDSVEISGVEDRFNASLGTYHDLLKIIKDKDFLDNEENEDILEDIVLTLTLFEDREMIEERLKTYAHLFDDKVMKQLKRRRYTGWGRLSRKLINGIRDKQSGKTILDFLKSDGFANRNFMQLIHDDSLTFKEDIQKAQVSGQGDSLHEHIANLAGSPAIKKGILQTVKVVDELVKVMGRHKPENIVIEMARENQTTQKGQKNSRERMKRIEEGIKELGSQILKEHPVENTQLQNEKLYLYYLQNGRDMYVDQELDINRLSDYDVDHIVPQSFLKDDSIDNKVLTRSDKARGKSDNVPSEEVVKKMKNYWRQLLNAKLITQRKFDNLTKAERGGLSELDKAGFIKRQLVETRQITKHVAQILDSRMNTKYDENDKLIREVKVITLKSKLVSDFRKDFQFYKVREINNYHHAHDAYLNAVVGTALIKKYPKLESEFVYGDYKVYDVRKMIAKSEQEIGKATAKYFFYSNIMNFFKTEITLANGEIRKRPLIETNGETGEIVWDKGRDFATVRKVLSMPQVNIVKKTEVQTGGFSKESILPKRNSDKLIARKKDWDPKKYGGFDSPTVAYSVLVVAKVEKGKSKKLKSVKELLGITIMERSSFEKNPIDFLEAKGYKEVKKDLIIKLPKYSLFELENGRKRMLASAGELQKGNELALPSKYVNFLYLASHYEKLKGSPEDNEQKQLFVEQHKHYLDEIIEQISEFSKRVILADANLDKVLSAYNKHRDKPIREQAENIIHLFTLTNLGAPAAFKYFDTTIDRKRYTSTKEVLDATLIHQSITGLYETRIDLSQLGGDGGGGSGGGPAPGGMNPLQLLQPLPAEIKGTKLLAHWNSGATITCIPESFLEDEQPIKKTLIKTIHGEKQQNVYYVTFKVKGRKVEAEVIASPYEYILLSPTDVPWLTQQPLQLTILVPLQEYQEKILSKTALPEDQKQQLKTLFVKYDNLWQHWENQVGHRKIRPHNIATGDYPPRPQKQYPINPKAKPSIQIVIDDLLKQGVLTPQNSTMNTPVYPVPKPDGRWRMVLDYREVNKTIPLTAAQNQHSAGILATIVRQKYKTTLDLANGFWAHPITPESYWLTAFTWQGKQYCWTRLPQGFLNSPALFTADVVDLLKEIPNVQVYVDDIYLSHDDPKEHVQQLEKVFQILLQAGYVVSLKKSEIGQKTVEFLGFNITKEGRGLTDTFKTKLLNITPPKDLKQLQSILGLLNFARNFIPNFAELVQPLYNLIASAKGKYIEWSEENTKQLNMVIEALNTASNLEERLPEQRLVIKVNTSPSAGYVRYYNETGKKPIMYLNYVFSKAELKFSMLEKLLTTMHKALIKAMDLAMGQEILVYSPIVSMTKIQKTPLPERKALPIRWITWMTYLEDPRIQFHYDKTLPELKHIPDVYTSSQSPVKHPSQYEGVFYTDGSAIKSPDPTKSNNAGMGIVHATYKPEYQVLNQWSIPLGNHTAQMAEIAAVEFACKKALKIPGPVLVITDSFYVAESANKELPYWKSNGFVNNKKKPLKHISKWKSIAECLSMKPDITIQHEKGISLQIPVFILKGNALADKLATQGSYVVNAGKRTADGSEFEKRTADGSEFESPKKKAKVE

SEQ ID NO: 1291 - protein, 2176 aa, synthetic construct
MPAAKRVKLDGGDKKYSIGLDIGTNSVGWAVITDEYKVPSKKFKVLGNTDRHSIKKNLIGALLFDSGETAEATRLKRTARRRYTRRKNRICYLQEIFSNEMAKVDDSFFHRLEESFLVEEDKKHERHPIFGNIVDEVAYHEKYPTIYHLRKKLVDSTDKADLRLIYLALAHMIKFRGHFLIEGDLNPDNSDVDKLFIQLVQTYNQLFEENPINASGVDAKAILSARLSKSRRLENLIAQLPGEKKNGLFGNLIALSLGLTPNFKSNFDLAEDAKLQLSKDTYDDDLDNLLAQIGDQYADLFLAAKNLSDAILLSDILRVNTEITKAPLSASMIKRYDEHHQDLTLLKALVRQQLPEKYKEIFFDQSKNGYAGYIDGGASQEEFYKFIKPILEKMDGTEELLVKLNREDLLRKQRTFDNGSIPHQIHLGELHAILRRQEDFYPFLKDNREKIEKILTFRIPYYVGPLARGNSRFAWMTRKSEETITPWNFEEVVDKGASAQSFIERMTNFDKNLPNEKVLPKHSLLYEYFTVYNELTKVKYVTEGMRKPAFLSGEQKKAIVDLLFKTNRKVTVKQLKEDYFKKIECFDSVEISGVEDRFNASLGTYHDLLKIIKDKDFLDNEENEDILEDIVLTLTLFEDREMIEERLKTYAHLFDDKVMKQLKRRRYTGWGRLSRKLINGIRDKQSGKTILDFLKSDGFANRNFMQLIHDDSLTFKEDIQKAQVSGQGDSLHEHIANLAGSPAIKKGILQTVKVVDELVKVMGRHKPENIVIEMARENQTTQKGQKNSRERMKRIEEGIKELGSQILKEHPVENTQLQNEKLYLYYLQNGRDMYVDQELDINRLSDYDVDHIVPQSFLKDDSIDNKVLTRSDKARGKSDNVPSEEVVKKMKNYWRQLLNAKLITQRKFDNLTKAERGGLSELDKAGFIKRQLVETRQITKHVAQILDSRMNTKYDENDKLIREVKVITLKSKLVSDFRKDFQFYKVREINNYHHAHDAYLNAVVGTALIKKYPKLESEFVYGDYKVYDVRKMIAKSEQEIGKATAKYFFYSNIMNFFKTEITLANGEIRKRPLIETNGETGEIVWDKGRDFATVRKVLSMPQVNIVKKTEVQTGGFSKESILPKRNSDKLIARKKDWDPKKYGGFDSPTVAYSVLVVAKVEKGKSKKLKSVKELLGITIMERSSFEKNPIDFLEAKGYKEVKKDLIIKLPKYSLFELENGRKRMLASAGELQKGNELALPSKYVNFLYLASHYEKLKGSPEDNEQKQLFVEQHKHYLDEIIEQISEFSKRVILADANLDKVLSAYNKHRDKPIREQAENIIHLFTLTNLGAPAAFKYFDTTIDRKRYTSTKEVLDATLIHQSITGLYETRIDLSQLGGDGGPAPGGSEAAAKGGMNPLQLLQPLPAEIKGTKLLAHWNSGATITCIPESFLEDEQPIKKTLIKTIHGEKQQNVYYVTFKVKGRKVEAEVIASPYEYILLSPTDVPWLTQQPLQLTILVPLQEYQEKILSKTALPEDQKQQLKTLFVKYDNLWQHWENQVGHRKIRPHNIATGDYPPRPQKQYPINPKAKPSIQIVIDDLLKQGVLTPQNSTMNTPVYPVPKPDGRWRMVLDYREVNKTIPLTAAQNQHSAGILATIVRQKYKTTLDLANGFWAHPITPESYWLTAFTWQGKQYCWTRLPQGFLNSPALFTADVVDLLKEIPNVQVYVDDIYLSHDDPKEHVQQLEKVFQILLQAGYVVSLKKSEIGQKTVEFLGFNITKEGRGLTDTFKTKLLNITPPKDLKQLQSILGLLNFARNFIPNFAELVQPLYNLIASAKGKYIEWSEENTKQLNMVIEALNTASNLEERLPEQRLVIKVNTSPSAGYVRYYNETGKKPIMYLNYVFSKAELKFSMLEKLLTTMHKALIKAMDLAMGQEILVYSPIVSMTKIQKTPLPERKALPIRWITWMTYLEDPRIQFHYDKTLPELKHIPDVYTSSQSPVKHPSQYEGVFYTDGSAIKSPDPTKSNNAGMGIVHATYKPEYQVLNQWSIPLGNHTAQMAEIAAVEFACKKALKIPGPVLVITDSFYVAESANKELPYWKSNGFVNNKKKPLKHISKWKSIAECLSMKPDITIQHEKGISLQIPVFILKGNALADKLATQGSYVVNAGKRTADGSEFEKRTADGSEFESPKKKAKVE

SEQ ID NO: 1292 - protein, 2173 aa, synthetic construct
MPAAKRVKLDGGDKKYSIGLDIGTNSVGWAVITDEYKVPSKKFKVLGNTDRHSIKKNLIGALLFDSGETAEATRLKRTARRRYTRRKNRICYLQEIFSNEMAKVDDSFFHRLEESFLVEEDKKHERHPIFGNIVDEVAYHEKYPTIYHLRKKLVDSTDKADLRLIYLALAHMIKFRGHFLIEGDLNPDNSDVDKLFIQLVQTYNQLFEENPINASGVDAKAILSARLSKSRRLENLIAQLPGEKKNGLFGNLIALSLGLTPNFKSNFDLAEDAKLQLSKDTYDDDLDNLLAQIGDQYADLFLAAKNLSDAILLSDILRVNTEITKAPLSASMIKRYDEHHQDLTLLKALVRQQLPEKYKEIFFDQSKNGYAGYIDGGASQEEFYKFIKPILEKMDGTEELLVKLNREDLLRKQRTFDNGSIPHQIHLGELHAILRRQEDFYPFLKDNREKIEKILTFRIPYYVGPLARGNSRFAWMTRKSEETITPWNFEEVVDKGASAQSFIERMTNFDKNLPNEKVLPKHSLLYEYFTVYNELTKVKYVTEGMRKPAFLSGEQKKAIVDLLFKTNRKVTVKQLKEDYFKKIECFDSVEISGVEDRFNASLGTYHDLLKIIKDKDFLDNEENEDILEDIVLTLTLFEDREMIEERLKTYAHLFDDKVMKQLKRRRYTGWGRLSRKLINGIRDKQSGKTILDFLKSDGFANRNFMQLIHDDSLTFKEDIQKAQVSGQGDSLHEHIANLAGSPAIKKGILQTVKVVDELVKVMGRHKPENIVIEMARENQTTQKGQKNSRERMKRIEEGIKELGSQILKEHPVENTQLQNEKLYLYYLQNGRDMYVDQELDINRLSDYDVDHIVPQSFLKDDSIDNKVLTRSDKARGKSDNVPSEEVVKKMKNYWRQLLNAKLITQRKFDNLTKAERGGLSELDKAGFIKRQLVETRQITKHVAQILDSRMNTKYDENDKLIREVKVITLKSKLVSDFRKDFQFYKVREINNYHHAHDAYLNAVVGTALIKKYPKLESEFVYGDYKVYDVRKMIAKSEQEIGKATAKYFFYSNIMNFFKTEITLANGEIRKRPLIETNGETGEIVWDKGRDFATVRKVLSMPQVNIVKKTEVQTGGFSKESILPKRNSDKLIARKKDWDPKKYGGFDSPTVAYSVLVVAKVEKGKSKKLKSVKELLGITIMERSSFEKNPIDFLEAKGYKEVKKDLIIKLPKYSLFELENGRKRMLASAGELQKGNELALPSKYVNFLYLASHYEKLKGSPEDNEQKQLFVEQHKHYLDEIIEQISEFSKRVILADANLDKVLSAYNKHRDKPIREQAENIIHLFTLTNLGAPAAFKYFDTTIDRKRYTSTKEVLDATLIHQSITGLYETRIDLSQLGGDGGGSSEAAAKGGMNPLQLLQPLPAEIKGTKLLAHWNSGATITCIPESFLEDEQPIKKTLIKTIHGEKQQNVYYVTFKVKGRKVEAEVIASPYEYILLSPTDVPWLTQQPLQLTILVPLQEYQEKILSKTALPEDQKQQLKTLFVKYDNLWQHWENQVGHRKIRPHNIATGDYPPRPQKQYPINPKAKPSIQIVIDDLLKQGVLTPQNSTMNTPVYPVPKPDGRWRMVLDYREVNKTIPLTAAQNQHSAGILATIVRQKYKTTLDLANGFWAHPITPESYWLTAFTWQGKQYCWTRLPQGFLNSPALFTADVVDLLKEIPNVQVYVDDIYLSHDDPKEHVQQLEKVFQILLQAGYVVSLKKSEIGQKTVEFLGFNITKEGRGLTDTFKTKLLNITPPKDLKQLQSILGLLNFARNFIPNFAELVQPLYNLIASAKGKYIEWSEENTKQLNMVIEALNTASNLEERLPEQRLVIKVNTSPSAGYVRYYNETGKKPIMYLNYVFSKAELKFSMLEKLLTTMHKALIKAMDLAMGQEILVYSPIVSMTKIQKTPLPERKALPIRWITWMTYLEDPRIQFHYDKTLPELKHIPDVYTSSQSPVKHPSQYEGVFYTDGSAIKSPDPTKSNNAGMGIVHATYKPEYQVLNQWSIPLGNHTAQMAEIAAVEFACKKALKIPGPVLVITDSFYVAESANKELPYWKSNGFVNNKKKPLKHISKWKSIAECLSMKPDITIQHEKGISLQIPVFILKGNALADKLATQGSYVVNAGKRTADGSEFEKRTADGSEFESPKKKAKVE

SEQ ID NO: 1293 - protein, 2176 aa, synthetic construct
MPAAKRVKLDGGDKKYSIGLDIGTNSVGWAVITDEYKVPSKKFKVLGNTDRHSIKKNLIGALLFDSGETAEATRLKRTARRRYTRRKNRICYLQEIFSNEMAKVDDSFFHRLEESFLVEEDKKHERHPIFGNIVDEVAYHEKYPTIYHLRKKLVDSTDKADLRLIYLALAHMIKFRGHFLIEGDLNPDNSDVDKLFIQLVQTYNQLFEENPINASGVDAKAILSARLSKSRRLENLIAQLPGEKKNGLFGNLIALSLGLTPNFKSNFDLAEDAKLQLSKDTYDDDLDNLLAQIGDQYADLFLAAKNLSDAILLSDILRVNTEITKAPLSASMIKRYDEHHQDLTLLKALVRQQLPEKYKEIFFDQSKNGYAGYIDGGASQEEFYKFIKPILEKMDGTEELLVKLNREDLLRKQRTFDNGSIPHQIHLGELHAILRRQEDFYPFLKDNREKIEKILTFRIPYYVGPLARGNSRFAWMTRKSEETITPWNFEEVVDKGASAQSFIERMTNFDKNLPNEKVLPKHSLLYEYFTVYNELTKVKYVTEGMRKPAFLSGEQKKAIVDLLFKTNRKVTVKQLKEDYFKKIECFDSVEISGVEDRFNASLGTYHDLLKIIKDKDFLDNEENEDILEDIVLTLTLFEDREMIEERLKTYAHLFDDKVMKQLKRRRYTGWGRLSRKLINGIRDKQSGKTILDFLKSDGFANRNFMQLIHDDSLTFKEDIQKAQVSGQGDSLHEHIANLAGSPAIKKGILQTVKVVDELVKVMGRHKPENIVIEMARENQTTQKGQKNSRERMKRIEEGIKELGSQILKEHPVENTQLQNEKLYLYYLQNGRDMYVDQELDINRLSDYDVDHIVPQSFLKDDSIDNKVLTRSDKARGKSDNVPSEEVVKKMKNYWRQLLNAKLITQRKFDNLTKAERGGLSELDKAGFIKRQLVETRQITKHVAQILDSRMNTKYDENDKLIREVKVITLKSKLVSDFRKDFQFYKVREINNYHHAHDAYLNAVVGTALIKKYPKLESEFVYGDYKVYDVRKMIAKSEQEIGKATAKYFFYSNIMNFFKTEITLANGEIRKRPLIETNGETGEIVWDKGRDFATVRKVLSMPQVNIVKKTEVQTGGFSKESILPKRNSDKLIARKKDWDPKKYGGFDSPTVAYSVLVVAKVEKGKSKKLKSVKELLGITIMERSSFEKNPIDFLEAKGYKEVKKDLIIKLPKYSLFELENGRKRMLASAGELQKGNELALPSKYVNFLYLASHYEKLKGSPEDNEQKQLFVEQHKHYLDEIIEQISEFSKRVILADANLDKVLSAYNKHRDKPIREQAENIIHLFTLTNLGAPAAFKYFDTTIDRKRYTSTKEVLDATLIHQSITGLYETRIDLSQLGGDGGGGSGSSEAAAKGGMNPLQLLQPLPAEIKGTKLLAHWNSGATITCIPESFLEDEQPIKKTLIKTIHGEKQQNVYYVTFKVKGRKVEAEVIASPYEYILLSPTDVPWLTQQPLQLTILVPLQEYQEKILSKTALPEDQKQQLKTLFVKYDNLWQHWENQVGHRKIRPHNIATGDYPPRPQKQYPINPKAKPSIQIVIDDLLKQGVLTPQNSTMNTPVYPVPKPDGRWRMVLDYREVNKTIPLTAAQNQHSAGILATIVRQKYKTTLDLANGFWAHPITPESYWLTAFTWQGKQYCWTRLPQGFLNSPALFTADVVDLLKEIPNVQVYVDDIYLSHDDPKEHVQQLEKVFQILLQAGYVVSLKKSEIGQKTVEFLGFNITKEGRGLTDTFKTKLLNITPPKDLKQLQSILGLLNFARNFIPNFAELVQPLYNLIASAKGKYIEWSEENTKQLNMVIEALNTASNLEERLPEQRLVIKVNTSPSAGYVRYYNETGKKPIMYLNYVFSKAELKFSMLEKLLTTMHKALIKAMDLAMGQEILVYSPIVSMTKIQKTPLPERKALPIRWITWMTYLEDPRIQFHYDKTLPELKHIPDVYTSSQSPVKHPSQYEGVFYTDGSAIKSPDPTKSNNAGMGIVHATYKPEYQVLNQWSIPLGNHTAQMAEIAAVEFACKKALKIPGPVLVITDSFYVAESANKELPYWKSNGFVNNKKKPLKHISKWKSIAECLSMKPDITIQHEKGISLQIPVFILKGNALADKLATQGSYVVNAGKRTADGSEFEKRTADGSEFESPKKKAKVE

SEQ ID NO: 1294 - protein, 2171 aa, synthetic construct
MPAAKRVKLDGGDKKYSIGLDIGTNSVGWAVITDEYKVPSKKFKVLGNTDRHSIKKNLIGALLFDSGETAEATRLKRTARRRYTRRKNRICYLQEIFSNEMAKVDDSFFHRLEESFLVEEDKKHERHPIFGNIVDEVAYHEKYPTIYHLRKKLVDSTDKADLRLIYLALAHMIKFRGHFLIEGDLNPDNSDVDKLFIQLVQTYNQLFEENPINASGVDAKAILSARLSKSRRLENLIAQLPGEKKNGLFGNLIALSLGLTPNFKSNFDLAEDAKLQLSKDTYDDDLDNLLAQIGDQYADLFLAAKNLSDAILLSDILRVNTEITKAPLSASMIKRYDEHHQDLTLLKALVRQQLPEKYKEIFFDQSKNGYAGYIDGGASQEEFYKFIKPILEKMDGTEELLVKLNREDLLRKQRTFDNGSIPHQIHLGELHAILRRQEDFYPFLKDNREKIEKILTFRIPYYVGPLARGNSRFAWMTRKSEETITPWNFEEVVDKGASAQSFIERMTNFDKNLPNEKVLPKHSLLYEYFTVYNELTKVKYVTEGMRKPAFLSGEQKKAIVDLLFKTNRKVTVKQLKEDYFKKIECFDSVEISGVEDRFNASLGTYHDLLKIIKDKDFLDNEENEDILEDIVLTLTLFEDREMIEERLKTYAHLFDDKVMKQLKRRRYTGWGRLSRKLINGIRDKQSGKTILDFLKSDGFANRNFMQLIHDDSLTFKEDIQKAQVSGQGDSLHEHIANLAGSPAIKKGILQTVKVVDELVKVMGRHKPENIVIEMARENQTTQKGQKNSRERMKRIEEGIKELGSQILKEHPVENTQLQNEKLYLYYLQNGRDMYVDQELDINRLSDYDVDHIVPQSFLKDDSIDNKVLTRSDKARGKSDNVPSEEVVKKMKNYWRQLLNAKLITQRKFDNLTKAERGGLSELDKAGFIKRQLVETRQITKHVAQILDSRMNTKYDENDKLIREVKVITLKSKLVSDFRKDFQFYKVREINNYHHAHDAYLNAVVGTALIKKYPKLESEFVYGDYKVYDVRKMIAKSEQEIGKATAKYFFYSNIMNFFKTEITLANGEIRKRPLIETNGETGEIVWDKGRDFATVRKVLSMPQVNIVKKTEVQTGGFSKESILPKRNSDKLIARKKDWDPKKYGGFDSPTVAYSVLVVAKVEKGKSKKLKSVKELLGITIMERSSFEKNPIDFLEAKGYKEVKKDLIIKLPKYSLFELENGRKRMLASAGELQKGNELALPSKYVNFLYLASHYEKLKGSPEDNEQKQLFVEQHKHYLDEIIEQISEFSKRVILADANLDKVLSAYNKHRDKPIREQAENIIHLFTLTNLGAPAAFKYFDTTIDRKRYTSTKEVLDATLIHQSITGLYETRIDLSQLGGDGGGGSGGSGGMNPLQLLQPLPAEIKGTKLLAHWNSGATITCIPESFLEDEQPIKKTLIKTIHGEKQQNVYYVTFKVKGRKVEAEVIASPYEYILLSPTDVPWLTQQPLQLTILVPLQEYQEKILSKTALPEDQKQQLKTLFVKYDNLWQHWENQVGHRKIRPHNIATGDYPPRPQKQYPINPKAKPSIQIVIDDLLKQGVLTPQNSTMNTPVYPVPKPDGRWRMVLDYREVNKTIPLTAAQNQHSAGILATIVRQKYKTTLDLANGFWAHPITPESYWLTAFTWQGKQYCWTRLPQGFLNSPALFTADVVDLLKEIPNVQVYVDDIYLSHDDPKEHVQQLEKVFQILLQAGYVVSLKKSEIGQKTVEFLGFNITKEGRGLTDTFKTKLLNITPPKDLKQLQSILGLLNFARNFIPNFAELVQPLYNLIASAKGKYIEWSEENTKQLNMVIEALNTASNLEERLPEQRLVIKVNTSPSAGYVRYYNETGKKPIMYLNYVFSKAELKFSMLEKLLTTMHKALIKAMDLAMGQEILVYSPIVSMTKIQKTPLPERKALPIRWITWMTYLEDPRIQFHYDKTLPELKHIPDVYTSSQSPVKHPSQYEGVFYTDGSAIKSPDPTKSNNAGMGIVHATYKPEYQVLNQWSIPLGNHTAQMAEIAAVEFACKKALKIPGPVLVITDSFYVAESANKELPYWKSNGFVNNKKKPLKHISKWKSIAECLSMKPDITIQHEKGISLQIPVFILKGNALADKLATQGSYVVNAGKRTADGSEFEKRTADGSEFESPKKKAKVE

SEQ ID NO: 1295 - protein, 2084 aa, synthetic construct
MPAAKRVKLDGGDKKYSIGLDIGTNSVGWAVITDEYKVPSKKFKVLGNTDRHSIKKNLIGALLFDSGETAEATRLKRTARRRYTRRKNRICYLQEIFSNEMAKVDDSFFHRLEESFLVEEDKKHERHPIFGNIVDEVAYHEKYPTIYHLRKKLVDSTDKADLRLIYLALAHMIKFRGHFLIEGDLNPDNSDVDKLFIQLVQTYNQLFEENPINASGVDAKAILSARLSKSRRLENLIAQLPGEKKNGLFGNLIALSLGLTPNFKSNFDLAEDAKLQLSKDTYDDDLDNLLAQIGDQYADLFLAAKNLSDAILLSDILRVNTEITKAPLSASMIKRYDEHHQDLTLLKALVRQQLPEKYKEIFFDQSKNGYAGYIDGGASQEEFYKFIKPILEKMDGTEELLVKLNREDLLRKQRTFDNGSIPHQIHLGELHAILRRQEDFYPFLKDNREKIEKILTFRIPYYVGPLARGNSRFAWMTRKSEETITPWNFEEVVDKGASAQSFIERMTNFDKNLPNEKVLPKHSLLYEYFTVYNELTKVKYVTEGMRKPAFLSGEQKKAIVDLLFKTNRKVTVKQLKEDYFKKIECFDSVEISGVEDRFNASLGTYHDLLKIIKDKDFLDNEENEDILEDIVLTLTLFEDREMIEERLKTYAHLFDDKVMKQLKRRRYTGWGRLSRKLINGIRDKQSGKTILDFLKSDGFANRNFMQLIHDDSLTFKEDIQKAQVSGQGDSLHEHIANLAGSPAIKKGILQTVKVVDELVKVMGRHKPENIVIEMARENQTTQKGQKNSRERMKRIEEGIKELGSQILKEHPVENTQLQNEKLYLYYLQNGRDMYVDQELDINRLSDYDVDHIVPQSFLKDDSIDNKVLTRSDKARGKSDNVPSEEVVKKMKNYWRQLLNAKLITQRKFDNLTKAERGGLSELDKAGFIKRQLVETRQITKHVAQILDSRMNTKYDENDKLIREVKVITLKSKLVSDFRKDFQFYKVREINNYHHAHDAYLNAVVGTALIKKYPKLESEFVYGDYKVYDVRKMIAKSEQEIGKATAKYFFYSNIMNFFKTEITLANGEIRKRPLIETNGETGEIVWDKGRDFATVRKVLSMPQVNIVKKTEVQTGGFSKESILPKRNSDKLIARKKDWDPKKYGGFDSPTVAYSVLVVAKVEKGKSKKLKSVKELLGITIMERSSFEKNPIDFLEAKGYKEVKKDLIIKLPKYSLFELENGRKRMLASAGELQKGNELALPSKYVNFLYLASHYEKLKGSPEDNEQKQLFVEQHKHYLDEIIEQISEFSKRVILADANLDKVLSAYNKHRDKPIREQAENIIHLFTLTNLGAPAAFKYFDTTIDRKRYTSTKEVLDATLIHQSITGLYETRIDLSQLGGDGGEAAAKPAPGGVPWLTQQPLQLTILVPLQEYQEKILSKTALPEDQKQQLKTLFVKYDNLWQHWENQVGHRKIRPHNIATGDYPPRPQKQYPINPKAKPSIQIVIDDLLKQGVLTPQNSTMNTPVYPVPKPDGRWRMVLDYREVNKTIPLTAAQNQHSAGILATIVRQKYKTTLDLANGFWAHPITPESYWLTAFTWQGKQYCWTRLPQGFLNSPALFTADVVDLLKEIPNVQVYVDDIYLSHDDPKEHVQQLEKVFQILLQAGYVVSLKKSEIGQKTVEFLGFNITKEGRGLTDTFKTKLLNITPPKDLKQLQSILGLLNFARNFIPNFAELVQPLYNLIASAKGKYIEWSEENTKQLNMVIEALNTASNLEERLPEQRLVIKVNTSPSAGYVRYYNETGKKPIMYLNYVFSKAELKFSMLEKLLTTMHKALIKAMDLAMGQEILVYSPIVSMTKIQKTPLPERKALPIRWITWMTYLEDPRIQFHYDKTLPELKHIPDVYTSSQSPVKHPSQYEGVFYTDGSAIKSPDPTKSNNAGMGIVHATYKPEYQVLNQWSIPLGNHTAQMAEIAAVEFACKKALKIPGPVLVITDSFYVAESANKELPYWKSNGFVNNKKKPLKHISKWKSIAECLSMKPDITIQHEKGISLQIPVFILKGNALADKLATQGSYVVNAGKRTADGSEFEKRTADGSEFESPKKKAKVE

SEQ ID NO: 1296 - protein, 2087 aa, synthetic construct
MPAAKRVKLDGGDKKYSIGLDIGTNSVGWAVITDEYKVPSKKFKVLGNTDRHSIKKNLIGALLFDSGETAEATRLKRTARRRYTRRKNRICYLQEIFSNEMAKVDDSFFHRLEESFLVEEDKKHERHPIFGNIVDEVAYHEKYPTIYHLRKKLVDSTDKADLRLIYLALAHMIKFRGHFLIEGDLNPDNSDVDKLFIQLVQTYNQLFEENPINASGVDAKAILSARLSKSRRLENLIAQLPGEKKNGLFGNLIALSLGLTPNFKSNFDLAEDAKLQLSKDTYDDDLDNLLAQIGDQYADLFLAAKNLSDAILLSDILRVNTEITKAPLSASMIKRYDEHHQDLTLLKALVRQQLPEKYKEIFFDQSKNGYAGYIDGGASQEEFYKFIKPILEKMDGTEELLVKLNREDLLRKQRTFDNGSIPHQIHLGELHAILRRQEDFYPFLKDNREKIEKILTFRIPYYVGPLARGNSRFAWMTRKSEETITPWNFEEVVDKGASAQSFIERMTNFDKNLPNEKVLPKHSLLYEYFTVYNELTKVKYVTEGMRKPAFLSGEQKKAIVDLLFKTNRKVTVKQLKEDYFKKIECFDSVEISGVEDRFNASLGTYHDLLKIIKDKDFLDNEENEDILEDIVLTLTLFEDREMIEERLKTYAHLFDDKVMKQLKRRRYTGWGRLSRKLINGIRDKQSGKTILDFLKSDGFANRNFMQLIHDDSLTFKEDIQKAQVSGQGDSLHEHIANLAGSPAIKKGILQTVKVVDELVKVMGRHKPENIVIEMARENQTTQKGQKNSRERMKRIEEGIKELGSQILKEHPVENTQLQNEKLYLYYLQNGRDMYVDQELDINRLSDYDVDHIVPQSFLKDDSIDNKVLTRSDKARGKSDNVPSEEVVKKMKNYWRQLLNAKLITQRKFDNLTKAERGGLSELDKAGFIKRQLVETRQITKHVAQILDSRMNTKYDENDKLIREVKVITLKSKLVSDFRKDFQFYKVREINNYHHAHDAYLNAVVGTALIKKYPKLESEFVYGDYKVYDVRKMIAKSEQEIGKATAKYFFYSNIMNFFKTEITLANGEIRKRPLIETNGETGEIVWDKGRDFATVRKVLSMPQVNIVKKTEVQTGGFSKESILPKRNSDKLIARKKDWDPKKYGGFDSPTVAYSVLVVAKVEKGKSKKLKSVKELLGITIMERSSFEKNPIDFLEAKGYKEVKKDLIIKLPKYSLFELENGRKRMLASAGELQKGNELALPSKYVNFLYLASHYEKLKGSPEDNEQKQLFVEQHKHYLDEIIEQISEFSKRVILADANLDKVLSAYNKHRDKPIREQAENIIHLFTLTNLGAPAAFKYFDTTIDRKRYTSTKEVLDATLIHQSITGLYETRIDLSQLGGDGGEAAAKGSSGGSGGVPWLTQQPLQLTILVPLQEYQEKILSKTALPEDQKQQLKTLFVKYDNLWQHWENQVGHRKIRPHNIATGDYPPRPQKQYPINPKAKPSIQIVIDDLLKQGVLTPQNSTMNTPVYPVPKPDGRWRMVLDYREVNKTIPLTAAQNQHSAGILATIVRQKYKTTLDLANGFWAHPITPESYWLTAFTWQGKQYCWTRLPQGFLNSPALFTADVVDLLKEIPNVQVYVDDIYLSHDDPKEHVQQLEKVFQILLQAGYVVSLKKSEIGQKTVEFLGFNITKEGRGLTDTFKTKLLNITPPKDLKQLQSILGLLNFARNFIPNFAELVQPLYNLIASAKGKYIEWSEENTKQLNMVIEALNTASNLEERLPEQRLVIKVNTSPSAGYVRYYNETGKKPIMYLNYVFSKAELKFSMLEKLLTTMHKALIKAMDLAMGQEILVYSPIVSMTKIQKTPLPERKALPIRWITWMTYLEDPRIQFHYDKTLPELKHIPDVYTSSQSPVKHPSQYEGVFYTDGSAIKSPDPTKSNNAGMGIVHATYKPEYQVLNQWSIPLGNHTAQMAEIAAVEFACKKALKIPGPVLVITDSFYVAESANKELPYWKSNGFVNNKKKPLKHISKWKSIAECLSMKPDITIQHEKGISLQIPVFILKGNALADKLATQGSYVVNAGKRTADGSEFEKRTADGSEFESPKKKAKVE

SEQ ID NO: 1297 - protein, 2094 aa, synthetic construct
MPAAKRVKLDGGDKKYSIGLDIGTNSVGWAVITDEYKVPSKKFKVLGNTDRHSIKKNLIGALLFDSGETAEATRLKRTARRRYTRRKNRICYLQEIFSNEMAKVDDSFFHRLEESFLVEEDKKHERHPIFGNIVDEVAYHEKYPTIYHLRKKLVDSTDKADLRLIYLALAHMIKFRGHFLIEGDLNPDNSDVDKLFIQLVQTYNQLFEENPINASGVDAKAILSARLSKSRRLENLIAQLPGEKKNGLFGNLIALSLGLTPNFKSNFDLAEDAKLQLSKDTYDDDLDNLLAQIGDQYADLFLAAKNLSDAILLSDILRVNTEITKAPLSASMIKRYDEHHQDLTLLKALVRQQLPEKYKEIFFDQSKNGYAGYIDGGASQEEFYKFIKPILEKMDGTEELLVKLNREDLLRKQRTFDNGSIPHQIHLGELHAILRRQEDFYPFLKDNREKIEKILTFRIPYYVGPLARGNSRFAWMTRKSEETITPWNFEEVVDKGASAQSFIERMTNFDKNLPNEKVLPKHSLLYEYFTVYNELTKVKYVTEGMRKPAFLSGEQKKAIVDLLFKTNRKVTVKQLKEDYFKKIECFDSVEISGVEDRFNASLGTYHDLLKIIKDKDFLDNEENEDILEDIVLTLTLFEDREMIEERLKTYAHLFDDKVMKQLKRRRYTGWGRLSRKLINGIRDKQSGKTILDFLKSDGFANRNFMQLIHDDSLTFKEDIQKAQVSGQGDSLHEHIANLAGSPAIKKGILQTVKVVDELVKVMGRHKPENIVIEMARENQTTQKGQKNSRERMKRIEEGIKELGSQILKEHPVENTQLQNEKLYLYYLQNGRDMYVDQELDINRLSDYDVDHIVPQSFLKDDSIDNKVLTRSDKARGKSDNVPSEEVVKKMKNYWRQLLNAKLITQRKFDNLTKAERGGLSELDKAGFIKRQLVETRQITKHVAQILDSRMNTKYDENDKLIREVKVITLKSKLVSDFRKDFQFYKVREINNYHHAHDAYLNAVVGTALIKKYPKLESEFVYGDYKVYDVRKMIAKSEQEIGKATAKYFFYSNIMNFFKTEITLANGEIRKRPLIETNGETGEIVWDKGRDFATVRKVLSMPQVNIVKKTEVQTGGFSKESILPKRNSDKLIARKKDWDPKKYGGFDSPTVAYSVLVVAKVEKGKSKKLKSVKELLGITIMERSSFEKNPIDFLEAKGYKEVKKDLIIKLPKYSLFELENGRKRMLASAGELQKGNELALPSKYVNFLYLASHYEKLKGSPEDNEQKQLFVEQHKHYLDEIIEQISEFSKRVILADANLDKVLSAYNKHRDKPIREQAENIIHLFTLTNLGAPAAFKYFDTTIDRKRYTSTKEVLDATLIHQSITGLYETRIDLSQLGGDGGGSSGSSGSSGSSGSSGSSGGVPWLTQQPLQLTILVPLQEYQEKILSKTALPEDQKQQLKTLFVKYDNLWQHWENQVGHRKIRPHNIATGDYPPRPQKQYPINPKAKPSIQIVIDDLLKQGVLTPQNSTMNTPVYPVPKPDGRWRMVLDYREVNKTIPLTAAQNQHSAGILATIVRQKYKTTLDLANGFWAHPITPESYWLTAFTWQGKQYCWTRLPQGFLNSPALFTADVVDLLKEIPNVQVYVDDIYLSHDDPKEHVQQLEKVFQILLQAGYVVSLKKSEIGQKTVEFLGFNITKEGRGLTDTFKTKLLNITPPKDLKQLQSILGLLNFARNFIPNFAELVQPLYNLIASAKGKYIEWSEENTKQLNMVIEALNTASNLEERLPEQRLVIKVNTSPSAGYVRYYNETGKKPIMYLNYVFSKAELKFSMLEKLLTTMHKALIKAMDLAMGQEILVYSPIVSMTKIQKTPLPERKALPIRWITWMTYLEDPRIQFHYDKTLPELKHIPDVYTSSQSPVKHPSQYEGVFYTDGSAIKSPDPTKSNNAGMGIVHATYKPEYQVLNQWSIPLGNHTAQMAEIAAVEFACKKALKIPGPVLVITDSFYVAESANKELPYWKSNGFVNNKKKPLKHISKWKSIAECLSMKPDITIQHEKGISLQIPVFILKGNALADKLATQGSYVVNAGKRTADGSEFEKRTADGSEFESPKKKAKVE

SEQ ID NO: 1298 - protein, 2122 aa, synthetic construct
MPAAKRVKLDGGDKKYSIGLDIGTNSVGWAVITDEYKVPSKKFKVLGNTDRHSIKKNLIGALLFDSGETAEATRLKRTARRRYTRRKNRICYLQEIFSNEMAKVDDSFFHRLEESFLVEEDKKHERHPIFGNIVDEVAYHEKYPTIYHLRKKLVDSTDKADLRLIYLALAHMIKFRGHFLIEGDLNPDNSDVDKLFIQLVQTYNQLFEENPINASGVDAKAILSARLSKSRRLENLIAQLPGEKKNGLFGNLIALSLGLTPNFKSNFDLAEDAKLQLSKDTYDDDLDNLLAQIGDQYADLFLAAKNLSDAILLSDILRVNTEITKAPLSASMIKRYDEHHQDLTLLKALVRQQLPEKYKEIFFDQSKNGYAGYIDGGASQEEFYKFIKPILEKMDGTEELLVKLNREDLLRKQRTFDNGSIPHQIHLGELHAILRRQEDFYPFLKDNREKIEKILTFRIPYYVGPLARGNSRFAWMTRKSEETITPWNFEEVVDKGASAQSFIERMTNFDKNLPNEKVLPKHSLLYEYFTVYNELTKVKYVTEGMRKPAFLSGEQKKAIVDLLFKTNRKVTVKQLKEDYFKKIECFDSVEISGVEDRFNASLGTYHDLLKIIKDKDFLDNEENEDILEDIVLTLTLFEDREMIEERLKTYAHLFDDKVMKQLKRRRYTGWGRLSRKLINGIRDKQSGKTILDFLKSDGFANRNFMQLIHDDSLTFKEDIQKAQVSGQGDSLHEHIANLAGSPAIKKGILQTVKVVDELVKVMGRHKPENIVIEMARENQTTQKGQKNSRERMKRIEEGIKELGSQILKEHPVENTQLQNEKLYLYYLQNGRDMYVDQELDINRLSDYDVDHIVPQSFLKDDSIDNKVLTRSDKARGKSDNVPSEEVVKKMKNYWRQLLNAKLITQRKFDNLTKAERGGLSELDKAGFIKRQLVETRQITKHVAQILDSRMNTKYDENDKLIREVKVITLKSKLVSDFRKDFQFYKVREINNYHHAHDAYLNAVVGTALIKKYPKLESEFVYGDYKVYDVRKMIAKSEQEIGKATAKYFFYSNIMNFFKTEITLANGEIRKRPLIETNGETGEIVWDKGRDFATVRKVLSMPQVNIVKKTEVQTGGFSKESILPKRNSDKLIARKKDWDPKKYGGFDSPTVAYSVLVVAKVEKGKSKKLKSVKELLGITIMERSSFEKNPIDFLEAKGYKEVKKDLIIKLPKYSLFELENGRKRMLASAGELQKGNELALPSKYVNFLYLASHYEKLKGSPEDNEQKQLFVEQHKHYLDEIIEQISEFSKRVILADANLDKVLSAYNKHRDKPIREQAENIIHLFTLTNLGAPAAFKYFDTTIDRKRYTSTKEVLDATLIHQSITGLYETRIDLSQLGGDGGAEAAAKEAAAKEAAAKEAAAKALEAEAAAKEAAAKEAAAKEAAAKAGGVPWLTQQPLQLTILVPLQEYQEKILSKTALPEDQKQQLKTLFVKYDNLWQHWENQVGHRKIRPHNIATGDYPPRPQKQYPINPKAKPSIQIVIDDLLKQGVLTPQNSTMNTPVYPVPKPDGRWRMVLDYREVNKTIPLTAAQNQHSAGILATIVRQKYKTTLDLANGFWAHPITPESYWLTAFTWQGKQYCWTRLPQGFLNSPALFNADVVDLLKEIPNVQVYVDDIYLSHDDPKEHVQQLEKVFQILLQAGYVVSLKKSEIGQKTVEFLGFNITKEGRGLTDTFKTKLLNITPPKDLKQLQSILGLLNFARNFIPNFAELVQPLYNLIAPAKGKYIEWSEENTKQLNMVIEALNTASNLEERLPEQRLVIKVNTSPSAGYVRYYNETGKKPIMYLNYVFSKAELKFSMLEKLLTTMHKALIKAMDLAMGQEILVYSPIVSMTKIQKTPLPERKALPIRWITWMTYLEDPRIQFHYDKTLPELKHIPDVYTSSQSPVKHPSQYEGVFYTDGSAIKSPDPTKSNNAGMGIVHATYKPEYQVLNQWSIPLGNHTAQMAEIAAVEFACKKALKIPGPVLVITDSFYVAESANKELPYWKSNGFVNNKKKPLKHISKWKSIAECLSMKPDITIQHEKGISLQIPVFILKGNALADKLATQGSYVVNAGKRTADGSEFEKRTADGSEFESPKKKAKVE

SEQ ID NO: 1299 - protein, 2096 aa, synthetic construct
MPAAKRVKLDGGDKKYSIGLDIGTNSVGWAVITDEYKVPSKKFKVLGNTDRHSIKKNLIGALLFDSGETAEATRLKRTARRRYTRRKNRICYLQEIFSNEMAKVDDSFFHRLEESFLVEEDKKHERHPIFGNIVDEVAYHEKYPTIYHLRKKLVDSTDKADLRLIYLALAHMIKFRGHFLIEGDLNPDNSDVDKLFIQLVQTYNQLFEENPINASGVDAKAILSARLSKSRRLENLIAQLPGEKKNGLFGNLIALSLGLTPNFKSNFDLAEDAKLQLSKDTYDDDLDNLLAQIGDQYADLFLAAKNLSDAILLSDILRVNTEITKAPLSASMIKRYDEHHQDLTLLKALVRQQLPEKYKEIFFDQSKNGYAGYIDGGASQEEFYKFIKPILEKMDGTEELLVKLNREDLLRKQRTFDNGSIPHQIHLGELHAILRRQEDFYPFLKDNREKIEKILTFRIPYYVGPLARGNSRFAWMTRKSEETITPWNFEEVVDKGASAQSFIERMTNFDKNLPNEKVLPKHSLLYEYFTVYNELTKVKYVTEGMRKPAFLSGEQKKAIVDLLFKTNRKVTVKQLKEDYFKKIECFDSVEISGVEDRFNASLGTYHDLLKIIKDKDFLDNEENEDILEDIVLTLTLFEDREMIEERLKTYAHLFDDKVMKQLKRRRYTGWGRLSRKLINGIRDKQSGKTILDFLKSDGFANRNFMQLIHDDSLTFKEDIQKAQVSGQGDSLHEHIANLAGSPAIKKGILQTVKVVDELVKVMGRHKPENIVIEMARENQTTQKGQKNSRERMKRIEEGIKELGSQILKEHPVENTQLQNEKLYLYYLQNGRDMYVDQELDINRLSDYDVDHIVPQSFLKDDSIDNKVLTRSDKARGKSDNVPSEEVVKKMKNYWRQLLNAKLITQRKFDNLTKAERGGLSELDKAGFIKRQLVETRQITKHVAQILDSRMNTKYDENDKLIREVKVITLKSKLVSDFRKDFQFYKVREINNYHHAHDAYLNAVVGTALIKKYPKLESEFVYGDYKVYDVRKMIAKSEQEIGKATAKYFFYSNIMNFFKTEITLANGEIRKRPLIETNGETGEIVWDKGRDFATVRKVLSMPQVNIVKKTEVQTGGFSKESILPKRNSDKLIARKKDWDPKKYGGFDSPTVAYSVLVVAKVEKGKSKKLKSVKELLGITIMERSSFEKNPIDFLEAKGYKEVKKDLIIKLPKYSLFELENGRKRMLASAGELQKGNELALPSKYVNFLYLASHYEKLKGSPEDNEQKQLFVEQHKHYLDEIIEQISEFSKRVILADANLDKVLSAYNKHRDKPIREQAENIIHLFTLTNLGAPAAFKYFDTTIDRKRYTSTKEVLDATLIHQSITGLYETRIDLSQLGGDGGGGGGSGGGGSGGGGSGGGGSGGVPWLTQQPLQLTILVPLQEYQEKILSKTALPEDQKQQLKTLFVKYDNLWQHWENQVGHRKIRPHNIATGDYPPRPQKQYPINPKAKPSIQIVIDDLLKQGVLTPQNSTMNTPVYPVPKPDGRWRMVLDYREVNKTIPLTAAQNQHSAGILATIVRQKYKTTLDLANGFWAHPITPESYWLTAFTWQGKQYCWTRLPQGFLNSPALFNADVVDLLKEIPNVQVYVDDIYLSHDDPKEHVQQLEKVFQILLQAGYVVSLKKSEIGQKTVEFLGFNITKEGRGLTDTFKTKLLNITPPKDLKQLQSILGLLNFARNFIPNFAELVQPLYNLIAPAKGKYIEWSEENTKQLNMVIEALNTASNLEERLPEQRLVIKVNTSPSAGYVRYYNETGKKPIMYLNYVFSKAELKFSMLEKLLTTMHKALIKAMDLAMGQEILVYSPIVSMTKIQKTPLPERKALPIRWITWMTYLEDPRIQFHYDKTLPELKHIPDVYTSSQSPVKHPSQYEGVFYTDGSAIKSPDPTKSNNAGMGIVHATYKPEYQVLNQWSIPLGNHTAQMAEIAAVEFACKKALKIPGPVLVITDSFYVAESANKELPYWKSNGFVNNKKKPLKHISKWKSIAECLSMKPDITIQHEKGISLQIPVFILKGNALADKLATQGSYVVNAGKRTADGSEFEKRTADGSEFESPKKKAKVE

SEQ ID NO: 1300 - protein, 2096 aa, synthetic construct
MPAAKRVKLDGGDKKYSIGLDIGTNSVGWAVITDEYKVPSKKFKVLGNTDRHSIKKNLIGALLFDSGETAEATRLKRTARRRYTRRKNRICYLQEIFSNEMAKVDDSFFHRLEESFLVEEDKKHERHPIFGNIVDEVAYHEKYPTIYHLRKKLVDSTDKADLRLIYLALAHMIKFRGHFLIEGDLNPDNSDVDKLFIQLVQTYNQLFEENPINASGVDAKAILSARLSKSRRLENLIAQLPGEKKNGLFGNLIALSLGLTPNFKSNFDLAEDAKLQLSKDTYDDDLDNLLAQIGDQYADLFLAAKNLSDAILLSDILRVNTEITKAPLSASMIKRYDEHHQDLTLLKALVRQQLPEKYKEIFFDQSKNGYAGYIDGGASQEEFYKFIKPILEKMDGTEELLVKLNREDLLRKQRTFDNGSIPHQIHLGELHAILRRQEDFYPFLKDNREKIEKILTFRIPYYVGPLARGNSRFAWMTRKSEETITPWNFEEVVDKGASAQSFIERMTNFDKNLPNEKVLPKHSLLYEYFTVYNELTKVKYVTEGMRKPAFLSGEQKKAIVDLLFKTNRKVTVKQLKEDYFKKIECFDSVEISGVEDRFNASLGTYHDLLKIIKDKDFLDNEENEDILEDIVLTLTLFEDREMIEERLKTYAHLFDDKVMKQLKRRRYTGWGRLSRKLINGIRDKQSGKTILDFLKSDGFANRNFMQLIHDDSLTFKEDIQKAQVSGQGDSLHEHIANLAGSPAIKKGILQTVKVVDELVKVMGRHKPENIVIEMARENQTTQKGQKNSRERMKRIEEGIKELGSQILKEHPVENTQLQNEKLYLYYLQNGRDMYVDQELDINRLSDYDVDHIVPQSFLKDDSIDNKVLTRSDKARGKSDNVPSEEVVKKMKNYWRQLLNAKLITQRKFDNLTKAERGGLSELDKAGFIKRQLVETRQITKHVAQILDSRMNTKYDENDKLIREVKVITLKSKLVSDFRKDFQFYKVREINNYHHAHDAYLNAVVGTALIKKYPKLESEFVYGDYKVYDVRKMIAKSEQEIGKATAKYFFYSNIMNFFKTEITLANGEIRKRPLIETNGETGEIVWDKGRDFATVRKVLSMPQVNIVKKTEVQTGGFSKESILPKRNSDKLIARKKDWDPKKYGGFDSPTVAYSVLVVAKVEKGKSKKLKSVKELLGITIMERSSFEKNPIDFLEAKGYKEVKKDLIIKLPKYSLFELENGRKRMLASAGELQKGNELALPSKYVNFLYLASHYEKLKGSPEDNEQKQLFVEQHKHYLDEIIEQISEFSKRVILADANLDKVLSAYNKHRDKPIREQAENIIHLFTLTNLGAPAAFKYFDTTIDRKRYTSTKEVLDATLIHQSITGLYETRIDLSQLGGDGGEAAAKEAAAKEAAAKEAAAKGGVPWLTQQPLQLTILVPLQEYQEKILSKTALPEDQKQQLKTLFVKYDNLWQHWENQVGHRKIRPHNIATGDYPPRPQKQYPINPKAKPSIQIVIDDLLKQGVLTPQNSTMNTPVYPVPKPDGRWRMVLDYREVNKTIPLTAAQNQHSAGILATIVRQKYKTTLDLANGFWAHPITPESYWLTAFTWQGKQYCWTRLPQGFLNSPALFNADVVDLLKEIPNVQVYVDDIYLSHDDPKEHVQQLEKVFQILLQAGYVVSLKKSEIGQKTVEFLGFNITKEGRGLTDTFKTKLLNITPPKDLKQLQSILGLLNFARNFIPNFAELVQPLYNLIAPAKGKYIEWSEENTKQLNMVIEALNTASNLEERLPEQRLVIKVNTSPSAGYVRYYNETGKKPIMYLNYVFSKAELKFSMLEKLLTTMHKALIKAMDLAMGQEILVYSPIVSMTKIQKTPLPERKALPIRWITWMTYLEDPRIQFHYDKTLPELKHIPDVYTSSQSPVKHPSQYEGVFYTDGSAIKSPDPTKSNNAGMGIVHATYKPEYQVLNQWSIPLGNHTAQMAEIAAVEFACKKALKIPGPVLVITDSFYVAESANKELPYWKSNGFVNNKKKPLKHISKWKSIAECLSMKPDITIQHEKGISLQIPVFILKGNALADKLATQGSYVVNAGKRTADGSEFEKRTADGSEFESPKKKAKVE

SEQ ID NO: 1301 - protein, 2084 aa, synthetic construct
MPAAKRVKLDGGDKKYSIGLDIGTNSVGWAVITDEYKVPSKKFKVLGNTDRHSIKKNLIGALLFDSGETAEATRLKRTARRRYTRRKNRICYLQEIFSNEMAKVDDSFFHRLEESFLVEEDKKHERHPIFGNIVDEVAYHEKYPTIYHLRKKLVDSTDKADLRLIYLALAHMIKFRGHFLIEGDLNPDNSDVDKLFIQLVQTYNQLFEENPINASGVDAKAILSARLSKSRRLENLIAQLPGEKKNGLFGNLIALSLGLTPNFKSNFDLAEDAKLQLSKDTYDDDLDNLLAQIGDQYADLFLAAKNLSDAILLSDILRVNTEITKAPLSASMIKRYDEHHQDLTLLKALVRQQLPEKYKEIFFDQSKNGYAGYIDGGASQEEFYKFIKPILEKMDGTEELLVKLNREDLLRKQRTFDNGSIPHQIHLGELHAILRRQEDFYPFLKDNREKIEKILTFRIPYYVGPLARGNSRFAWMTRKSEETITPWNFEEVVDKGASAQSFIERMTNFDKNLPNEKVLPKHSLLYEYFTVYNELTKVKYVTEGMRKPAFLSGEQKKAIVDLLFKTNRKVTVKQLKEDYFKKIECFDSVEISGVEDRFNASLGTYHDLLKIIKDKDFLDNEENEDILEDIVLTLTLFEDREMIEERLKTYAHLFDDKVMKQLKRRRYTGWGRLSRKLINGIRDKQSGKTILDFLKSDGFANRNFMQLIHDDSLTFKEDIQKAQVSGQGDSLHEHIANLAGSPAIKKGILQTVKVVDELVKVMGRHKPENIVIEMARENQTTQKGQKNSRERMKRIEEGIKELGSQILKEHPVENTQLQNEKLYLYYLQNGRDMYVDQELDINRLSDYDVDHIVPQSFLKDDSIDNKVLTRSDKARGKSDNVPSEEVVKKMKNYWRQLLNAKLITQRKFDNLTKAERGGLSELDKAGFIKRQLVETRQITKHVAQILDSRMNTKYDENDKLIREVKVITLKSKLVSDFRKDFQFYKVREINNYHHAHDAYLNAVVGTALIKKYPKLESEFVYGDYKVYDVRKMIAKSEQEIGKATAKYFFYSNIMNFFKTEITLANGEIRKRPLIETNGETGEIVWDKGRDFATVRKVLSMPQVNIVKKTEVQTGGFSKESILPKRNSDKLIARKKDWDPKKYGGFDSPTVAYSVLVVAKVEKGKSKKLKSVKELLGITIMERSSFEKNPIDFLEAKGYKEVKKDLIIKLPKYSLFELENGRKRMLASAGELQKGNELALPSKYVNFLYLASHYEKLKGSPEDNEQKQLFVEQHKHYLDEIIEQISEFSKRVILADANLDKVLSAYNKHRDKPIREQAENIIHLFTLTNLGAPAAFKYFDTTIDRKRYTSTKEVLDATLIHQSITGLYETRIDLSQLGGDGGEAAAKPAPGGVPWLTQQPLQLTILVPLQEYQEKILSKTALPEDQKQQLKTLFVKYDNLWQHWENQVGHRKIRPHNIATGDYPPRPQKQYPINPKAKPSIQIVIDDLLKQGVLTPQNSTMNTPVYPVPKPDGRWRMVLDYREVNKTIPLTAAQNQHSAGILATIVRQKYKTTLDLANGFWAHPITPESYWLTAFTWQGKQYCWTRLPQGFLNSPALFNADVVDLLKEIPNVQVYVDDIYLSHDDPKEHVQQLEKVFQILLQAGYVVSLKKSEIGQKTVEFLGFNITKEGRGLTDTFKTKLLNITPPKDLKQLQSILGLLNFARNFIPNFAELVQPLYNLIAPAKGKYIEWSEENTKQLNMVIEALNTASNLEERLPEQRLVIKVNTSPSAGYVRYYNETGKKPIMYLNYVFSKAELKFSMLEKLLTTMHKALIKAMDLAMGQEILVYSPIVSMTKIQKTPLPERKALPIRWITWMTYLEDPRIQFHYDKTLPELKHIPDVYTSSQSPVKHPSQYEGVFYTDGSAIKSPDPTKSNNAGMGIVHATYKPEYQVLNQWSIPLGNHTAQMAEIAAVEFACKKALKIPGPVLVITDSFYVAESANKELPYWKSNGFVNNKKKPLKHISKWKSIAECLSMKPDITIQHEKGISLQIPVFILKGNALADKLATQGSYVVNAGKRTADGSEFEKRTADGSEFESPKKKAKVE

SEQ ID NO: 1302 - protein, 2087 aa, synthetic construct
MPAAKRVKLDGGDKKYSIGLDIGTNSVGWAVITDEYKVPSKKFKVLGNTDRHSIKKNLIGALLFDSGETAEATRLKRTARRRYTRRKNRICYLQEIFSNEMAKVDDSFFHRLEESFLVEEDKKHERHPIFGNIVDEVAYHEKYPTIYHLRKKLVDSTDKADLRLIYLALAHMIKFRGHFLIEGDLNPDNSDVDKLFIQLVQTYNQLFEENPINASGVDAKAILSARLSKSRRLENLIAQLPGEKKNGLFGNLIALSLGLTPNFKSNFDLAEDAKLQLSKDTYDDDLDNLLAQIGDQYADLFLAAKNLSDAILLSDILRVNTEITKAPLSASMIKRYDEHHQDLTLLKALVRQQLPEKYKEIFFDQSKNGYAGYIDGGASQEEFYKFIKPILEKMDGTEELLVKLNREDLLRKQRTFDNGSIPHQIHLGELHAILRRQEDFYPFLKDNREKIEKILTFRIPYYVGPLARGNSRFAWMTRKSEETITPWNFEEVVDKGASAQSFIERMTNFDKNLPNEKVLPKHSLLYEYFTVYNELTKVKYVTEGMRKPAFLSGEQKKAIVDLLFKTNRKVTVKQLKEDYFKKIECFDSVEISGVEDRFNASLGTYHDLLKIIKDKDFLDNEENEDILEDIVLTLTLFEDREMIEERLKTYAHLFDDKVMKQLKRRRYTGWGRLSRKLINGIRDKQSGKTILDFLKSDGFANRNFMQLIHDDSLTFKEDIQKAQVSGQGDSLHEHIANLAGSPAIKKGILQTVKVVDELVKVMGRHKPENIVIEMARENQTTQKGQKNSRERMKRIEEGIKELGSQILKEHPVENTQLQNEKLYLYYLQNGRDMYVDQELDINRLSDYDVDHIVPQSFLKDDSIDNKVLTRSDKARGKSDNVPSEEVVKKMKNYWRQLLNAKLITQRKFDNLTKAERGGLSELDKAGFIKRQLVETRQITKHVAQILDSRMNTKYDENDKLIREVKVITLKSKLVSDFRKDFQFYKVREINNYHHAHDAYLNAVVGTALIKKYPKLESEFVYGDYKVYDVRKMIAKSEQEIGKATAKYFFYSNIMNFFKTEITLANGEIRKRPLIETNGETGEIVWDKGRDFATVRKVLSMPQVNIVKKTEVQTGGFSKESILPKRNSDKLIARKKDWDPKKYGGFDSPTVAYSVLVVAKVEKGKSKKLKSVKELLGITIMERSSFEKNPIDFLEAKGYKEVKKDLIIKLPKYSLFELENGRKRMLASAGELQKGNELALPSKYVNFLYLASHYEKLKGSPEDNEQKQLFVEQHKHYLDEIIEQISEFSKRVILADANLDKVLSAYNKHRDKPIREQAENIIHLFTLTNLGAPAAFKYFDTTIDRKRYTSTKEVLDATLIHQSITGLYETRIDLSQLGGDGGPAPGSSEAAAKGGVPWLTQQPLQLTILVPLQEYQEKILSKTALPEDQKQQLKTLFVKYDNLWQHWENQVGHRKIRPHNIATGDYPPRPQKQYPINPKAKPSIQIVIDDLLKQGVLTPQNSTMNTPVYPVPKPDGRWRMVLDYREVNKTIPLTAAQNQHSAGILATIVRQKYKTTLDLANGFWAHPITPESYWLTAFTWQGKQYCWTRLPQGFLNSPALFNADVVDLLKEIPNVQVYVDDIYLSHDDPKEHVQQLEKVFQILLQAGYVVSLKKSEIGQKTVEFLGFNITKEGRGLTDTFKTKLLNITPPKDLKQLQSILGLLNFARNFIPNFAELVQPLYNLIAPAKGKYIEWSEENTKQLNMVIEALNTASNLEERLPEQRLVIKVNTSPSAGYVRYYNETGKKPIMYLNYVFSKAELKFSMLEKLLTTMHKALIKAMDLAMGQEILVYSPIVSMTKIQKTPLPERKALPIRWITWMTYLEDPRIQFHYDKTLPELKHIPDVYTSSQSPVKHPSQYEGVFYTDGSAIKSPDPTKSNNAGMGIVHATYKPEYQVLNQWSIPLGNHTAQMAEIAAVEFACKKALKIPGPVLVITDSFYVAESANKELPYWKSNGFVNNKKKPLKHISKWKSIAECLSMKPDITIQHEKGISLQIPVFILKGNALADKLATQGSYVVNAGKRTADGSEFEKRTADGSEFESPKKKAKVE

SEQ ID NO: 1303 - protein, 2091 aa, synthetic construct
MPAAKRVKLDGGDKKYSIGLDIGTNSVGWAVITDEYKVPSKKFKVLGNTDRHSIKKNLIGALLFDSGETAEATRLKRTARRRYTRRKNRICYLQEIFSNEMAKVDDSFFHRLEESFLVEEDKKHERHPIFGNIVDEVAYHEKYPTIYHLRKKLVDSTDKADLRLIYLALAHMIKFRGHFLIEGDLNPDNSDVDKLFIQLVQTYNQLFEENPINASGVDAKAILSARLSKSRRLENLIAQLPGEKKNGLFGNLIALSLGLTPNFKSNFDLAEDAKLQLSKDTYDDDLDNLLAQIGDQYADLFLAAKNLSDAILLSDILRVNTEITKAPLSASMIKRYDEHHQDLTLLKALVRQQLPEKYKEIFFDQSKNGYAGYIDGGASQEEFYKFIKPILEKMDGTEELLVKLNREDLLRKQRTFDNGSIPHQIHLGELHAILRRQEDFYPFLKDNREKIEKILTFRIPYYVGPLARGNSRFAWMTRKSEETITPWNFEEVVDKGASAQSFIERMTNFDKNLPNEKVLPKHSLLYEYFTVYNELTKVKYVTEGMRKPAFLSGEQKKAIVDLLFKTNRKVTVKQLKEDYFKKIECFDSVEISGVEDRFNASLGTYHDLLKIIKDKDFLDNEENEDILEDIVLTLTLFEDREMIEERLKTYAHLFDDKVMKQLKRRRYTGWGRLSRKLINGIRDKQSGKTILDFLKSDGFANRNFMQLIHDDSLTFKEDIQKAQVSGQGDSLHEHIANLAGSPAIKKGILQTVKVVDELVKVMGRHKPENIVIEMARENQTTQKGQKNSRERMKRIEEGIKELGSQILKEHPVENTQLQNEKLYLYYLQNGRDMYVDQELDINRLSDYDVDHIVPQSFLKDDSIDNKVLTRSDKARGKSDNVPSEEVVKKMKNYWRQLLNAKLITQRKFDNLTKAERGGLSELDKAGFIKRQLVETRQITKHVAQILDSRMNTKYDENDKLIREVKVITLKSKLVSDFRKDFQFYKVREINNYHHAHDAYLNAVVGTALIKKYPKLESEFVYGDYKVYDVRKMIAKSEQEIGKATAKYFFYSNIMNFFKTEITLANGEIRKRPLIETNGETGEIVWDKGRDFATVRKVLSMPQVNIVKKTEVQTGGFSKESILPKRNSDKLIARKKDWDPKKYGGFDSPTVAYSVLVVAKVEKGKSKKLKSVKELLGITIMERSSFEKNPIDFLEAKGYKEVKKDLIIKLPKYSLFELENGRKRMLASAGELQKGNELALPSKYVNFLYLASHYEKLKGSPEDNEQKQLFVEQHKHYLDEIIEQISEFSKRVILADANLDKVLSAYNKHRDKPIREQAENIIHLFTLTNLGAPAAFKYFDTTIDRKRYTSTKEVLDATLIHQSITGLYETRIDLSQLGGDGGGSSGSSGSSGSSGSSGGVPWLTQQPLQLTILVPLQEYQEKILSKTALPEDQKQQLKTLFVKYDNLWQHWENQVGHRKIRPHNIATGDYPPRPQKQYPINPKAKPSIQIVIDDLLKQGVLTPQNSTMNTPVYPVPKPDGRWRMVLDYREVNKTIPLTAAQNQHSAGILATIVRQKYKTTLDLANGFWAHPITPESYWLTAFTWQGKQYCWTRLPQGFLNSPALFNADVVDLLKEIPNVQVYVDDIYLSHDDPKEHVQQLEKVFQILLQAGYVVSLKKSEIGQKTVEFLGFNITKEGRGLTDTFKTKLLNITPPKDLKQLQSILGLLNFARNFIPNFAELVQPLYNLIAPAKGKYIEWSEENTKQLNMVIEALNTASNLEERLPEQRLVIKVNTSPSAGYVRYYNETGKKPIMYLNYVFSKAELKFSMLEKLLTTMHKALIKAMDLAMGQEILVYSPIVSMTKIQKTPLPERKALPIRWITWMTYLEDPRIQFHYDKTLPELKHIPDVYTSSQSPVKHPSQYEGVFYTDGSAIKSPDPTKSNNAGMGIVHATYKPEYQVLNQWSIPLGNHTAQMAEIAAVEFACKKALKIPGPVLVITDSFYVAESANKELPYWKSNGFVNNKKKPLKHISKWKSIAECLSMKPDITIQHEKGISLQIPVFILKGNALADKLATQGSYVVNAGKRTADGSEFEKRTADGSEFESPKKKAKVE

SEQ ID NO: 1304 - protein, 2085 aa, synthetic construct
MPAAKRVKLDGGDKKYSIGLDIGTNSVGWAVITDEYKVPSKKFKVLGNTDRHSIKKNLIGALLFDSGETAEATRLKRTARRRYTRRKNRICYLQEIFSNEMAKVDDSFFHRLEESFLVEEDKKHERHPIFGNIVDEVAYHEKYPTIYHLRKKLVDSTDKADLRLIYLALAHMIKFRGHFLIEGDLNPDNSDVDKLFIQLVQTYNQLFEENPINASGVDAKAILSARLSKSRRLENLIAQLPGEKKNGLFGNLIALSLGLTPNFKSNFDLAEDAKLQLSKDTYDDDLDNLLAQIGDQYADLFLAAKNLSDAILLSDILRVNTEITKAPLSASMIKRYDEHHQDLTLLKALVRQQLPEKYKEIFFDQSKNGYAGYIDGGASQEEFYKFIKPILEKMDGTEELLVKLNREDLLRKQRTFDNGSIPHQIHLGELHAILRRQEDFYPFLKDNREKIEKILTFRIPYYVGPLARGNSRFAWMTRKSEETITPWNFEEVVDKGASAQSFIERMTNFDKNLPNEKVLPKHSLLYEYFTVYNELTKVKYVTEGMRKPAFLSGEQKKAIVDLLFKTNRKVTVKQLKEDYFKKIECFDSVEISGVEDRFNASLGTYHDLLKIIKDKDFLDNEENEDILEDIVLTLTLFEDREMIEERLKTYAHLFDDKVMKQLKRRRYTGWGRLSRKLINGIRDKQSGKTILDFLKSDGFANRNFMQLIHDDSLTFKEDIQKAQVSGQGDSLHEHIANLAGSPAIKKGILQTVKVVDELVKVMGRHKPENIVIEMARENQTTQKGQKNSRERMKRIEEGIKELGSQILKEHPVENTQLQNEKLYLYYLQNGRDMYVDQELDINRLSDYDVDHIVPQSFLKDDSIDNKVLTRSDKARGKSDNVPSEEVVKKMKNYWRQLLNAKLITQRKFDNLTKAERGGLSELDKAGFIKRQLVETRQITKHVAQILDSRMNTKYDENDKLIREVKVITLKSKLVSDFRKDFQFYKVREINNYHHAHDAYLNAVVGTALIKKYPKLESEFVYGDYKVYDVRKMIAKSEQEIGKATAKYFFYSNIMNFFKTEITLANGEIRKRPLIETNGETGEIVWDKGRDFATVRKVLSMPQVNIVKKTEVQTGGFSKESILPKRNSDKLIARKKDWDPKKYGGFDSPTVAYSVLVVAKVEKGKSKKLKSVKELLGITIMERSSFEKNPIDFLEAKGYKEVKKDLIIKLPKYSLFELENGRKRMLASAGELQKGNELALPSKYVNFLYLASHYEKLKGSPEDNEQKQLFVEQHKHYLDEIIEQISEFSKRVILADANLDKVLSAYNKHRDKPIREQAENIIHLFTLTNLGAPAAFKYFDTTIDRKRYTSTKEVLDATLIHQSITGLYETRIDLSQLGGDGGGGSGGSGGSGGVPWLTQQPLQLTILVPLQEYQEKILSKTALPEDQKQQLKTLFVKYDNLWQHWENQVGHRKIRPHNIATGDYPPRPQKQYPINPKAKPSIQIVIDDLLKQGVLTPQNSTMNTPVYPVPKPDGRWRMVLDYREVNKTIPLTAAQNQHSAGILATIVRQKYKTTLDLANGFWAHPITPESYWLTAFTWQGKQYCWTRLPQGFLNSPALFNADVVDLLKEIPNVQVYVDDIYLSHDDPKEHVQQLEKVFQILLQAGYVVSLKKSEIGQKTVEFLGFNITKEGRGLTDTFKTKLLNITPPKDLKQLQSILGLLNFARNFIPNFAELVQPLYNLIAPAKGKYIEWSEENTKQLNMVIEALNTASNLEERLPEQRLVIKVNTSPSAGYVRYYNETGKKPIMYLNYVFSKAELKFSMLEKLLTTMHKALIKAMDLAMGQEILVYSPIVSMTKIQKTPLPERKALPIRWITWMTYLEDPRIQFHYDKTLPELKHIPDVYTSSQSPVKHPSQYEGVFYTDGSAIKSPDPTKSNNAGMGIVHATYKPEYQVLNQWSIPLGNHTAQMAEIAAVEFACKKALKIPGPVLVITDSFYVAESANKELPYWKSNGFVNNKKKPLKHISKWKSIAECLSMKPDITIQHEKGISLQIPVFILKGNALADKLATQGSYVVNAGKRTADGSEFEKRTADGSEFESPKKKAKVE

SEQ ID NO: 1305 - protein, 2085 aa, synthetic construct
MPAAKRVKLDGGDKKYSIGLDIGTNSVGWAVITDEYKVPSKKFKVLGNTDRHSIKKNLIGALLFDSGETAEATRLKRTARRRYTRRKNRICYLQEIFSNEMAKVDDSFFHRLEESFLVEEDKKHERHPIFGNIVDEVAYHEKYPTIYHLRKKLVDSTDKADLRLIYLALAHMIKFRGHFLIEGDLNPDNSDVDKLFIQLVQTYNQLFEENPINASGVDAKAILSARLSKSRRLENLIAQLPGEKKNGLFGNLIALSLGLTPNFKSNFDLAEDAKLQLSKDTYDDDLDNLLAQIGDQYADLFLAAKNLSDAILLSDILRVNTEITKAPLSASMIKRYDEHHQDLTLLKALVRQQLPEKYKEIFFDQSKNGYAGYIDGGASQEEFYKFIKPILEKMDGTEELLVKLNREDLLRKQRTFDNGSIPHQIHLGELHAILRRQEDFYPFLKDNREKIEKILTFRIPYYVGPLARGNSRFAWMTRKSEETITPWNFEEVVDKGASAQSFIERMTNFDKNLPNEKVLPKHSLLYEYFTVYNELTKVKYVTEGMRKPAFLSGEQKKAIVDLLFKTNRKVTVKQLKEDYFKKIECFDSVEISGVEDRFNASLGTYHDLLKIIKDKDFLDNEENEDILEDIVLTLTLFEDREMIEERLKTYAHLFDDKVMKQLKRRRYTGWGRLSRKLINGIRDKQSGKTILDFLKSDGFANRNFMQLIHDDSLTFKEDIQKAQVSGQGDSLHEHIANLAGSPAIKKGILQTVKVVDELVKVMGRHKPENIVIEMARENQTTQKGQKNSRERMKRIEEGIKELGSQILKEHPVENTQLQNEKLYLYYLQNGRDMYVDQELDINRLSDYDVDHIVPQSFLKDDSIDNKVLTRSDKARGKSDNVPSEEVVKKMKNYWRQLLNAKLITQRKFDNLTKAERGGLSELDKAGFIKRQLVETRQITKHVAQILDSRMNTKYDENDKLIREVKVITLKSKLVSDFRKDFQFYKVREINNYHHAHDAYLNAVVGTALIKKYPKLESEFVYGDYKVYDVRKMIAKSEQEIGKATAKYFFYSNIMNFFKTEITLANGEIRKRPLIETNGETGEIVWDKGRDFATVRKVLSMPQVNIVKKTEVQTGGFSKESILPKRNSDKLIARKKDWDPKKYGGFDSPTVAYSVLVVAKVEKGKSKKLKSVKELLGITIMERSSFEKNPIDFLEAKGYKEVKKDLIIKLPKYSLFELENGRKRMLASAGELQKGNELALPSKYVNFLYLASHYEKLKGSPEDNEQKQLFVEQHKHYLDEIIEQISEFSKRVILADANLDKVLSAYNKHRDKPIREQAENIIHLFTLTNLGAPAAFKYFDTTIDRKRYTSTKEVLDATLIHQSITGLYETRIDLSQLGGDGGGGGGSSPAPGGVPWLTQQPLQLTILVPLQEYQEKILSKTALPEDQKQQLKTLFVKYDNLWQHWENQVGHRKIRPHNIATGDYPPRPQKQYPINPKAKPSIQIVIDDLLKQGVLTPQNSTMNTPVYPVPKPDGRWRMVLDYREVNKTIPLTAAQNQHSAGILATIVRQKYKTTLDLANGFWAHPITPESYWLTAFTWQGKQYCWTRLPQGFLNSPALFNADVVDLLKEIPNVQVYVDDIYLSHDDPKEHVQQLEKVFQILLQAGYVVSLKKSEIGQKTVEFLGFNITKEGRGLTDTFKTKLLNITPPKDLKQLQSILGLLNFARNFIPNFAELVQPLYNLIAPAKGKYIEWSEENTKQLNMVIEALNTASNLEERLPEQRLVIKVNTSPSAGYVRYYNETGKKPIMYLNYVFSKAELKFSMLEKLLTTMHKALIKAMDLAMGQEILVYSPIVSMTKIQKTPLPERKALPIRWITWMTYLEDPRIQFHYDKTLPELKHIPDVYTSSQSPVKHPSQYEGVFYTDGSAIKSPDPTKSNNAGMGIVHATYKPEYQVLNQWSIPLGNHTAQMAEIAAVEFACKKALKIPGPVLVITDSFYVAESANKELPYWKSNGFVNNKKKPLKHISKWKSIAECLSMKPDITIQHEKGISLQIPVFILKGNALADKLATQGSYVVNAGKRTADGSEFEKRTADGSEFESPKKKAKVE

SEQ ID NO: 1306 - protein, 2087 aa, synthetic construct
MPAAKRVKLDGGDKKYSIGLDIGTNSVGWAVITDEYKVPSKKFKVLGNTDRHSIKKNLIGALLFDSGETAEATRLKRTARRRYTRRKNRICYLQEIFSNEMAKVDDSFFHRLEESFLVEEDKKHERHPIFGNIVDEVAYHEKYPTIYHLRKKLVDSTDKADLRLIYLALAHMIKFRGHFLIEGDLNPDNSDVDKLFIQLVQTYNQLFEENPINASGVDAKAILSARLSKSRRLENLIAQLPGEKKNGLFGNLIALSLGLTPNFKSNFDLAEDAKLQLSKDTYDDDLDNLLAQIGDQYADLFLAAKNLSDAILLSDILRVNTEITKAPLSASMIKRYDEHHQDLTLLKALVRQQLPEKYKEIFFDQSKNGYAGYIDGGASQEEFYKFIKPILEKMDGTEELLVKLNREDLLRKQRTFDNGSIPHQIHLGELHAILRRQEDFYPFLKDNREKIEKILTFRIPYYVGPLARGNSRFAWMTRKSEETITPWNFEEVVDKGASAQSFIERMTNFDKNLPNEKVLPKHSLLYEYFTVYNELTKVKYVTEGMRKPAFLSGEQKKAIVDLLFKTNRKVTVKQLKEDYFKKIECFDSVEISGVEDRFNASLGTYHDLLKIIKDKDFLDNEENEDILEDIVLTLTLFEDREMIEERLKTYAHLFDDKVMKQLKRRRYTGWGRLSRKLINGIRDKQSGKTILDFLKSDGFANRNFMQLIHDDSLTFKEDIQKAQVSGQGDSLHEHIANLAGSPAIKKGILQTVKVVDELVKVMGRHKPENIVIEMARENQTTQKGQKNSRERMKRIEEGIKELGSQILKEHPVENTQLQNEKLYLYYLQNGRDMYVDQELDINRLSDYDVDHIVPQSFLKDDSIDNKVLTRSDKARGKSDNVPSEEVVKKMKNYWRQLLNAKLITQRKFDNLTKAERGGLSELDKAGFIKRQLVETRQITKHVAQILDSRMNTKYDENDKLIREVKVITLKSKLVSDFRKDFQFYKVREINNYHHAHDAYLNAVVGTALIKKYPKLESEFVYGDYKVYDVRKMIAKSEQEIGKATAKYFFYSNIMNFFKTEITLANGEIRKRPLIETNGETGEIVWDKGRDFATVRKVLSMPQVNIVKKTEVQTGGFSKESILPKRNSDKLIARKKDWDPKKYGGFDSPTVAYSVLVVAKVEKGKSKKLKSVKELLGITIMERSSFEKNPIDFLEAKGYKEVKKDLIIKLPKYSLFELENGRKRMLASAGELQKGNELALPSKYVNFLYLASHYEKLKGSPEDNEQKQLFVEQHKHYLDEIIEQISEFSKRVILADANLDKVLSAYNKHRDKPIREQAENIIHLFTLTNLGAPAAFKYFDTTIDRKRYTSTKEVLDATLIHQSITGLYETRIDLSQLGGDGGGSSGGSEAAAKGGVPWLTQQPLQLTILVPLQEYQEKILSKTALPEDQKQQLKTLFVKYDNLWQHWENQVGHRKIRPHNIATGDYPPRPQKQYPINPKAKPSIQIVIDDLLKQGVLTPQNSTMNTPVYPVPKPDGRWRMVLDYREVNKTIPLTAAQNQHSAGILATIVRQKYKTTLDLANGFWAHPITPESYWLTAFTWQGKQYCWTRLPQGFLNSPALFNADVVDLLKEIPNVQVYVDDIYLSHDDPKEHVQQLEKVFQILLQAGYVVSLKKSEIGQKTVEFLGFNITKEGRGLTDTFKTKLLNITPPKDLKQLQSILGLLNFARNFIPNFAELVQPLYNLIAPAKGKYIEWSEENTKQLNMVIEALNTASNLEERLPEQRLVIKVNTSPSAGYVRYYNETGKKPIMYLNYVFSKAELKFSMLEKLLTTMHKALIKAMDLAMGQEILVYSPIVSMTKIQKTPLPERKALPIRWITWMTYLEDPRIQFHYDKTLPELKHIPDVYTSSQSPVKHPSQYEGVFYTDGSAIKSPDPTKSNNAGMGIVHATYKPEYQVLNQWSIPLGNHTAQMAEIAAVEFACKKALKIPGPVLVITDSFYVAESANKELPYWKSNGFVNNKKKPLKHISKWKSIAECLSMKPDITIQHEKGISLQIPVFILKGNALADKLATQGSYVVNAGKRTADGSEFEKRTADGSEFESPKKKAKVE

SEQ ID NO: 1307 - protein, 2085 aa, synthetic construct
MPAAKRVKLDGGDKKYSIGLDIGTNSVGWAVITDEYKVPSKKFKVLGNTDRHSIKKNLIGALLFDSGETAEATRLKRTARRRYTRRKNRICYLQEIFSNEMAKVDDSFFHRLEESFLVEEDKKHERHPIFGNIVDEVAYHEKYPTIYHLRKKLVDSTDKADLRLIYLALAHMIKFRGHFLIEGDLNPDNSDVDKLFIQLVQTYNQLFEENPINASGVDAKAILSARLSKSRRLENLIAQLPGEKKNGLFGNLIALSLGLTPNFKSNFDLAEDAKLQLSKDTYDDDLDNLLAQIGDQYADLFLAAKNLSDAILLSDILRVNTEITKAPLSASMIKRYDEHHQDLTLLKALVRQQLPEKYKEIFFDQSKNGYAGYIDGGASQEEFYKFIKPILEKMDGTEELLVKLNREDLLRKQRTFDNGSIPHQIHLGELHAILRRQEDFYPFLKDNREKIEKILTFRIPYYVGPLARGNSRFAWMTRKSEETITPWNFEEVVDKGASAQSFIERMTNFDKNLPNEKVLPKHSLLYEYFTVYNELTKVKYVTEGMRKPAFLSGEQKKAIVDLLFKTNRKVTVKQLKEDYFKKIECFDSVEISGVEDRFNASLGTYHDLLKIIKDKDFLDNEENEDILEDIVLTLTLFEDREMIEERLKTYAHLFDDKVMKQLKRRRYTGWGRLSRKLINGIRDKQSGKTILDFLKSDGFANRNFMQLIHDDSLTFKEDIQKAQVSGQGDSLHEHIANLAGSPAIKKGILQTVKVVDELVKVMGRHKPENIVIEMARENQTTQKGQKNSRERMKRIEEGIKELGSQILKEHPVENTQLQNEKLYLYYLQNGRDMYVDQELDINRLSDYDVDHIVPQSFLKDDSIDNKVLTRSDKARGKSDNVPSEEVVKKMKNYWRQLLNAKLITQRKFDNLTKAERGGLSELDKAGFIKRQLVETRQITKHVAQILDSRMNTKYDENDKLIREVKVITLKSKLVSDFRKDFQFYKVREINNYHHAHDAYLNAVVGTALIKKYPKLESEFVYGDYKVYDVRKMIAKSEQEIGKATAKYFFYSNIMNFFKTEITLANGEIRKRPLIETNGETGEIVWDKGRDFATVRKVLSMPQVNIVKKTEVQTGGFSKESILPKRNSDKLIARKKDWDPKKYGGFDSPTVAYSVLVVAKVEKGKSKKLKSVKELLGITIMERSSFEKNPIDFLEAKGYKEVKKDLIIKLPKYSLFELENGRKRMLASAGELQKGNELALPSKYVNFLYLASHYEKLKGSPEDNEQKQLFVEQHKHYLDEIIEQISEFSKRVILADANLDKVLSAYNKHRDKPIREQAENIIHLFTLTNLGAPAAFKYFDTTIDRKRYTSTKEVLDATLIHQSITGLYETRIDLSQLGGDGGGSSPAPGGSGGVPWLTQQPLQLTILVPLQEYQEKILSKTALPEDQKQQLKTLFVKYDNLWQHWENQVGHRKIRPHNIATGDYPPRPQKQYPINPKAKPSIQIVIDDLLKQGVLTPQNSTMNTPVYPVPKPDGRWRMVLDYREVNKTIPLTAAQNQHSAGILATIVRQKYKTTLDLANGFWAHPITPESYWLTAFTWQGKQYCWTRLPQGFLNSPALFNADVVDLLKEIPNVQVYVDDIYLSHDDPKEHVQQLEKVFQILLQAGYVVSLKKSEIGQKTVEFLGFNITKEGRGLTDTFKTKLLNITPPKDLKQLQSILGLLNFARNFIPNFAELVQPLYNLIAPAKGKYIEWSEENTKQLNMVIEALNTASNLEERLPEQRLVIKVNTSPSAGYVRYYNETGKKPIMYLNYVFSKAELKFSMLEKLLTTMHKALIKAMDLAMGQEILVYSPIVSMTKIQKTPLPERKALPIRWITWMTYLEDPRIQFHYDKTLPELKHIPDVYTSSQSPVKHPSQYEGVFYTDGSAIKSPDPTKSNNAGMGIVHATYKPEYQVLNQWSIPLGNHTAQMAEIAAVEFACKKALKIPGPVLVITDSFYVAESANKELPYWKSNGFVNNKKKPLKHISKWKSIAECLSMKPDITIQHEKGISLQIPVFILKGNALADKLATQGSYVVNAGKRTADGSEFEKRTADGSEFESPKKKAKVE

SEQ ID NO: 1308 - protein, 2086 aa, synthetic construct
MPAAKRVKLDGGDKKYSIGLDIGTNSVGWAVITDEYKVPSKKFKVLGNTDRHSIKKNLIGALLFDSGETAEATRLKRTARRRYTRRKNRICYLQEIFSNEMAKVDDSFFHRLEESFLVEEDKKHERHPIFGNIVDEVAYHEKYPTIYHLRKKLVDSTDKADLRLIYLALAHMIKFRGHFLIEGDLNPDNSDVDKLFIQLVQTYNQLFEENPINASGVDAKAILSARLSKSRRLENLIAQLPGEKKNGLFGNLIALSLGLTPNFKSNFDLAEDAKLQLSKDTYDDDLDNLLAQIGDQYADLFLAAKNLSDAILLSDILRVNTEITKAPLSASMIKRYDEHHQDLTLLKALVRQQLPEKYKEIFFDQSKNGYAGYIDGGASQEEFYKFIKPILEKMDGTEELLVKLNREDLLRKQRTFDNGSIPHQIHLGELHAILRRQEDFYPFLKDNREKIEKILTFRIPYYVGPLARGNSRFAWMTRKSEETITPWNFEEVVDKGASAQSFIERMTNFDKNLPNEKVLPKHSLLYEYFTVYNELTKVKYVTEGMRKPAFLSGEQKKAIVDLLFKTNRKVTVKQLKEDYFKKIECFDSVEISGVEDRFNASLGTYHDLLKIIKDKDFLDNEENEDILEDIVLTLTLFEDREMIEERLKTYAHLFDDKVMKQLKRRRYTGWGRLSRKLINGIRDKQSGKTILDFLKSDGFANRNFMQLIHDDSLTFKEDIQKAQVSGQGDSLHEHIANLAGSPAIKKGILQTVKVVDELVKVMGRHKPENIVIEMARENQTTQKGQKNSRERMKRIEEGIKELGSQILKEHPVENTQLQNEKLYLYYLQNGRDMYVDQELDINRLSDYDVDHIVPQSFLKDDSIDNKVLTRSDKARGKSDNVPSEEVVKKMKNYWRQLLNAKLITQRKFDNLTKAERGGLSELDKAGFIKRQLVETRQITKHVAQILDSRMNTKYDENDKLIREVKVITLKSKLVSDFRKDFQFYKVREINNYHHAHDAYLNAVVGTALIKKYPKLESEFVYGDYKVYDVRKMIAKSEQEIGKATAKYFFYSNIMNFFKTEITLANGEIRKRPLIETNGETGEIVWDKGRDFATVRKVLSMPQVNIVKKTEVQTGGFSKESILPKRNSDKLIARKKDWDPKKYGGFDSPTVAYSVLVVAKVEKGKSKKLKSVKELLGITIMERSSFEKNPIDFLEAKGYKEVKKDLIIKLPKYSLFELENGRKRMLASAGELQKGNELALPSKYVNFLYLASHYEKLKGSPEDNEQKQLFVEQHKHYLDEIIEQISEFSKRVILADANLDKVLSAYNKHRDKPIREQAENIIHLFTLTNLGAPAAFKYFDTTIDRKRYTSTKEVLDATLIHQSITGLYETRIDLSQLGGDGGEAAAKEAAAKGGVPWLTQQPLQLTILVPLQEYQEKILSKTALPEDQKQQLKTLFVKYDNLWQHWENQVGHRKIRPHNIATGDYPPRPQKQYPINPKAKPSIQIVIDDLLKQGVLTPQNSTMNTPVYPVPKPDGRWRMVLDYREVNKTIPLTAAQNQHSAGILATIVRQKYKTTLDLANGFWAHPITPESYWLTAFTWQGKQYCWTRLPQGFLNSPALFNADVVDLLKEIPNVQVYVDDIYLSHDDPKEHVQQLEKVFQILLQAGYVVSLKKSEIGQKTVEFLGFNITKEGRGLTDTFKTKLLNITPPKDLKQLQSILGLLNFARNFIPNFAELVQPLYNLIAPAKGKYIEWSEENTKQLNMVIEALNTASNLEERLPEQRLVIKVNTSPSAGYVRYYNETGKKPIMYLNYVFSKAELKFSMLEKLLTTMHKALIKAMDLAMGQEILVYSPIVSMTKIQKTPLPERKALPIRWITWMTYLEDPRIQFHYDKTLPELKHIPDVYTSSQSPVKHPSQYEGVFYTDGSAIKSPDPTKSNNAGMGIVHATYKPEYQVLNQWSIPLGNHTAQMAEIAAVEFACKKALKIPGPVLVITDSFYVAESANKELPYWKSNGFVNNKKKPLKHISKWKSIAECLSMKPDITIQHEKGISLQIPVFILKGNALADKLATQGSYVVNAGKRTADGSEFEKRTADGSEFESPKKKAKVE

SEQ ID NO: 1309 - protein, 2087 aa, synthetic construct
MPAAKRVKLDGGDKKYSIGLDIGTNSVGWAVITDEYKVPSKKFKVLGNTDRHSIKKNLIGALLFDSGETAEATRLKRTARRRYTRRKNRICYLQEIFSNEMAKVDDSFFHRLEESFLVEEDKKHERHPIFGNIVDEVAYHEKYPTIYHLRKKLVDSTDKADLRLIYLALAHMIKFRGHFLIEGDLNPDNSDVDKLFIQLVQTYNQLFEENPINASGVDAKAILSARLSKSRRLENLIAQLPGEKKNGLFGNLIALSLGLTPNFKSNFDLAEDAKLQLSKDTYDDDLDNLLAQIGDQYADLFLAAKNLSDAILLSDILRVNTEITKAPLSASMIKRYDEHHQDLTLLKALVRQQLPEKYKEIFFDQSKNGYAGYIDGGASQEEFYKFIKPILEKMDGTEELLVKLNREDLLRKQRTFDNGSIPHQIHLGELHAILRRQEDFYPFLKDNREKIEKILTFRIPYYVGPLARGNSRFAWMTRKSEETITPWNFEEVVDKGASAQSFIERMTNFDKNLPNEKVLPKHSLLYEYFTVYNELTKVKYVTEGMRKPAFLSGEQKKAIVDLLFKTNRKVTVKQLKEDYFKKIECFDSVEISGVEDRFNASLGTYHDLLKIIKDKDFLDNEENEDILEDIVLTLTLFEDREMIEERLKTYAHLFDDKVMKQLKRRRYTGWGRLSRKLINGIRDKQSGKTILDFLKSDGFANRNFMQLIHDDSLTFKEDIQKAQVSGQGDSLHEHIANLAGSPAIKKGILQTVKVVDELVKVMGRHKPENIVIEMARENQTTQKGQKNSRERMKRIEEGIKELGSQILKEHPVENTQLQNEKLYLYYLQNGRDMYVDQELDINRLSDYDVDHIVPQSFLKDDSIDNKVLTRSDKARGKSDNVPSEEVVKKMKNYWRQLLNAKLITQRKFDNLTKAERGGLSELDKAGFIKRQLVETRQITKHVAQILDSRMNTKYDENDKLIREVKVITLKSKLVSDFRKDFQFYKVREINNYHHAHDAYLNAVVGTALIKKYPKLESEFVYGDYKVYDVRKMIAKSEQEIGKATAKYFFYSNIMNFFKTEITLANGEIRKRPLIETNGETGEIVWDKGRDFATVRKVLSMPQVNIVKKTEVQTGGFSKESILPKRNSDKLIARKKDWDPKKYGGFDSPTVAYSVLVVAKVEKGKSKKLKSVKELLGITIMERSSFEKNPIDFLEAKGYKEVKKDLIIKLPKYSLFELENGRKRMLASAGELQKGNELALPSKYVNFLYLASHYEKLKGSPEDNEQKQLFVEQHKHYLDEIIEQISEFSKRVILADANLDKVLSAYNKHRDKPIREQAENIIHLFTLTNLGAPAAFKYFDTTIDRKRYTSTKEVLDATLIHQSITGLYETRIDLSQLGGDGGGGGEAAAKPAPGGVPWLTQQPLQLTILVPLQEYQEKILSKTALPEDQKQQLKTLFVKYDNLWQHWENQVGHRKIRPHNIATGDYPPRPQKQYPINPKAKPSIQIVIDDLLKQGVLTPQNSTMNTPVYPVPKPDGRWRMVLDYREVNKTIPLTAAQNQHSAGILATIVRQKYKTTLDLANGFWAHPITPESYWLTAFTWQGKQYCWTRLPQGFLNSPALFNADVVDLLKEIPNVQVYVDDIYLSHDDPKEHVQQLEKVFQILLQAGYVVSLKKSEIGQKTVEFLGFNITKEGRGLTDTFKTKLLNITPPKDLKQLQSILGLLNFARNFIPNFAELVQPLYNLIAPAKGKYIEWSEENTKQLNMVIEALNTASNLEERLPEQRLVIKVNTSPSAGYVRYYNETGKKPIMYLNYVFSKAELKFSMLEKLLTTMHKALIKAMDLAMGQEILVYSPIVSMTKIQKTPLPERKALPIRWITWMTYLEDPRIQFHYDKTLPELKHIPDVYTSSQSPVKHPSQYEGVFYTDGSAIKSPDPTKSNNAGMGIVHATYKPEYQVLNQWSIPLGNHTAQMAEIAAVEFACKKALKIPGPVLVITDSFYVAESANKELPYWKSNGFVNNKKKPLKHISKWKSIAECLSMKPDITIQHEKGISLQIPVFILKGNALADKLATQGSYVVNAGKRTADGSEFEKRTADGSEFESPKKKAKVE

SEQ ID NO: 1310 - protein, 2085 aa, synthetic construct
MPAAKRVKLDGGDKKYSIGLDIGTNSVGWAVITDEYKVPSKKFKVLGNTDRHSIKKNLIGALLFDSGETAEATRLKRTARRRYTRRKNRICYLQEIFSNEMAKVDDSFFHRLEESFLVEEDKKHERHPIFGNIVDEVAYHEKYPTIYHLRKKLVDSTDKADLRLIYLALAHMIKFRGHFLIEGDLNPDNSDVDKLFIQLVQTYNQLFEENPINASGVDAKAILSARLSKSRRLENLIAQLPGEKKNGLFGNLIALSLGLTPNFKSNFDLAEDAKLQLSKDTYDDDLDNLLAQIGDQYADLFLAAKNLSDAILLSDILRVNTEITKAPLSASMIKRYDEHHQDLTLLKALVRQQLPEKYKEIFFDQSKNGYAGYIDGGASQEEFYKFIKPILEKMDGTEELLVKLNREDLLRKQRTFDNGSIPHQIHLGELHAILRRQEDFYPFLKDNREKIEKILTFRIPYYVGPLARGNSRFAWMTRKSEETITPWNFEEVVDKGASAQSFIERMTNFDKNLPNEKVLPKHSLLYEYFTVYNELTKVKYVTEGMRKPAFLSGEQKKAIVDLLFKTNRKVTVKQLKEDYFKKIECFDSVEISGVEDRFNASLGTYHDLLKIIKDKDFLDNEENEDILEDIVLTLTLFEDREMIEERLKTYAHLFDDKVMKQLKRRRYTGWGRLSRKLINGIRDKQSGKTILDFLKSDGFANRNFMQLIHDDSLTFKEDIQKAQVSGQGDSLHEHIANLAGSPAIKKGILQTVKVVDELVKVMGRHKPENIVIEMARENQTTQKGQKNSRERMKRIEEGIKELGSQILKEHPVENTQLQNEKLYLYYLQNGRDMYVDQELDINRLSDYDVDHIVPQSFLKDDSIDNKVLTRSDKARGKSDNVPSEEVVKKMKNYWRQLLNAKLITQRKFDNLTKAERGGLSELDKAGFIKRQLVETRQITKHVAQILDSRMNTKYDENDKLIREVKVITLKSKLVSDFRKDFQFYKVREINNYHHAHDAYLNAVVGTALIKKYPKLESEFVYGDYKVYDVRKMIAKSEQEIGKATAKYFFYSNIMNFFKTEITLANGEIRKRPLIETNGETGEIVWDKGRDFATVRKVLSMPQVNIVKKTEVQTGGFSKESILPKRNSDKLIARKKDWDPKKYGGFDSPTVAYSVLVVAKVEKGKSKKLKSVKELLGITIMERSSFEKNPIDFLEAKGYKEVKKDLIIKLPKYSLFELENGRKRMLASAGELQKGNELALPSKYVNFLYLASHYEKLKGSPEDNEQKQLFVEQHKHYLDEIIEQISEFSKRVILADANLDKVLSAYNKHRDKPIREQAENIIHLFTLTNLGAPAAFKYFDTTIDRKRYTSTKEVLDATLIHQSITGLYETRIDLSQLGGDGGGGSGGGPAPGGVPWLTQQPLQLTILVPLQEYQEKILSKTALPEDQKQQLKTLFVKYDNLWQHWENQVGHRKIRPHNIATGDYPPRPQKQYPINPKAKPSIQIVIDDLLKQGVLTPQNSTMNTPVYPVPKPDGRWRMVLDYREVNKTIPLTAAQNQHSAGILATIVRQKYKTTLDLANGFWAHPITPESYWLTAFTWQGKQYCWTRLPQGFLNSPALFNADVVDLLKEIPNVQVYVDDIYLSHDDPKEHVQQLEKVFQILLQAGYVVSLKKSEIGQKTVEFLGFNITKEGRGLTDTFKTKLLNITPPKDLKQLQSILGLLNFARNFIPNFAELVQPLYNLIAPAKGKYIEWSEENTKQLNMVIEALNTASNLEERLPEQRLVIKVNTSPSAGYVRYYNETGKKPIMYLNYVFSKAELKFSMLEKLLTTMHKALIKAMDLAMGQEILVYSPIVSMTKIQKTPLPERKALPIRWITWMTYLEDPRIQFHYDKTLPELKHIPDVYTSSQSPVKHPSQYEGVFYTDGSAIKSPDPTKSNNAGMGIVHATYKPEYQVLNQWSIPLGNHTAQMAEIAAVEFACKKALKIPGPVLVITDSFYVAESANKELPYWKSNGFVNNKKKPLKHISKWKSIAECLSMKPDITIQHEKGISLQIPVFILKGNALADKLATQGSYVVNAGKRTADGSEFEKRTADGSEFESPKKKAKVE

SEQ ID NO: 1311 - protein, 2122 aa, synthetic construct
MPAAKRVKLDGGDKKYSIGLDIGTNSVGWAVITDEYKVPSKKFKVLGNTDRHSIKKNLIGALLFDSGETAEATRLKRTARRRYTRRKNRICYLQEIFSNEMAKVDDSFFHRLEESFLVEEDKKHERHPIFGNIVDEVAYHEKYPTIYHLRKKLVDSTDKADLRLIYLALAHMIKFRGHFLIEGDLNPDNSDVDKLFIQLVQTYNQLFEENPINASGVDAKAILSARLSKSRRLENLIAQLPGEKKNGLFGNLIALSLGLTPNFKSNFDLAEDAKLQLSKDTYDDDLDNLLAQIGDQYADLFLAAKNLSDAILLSDILRVNTEITKAPLSASMIKRYDEHHQDLTLLKALVRQQLPEKYKEIFFDQSKNGYAGYIDGGASQEEFYKFIKPILEKMDGTEELLVKLNREDLLRKQRTFDNGSIPHQIHLGELHAILRRQEDFYPFLKDNREKIEKILTFRIPYYVGPLARGNSRFAWMTRKSEETITPWNFEEVVDKGASAQSFIERMTNFDKNLPNEKVLPKHSLLYEYFTVYNELTKVKYVTEGMRKPAFLSGEQKKAIVDLLFKTNRKVTVKQLKEDYFKKIECFDSVEISGVEDRFNASLGTYHDLLKIIKDKDFLDNEENEDILEDIVLTLTLFEDREMIEERLKTYAHLFDDKVMKQLKRRRYTGWGRLSRKLINGIRDKQSGKTILDFLKSDGFANRNFMQLIHDDSLTFKEDIQKAQVSGQGDSLHEHIANLAGSPAIKKGILQTVKVVDELVKVMGRHKPENIVIEMARENQTTQKGQKNSRERMKRIEEGIKELGSQILKEHPVENTQLQNEKLYLYYLQNGRDMYVDQELDINRLSDYDVDHIVPQSFLKDDSIDNKVLTRSDKARGKSDNVPSEEVVKKMKNYWRQLLNAKLITQRKFDNLTKAERGGLSELDKAGFIKRQLVETRQITKHVAQILDSRMNTKYDENDKLIREVKVITLKSKLVSDFRKDFQFYKVREINNYHHAHDAYLNAVVGTALIKKYPKLESEFVYGDYKVYDVRKMIAKSEQEIGKATAKYFFYSNIMNFFKTEITLANGEIRKRPLIETNGETGEIVWDKGRDFATVRKVLSMPQVNIVKKTEVQTGGFSKESILPKRNSDKLIARKKDWDPKKYGGFDSPTVAYSVLVVAKVEKGKSKKLKSVKELLGITIMERSSFEKNPIDFLEAKGYKEVKKDLIIKLPKYSLFELENGRKRMLASAGELQKGNELALPSKYVNFLYLASHYEKLKGSPEDNEQKQLFVEQHKHYLDEIIEQISEFSKRVILADANLDKVLSAYNKHRDKPIREQAENIIHLFTLTNLGAPAAFKYFDTTIDRKRYTSTKEVLDATLIHQSITGLYETRIDLSQLGGDGGAEAAAKEAAAKEAAAKEAAAKALEAEAAAKEAAAKEAAAKEAAAKAGGVPWLTQQPLQLTILVPLQEYQEKILSKTALPEDQKQQLKTLFVKYDNLWQHWENQVGHRKIRPHNIATGDYPPRPQKQYPINPKAKPSIQIVIDDLLKQGVLTPQNSTMNTPVYPVPKPDGRWRMVLDYREVNKTIPLTAAQNQHSAGILATIVRQKYKTTLDLANGFWAHPITPESYWLTAFTWQGKQYCWTRLPQGFLNSPALFNADVVDLLKEIPNVQVYVDDIYLSHDDPKEHVQQLEKVFQILLQAGYVVSLKKSEIGQKTVEFLGFNITKEGRGLTDTFKTKLLNITPPKDLKQLQSILGKLNFARNFIPNFAELVQPLYNLIAPAKGKYIEWSEENTKQLNMVIEALNTASNLEERLPEQRLVIKVNTSPSAGYVRYYNETGKKPIMYLNYVFSKAELKFSMLEKLLTTMHKALIKAMDLAMGQEILVYSPIVSMTKIQKTPLPERKALPIRWITWMTYLEDPRIQFHYDKTLPELKHIPDVYTSSQSPVKHPSQYEGVFYTDGSAIKSPDPTKSNNAGMGIVHATYKPEYQVLNQWSIPLGNHTAQMAEIAAVEFACKKALKIPGPVLVITDSFYVAESANKELPYWKSNGFVNNKKKPLKHISKWKSIAECLSMKPDITIQHEKGISLQIPVFILKGNALADKLATQGSYVVNAGKRTADGSEFEKRTADGSEFESPKKKAKVE

SEQ ID NO: 1312 - protein, 2092 aa, synthetic construct
MPAAKRVKLDGGDKKYSIGLDIGTNSVGWAVITDEYKVPSKKFKVLGNTDRHSIKKNLIGALLFDSGETAEATRLKRTARRRYTRRKNRICYLQEIFSNEMAKVDDSFFHRLEESFLVEEDKKHERHPIFGNIVDEVAYHEKYPTIYHLRKKLVDSTDKADLRLIYLALAHMIKFRGHFLIEGDLNPDNSDVDKLFIQLVQTYNQLFEENPINASGVDAKAILSARLSKSRRLENLIAQLPGEKKNGLFGNLIALSLGLTPNFKSNFDLAEDAKLQLSKDTYDDDLDNLLAQIGDQYADLFLAAKNLSDAILLSDILRVNTEITKAPLSASMIKRYDEHHQDLTLLKALVRQQLPEKYKEIFFDQSKNGYAGYIDGGASQEEFYKFIKPILEKMDGTEELLVKLNREDLLRKQRTFDNGSIPHQIHLGELHAILRRQEDFYPFLKDNREKIEKILTFRIPYYVGPLARGNSRFAWMTRKSEETITPWNFEEVVDKGASAQSFIERMTNFDKNLPNEKVLPKHSLLYEYFTVYNELTKVKYVTEGMRKPAFLSGEQKKAIVDLLFKTNRKVTVKQLKEDYFKKIECFDSVEISGVEDRFNASLGTYHDLLKIIKDKDFLDNEENEDILEDIVLTLTLFEDREMIEERLKTYAHLFDDKVMKQLKRRRYTGWGRLSRKLINGIRDKQSGKTILDFLKSDGFANRNFMQLIHDDSLTFKEDIQKAQVSGQGDSLHEHIANLAGSPAIKKGILQTVKVVDELVKVMGRHKPENIVIEMARENQTTQKGQKNSRERMKRIEEGIKELGSQILKEHPVENTQLQNEKLYLYYLQNGRDMYVDQELDINRLSDYDVDHIVPQSFLKDDSIDNKVLTRSDKARGKSDNVPSEEVVKKMKNYWRQLLNAKLITQRKFDNLTKAERGGLSELDKAGFIKRQLVETRQITKHVAQILDSRMNTKYDENDKLIREVKVITLKSKLVSDFRKDFQFYKVREINNYHHAHDAYLNAVVGTALIKKYPKLESEFVYGDYKVYDVRKMIAKSEQEIGKATAKYFFYSNIMNFFKTEITLANGEIRKRPLIETNGETGEIVWDKGRDFATVRKVLSMPQVNIVKKTEVQTGGFSKESILPKRNSDKLIARKKDWDPKKYGGFDSPTVAYSVLVVAKVEKGKSKKLKSVKELLGITIMERSSFEKNPIDFLEAKGYKEVKKDLIIKLPKYSLFELENGRKRMLASAGELQKGNELALPSKYVNFLYLASHYEKLKGSPEDNEQKQLFVEQHKHYLDEIIEQISEFSKRVILADANLDKVLSAYNKHRDKPIREQAENIIHLFTLTNLGAPAAFKYFDTTIDRKRYTSTKEVLDATLIHQSITGLYETRIDLSQLGGDGGSGSETPGTSESATPESGGVPWLTQQPLQLTILVPLQEYQEKILSKTALPEDQKQQLKTLFVKYDNLWQHWENQVGHRKIRPHNIATGDYPPRPQKQYPINPKAKPSIQIVIDDLLKQGVLTPQNSTMNTPVYPVPKPDGRWRMVLDYREVNKTIPLTAAQNQHSAGILATIVRQKYKTTLDLANGFWAHPITPESYWLTAFTWQGKQYCWTRLPQGFLNSPALFNADVVDLLKEIPNVQVYVDDIYLSHDDPKEHVQQLEKVFQILLQAGYVVSLKKSEIGQKTVEFLGFNITKEGRGLTDTFKTKLLNITPPKDLKQLQSILGKLNFARNFIPNFAELVQPLYNLIAPAKGKYIEWSEENTKQLNMVIEALNTASNLEERLPEQRLVIKVNTSPSAGYVRYYNETGKKPIMYLNYVFSKAELKFSMLEKLLTTMHKALIKAMDLAMGQEILVYSPIVSMTKIQKTPLPERKALPIRWITWMTYLEDPRIQFHYDKTLPELKHIPDVYTSSQSPVKHPSQYEGVFYTDGSAIKSPDPTKSNNAGMGIVHATYKPEYQVLNQWSIPLGNHTAQMAEIAAVEFACKKALKIPGPVLVITDSFYVAESANKELPYWKSNGFVNNKKKPLKHISKWKSIAECLSMKPDITIQHEKGISLQIPVFILKGNALADKLATQGSYVVNAGKRTADGSEFEKRTADGSEFESPKKKAKVE

SEQ ID NO: 1313 - protein, 2096 aa, synthetic construct
MPAAKRVKLDGGDKKYSIGLDIGTNSVGWAVITDEYKVPSKKFKVLGNTDRHSIKKNLIGALLFDSGETAEATRLKRTARRRYTRRKNRICYLQEIFSNEMAKVDDSFFHRLEESFLVEEDKKHERHPIFGNIVDEVAYHEKYPTIYHLRKKLVDSTDKADLRLIYLALAHMIKFRGHFLIEGDLNPDNSDVDKLFIQLVQTYNQLFEENPINASGVDAKAILSARLSKSRRLENLIAQLPGEKKNGLFGNLIALSLGLTPNFKSNFDLAEDAKLQLSKDTYDDDLDNLLAQIGDQYADLFLAAKNLSDAILLSDILRVNTEITKAPLSASMIKRYDEHHQDLTLLKALVRQQLPEKYKEIFFDQSKNGYAGYIDGGASQEEFYKFIKPILEKMDGTEELLVKLNREDLLRKQRTFDNGSIPHQIHLGELHAILRRQEDFYPFLKDNREKIEKILTFRIPYYVGPLARGNSRFAWMTRKSEETITPWNFEEVVDKGASAQSFIERMTNFDKNLPNEKVLPKHSLLYEYFTVYNELTKVKYVTEGMRKPAFLSGEQKKAIVDLLFKTNRKVTVKQLKEDYFKKIECFDSVEISGVEDRFNASLGTYHDLLKIIKDKDFLDNEENEDILEDIVLTLTLFEDREMIEERLKTYAHLFDDKVMKQLKRRRYTGWGRLSRKLINGIRDKQSGKTILDFLKSDGFANRNFMQLIHDDSLTFKEDIQKAQVSGQGDSLHEHIANLAGSPAIKKGILQTVKVVDELVKVMGRHKPENIVIEMARENQTTQKGQKNSRERMKRIEEGIKELGSQILKEHPVENTQLQNEKLYLYYLQNGRDMYVDQELDINRLSDYDVDHIVPQSFLKDDSIDNKVLTRSDKARGKSDNVPSEEVVKKMKNYWRQLLNAKLITQRKFDNLTKAERGGLSELDKAGFIKRQLVETRQITKHVAQILDSRMNTKYDENDKLIREVKVITLKSKLVSDFRKDFQFYKVREINNYHHAHDAYLNAVVGTALIKKYPKLESEFVYGDYKVYDVRKMIAKSEQEIGKATAKYFFYSNIMNFFKTEITLANGEIRKRPLIETNGETGEIVWDKGRDFATVRKVLSMPQVNIVKKTEVQTGGFSKESILPKRNSDKLIARKKDWDPKKYGGFDSPTVAYSVLVVAKVEKGKSKKLKSVKELLGITIMERSSFEKNPIDFLEAKGYKEVKKDLIIKLPKYSLFELENGRKRMLASAGELQKGNELALPSKYVNFLYLASHYEKLKGSPEDNEQKQLFVEQHKHYLDEIIEQISEFSKRVILADANLDKVLSAYNKHRDKPIREQAENIIHLFTLTNLGAPAAFKYFDTTIDRKRYTSTKEVLDATLIHQSITGLYETRIDLSQLGGDGGEAAAKEAAAKEAAAKEAAAKGGVPWLTQQPLQLTILVPLQEYQEKILSKTALPEDQKQQLKTLFVKYDNLWQHWENQVGHRKIRPHNIATGDYPPRPQKQYPINPKAKPSIQIVIDDLLKQGVLTPQNSTMNTPVYPVPKPDGRWRMVLDYREVNKTIPLTAAQNQHSAGILATIVRQKYKTTLDLANGFWAHPITPESYWLTAFTWQGKQYCWTRLPQGFLNSPALFNADVVDLLKEIPNVQVYVDDIYLSHDDPKEHVQQLEKVFQILLQAGYVVSLKKSEIGQKTVEFLGFNITKEGRGLTDTFKTKLLNITPPKDLKQLQSILGKLNFARNFIPNFAELVQPLYNLIAPAKGKYIEWSEENTKQLNMVIEALNTASNLEERLPEQRLVIKVNTSPSAGYVRYYNETGKKPIMYLNYVFSKAELKFSMLEKLLTTMHKALIKAMDLAMGQEILVYSPIVSMTKIQKTPLPERKALPIRWITWMTYLEDPRIQFHYDKTLPELKHIPDVYTSSQSPVKHPSQYEGVFYTDGSAIKSPDPTKSNNAGMGIVHATYKPEYQVLNQWSIPLGNHTAQMAEIAAVEFACKKALKIPGPVLVITDSFYVAESANKELPYWKSNGFVNNKKKPLKHISKWKSIAECLSMKPDITIQHEKGISLQIPVFILKGNALADKLATQGSYVVNAGKRTADGSEFEKRTADGSEFESPKKKAKVE

SEQ ID NO: 1314 - protein, 2096 aa, synthetic construct
MPAAKRVKLDGGDKKYSIGLDIGTNSVGWAVITDEYKVPSKKFKVLGNTDRHSIKKNLIGALLFDSGETAEATRLKRTARRRYTRRKNRICYLQEIFSNEMAKVDDSFFHRLEESFLVEEDKKHERHPIFGNIVDEVAYHEKYPTIYHLRKKLVDSTDKADLRLIYLALAHMIKFRGHFLIEGDLNPDNSDVDKLFIQLVQTYNQLFEENPINASGVDAKAILSARLSKSRRLENLIAQLPGEKKNGLFGNLIALSLGLTPNFKSNFDLAEDAKLQLSKDTYDDDLDNLLAQIGDQYADLFLAAKNLSDAILLSDILRVNTEITKAPLSASMIKRYDEHHQDLTLLKALVRQQLPEKYKEIFFDQSKNGYAGYIDGGASQEEFYKFIKPILEKMDGTEELLVKLNREDLLRKQRTFDNGSIPHQIHLGELHAILRRQEDFYPFLKDNREKIEKILTFRIPYYVGPLARGNSRFAWMTRKSEETITPWNFEEVVDKGASAQSFIERMTNFDKNLPNEKVLPKHSLLYEYFTVYNELTKVKYVTEGMRKPAFLSGEQKKAIVDLLFKTNRKVTVKQLKEDYFKKIECFDSVEISGVEDRFNASLGTYHDLLKIIKDKDFLDNEENEDILEDIVLTLTLFEDREMIEERLKTYAHLFDDKVMKQLKRRRYTGWGRLSRKLINGIRDKQSGKTILDFLKSDGFANRNFMQLIHDDSLTFKEDIQKAQVSGQGDSLHEHIANLAGSPAIKKGILQTVKVVDELVKVMGRHKPENIVIEMARENQTTQKGQKNSRERMKRIEEGIKELGSQILKEHPVENTQLQNEKLYLYYLQNGRDMYVDQELDINRLSDYDVDHIVPQSFLKDDSIDNKVLTRSDKARGKSDNVPSEEVVKKMKNYWRQLLNAKLITQRKFDNLTKAERGGLSELDKAGFIKRQLVETRQITKHVAQILDSRMNTKYDENDKLIREVKVITLKSKLVSDFRKDFQFYKVREINNYHHAHDAYLNAVVGTALIKKYPKLESEFVYGDYKVYDVRKMIAKSEQEIGKATAKYFFYSNIMNFFKTEITLANGEIRKRPLIETNGETGEIVWDKGRDFATVRKVLSMPQVNIVKKTEVQTGGFSKESILPKRNSDKLIARKKDWDPKKYGGFDSPTVAYSVLVVAKVEKGKSKKLKSVKELLGITIMERSSFEKNPIDFLEAKGYKEVKKDLIIKLPKYSLFELENGRKRMLASAGELQKGNELALPSKYVNFLYLASHYEKLKGSPEDNEQKQLFVEQHKHYLDEIIEQISEFSKRVILADANLDKVLSAYNKHRDKPIREQAENIIHLFTLTNLGAPAAFKYFDTTIDRKRYTSTKEVLDATLIHQSITGLYETRIDLSQLGGDGGGGGGSGGGGSGGGGSGGGGSGGVPWLTQQPLQLTILVPLQEYQEKILSKTALPEDQKQQLKTLFVKYDNLWQHWENQVGHRKIRPHNIATGDYPPRPQKQYPINPKAKPSIQIVIDDLLKQGVLTPQNSTMNTPVYPVPKPDGRWRMVLDYREVNKTIPLTAAQNQHSAGILATIVRQKYKTTLDLANGFWAHPITPESYWLTAFTWQGKQYCWTRLPQGFLNSPALFNADVVDLLKEIPNVQVYVDDIYLSHDDPKEHVQQLEKVFQILLQAGYVVSLKKSEIGQKTVEFLGFNITKEGRGLTDTFKTKLLNITPPKDLKQLQSILGKLNFARNFIPNFAELVQPLYNLIAPAKGKYIEWSEENTKQLNMVIEALNTASNLEERLPEQRLVIKVNTSPSAGYVRYYNETGKKPIMYLNYVFSKAELKFSMLEKLLTTMHKALIKAMDLAMGQEILVYSPIVSMTKIQKTPLPERKALPIRWITWMTYLEDPRIQFHYDKTLPELKHIPDVYTSSQSPVKHPSQYEGVFYTDGSAIKSPDPTKSNNAGMGIVHATYKPEYQVLNQWSIPLGNHTAQMAEIAAVEFACKKALKIPGPVLVITDSFYVAESANKELPYWKSNGFVNNKKKPLKHISKWKSIAECLSMKPDITIQHEKGISLQIPVFILKGNALADKLATQGSYVVNAGKRTADGSEFEKRTADGSEFESPKKKAKVE

SEQ ID NO: 1315 - protein, 2087 aa, synthetic construct
MPAAKRVKLDGGDKKYSIGLDIGTNSVGWAVITDEYKVPSKKFKVLGNTDRHSIKKNLIGALLFDSGETAEATRLKRTARRRYTRRKNRICYLQEIFSNEMAKVDDSFFHRLEESFLVEEDKKHERHPIFGNIVDEVAYHEKYPTIYHLRKKLVDSTDKADLRLIYLALAHMIKFRGHFLIEGDLNPDNSDVDKLFIQLVQTYNQLFEENPINASGVDAKAILSARLSKSRRLENLIAQLPGEKKNGLFGNLIALSLGLTPNFKSNFDLAEDAKLQLSKDTYDDDLDNLLAQIGDQYADLFLAAKNLSDAILLSDILRVNTEITKAPLSASMIKRYDEHHQDLTLLKALVRQQLPEKYKEIFFDQSKNGYAGYIDGGASQEEFYKFIKPILEKMDGTEELLVKLNREDLLRKQRTFDNGSIPHQIHLGELHAILRRQEDFYPFLKDNREKIEKILTFRIPYYVGPLARGNSRFAWMTRKSEETITPWNFEEVVDKGASAQSFIERMTNFDKNLPNEKVLPKHSLLYEYFTVYNELTKVKYVTEGMRKPAFLSGEQKKAIVDLLFKTNRKVTVKQLKEDYFKKIECFDSVEISGVEDRFNASLGTYHDLLKIIKDKDFLDNEENEDILEDIVLTLTLFEDREMIEERLKTYAHLFDDKVMKQLKRRRYTGWGRLSRKLINGIRDKQSGKTILDFLKSDGFANRNFMQLIHDDSLTFKEDIQKAQVSGQGDSLHEHIANLAGSPAIKKGILQTVKVVDELVKVMGRHKPENIVIEMARENQTTQKGQKNSRERMKRIEEGIKELGSQILKEHPVENTQLQNEKLYLYYLQNGRDMYVDQELDINRLSDYDVDHIVPQSFLKDDSIDNKVLTRSDKARGKSDNVPSEEVVKKMKNYWRQLLNAKLITQRKFDNLTKAERGGLSELDKAGFIKRQLVETRQITKHVAQILDSRMNTKYDENDKLIREVKVITLKSKLVSDFRKDFQFYKVREINNYHHAHDAYLNAVVGTALIKKYPKLESEFVYGDYKVYDVRKMIAKSEQEIGKATAKYFFYSNIMNFFKTEITLANGEIRKRPLIETNGETGEIVWDKGRDFATVRKVLSMPQVNIVKKTEVQTGGFSKESILPKRNSDKLIARKKDWDPKKYGGFDSPTVAYSVLVVAKVEKGKSKKLKSVKELLGITIMERSSFEKNPIDFLEAKGYKEVKKDLIIKLPKYSLFELENGRKRMLASAGELQKGNELALPSKYVNFLYLASHYEKLKGSPEDNEQKQLFVEQHKHYLDEIIEQISEFSKRVILADANLDKVLSAYNKHRDKPIREQAENIIHLFTLTNLGAPAAFKYFDTTIDRKRYTSTKEVLDATLIHQSITGLYETRIDLSQLGGDGGGSSPAPEAAAKGGVPWLTQQPLQLTILVPLQEYQEKILSKTALPEDQKQQLKTLFVKYDNLWQHWENQVGHRKIRPHNIATGDYPPRPQKQYPINPKAKPSIQIVIDDLLKQGVLTPQNSTMNTPVYPVPKPDGRWRMVLDYREVNKTIPLTAAQNQHSAGILATIVRQKYKTTLDLANGFWAHPITPESYWLTAFTWQGKQYCWTRLPQGFLNSPALFNADVVDLLKEIPNVQVYVDDIYLSHDDPKEHVQQLEKVFQILLQAGYVVSLKKSEIGQKTVEFLGFNITKEGRGLTDTFKTKLLNITPPKDLKQLQSILGKLNFARNFIPNFAELVQPLYNLIAPAKGKYIEWSEENTKQLNMVIEALNTASNLEERLPEQRLVIKVNTSPSAGYVRYYNETGKKPIMYLNYVFSKAELKFSMLEKLLTTMHKALIKAMDLAMGQEILVYSPIVSMTKIQKTPLPERKALPIRWITWMTYLEDPRIQFHYDKTLPELKHIPDVYTSSQSPVKHPSQYEGVFYTDGSAIKSPDPTKSNNAGMGIVHATYKPEYQVLNQWSIPLGNHTAQMAEIAAVEFACKKALKIPGPVLVITDSFYVAESANKELPYWKSNGFVNNKKKPLKHISKWKSIAECLSMKPDITIQHEKGISLQIPVFILKGNALADKLATQGSYVVNAGKRTADGSEFEKRTADGSEFESPKKKAKVE
